United States Patent Application Publication US 2011/0183924 A1 - sequence listing, part 90

SEQ ID NO: 297918 - DNA, 9806 bp, Homo sapiens
  misc_feature (21)..(21): n is a, c, g, or t
  misc_feature (1961)..(1961): n is a, c, g, or t
  misc_feature (2596)..(2596): n is a, c, g, or t
ctcggtacccgactgcatccnacgtcccaaccagcacggtccccgcagaatgccagcgcacctcctcccgccacttcaaagagccggctcggcggggcaggaagcggcggctgcggctgcgggtcctgcgagaagagcgcgatttcctccggggctgcccagttatctctggagtcgcagaactgctctcgggagaacgcgttctctaccccaaccccgtgctcctcaacccacccacctacttcctctagctccacacactcacaagcaccgagctgccaaaaatttccacccaccgcccccctccctagctaacttccttccagcatttcctgagctggatgatcctaggatttgtaagacaggaaaaaaaggaaggcgtgagggcgggcagcagcgacaggatgcttgtttttcgctctaccaaagtcgtctgaaggcgagacagcgggcccagggcgcaggacccaccgcagccccctgggcagtctcctcgccccgcgtccgcgtcgtctccggggcacttagtaaggggtggggagagcttgccctccctcttaagctgaggagaaacacccgaagacaccgcaggagcctgtgaaagtccctaggactccaagtgaggaagtgacactcccaggcgagccggcccgcggctgccagtctgcacggcctcggcacggcggccccggagcggcgcggggtggatctcaggctctgccggcccgcggcccgcggggtccatgcgcagggcccccagcccaagttcttccatcttccgatgcggccccccagagccgcggggcagccggtgatctagcccgggagcccatcttacagcggtgccaagcagaggggcggcagagacggaggggcagcctctttgggactaactcatgaagaacaagggtgctaagcagaagctgaaacgaaagggagccgccagcgcgtttggctgtgacctgacggagtatctggaaagctcgggacaggatgttccatacgttttgaagagctgtgcagaatttatagagactcacggcatcgtggatggaatctatcggctttcaggagtcacctcaaacatacaacggctaaggcaagagtttggctcagatcaatgtccagatctgacaagggaagtgtacctccaggacatccactgtgtgggctcgctttgcaagctctactttagggagctgcccaaccccctcctgacttatgagctctatgagaaattcacggaggcagtgtcgcattgccctgaagaaggccaactggcccgaatccaaaatgttatccaggagcttcctccatcccactataggaccttggaatacctgattcgacacctggcccatatcgcctccttcagcagcaagaccaacatgcacgcccggaacctggccctggtgtgggcgccaaacctcctcaggtctaaagaaattgaagccactggttgcaatggagatgcagccttccttgcagtccgggtccagcaggtggtgattgagttcatattgaatcatgtagatcaaatctttaacaacggtgcacctgggtctctggagaatgatgaaaaccggcccatcatgaagagcctgaccttgccagccctctccctgcccatgaagctggtgagccttgaggaagctcaagcccgcagcctggccactaaccatcctgctcgcaaggaaaggagggagaacagcctgcctgagattgtccctcccatgggcaccctcttccacactgtccttgagttaccagacaacaagcgaaagctctccagtaaatcaaagaagtggaaatcaatatttaacctgggacgttctggatcagactccaaatcaaaactgagtagaaatgggagtgtatttgtgagaggacagaggctctcggtggaaaaggctactatccgaccagctaaaagcatggactcactatgttcagtgcctgtngaaggaaaagaaaccaagggaaatttcaatcgaacagttaccaccggtggatttttcattccagcaacaaagatgcactccaccggcaccggcagctcatgtgacctcaccaagcaggagggcgaatggggccaggaggggatgcctcccggggctgagggtggctttgatgtgagcagtgatcgcagccatctccagggcgctcaggcccggcccccaccggaacagctgaaggttttccggcctgttgaggatccggagagcgagcaaacagccccaaagatgttgggtatgttctacacttcgaacgacagccctagcaaatccgtcttcaccagcagcctcttccagatggagccctcgccgcgtaaccagcgcaaggcgctgaacatctccgagccctttgcggtatctgtgccgctccgcgtgtccgcagtcatcagcaccaacagcacgccgtgcagaacacccccgaaggagctgcagtctctttccagcctggaagagttttcttttcatggatcagagagcggaggctggccagaagaagagaaaccgctgggagctgagacttctgcagcttctgtacctaagaaggcaggtcttgaggatccaaggcagtacctgaagcaccngggacagtggaatgcagcaaaggcctgtcccaggagccaggcgcccacctggaggagaagaaaaccccagaaagctccttgagctctcaacatttaaatgaattagagaagaggccaaatccggagaaggtggtggaggagggacgagaggctggtgagatggagtccagcaccctgcaggagagccccagggccagagccgaagctgtgcttctccatgagatggatgaagatgatctggccaatgccctgatctggcctgagattcaacaggagctgaaaatcattgaatctgaggaggagctctcatcgttgccacctcctgctctgaagaccagcccaattcagcctattctcgagtcgagtctggggccctttattccctcagagcctcctgggagcttgccttgtggctccttccctgctccagtctccacccctctggaggtgtggactagggatccagccaatcagagcacacagggggcttccacagcagccagcagagagaagccggaacctgagcagggcctgcacccagacctcgccagcctggctcctctggaaatagttccttttgagaaggcatctccacaagcaacagtggaagtaggaggcccaggcaatctgtctcctccactcccacctgctcctccccctccaactcctctggaggagtcaactccagtcctgctttcaaagggcagcccggaaagagaagactcatccaggaaattgaggacagatctctacatagaccagctgaagtcccaagacagccctgagatctctagcctctgtcagggagaggaggcaaccccaagacacagtgacaagcaaaattcaaagaatgctgcttctgaggggaaaggctgtggttttccaagcccaaccagggaggttgagatcgtctcacaagaagaggaggatgtaacccattcagtacaggagccttcagactgtgacgaagatgacactgtgacagacattgcccagcatggcctggagatggtggagccctgggaggaaccccagtgggtgacgagtccccttcactctcccaccctgaaagacgcgcacaaggcccaggtacagggccttcagggtcaccagttggagaagaggctttcccacaggcccagccttcgccagagccattctctagatagcaaacccacggttaaaagccagtggactctcgaggttccctcctccagcagctgtgctaatcttgaaacagagaggaattctgaccctcttcagccccaggcacccaggagagagattactggatgggatgagaaagccctgaggtccttcagagagttctctggcctgaaaggggcagaggctcctcccaaccagaagggaccaagtggtgtgcaacccaacccagcagaaaccagccccatcagcctagcagagggaaaggagctagggacacacctggggcacagcagtccacagattaggcaaggtggtgttcctgggccagagagcagcaaggagagttcacccagcgtgcaggacagcacttcgcctggagagcaccccgcaaagttacagctaaagagcacagagtgtgggcccccaaaagggaaaaacaggccttcttccctcaacttggaccctgccattcccattgctgacctcttctggtttgagaatgtggcctcatttagttcacctggaatgcaggtctctgagccaggagacccaaaggtcacatggatgacctcatcttactgtaaagcagacccctggagggtttactcccaggacccccaggacctggacattgttgctcatgcactgacaggccgccgtaactcagctcctgtgagtgtgtcagctgtgagaacctccttcatggtcaaaatgtgccaggccagggcggtcccagtcatccctcccaagattcagtacacccagatcccacagcccctgccctctcagagctcaggggagaatggggttcagcctctggagaggagccaggagggacccagctcaaccagtgggaccactcagaaacctgccaaagatgattctccctcctccctggaaagctcaaaggaagaaaaaccaaagcaagatcccggagccattaagtcctcaccagtggatgccactgcaccctgcatgtgcgagggacctaccctttctccagaaccaggctcgtctaacctgctctccacccaggatgcagtagtgcaatgcagaaagcgcatgtcagagacagagccatctggggacaaccttctttcttcaaaactagagcgaccatctgggggttctaagcctttccacaggtcaaggccaggaagacctcagagcctaatcttattcagtcctcctttccccattatggaccacctgcccccttcatccacagtgacagattccaaggtcctgctgtcccctatcagaagtcccacccagacagtttcccctggccttctttgtggagagttggcagaaaacacatgggtcacaccagaaggggttacacttaggaataaaatgaccatccctaagaatggccagagactagagacctcaaccagctgtttttaccagcctcagcggagatcagtaattctggatggaagaagtgggaggcaaatagaatgatttcggttcacctgctggtgtctgaaaaaaaccgtgattcatctggaagttattacagggccagcttgccatattccaggcacacgttatcaagtttgggcctattgtggcctctgacttctctttcttcagccttttgaccacttattaattagtccatttgctagaagagtggtcaagggaaaaacgagagatgaaatttagttaagtctatgtgagcaagtgagagaaggttaggtaaggggagaggatggaatgcttgcctccaatgaactttggagcttgtatgtgagtcagattgctcccctattgctattatctattactcttgagagctggctgtcctttgaaagaaagaagtaatgttctttgaaagaaagaaaaatctcttgctgtgtcaaacctcaaaatgttgctattggggttagaaggcctcctctttatgctttttaatgctctttcaaacgtgttcttttagaccagttttctaataagctttgtaaaatgtactatccaaattagaagcggatttggaaatgcaaactaacgtgcacttagatatccaagtgggtgagcttagccactcttacccatgctctttccctggaatccctggagacctgtccaagatgatttccatataccagcatagaaaatcagaatcaagagcaaactctgagactggcacaatccaagaagatttcctggctctggcttttagtaatttgggactccaactgccactgtactggactgtaatttataaatccagtagctacgcagggtggaggctgggctgaggattaccataatgaaatgtactaaatcttcatttaggtatgcaattgtgaagtgaaggcatctgctttctttacagtatcagagtccaagaacaggatgtcaccatagataaaagcctcatacaaaggcagaactacactccaaatttaatgtgtttaaattggtggggcaccagcagaaaatacttctagctcagctttactcttcttccacactaggctgggcccagcaatacaggagaggatgaagggaggagctccaggaggcgagggaagagccctagcagggcggccatcacaaccactcactgagagttgcccttctactgctcaagaacagatttgaggccaggtgcggtgcctcacatctgtaatcccaacactttgggaggctgagatgggtggattgcttgagcccaggagttcaagaccagcctgggcaacacagcgagaccccatctcttaaaaaataacagacttgaggaacccctctcccttccataattcccctcatccaccgcccactccaggcactcactcaaacttgctcttcaactctgtatacaagcagaagcaataaaccaatctgattttcttttcaattatttataactttcaatggttctttcctttccagctggcgagagaaaggagaactaatatacctgctggcagatttttggtgctgcccaaaaaaggacttcacagggcatctcttctcaggttcaagcctggctgaattctgcccagaagctcagtcattgcagaaatttctctaagggctgatagtacctctgggtaggcgtcacaaccaaggctggttctgggcttagtgggggctgagatgaagttacctcctccaatgagaaattgggagctgatgccctgcaacagatatatattcctctctctctctgtctctctatctctctcctccctctccctccctccctccccgccaataagccttacaaacagttttgaaatcttgttctgtaccttttaagccagtgtctgtggcgagggtgactggcaagtcagctgatgagttctgccttctgagagcactgagtgagcaaggcctttcatcagtgttttggccttctcattgggtgaggaagacattgaaccaacagccaacgagatatgaacctgtaagaaaaaagtcctagaatatagtatttttccccaggccagcaaagtgaagaaatacagtggtgacagatgagaaaggccatgttcaagagatctgaaaagtacattcctgccttatcagaaaatgtgtcagacaggttttatgtcagcctcagtgctcctgcggtgtcgacgctctgataaggaccatgttccagttagaatgcgagggagggaaagagctgcactttgcttcaccatcagaactctgagccaaataatgaatatgtaaactattttatgattattttaaatgtttgtttggtaacatttataagatctatttttatttggggatagactgagaagccaccatttacatattaacaagtgacttcagttctaagggttgagatgcctgtgtggatttataaaatggttgcaagatcttttagactctgacatttatagcatcaccttcaggaacacagttctggggatgtcatcatgagacacactgacagctgtggagatagtccctactctcagctttccttgctagtcaagtccaaaaggccttagaagctgactcaccttctcagccagagtcctgctgctcaagtgtggacctccactttgactctcacccagcctgccagccatcacaaaggctttcataaacttcctgtggtctgggctagcctggcactgatgaaattccattctaaagaaagaaaactcatattcctcccccccgcaaattgttcccccaaatgctctgggattacctatttcaccactcatttgagtctccgaaaaatgaactccctgagaatggctggatgggaatcagatagtctgcttccattcaggagagggacagaacaggagctgctgtgtttaggaggatttacctggtgccctagaaagggctatgcaatcaaattctcaagggctccttcaaatcagctatcagtcctcaaaatgggggttgctgatgttaaatgatggatttgcagtgaaacgcatgcatgtactgacgttttctttcagcattagtggttgcttaagaaaatagtaacctatattttctgctacacttggaatatgaagaaatctgaacaagaaccccattaagacacctaacctaatctaaaccctaaaattcaaaatattgtccaagtcaaaagtctagactctgaggacattaaaaatgtaaatatcatcatccttagcaaatatttattgggagcttagtaatagtgcactgggtaccttagcactcccaaatcattcaagagtctagtgaaaaagggggagggatggcagcaaataaaacacccccataaacaaccaggagcaaggttgagaaccattaagttgccaaacaaaagcagaaggggaaaaagtgtggcaacaagcatcttttaataggatagttgacggtattcaagtgacctactgactccaaataatcaaattgaacacaattgcaaatccaatagaacatcccagtgagacactcgggtatttgagaactttgcttgatttagaaaactggaaagtggcaactaggctagaatagtggcaactaggttcggaggtttcgtgtggtcataattggtttggtgaagtgtgagatctctgcaaatgagccaggtaagatcagtattccatagtgcttgaaaaggggattttagagacttctgtcatcacaaagcagattaactcctagttaatgatgaagcagtaggcccaagataaactgttcaattcaagataaattgttcttgtccagtgtttggcatatgataatcacatttggctaaaattggatgggacagtcatttgtctacacaggccttccattcctgcatgaagagatactggggagcatacaattattttggtccagtattagagtgggagaagttctcagtaagtccagtcccaccaggatttatttgggccacattctaccatggccagtccaatctgatgaccacatgaattggggttaagtgttgctaagactatgattttagacatgtctggcaggaaggtcagctcaaaatgtggcatgacaaagaatatgtgctctactaccaaaacctttcctagcaaaacaaggccagaagagggagcaagcatctttccaagcatggagaggagggggcaatggtggaagggtgattgcctgaaatcagtgccagtacagatagcataaaattgggggccaccacagattggctggctactgtgtagatcatttagtaatcttgaggtacattaataatgcagagattacttttctgtgagggtaagggggacgtagctaaatataagaagcttacaaggtccatagccatgtattttactggataaatcacaatgctttgcaataacttaatgtcatagtactttctggcttataattctgcaaagtaaagcactttttcaaaggagtctattggaaagccacatgatttcagctgtgttttaagctctacaaatacgtttccaaagacataatcaagatgtaattctattcattacaaatataaatattaaaactatccatagagacatttaagtaattaaaacagatttttatgctttaaaaataaatactctaataaatg

SEQ ID NO: 297919 - DNA, 7061 bp, Homo sapiens
  misc_feature (21)..(21): n is a, c, g, or t
  misc_feature (1961)..(1961): n is a, c, g, or t
  misc_feature (2596)..(2596): n is a, c, g, or t
ctcggtacccgactgcatccnacgtcccaaccagcacggtccccgcagaatgccagcgcacctcctcccgccacttcaaagagccggctcggcggggcaggaagcggcggctgcggctgcgggtcctgcgagaagagcgcgatttcctccggggctgcccagttatctctggagtcgcagaactgctctcgggagaacgcgttctctaccccaaccccgtgctcctcaacccacccacctacttcctctagctccacacactcacaagcaccgagctgccaaaaatttccacccaccgcccccctccctagctaacttccttccagcatttcctgagctggatgatcctaggatttgtaagacaggaaaaaaaggaaggcgtgagggcgggcagcagcgacaggatgcttgtttttcgctctaccaaagtcgtctgaaggcgagacagcgggcccagggcgcaggacccaccgcagccccctgggcagtctcctcgccccgcgtccgcgtcgtctccggggcacttagtaaggggtggggagagcttgccctccctcttaagctgaggagaaacacccgaagacaccgcaggagcctgtgaaagtccctaggactccaagtgaggaagtgacactcccaggcgagccggcccgcggctgccagtctgcacggcctcggcacggcggccccggagcggcgcggggtggatctcaggctctgccggcccgcggcccgcggggtccatgcgcagggcccccagcccaagttcttccatcttccgatgcggccccccagagccgcggggcagccggtgatctagcccgggagcccatcttacagcggtgccaagcagaggggcggcagagacggaggggcagcctctttgggactaactcatgaagaacaagggtgctaagcagaagctgaaacgaaagggagccgccagcgcgtttggctgtgacctgacggagtatctggaaagctcgggacaggatgttccatacgttttgaagagctgtgcagaatttatagagactcacggcatcgtggatggaatctatcggctttcaggagtcacctcaaacatacaacggctaaggcaagagtttggctcagatcaatgtccagatctgacaagggaagtgtacctccaggacatccactgtgtgggctcgctttgcaagctctactttagggagctgcccaaccccctcctgacttatgagctctatgagaaattcacggaggcagtgtcgcattgccctgaagaaggccaactggcccgaatccaaaatgttatccaggagcttcctccatcccactataggaccttggaatacctgattcgacacctggcccatatcgcctccttcagcagcaagaccaacatgcacgcccggaacctggccctggtgtgggcgccaaacctcctcaggtctaaagaaattgaagccactggttgcaatggagatgcagccttccttgcagtccgggtccagcaggtggtgattgagttcatattgaatcatgtagatcaaatctttaacaacggtgcacctgggtctctggagaatgatgaaaaccggcccatcatgaagagcctgaccttgccagccctctccctgcccatgaagctggtgagccttgaggaagctcaagcccgcagcctggccactaaccatcctgctcgcaaggaaaggagggagaacagcctgcctgagattgtccctcccatgggcaccctcttccacactgtccttgagttaccagacaacaagcgaaagctctccagtaaatcaaagaagtggaaatcaatatttaacctgggacgttctggatcagactccaaatcaaaactgagtagaaatgggagtgtatttgtgagaggacagaggctctcggtggaaaaggctactatccgaccagctaaaagcatggactcactatgttcagtgcctgtngaaggaaaagaaaccaagggaaatttcaatcgaacagttaccaccggtggatttttcattccagcaacaaagatgcactccaccggcaccggcagctcatgtgacctcaccaagcaggagggcgaatggggccaggaggggatgcctcccggggctgagggtggctttgatgtgagcagtgatcgcagccatctccagggcgctcaggcccggcccccaccggaacagctgaaggttttccggcctgttgaggatccggagagcgagcaaacagccccaaagatgttgggtatgttctacacttcgaacgacagccctagcaaatccgtcttcaccagcagcctcttccagatggagccctcgccgcgtaaccagcgcaaggcgctgaacatctccgagccctttgcggtatctgtgccgctccgcgtgtccgcagtcatcagcaccaacagcacgccgtgcagaacacccccgaaggagctgcagtctctttccagcctggaagagttttcttttcatggatcagagagcggaggctggccagaagaagagaaaccgctgggagctgagacttctgcagcttctgtacctaagaaggcaggtcttgaggatccaaggcagtacctgaagcaccngggacagtggaatgcagcaaaggcctgtcccaggagccaggcgcccacctggaggagaagaaaaccccagaaagctccttgagctctcaacatttaaatgaattagagaagaggccaaatccggagaaggtggtggaggagggacgagaggctggtgagatggagtccagcaccctgcaggagagccccagggccagagccgaagctgtgcttctccatgagatggatgaagatgatctggccaatgccctgatctggcctgagattcaacaggagctgaaaatcattgaatctgaggaggagctctcatcgttgccacctcctgctctgaagaccagcccaattcagcctattctcgagtcgagtctggggccctttattccctcagagcctcctgggagcttgccttgtggctccttccctgctccagtctccacccctctggaggtgtggactagggatccagccaatcagagcacacagggggcttccacagcagccagcagagagaagccggaacctgagcagggcctgcacccagacctcgccagcctggctcctctggaaatagttccttttgagaaggcatctccacaagcaacagtggaagtaggaggcccaggcaatctgtctcctccactcccacctgctcctccccctccaactcctctggaggagtcaactccagtcctgctttcaaagggcagcccggaaagagaagactcatccaggaaattgaggacagatctctacatagaccagctgaagtcccaagacagccctgagatctctagcctctgtcagggagaggaggcaaccccaagacacagtgacaagcaaaattcaaagaatgctgcttctgaggggaaaggctgtggttttccaagcccaaccagggaggttgagatcgtctcacaagaagaggaggatgtaacccattcagtacaggagccttcagactgtgacgaagatgacactgtgacagacattgcccagcatggcctggagatggtggagccctgggaggaaccccagtgggtgacgagtccccttcactctcccaccctgaaagacgcgcacaaggcccaggtacagggccttcagggtcaccagttggagaagaggctttcccacaggcccagccttcgccagagccattctctagatagcaaacccacggttaaaagccagtggactctcgaggttccctcctccagcagctgtgctaatcttgaaacagagaggaattctgaccctcttcagccccaggcacccaggagagagattactggatgggatgagaaagccctgaggtccttcagagagttctctggcctgaaaggggcagaggctcctcccaaccagaagggaccaagtggtgtgcaacccaacccagcagaaaccagccccatcagcctagcagagggaaaggagctagggacacacctggggcacagcagtccacagattaggcaaggtggtgttcctgggccagagagcagcaaggagagttcacccagcgtgcaggacagcacttcgcctggagagcaccccgcaaagttacagctaaagagcacagagtgtgggcccccaaaagggaaaaacaggccttcttccctcaacttggaccctgccattcccattgctgacctcttctggtttgagaatgtggcctcatttagttcacctggaatgcaggtctctgagccaggagacccaaaggtcacatggatgacctcatcttactgtaaagcagacccctggagggtttactcccaggacccccaggacctggacattgttgctcatgcactgacaggccgccgtaactcagctcctgtgagtgtgtcagctgtgagaacctccttcatggtcaaaatgtgccaggccagggcggtcccagtcatccctcccaagattcagtacacccagatcccacagcccctgccctctcagagctcaggggagaatggggttcagcctctggagaggagccaggagggacccagctcaaccagtgggaccactcagaaacctgccaaagatgattctccctcctccctggaaagctcaaaggaagaaaaaccaaagcaagatcccggagccattaagtcctcaccagtggatgccactgcaccctgcatgtgcgagggacctaccctttctccagaaccaggctcgtctaacctgctctccacccaggatgcagtagtgcaatgcagaaagcgcatgtcagagacagagccatctggggacaaccttctttcttcaaaactagagcgaccatctgggggttctaagcctttccacaggtcaaggccaggaagacctcagagcctaatcttattcagtcctcctttccccattatggaccacctgcccccttcatccacagtgacagattccaaggtcctgctgtcccctatcagaagtcccacccagacagtttcccctggccttctttgtggagagttggcagaaaacacatgggtcacaccagaaggggttacacttaggaataaaatgaccatccctaagaatggccagagactagagacctcaaccagctgtttttaccagcctcagcggagatcagtaattctggatggaagaagtgggaggcaaatagaatgatttcggttcacctgctggtgtctgaaaaaaaccgtgattcatctggaagttattacagggccagcttgccatattccaggcacacgttatcaagtttgggcctattgtggcctctgacttctctttcttcagccttttgaccacttattaattagtccatttgctagaagagtggtcaagggaaaaacgagagatgaaatttagttaagtctatgtgagcaagtgagagaaggttaggtaaggggagaggatggaatgcttgcctccaatgaactttggagcttgtatgtgagtcagattgctcccctattgctattatctattactcttgagagctggctgtcctttgaaagaaagaagtaatgttctttgaaagaaagaaaaatctcttgctgtgtcaaacctcaaaatgttgctattggggttagaaggcctcctctttatgctttttaatgctctttcaaacgtgttcttttagaccagttttctaataagctttgtaaaatgtactatccaaattagaagcggatttggaaatgcaaactaacgtgcacttagatatccaagtgggtgagcttagccactcttacccatgctctttccctggaatccctggagacctgtccaagatgatttccatataccagcatagaaaatcagaatcaagagcaaactctgagactggcacaatccaagaagatttcctggctctggcttttagtaatttgggactccaactgccactgtactggactgtaatttataaatccagtagctacgcagggtggaggctgggctgaggattaccataatgaaatgtactaaatcttcatttaggtatgcaattgtgaagtgaaggcatctgctttctttacagtatcagagtccaagaacaggatgtcaccatagataaaagcctcatacaaaggcagaactacactccaaatttaatgtgtttaaattggtggggcaccagcagaaaatacttctagctcagctttactcttcttccacactaggctgggcccagcaatacaggagaggatgaagggaggagctccaggaggcgagggaagagccctagcagggcggccatcacaaccactcactgagagttgcccttcttaaaaatgtattttattttagccagtgggtcccttcctttctcctttcctctctactgctcaagaacagatttgaggccaggtgcggtgcctcacatctgtaatcccaacactttgggaggctgagatgggtggattgcttgagcccaggagttcaagaccagcctgggcaacacagcgagaccccatctcttaaaaaataacagacttgaggaacccctctcccttccataattcccctcatccaccgcccactccaggcactcactcaaacttgctcttcaactctgtatacaagcagaagcaataaaccaatctgattttcttttcaattaaaaaaaaaaaacaaaaaaaacaagaaaaaaaaaaaccaaaaagaaaaacaaaaaaacaacagaagtcaaacaacacgaaaaaacaaagaaagcaggagagggaggagcgcgaccgacccacagaagcacacaccacgagggagcaaaaaaaaaaaaaaaaaacaaaaactacacaaacaacagtcacacaaacgcggcgcggcgtcagaagctgatcaccggcgcacgggacgcaacaccgatccatccgccacacactgaaagcgggcgccctggaaggcaacacactatccggcggccccgcgccaaacacaccccggaggagaaccctccgcgcgacagcacaccccccctgtcggcgccagccggcgc

SEQ ID NO: 297920 - DNA, 5212 bp, Homo sapiens
  misc_feature (21)..(21): n is a, c, g, or t
  misc_feature (1961)..(1961): n is a, c, g, or t
  misc_feature (2596)..(2596): n is a, c, g, or t
ctcggtacccgactgcatccnacgtcccaaccagcacggtccccgcagaatgccagcgcacctcctcccgccacttcaaagagccggctcggcggggcaggaagcggcggctgcggctgcgggtcctgcgagaagagcgcgatttcctccggggctgcccagttatctctggagtcgcagaactgctctcgggagaacgcgttctctaccccaaccccgtgctcctcaacccacccacctacttcctctagctccacacactcacaagcaccgagctgccaaaaatttccacccaccgcccccctccctagctaacttccttccagcatttcctgagctggatgatcctaggatttgtaagacaggaaaaaaaggaaggcgtgagggcgggcagcagcgacaggatgcttgtttttcgctctaccaaagtcgtctgaaggcgagacagcgggcccagggcgcaggacccaccgcagccccctgggcagtctcctcgccccgcgtccgcgtcgtctccggggcacttagtaaggggtggggagagcttgccctccctcttaagctgaggagaaacacccgaagacaccgcaggagcctgtgaaagtccctaggactccaagtgaggaagtgacactcccaggcgagccggcccgcggctgccagtctgcacggcctcggcacggcggccccggagcggcgcggggtggatctcaggctctgccggcccgcggcccgcggggtccatgcgcagggcccccagcccaagttcttccatcttccgatgcggccccccagagccgcggggcagccggtgatctagcccgggagcccatcttacagcggtgccaagcagaggggcggcagagacggaggggcagcctctttgggactaactcatgaagaacaagggtgctaagcagaagctgaaacgaaagggagccgccagcgcgtttggctgtgacctgacggagtatctggaaagctcgggacaggatgttccatacgttttgaagagctgtgcagaatttatagagactcacggcatcgtggatggaatctatcggctttcaggagtcacctcaaacatacaacggctaaggcaagagtttggctcagatcaatgtccagatctgacaagggaagtgtacctccaggacatccactgtgtgggctcgctttgcaagctctactttagggagctgcccaaccccctcctgacttatgagctctatgagaaattcacggaggcagtgtcgcattgccctgaagaaggccaactggcccgaatccaaaatgttatccaggagcttcctccatcccactataggaccttggaatacctgattcgacacctggcccatatcgcctccttcagcagcaagaccaacatgcacgcccggaacctggccctggtgtgggcgccaaacctcctcaggtctaaagaaattgaagccactggttgcaatggagatgcagccttccttgcagtccgggtccagcaggtggtgattgagttcatattgaatcatgtagatcaaatctttaacaacggtgcacctgggtctctggagaatgatgaaaaccggcccatcatgaagagcctgaccttgccagccctctccctgcccatgaagctggtgagccttgaggaagctcaagcccgcagcctggccactaaccatcctgctcgcaaggaaaggagggagaacagcctgcctgagattgtccctcccatgggcaccctcttccacactgtccttgagttaccagacaacaagcgaaagctctccagtaaatcaaagaagtggaaatcaatatttaacctgggacgttctggatcagactccaaatcaaaactgagtagaaatgggagtgtatttgtgagaggacagaggctctcggtggaaaaggctactatccgaccagctaaaagcatggactcactatgttcagtgcctgtngaaggaaaagaaaccaagggaaatttcaatcgaacagttaccaccggtggatttttcattccagcaacaaagatgcactccaccggcaccggcagctcatgtgacctcaccaagcaggagggcgaatggggccaggaggggatgcctcccggggctgagggtggctttgatgtgagcagtgatcgcagccatctccagggcgctcaggcccggcccccaccggaacagctgaaggttttccggcctgttgaggatccggagagcgagcaaacagccccaaagatgttgggtatgttctacacttcgaacgacagccctagcaaatccgtcttcaccagcagcctcttccagatggagccctcgccgcgtaaccagcgcaaggcgctgaacatctccgagccctttgcggtatctgtgccgctccgcgtgtccgcagtcatcagcaccaacagcacgccgtgcagaacacccccgaaggagctgcagtctctttccagcctggaagagttttcttttcatggatcagagagcggaggctggccagaagaagagaaaccgctgggagctgagacttctgcagcttctgtacctaagaaggcaggtcttgaggatccaaggcagtacctgaagcaccngggacagtggaatgcagcaaaggcctgtcccaggagccaggcgcccacctggaggagaagaaaaccccagaaagctccttgagctctcaacatttaaatgaattagagaagaggccaaatccggagaaggtggtggaggagggacgagaggctggtgagatggagtccagcaccctgcaggagagccccagggccagagccgaagctgtgcttctccatgagatggatgaagatgatctggccaatgccctgatctggcctgagattcaacaggagctgaaaatcattgaatctgaggaggagctctcatcgttgccacctcctgctctgaagaccagcccaattcagcctattctcgagtcgagtctggggccctttattccctcagagcctcctgggagcttgccttgtggctccttccctgctccagtctccacccctctggaggtgtggactagggatccagccaatcagagcacacagggggcttccacagcagccagcagagagaagccggaacctgagcagggcctgcacccagacctcgccagcctggctcctctggaaatagttccttttgagaaggcatctccacaagcaacagtggaagtaggaggcccaggcaatctgtctcctccactcccacctgctcctccccctccaactcctctggaggagtcaactccagtcctgctttcaaagggcagcccggaaagagaagactcatccaggaaattgaggacagatctctacatagaccagctgaagtcccaagacagccctgagatctctagcctctgtcagggagaggaggcaaccccaagacacagtgacaagcaaaattcaaagaatgctgcttctgaggggaaaggctgtggttttccaagcccaaccagggaggttgagatcgtctcacaagaagaggaggatgtaacccattcagtacaggagccttcagactgtgacgaagatgacactgtgacagacattgcccagcatggcctggagatggtggagccctgggaggaaccccagtgggtgacgagtccccttcactctcccaccctgaaagacgcgcacaaggcccaggtacagggccttcagggtcaccagttggagaagaggctttcccacaggcccagccttcgccagagccattctctagatagcaaacccacggttaaaagccagtggactctcgaggttccctcctccagcagctgtgctaatcttgaaacagagaggaattctgaccctcttcagccccaggcacccaggagagagattactggatgggatgagaaagccctgaggtccttcagagagttctctggcctgaaaggggcagaggctcctcccaaccagaagggaccaagtggtgtgcaacccaacccagcagaaaccagccccatcagcctagcagagggaaaggagctagggacacacctggggcacagcagtccacagattaggcaaggtggtgttcctgggccagagagcagcaaggagagttcacccagcgtgcaggacagcacttcgcctggagagcaccccgcaaagttacagctaaagagcacagagtgtgggcccccaaaagggaaaaacaggccttcttccctcaacttggaccctgccattcccattgctgacctcttctggtttgagaatgtggcctcatttagttcacctggaatgcaggtctctgagccaggagacccaaaggtcacatggatgacctcatcttactgtaaagcagacccctggagggtttactcccaggacccccaggacctggacattgttgctcatgcactgacaggccgccgtaactcagctcctgtgagtgtgtcagctgtgagaacctccttcatggtcaaaatgtgccaggccagggcggtcccagtcatccctcccaagattcagtacacccagatcccacagcccctgccctctcagagctcaggggagaatggggttcagcctctggagaggagccaggagggacccagctcaaccagtgggaccactcagaaacctgccaaagatgattctccctcctccctggaaagctcaaaggaagaaaaaccaaagcaagatcccggagccattaagtcctcaccagtggatgccactgcaccctgcatgtgcgagggacctaccctttctccagaaccaggctcgtctaacctgctctccacccaggatgcagtagtgcaatgcagaaagcgcatgtcagagacagagccatctggggacaaccttctttcttcaaaactagagcgaccatctgggggttctaagcctttccacaggtcaaggccaggaagacctcagagcctaatcttattcagtcctcctttccccattatggaccacctgcccccttcatccacagtgacagattccaaggtcctgctgtcccctatcagaagtcccacccagacagtttcccctggccttctttgtggagagttggcagaaaacacatgggtcacaccagaaggggttacacttaggaataaaatgaccatccctaagaatggccagtgtggagagagagtgtgtggagagagccagtgtggagagagagtgtggagagagccagtgtgaagagag

SEQ ID NO: 297921 - DNA, 520 bp, Homo sapiens
aataaaaaaggaattatgccttttataaaagaaaaacttttataaaaggcataattttataaagagccacaattctgttacttcccactcttccattaatttattaaatttttggtcactcttgctattaaatttcctgatgtaaaccttgatatggaggagactattcttgcagtaaatctgctaacatatttggaaataagtacatttgaaaaaagaaactttacatttgctttaatcagagctttttctacaacaaaacaagataaaattatttccttcatctttgcacttacgatcccaaagatgatgtttcttccaaatgaatgtttgcattttattttccagacttgttctctaaaaccaattattgctccattaagaaacatttttacatcttcttcaggaatgtcgttgtctgctgggtcttcccctcttcattcccccaagattactccacatacttctcctgctcccagaagaagaagtcacactccaaatccagcaagttacatggtgc

SEQ ID NO: 297922 - DNA, 371 bp, Homo sapiens
acagggtcttgctctgtcatccaggctggagggtactggtgtagagatggctcactgcagccttcacctcctgggctcaagcagttctcctgaatagctgggaccacagacaccaaatcctactgcaagcgagtttattcctaaaggaggatcaacctccaggctgagtaacgtgtcccagtcaaatatgtctgccttctctcaagttttctctcacccatccatgggaagccctgctactgctggattagcgccaggaatgtcgttgtctgctgggtcttcccctcttcattcccccaagattactccacatacttctcctgctcccagaagaagaagtcacactccaaatccagcaagttacatggtgc

SEQ ID NO: 297923 - DNA, 382 bp, Homo sapiens
tactactactaaattcgcggccgcgtcgactagaattgtgcaggctggatgagataatgacatactcttttacactgtaacagcagcattattgcctagaactttaaccattttagagttagatactaaggaaacaaactaattggtcatcatcattttctttttttctttttcttttttttttttttgcccttatgtgtcactaaacaactagtttctctcccttttgtcagttcccattgtgtattttttcaaaagaagtactgtattcggatgccagctaataaattgtcacacaatggaaaatcatatgccacaacattcattgtaaggtttaataaaattaaatttgcaccaaaaaaaagtcgacgcggccgcgaat

SEQ ID NO: 297924 - DNA, 5903 bp, Homo sapiens
caccccggccgcgacgccccgccccgcgcctaggctgttgctggccgcggccgccgccctcccccggcccaatggcgtggcggcacagtcagtgatgtgacgctcaggcttgtccggcccccggctcgcagcccattacaccatccgtcgcagcagtcgctgcagccgctgcagtccgagccgactaagggcgggaggcagctcgggtggcggggcgtggcgaacagcgcggccggattcattcctttggggcgcggagcatggaggagctgtgcggccgcaggcggagcagggcggcccgggcggcggtggggacaacggtttccctttgaaggggacggacaaagcccgagtgaccagcggcggcggggaggactagtccccgggcagtttggtgccctggttgtcagatgttggaaagcagtaggacggaacatactcttcgtggttgtgtatccgttctggggtgcagcaattaacattggactttggttcctgtgactcttgcctgtgtcgatagagttaaactggagctctgctttgaaagataaataaagcacagcctctcaactggacataaatggatctaaagacagcagtatttaacgcagctcgggatggcaaactccggcttctcaccaaattgttggcaagcaaatccaaagaggaggtttcctccttgatctctgaaaaaacaaatggggccacgccactcttgatggccgccaggtatgggcaccttgacatggtggaattcctcctagagcaatgcagtgcctccatagaagttgggggctccgtcaattttgatggcgaaaccattgagggggctccccctttatgggccgcttctgcagcaggacatctgaaggtggtccagtccttgttaaatcatggagcatctgtcaacaacacgactttaaccaattcaactcctcttcgagctgcgtgtttcgatggccatttggaaatagtgaagtaccttgtagaacacaaagctgatttggaagtgtcaaaccgacatgggcatacgtgcttgatgatttcatgttacaaaggacataaagagattgctcagtatttacttgaaaagggggcagatgttaatagaaaaagtgtcaaaggtaatactgcattgcatgattgtgcagaatctggaagtttggacatcatgaagatgcttcttatgtattgtgccaagatggaaaaggatggttatggaatgactccccttctctcagcaagtgtgactggtcacacaaatattgtggattttctgacacaccatgcacagaccagcaagacagaacgtattaatgctctagagcttctgggagctacatttgtagacaaaaaaagagatctgcttggggctttgaaatactggaaaaaggcaatgaacatgaggtacagtgataggactaatattattagtaaaccagtgccacagacactaataatggcttatgattatgccaaggaagtgaacagtgcagaagagctagaaggtcttattgctgatcctgatgagatgagaatgcaggcactattaatcagagaacgtattcttggtccttctcatcctgatacctcttactatattagatatagaggcgctgtctatgcagactctggaaatttcaaacgatgcatcaacctatggaagtatgctttggatatgcagcagagcaatttggatcctttaagcccaatgaccgccagcagcttattatcttttgcagaactattctcctttatgctacaggatagggctaaaggcctgctgggtactactgttacatttgatgatcttatgggcatactttgcaaaagcgtccttgaaatagagcgagctatcaaacaaactcagtgtccagctgacccattacagttaaataaggccctttctattattttgcacttaatttgcttgttagagaaagttccttgtactctagaacaagaccatttcaaaaagcagactatatacaggtttcttaagctgcatccaaggggaaagaataacttcagccctcttcatctggctgtggacaagaatactacatgtgtagggcggtaccctgtttgtaaatttccatctctacaagttactgcaatactgatagaatgtggtgctgatgtgaacgtcagagactcggatgacaacagtcccctgcatatcgctgctcttaacaaccatccagacatcatgaatctccttattaaatcaggtgcacattttgatgccacaaacttgcacaaacaaactgctagtgacttgctggatgagaaggaaatagctaaaaatttaatccagcctataaatcataccacattgcagtgtcttgctgctcgtgtcatagtgaatcatagaatatattataaagggcatatcccagaaaagctagagacttttgtttcccttcatagatgataacttgactgtattttagcactgttaaagcacgaattggtaacagttgtttcataaatgagcactgttgtgataacaccagcattcatttagcttgattgatatcattgtgctctcattggctaaagcattataagcatcaaatttacaacattggtttcccaatatttaatataaatataccatataatatattgtttgtgaattattgagaaatgtaacattcaaatttctaaaattgtctgccaaaggcttattcattctggttttgtttgctgttgggtgtttggggcagagttaaccatttctccatggtgtctttatactttactggtttgtgaattttatacaattgaaagtctttttttcttgcttctttcttctcttctcaagtttcccccctgtttctactttattgtttgtcctaaccatttctactacagttttttccttatggacccatactaggttgtacaaaccttaaggactcgttaccatttgcagttaccataagtgctttatcttctctatgcacaggcttaaacttgactgttgtatgttagcatattttctatgcagcagttggtcaacttcaactcaaaacactgttttcttatgtttgttacaaacttaattttttgaaagtactctgtagcatgacaatttttagagctgcaggttagctattatagctcaagcttttttgtttgtttttttcttcactttcttcacatctgaggtttctttctctaatccactgaaattattgtgtgctaaatttgggaaacagatctattctaactcattaacccagttgaaatttaggtctgtcatcttaatatatcatgcagtaaaaggaagaatctttttaaagtgacccacctttcatgctgctccagcattgtcctgcttgtgctgatggtgtgattaggtgtagagaatttgcttaaatttaacttcaaagttcatcacacagcttaatgagtcacattgaaatactcagtaattgaactgcaaatcacttttagttacaaaaagagctaaagcatgtcagtggcatgatgcttgccaagccagatctaggcatctaggataattaaggtattttagtatgcaatttactgccataatatcaaaggtcagtaacagtgttctttctttcttcaagcttatgtatacctttaaagataacttgcatgaattactttgattactttggtctcaattatttgtcaccccagttaaacatgaaaggttgcagtgcttcctgttcccttactggaagttagctttttcttttctctttcttcctttctttctctcactctttctttctctttctctttctctctctctctctctctcactcactcactcacagatttgctaatgccacagaaagggctcttttaacttaagataagtgaaaagtactaaaaaagattcaggtaattatcattcagcactttattgtaattcagaataaaatttatgatggcatatttgccctgcaaatgtcttaatgaagttgttctcaataaaaagctccttattgatttgagaaaaaatcagtttacctgtgagttcaatgagctggatcactcacttggatttttgtgttgacattttattctgagggttgatgttacactatttaaggagtcatcaatgcaaacagtcacattaggtatgtcatcatctttagtcagtaaaaaccttgtaatgaggagtagtaaataaacaagagaacattagactttttggttaaataattgagatttaatttttaaaagatattcttactcatttgctaggttgtaaatttgatttcaccattaagaaaaggtaaattggatataaatgaacgatctccaactttttgatgaagaggttttactatctctcactgtgggaaaatttgatgaaatatttgaactgtcacatatattaagaatactttatgatttagaccaatattctagaaatatcaaatgtcagtatcttgaaatcatctgcctctaactttgtggtataagaattatatatgaataagctattatttttataaaggaaaactttgccattatagtaaattacattagttgatctcgataatttgaggataacagatgacaattgaatttttaattgatttagtatttcctcctcctctttgggggctgggtgggagggcttacatgctcttatagtgaggcacatctcactgttttgcagcagaatttgaattgtgcaactcctgtgtaaagtaaggatttctttaaatagcatttttgcaccagtaaaaatagataacttagaactcagtcttgataactgaaatgacttatttcacttagaatacatttctcccttctctgccatctccacaaatgccattgggaggttttgaaaaaccagttaatttaatagctcaaaattgtccctgattttattttcttttagggaaaattgtttcataaatgtgacactgataaagcctttgtcagaaagtattctcacaattatgagatggattataataaaatacttaaatttgtgttattttttgaaccacagatgagtaaatttaataatgaaccaattacactcttgagtctaactaaactgtacactgtagcacggtgttattgactggagttaatgtgtaagttattaacatttctatgaaaatgcccttttggggcctcctgaattttagatgttccactgttttgatcatttctataaaagaaatggtcattttacttagatgccagtctactttataaagacaaatggattatagacttaaaaatagtcatttttcttattcataaatctgacaggcataaacccaaatcaaagataatttggtgcccattatgaatttgaagttaagtgatagctcacttgtaaagtgactaccttaatgtgtatagagaccccagtctactattatttgggaaaattgtttaggttatatgggaaaagtagctctttaaaaatcatattgcccaacagaaaccttaggctgaatttacaggtatgataatttttgtaattaattttcttagaattgtgcaggctggatgagataatgacatactcttttacactgtaacagcagcattattgcctagaactttaaccattttagagttagatactaaggaaacaaactaattggtcatcatcattttctttttttctttttcttttttttttttttgcccttatgtgtcactaaacaactagtttctctcccttttgtcagttcccattgtgtattttttcaaaagaagtactgtattcggatgccagctaataaattgtcacacaatggaaaatcatatgccacaacattcattgtaaggtttaataaaattaaatttttgccccaaaagaaaaaaaaaaacttagaaacagaagatagatcaagagaacaaaataagctaaataccaagcgagg

SEQ ID NO: 297925 - DNA, 3997 bp, Homo sapiens
caccccggccgcgacgccccgccccgcgcctaggctgttgctggccgcggccgccgccctcccccggcccaatggcgtggcggcacagtcagtgatgtgacgctcaggcttgtccggcccccggctcgcagcccattacaccatccgtcgcagcagtcgctgcagccgctgcagtccgagccgactaagggcgggaggcagctcgggtggcggggcgtggcgaacagcgcggccggattcattcctttggggcgcggagcatggaggagctgtgcggccgcaggcggagcagggcggcccgggcggcggtggggacaacggtttccctttgaaggggacggacaaagcccgagtgaccagcggcggcggggaggactagtccccgggcagtttggtgccctggttgtcagatgttggaaagcagtaggacggaacatactcttcgtggttgtgtatccgttctggggtgcagcaattaacattggactttggttcctgtgactcttgcctgtgtcgatagagttaaactggagctctgctttgaaagataaataaagcacagcctctcaactggacataaatggatctaaagacagcagtatttaacgcagctcgggatggcaaactccggcttctcaccaaattgttggcaagcaaatccaaagaggaggtttcctccttgatctctgaaaaaacaaatggggccacgccactcttgatggccgccaggtatgggcaccttgacatggtggaattcctcctagagcaatgcagtgcctccatagaagttgggggctccgtcaattttgatggcgaaaccattgagggggctccccctttatgggccgcttctgcagcaggacatctgaaggtggtccagtccttgttaaatcatggagcatctgtcaacaacacgactttaaccaattcaactcctcttcgagctgcgtgtttcgatggccatttggaaatagtgaagtaccttgtagaacacaaagctgatttggaagtgtcaaaccgacatgggcatacgtgcttgatgatttcatgttacaaaggacataaagagattgctcagtatttacttgaaaagggggcagatgttaatagaaaaagtgtcaaaggtaatactgcattgcatgattgtgcagaatctggaagtttggacatcatgaagatgcttcttatgtattgtgccaagatggaaaaggatggttatggaatgactccccttctctcagcaagtgtgactggtcacacaaatattgtggattttctgacacaccatgcacagaccagcaagacagaacgtattaatgctctagagcttctgggagctacatttgtagacaaaaaaagagatctgcttggggctttgaaatactggaaaaaggcaatgaacatgaggtacagtgataggactaatattattagtaaaccagtgccacagacactaataatggcttatgattatgccaaggaagtgaacagtgcagaagagctagaaggtcttattgctgatcctgatgagatgagaatgcaggcactattaatcagagaacgtattcttggtccttctcatcctgatacctcttactatattagatatagaggcgctgtctatgcagactctggaaatttcaaacgatgcatcaacctatggaagtatgctttggatatgcagcagagcaatttggatcctttaagcccaatgaccgccagcagcttattatcttttgcagaactattctcctttatgctacaggatagggctaaaggcctgctgggtactactgttacatttgatgatcttatgggcatactttgcaaaagcgtccttgaaatagagcgagctatcaaacaaactcagtgtccagctgacccattacagttaaataaggccctttctattattttgcacttaatttgcttgttagagaaagttccttgtactctagaacaagaccatttcaaaaagcagactatatacaggtttcttaagctgcatccaaggggaaagaataacttcagccctcttcatctggctgtggacaagaatactacatgtgtagggcggtaccctgtttgtaaatttccatctctacaagttactgcaatactgatagaatgtggtgctgatgtgaacgtcagagactcggatgacaacagtcccctgcatatcgctgctcttaacaaccatccagacatcatgaatctccttattaaatcaggtgcacattttgatgccacaaacttgcacaaacaaactgctagtgacttgctggatgagaaggaaatagctaaaaatttaatccagcctataaatcataccacattgcagtgtcttgctgctcgtgtcatagtgaatcatagaatatattataaagggcatatcccagaaaagctagagacttttgtttcccttcatagatgataacttgactgtattttagcactgttaaagcacgaattggtaacagttgtttcataaatgagcactgttgtgataacaccagcattcatttagcttgattgatatcattgtgctctcattggctaaagcattataagcatcaaatttacaacattggtttcccaatatttaatataaatataccatataatatattgtttgtgaattattgagaaatgtaacattcaaatttctaaaattgtctgccaaaggcttattcattctggttttgtttgctgttgggtgtttggggcagagttaaccatttctccatggtgtctttatactttactggtttgtgaattttatacaattgaaagtctttttttcttgcttctttcttctcttctcaagtttcccccctgtttctactttattgtttgtcctaaccatttctactacagttttttccttatggacccatactaggttgtacaaaccttaaggactcgttaccatttgcagttaccataagtgctttatcttctctatgcacaggcttaaacttgactgttgtatgttagcatattttctatgcagcagttggtcaacttcaactcaaaacactgttttcttatgtttgttacaaacttaattttttgaaagtactctgtagcatgacaatttttagagctgcaggttagctattatagctcaagcttttttgtttgtttttttcttcactttcttcacatctgaggtttctttctctaatccactgaaattattgtgtgctaaatttgggaaacagatctattctaactcattaacccagttgaaatttaggtctgtcatcttaatatatcatgcagtaaaaggaagaatctttttaaagtgacccacctttcatgctgctccagcattgtcctgcttgtgctgatggtgtgattaggtgtagagaatttgcttaaatttaacttcaaagttcatcacacagcttaatgagtcacattgaaatactcagtaattgaactgcaaatcacttttagttacaaaaagagctaaagcatgtcagtggcatgatgcttgccaagccagatctaggcatctaggataattaaggtattttagtatgcaatttactgccataatatcaaaggtcagtaacagtgttctttctttcttcaagcttatgtatacctttaaagataacttgcatgaattactttgattactttggtctcaattatttgtcaccccagttaaacatgaaaggttgcagtgcttcctgttcccttactggaagttagctttttcttttctctttcttcctttctttctctcactctttctttctctttctctttctctctctctctctctctcactcactcactcacagatttgctaatgccacagaaagggctcttttaacttaagataagtgaaaagtactaaaaaagattcaggtaattatcattcagcactttattgtaattcagaataaaatttatgatggcatatttgccctgcaaatgtcttaatgaagttgttctcaataaaaagctccttattgatttgaga

SEQ ID NO: 297926 - DNA, 5857 bp, Homo sapiens
caccccggccgcgacgccccgccccgcgcctaggctgttgctggccgcggccgccgccctcccccggcccaatggcgtggcggcacagtcagtgatgtgacgctcaggcttgtccggcccccggctcgcagcccattacaccatccgtcgcagcagtcgctgcagccgctgcagtccgagccgactaagggcgggaggcagctcgggtggcggggcgtggcgaacagcgcggccggattcattcctttggggcgcggagcatggaggagctgtgcggccgcaggcggagcagggcggcccgggcggcggtggggacaacggtttccctttgaaggggacggacaaagcccgagtgaccagcggcggcggggaggactagtccccgggcagtttggtgccctggttgtcagatgttggaaagcagtaggacggaacatactcttcgtggttgtgtatccgttctggggtgcagcaattaacattggactttggttcctgtgactcttgcctgtgtcgatagagttaaactggagctctgctttgaaagataaataaagcacagcctctcaactggacataaatggatctaaagacagcagtatttaacgcagctcgggatggcaaactccggcttctcaccaaattgttggcaagcaaatccaaagaggaggtttcctccttgatctctgaaaaaacaaatggggccacgccactcttgatggccgccaggtatgggcaccttgacatggtggaattcctcctagagcaatgcagtgcctccatagaagttgggggctccgtcaattttgatggcgaaaccattgagggggctccccctttatgggccgcttctgcagcaggacatctgaaggtggtccagtccttgttaaatcatggagcatctgtcaacaacacgactttaaccaattcaactcctcttcgagctgcgtgtttcgatggccatttggaaatagtgaagtaccttgtagaacacaaagctgatttggaagtgtcaaaccgacatgggcatacgtgcttgatgatttcatgttacaaaggacataaagagattgctcagtatttacttgaaaagggggcagatgttaatagaaaaagtgtcaaaggtaatactgcattgcatgattgtgcagaatctggaagtttggacatcatgaagatgcttcttatgtattgtgccaagatggaaaaggatggttatggaatgactccccttctctcagcaagtgtgactggtcacacaaatattgtggattttctgacacaccatgcacagaccagcaagacagaacgtattaatgctctagagcttctgggagctacatttgtagacaaaaaaagagatctgcttggggctttgaaatactggaaaaaggcaatgaacatgaggtacagtgataggactaatattattagtaaaccagtgccacagacactaataatggcttatgattatgccaaggaagtgaacagtgcagaagagctagaaggtcttattgctgatcctgatgagatgagaatgcaggcactattaatcagagaacgtattcttggtccttctcatcctgatacctcttactatattagatatagaggcgctgtctatgcagactctggaaatttcaaacgatgcatcaacctatggaagtatgctttggatatgcagcagagcaatttggatcctttaagcccaatgaccgccagcagcttattatcttttgcagaactattctcctttatgctacaggatagggctaaaggcctgctgggtactactgttacatttgatgatcttatgggcatactttgcaaaagcgtccttgaaatagagcgagctatcaaacaaactcagtgtccagctgacccattacagttaaataaggccctttctattattttgcacttaatttgcttgttagagaaagttccttgtactctagaacaagaccatttcaaaaagcagactatatacaggtttcttaagctgcatccaaggggaaagaataacttcagccctcttcatctggctgtggacaagaatactacatgtgtagggcggtaccctgtttgtaaatttccatctctacaagttactgcaatactgatagaatgtggtgctgatgtgaacgtcagagactcggatgacaacagtcccctgcatatcgctgctcttaacaaccatccagacatcatgaatctccttattaaatcaggtgcacattttgatgccacaaacttgcacaaacaaactgctagtgacttgctggatgagaaggaaatagctaaaaatttaatccagcctataaatcataccacattgcagtgtcttgctgctcgtgtcatagtgaatcatagaatatattataaagggcatatcccagaaaagctagagacttttgtttcccttcatagatgataacttgactgtattttagcactgttaaagcacgaattggtaacagttgtttcataaatgagcactgttgtgataacaccagcattcatttagcttgattgatatcattgtgctctcattggctaaagcattataagcatcaaatttacaacattggtttcccaatatttaatataaatataccatataatatattgtttgtgaattattgagaaatgtaacattcaaatttctaaaattgtctgccaaaggcttattcattctggttttgtttgctgttgggtgtttggggcagagttaaccatttctccatggtgtctttatactttactggtttgtgaattttatacaattgaaagtctttttttcttgcttctttcttctcttctcaagtttcccccctgtttctactttattgtttgtcctaaccatttctactacagttttttccttatggacccatactaggttgtacaaaccttaaggactcgttaccatttgcagttaccataagtgctttatcttctctatgcacaggcttaaacttgactgttgtatgttagcatattttctatgcagcagttggtcaacttcaactcaaaacactgttttcttatgtttgttacaaacttaattttttgaaagtactctgtagcatgacaatttttagagctgcaggttagctattatagctcaagcttttttgtttgtttttttcttcactttcttcacatctgaggtttctttctctaatccactgaaattattgtgtgctaaatttgggaaacagatctattctaactcattaacccagttgaaatttaggtctgtcatcttaatatatcatgcagtaaaaggaagaatctttttaaagtgacccacctttcatgctgctccagcattgtcctgcttgtgctgatggtgtgattaggtgtagagaatttgcttaaatttaacttcaaagttcatcacacagcttaatgagtcacattgaaatactcagtaattgaactgcaaatcacttttagttacaaaaagagctaaagcatgtcagtggcatgatgcttgccaagccagatctaggcatctaggataattaaggtattttagtatgcaatttactgccataatatcaaaggtcagtaacagtgttctttctttcttcaagcttatgtatacctttaaagataacttgcatgaattactttgattactttggtctcaattatttgtcaccccagttaaacatgaaaggttgcagtgcttcctgttcccttactggaagttagctttttcttttctctttcttcctttctttctctcactctttctttctctttctctttctctctctctctctctctcactcactcactcacagatttgctaatgccacagaaagggctcttttaacttaagataagtgaaaagtactaaaaaagattcaggtaattatcattcagcactttattgtaattcagaataaaatttatgatggcatatttgccctgcaaatgtcttaatgaagttgttctcaataaaaagctccttattgatttgagaaaaaatcagtttacctgtgagttcaatgagctggatcactcacttggatttttgtgttgacattttattctgagggttgatgttacactatttaaggagtcatcaatgcaaacagtcacattaggtatgtcatcatctttagtcagtaaaaaccttgtaatgaggagtagtaaataaacaagagaacattagactttttggttaaataattgagatttaatttttaaaagatattcttactcatttgctaggttgtaaatttgatttcaccattaagaaaaggtaaattggatataaatgaacgatctccaactttttgatgaagaggttttactatctctcactgtgggaaaatttgatgaaatatttgaactgtcacatatattaagaatactttatgatttagaccaatattctagaaatatcaaatgtcagtatcttgaaatcatctgcctctaactttgtggtataagaattatatatgaataagctattatttttataaaggaaaactttgccattatagtaaattacattagttgatctcgataatttgaggataacagatgacaattgaatttttaattgatttagtatttcctcctcctctttgggggctgggtgggagggcttacatgctcttatagtgaggcacatctcactgttttgcagcagaatttgaattgtgcaactcctgtgtaaagtaaggatttctttaaatagcatttttgcaccagtaaaaatagataacttagaactcagtcttgataactgaaatgacttatttcacttagaatacatttctcccttctctgccatctccacaaatgccattgggaggttttgaaaaaccagttaatttaatagctcaaaattgtccctgattttattttcttttagggaaaattgtttcataaatgtgacactgataaagcctttgtcagaaagtattctcacaattatgagatggattataataaaatacttaaatttgtgttattttttgaaccacagatgagtaaatttaataatgaaccaattacactcttgagtctaactaaactgtacactgtagcacggtgttattgactggagttaatgtgtaagttattaacatttctatgaaaatgcccttttggggcctcctgaattttagatgttccactgttttgatcatttctataaaagaaatggtcattttacttagatgccagtctactttataaagacaaatggattatagacttaaaaatagtcatttttcttattcataaatctgacaggcataaacccaaatcaaagataatttggtgcccattatgaatttgaagttaagtgatagctcacttgtaaagtgactaccttaatgtgtatagagaccccagtctactattatttgggaaaattgtttaggttatatgggaaaagtagctctttaaaaatcatattgcccaacagaaaccttaggctgaatttacaggtatgataatttttgtaattaattttcttagaattgtgcaggctggatgagataatgacatactcttttacactgtaacagcagcattattgcctagaactttaaccattttagagttagatactaaggaaacaaactaattggtcatcatcattttctttttttctttttcttttttttttttttgcccttatgtgtcactaaacaactagtttctctcccttttgtcagttcccattgtgtattttttcaaaagaagtactgtattcggatgccagctaataaattgtcacacaatggaaaatcatatgccacaacattcattgtaaggtttaataaaattaaatttgcaccaaaaaaaagtcgacgcggccgcgaat

SEQ ID NO: 297927 - DNA, 2622 bp, Homo sapiens
caccccggccgcgacgccccgccccgcgcctaggctgttgctggccgcggccgccgccctcccccggcccaatggcgtggcggcacagtcagtgatgtgacgctcaggcttgtccggcccccggctcgcagcccattacaccatccgtcgcagcagtcgctgcagccgctgcagtccgagccgactaagggcgggaggcagctcgggtggcggggcgtggcgaacagcgcggccggattcattcctttggggcgcggagcatggaggagctgtgcggccgcaggcggagcagggcggcccgggcggcggtggggacaacggtttccctttgaaggggacggacaaagcccgagtgaccagcggcggcggggaggactagtccccgggcagtttggtgccctggttgtcagatgttggaaagcagtaggacggaacatactcttcgtggttgtgtatccgttctggggtgcagcaattaacattggactttggttcctgtgactcttgcctgtgtcgatagagttaaactggagctctgctttgaaagataaataaagcacagcctctcaactggacataaatggatctaaagacagcagtatttaacgcagctcgggatggcaaactccggcttctcaccaaattgttggcaagcaaatccaaagaggaggtttcctccttgatctctgaaaaaacaaatggggccacgccactcttgatggccgccaggtatgggcaccttgacatggtggaattcctcctagagcaatgcagtgcctccatagaagttgggggctccgtcaattttgatggcgaaaccattgagggggctccccctttatgggccgcttctgcagcaggacatctgaaggtggtccagtccttgttaaatcatggagcatctgtcaacaacacgactttaaccaattcaactcctcttcgagctgcgtgtttcgatggccatttggaaatagtgaagtaccttgtagaacacaaagctgatttggaagtgtcaaaccgacatgggcatacgtgcttgatgatttcatgttacaaaggacataaagagattgctcagtatttacttgaaaagggggcagatgttaatagaaaaagtgtcaaaggtaatactgcattgcatgattgtgcagaatctggaagtttggacatcatgaagatgcttcttatgtattgtgccaagatggaaaaggatggttatggaatgactccccttctctcagcaagtgtgactggtcacacaaatattgtggattttctgacacaccatgcacagaccagcaagacagaacgtattaatgctctagagcttctgggagctacatttgtagacaaaaaaagagatctgcttggggctttgaaatactggaaaaaggcaatgaacatgaggtacagtgataggactaatattattagtaaaccagtgccacagacactaataatggcttatgattatgccaaggaagtgaacagtgcagaagagctagaaggtcttattgctgatcctgatgagatgagaatgcaggcactattaatcagagaacgtattcttggtccttctcatcctgatacctcttactatattagatatagaggcgctgtctatgcagactctggaaatttcaaacgatgcatcaacctatggaagtatgctttggatatgcagcagagcaatttggatcctttaagcccaatgaccgccagcagcttattatcttttgcagaactattctcctttatgctacaggatagggctaaaggcctgctgggtactactgttacatttgatgatcttatgggcatactttgcaaaagcgtccttgaaatagagcgagctatcaaacaaactcagtgtccagctgacccattacagttaaataaggccctttctattattttgcacttaatttgcttgttagagaaagttccttgtactctagaacaagaccatttcaaaaagcagactatatacaggtttcttaagctgcatccaaggggaaagaataacttcagccctcttcatctggctgtggacaagaatactacatgtgtagggcggtaccctgtttgtaaatttccatctctacaagttactgcaatactgatagaatgtggtgctgatgtgaacgtcagagactcggatgacaacagtcccctgcatatcgctgctcttaacaaccatccagacatcatgaatctccttattaaatcaggtgcacattttgatgccacaaacttgcacaaacaaactgctagtgacttgctggatgagaaggaaatagctaaaaatttaatccagcctataaatcataccacattgcagtgtcttgctgctcgtgtcatagtgaatcatagaatatattataaagggcatatcccagaaaagctagagacttttgtttcccttcatagatgataacttgactgtattttagcactgttaaagcacgaattggtaacagttgtttcataaatgagcactgttgtgataacaccagcattcatttagcttgattgatatcattgtgctctcattggctaaagcattataagcatcaaatttacaacattggtttcccaatatttaatataaatataccatat

SEQ ID NO: 297928 - DNA, 938 bp, Homo sapiens
  misc_feature (11)..(11): n is a, c, g, or t
gatcctgacgntaatatgtaacctctgtagcatgacaatttttagagctgcaggttagctattatagctcaagcttttttgtttgtttttttcttcactttcttcacatctgaggtttctttctctaatccactgaaattattgtgtgctaaatttgggaaacagatctattctaactcattaacccagttgaaatttaggtctgtcatcttaatatatcatgcagtaaaaggaagaatctttttaaagtgacccacctttcatgctgctccagcattgtcctgcttgtgctgatggtgtgattaggtgtagagaatttgcttaaatttaacttcaaagttcatcacacagcttaatgagtcacattgaaatactcagtaattgaactgcaaatcacttttagttacaaaaagagctaaagcatgtcagtggcatgatgcttgccaagccagatctaggcatctaggataattaaggtattttagtatgcaatttactgccataatatcaaaggtcagtaacagtgttctttctttcttcaagcttatgtatacctttaaagataacttgcatgaattactttgattactttggtctcaattatttgtcaccccagttaaacatgaaaggttgcagtgcttcctgttcccttactggaagttagctttttcttttctctttcttcctttctttctctcactctttctttctctttctctttctctctctctctctctctcactcactcactcacagatttgctaatgccacagaaagggctcttttaacttaagataagtgaaaagtactaaaaaagattcaggtaattatcattcagcactttattgtaattcagaataaaatttatgatggcatatttgccctgcaaatgtcttaatgaagttgttctcaataaaaagctccttattgatttgaga

SEQ ID NO: 297929 - DNA, 848 bp, Homo sapiens
ctgaggtgatctagaggatccctagcttgggtgaaggagtgactgaaattattgtgtgctaaatttgggaaacagatctattctaactcattaacccagttgaaatttaggtctgtcatcttaatatatcatgcagtaaaaggaagaatctttttaaagtgacccacctttcatgctgctccagcattgtcctgcttgtgctgatggtgtgattaggtgtagagaatttgcttaaatttaacttcaaagttcatcacacagcttaatgagtcacattgaaatactcagtaattgaactgcaaatcacttttagttacaaaaagagctaaagcatgtcagtggcatgatgcttgccaagccagatctaggcatctaggataattaaggtattttagtatgcaatttactgccataatatcaaaggtcagtaacagtgttctttctttcttcaagcttatgtatacctttaaagataacttgcatgaattactttgattactttggtctcaattatttgtcaccccagttaaacatgaaaggttgcagtgcttcctgttcccttactggaagttagctttttcttttctctttcttcctttctttctctcactctttctttctctttctctttctctctctctctctctctcactcactcactcacagatttgctaatgccacagaaagggctcttttaacttaagataagtgaaaagtactaaaaaagattcaggtaattatcattcagcactttattgtaattcagaataaaatttatgatggcatatttgccctgcaaatgtcttaatgaagttgttctcaataaaaagctccttattgatttgaga

SEQ ID NO: 297930 - DNA, 405 bp, Homo sapiens
gaatgacttgtgcatctgcatcaccagcacttagcacagttcccggggggaactttgaggacggggttgtcctcaaagatttcttagataaataaagtgatagaatcaaactttacaagatgcagcaagaactgtgtgaagtcactcatttaatagcgacacaaaattattcatgattgccccaagattatcatagaacatccaatgaattatgtacagtaattgtcatgaagcatgaaaggtcaaaatgcattctcagtactttaaatgtaactttgaagtcttccttcaaaaattgagtaacttcttttccacattttggtgcttaagatgtaactcagttgcttccattactcagaaaattccctcatggtgcatcctcactctctgccccaccaacctggc

SEQ ID NO: 297931 - DNA, 3752 bp, Homo sapiens
gaatcggccgatgtgaaccgaatgttgatgtaagaggcagggcactcggctgcggatgggtaacagggcgtgggctggcacacttacttgcaccagtgcccagagagggggtgcaggctgaggagctgcccagagcaccgctcacactcccagagtacctgaagtcggcatttcaatgacaggtgacaagggtccccaaaggctaagcgggtccagctatggttccatctccagcccgaccagcccgaccagcccagggccacagcaagcacctcccagagagacctacctgagtgagaagatccccatcccagacacaaaaccgggcaccttcagcctgcggaagctatgggccttcacggggcctggcttcctcatgagcattgctttcctggacccaggaaacatcgagtcagatcttcaggctggcgccgtggcgggattcaaacttctctgggtgctgctctgggccaccgtgttgggcttgctctgccagcgactggctgcacgtctgggcgtggtgacaggcaaggacttgggcgaggtctgccatctctactaccctaaggtgccccgcaccgtcctctggctgaccatcgagctagccattgtgggctccgacatgcaggaagtcatcggcacggccattgcattcaatctgctctcagctggacgaatcccactctggggtggcgtcctcatcaccatcgtggacaccttcttcttcctcttcctcgataactacgggctgcggaagctggaagctttttttggactccttataaccattatggccttgacctttggctatgagtatgtggtggcgcgtcctgagcagggagcgcttcttcggggcctgttcctgccctcgtgcccgggctgcggccaccccgagctgctgcaggcggtgggcattgttggcgccatcatcatgccccacaacatctacctgcactcggccctggtcaagtctcgagagatagaccgggcccgccgagcggacatcagagaagccaacatgtacttcctgattgaggccaccatcgccctgtccgtctcctttatcatcaacctctttgtcatggctgtctttgggcaggccttctaccagaaaaccaaccaggctgcgttcaacatctgtgccaacagcagcctccacgactacgccaagatcttccccatgaacaacgccaccgtggccgtggacatttaccaggggggcgtgatcctgggctgcctgttcggccccgcggccctctacatctgggccataggtctcctggcggctgggcagagctccaccatgacgggcacctacgcgggacagttcgtgatggagggcttcctgaggctgcggtggtcacgcttcgcccgtgtcctcctcacccgctcctgcgccatcctgcccaccgtgctcgtggctgtcttccgggacctgagggacttgtcgggcctcaatgatctgctcaacgtgctgcagagcctgctgctcccgttcgccgtgctgcccatcctcacgttcaccagcatgcccaccctcatgcaggagtttgccaatggcctgctgaacaaggtcgtcacctcttccatcatggtgctagtctgcgccatcaacctctacttcgtggtcagctatctgcccagcctgccccaccctgcctacttcggccttgcagccttgctggccgcagcctacctgggcctcagcacctacctggtctggacctgttgccttgcccacggagccacctttctggcccacagctcccaccaccacttcctgtatgggctccttgaagaggaccagaaaggggagacctctggctaggcccacaccagggcctggctgggagtggcatgtatgacgtgactggcctgctggatgtggagggggcgcgtgcaggcagcaggatggagtgggacagttcctgagaccagccaacctgggggctttagggacctgctgtttcctagcgcagccatgtgattaccctctgggtctcagtgtcctcatctgtaaaatggagacaccaccacccttgccatggaggttaagcactttaacacagtgtctggcacttgggacaaaaacaaacaaacaaacaaaaaacatttcaaaaggtatttattgagcacctgcaggcgtgacctgacagcccaagggtgggtggggtgagggcttgaggacttgggcgggacacaggctccaaactggagcttgaaatagtgtctgatgaatgttaaattatctatctatctatttatttatttatttgagacagggaaagggtctccctctgttgccaaggctggagtgcagtggcgcaatcttaactcattgcaacctccaccttctgggttcaagcgattctctttattcagccccgggagtggcgcgcgccaccacgcccagctaatttgtgtattttcagcagagacggggtttgccatgctggccaggctggtctcgaactgctggattcaagtgatccgcccatctccgtctcccaaagtgctgggaattacaggcgtgagccaccaaacccggcctgattaaagttaaataaatactagttcccttctcgtccaaaggagcagggaatgggaaccgggaaggcacgaagtctctaaagcatccagaagacccctacaccagggtctggtccgctcctattcgccgcagcctttctgttccgcctgcaacccattttccagacagtaaaacggcggcgcacttctttctccgtcaggcaccaggtcataaggaacccaagagtctgtgcctctgaggcccaaattatttgctgtttcctcaggggagccggcggccgcgactcccacgccgcgccgttaccgctccctctctgctgactgctccccctaggggcagagacggtcccgacgcccgccatcccgccccggcctcacccctccccgccaggcggaacgacgcggggaggcgggcgctcggggctcgcgcccaggggccccagaatccttcggggagagtgggtgggaggaagctgtgtgggcggggagccccctctgccttagggagcggctgggcacccattcgccccattcaggggctgcactttatagacgttccctaggctgtttctaggctcccccaagtccctcctccagcctcgtcgggtccctcagaccccagcccaggacctgcggagggccgcagcgaggagaggccaacaggcctttccctagagttgaacctgggccgggtgttgcacctggaagaacccccgatttcctggggacccagcagggcaggcggcctggctccgcgctcaggtccggacgcttgtttatgagaagaatttcctctttcttaaaagggcaacgatgcgagtgggtccctcaaggagagaagagatgggaccggtctggtgcgacctgggcaagcgctgcagagggtacctgggcaagagggccgcccgcctcctctgggtttggcactggagaagatgggtccatgccagctgaaggaggagatggatgggggacgtttagcgaagaaaggcatctcccagatcctttagcctcctggaagtgcccccgttgtaccccctacacacccctcttggcattgagtgccagtcctctgccaggctctgtgttacaagttggggagggcggcaaagtcccgaattaaagatgtcagttctcaaggaccccacactccagcggcgggagacagctgtgcaaacaagtccctgtggcaggatgcggtg

SEQ ID NO: 297932 - DNA, 3609 bp, Homo sapiens
gaatcggccgatgtgaaccgaatgttgatgtaagaggcagggcactcggctgcggatgggtaacagggcgtgggctggcacacttacttgcaccagtgcccagagagggggtgcaggctgaggagctgcccagagcaccgctcacactcccagagtacctgaagtcggcatttcaatgacagggcaccttcagcctgcggaagctatgggccttcacggggcctggcttcctcatgagcattgctttcctggacccaggaaacatcgagtcagatcttcaggctggcgccgtggcgggattcaaacttctctgggtgctgctctgggccaccgtgttgggcttgctctgccagcgactggctgcacgtctgggcgtggtgacaggcaaggacttgggcgaggtctgccatctctactaccctaaggtgccccgcaccgtcctctggctgaccatcgagctagccattgtgggctccgacatgcaggaagtcatcggcacggccattgcattcaatctgctctcagctggacgaatcccactctggggtggcgtcctcatcaccatcgtggacaccttcttcttcctcttcctcgataactacgggctgcggaagctggaagctttttttggactccttataaccattatggccttgacctttggctatgagtatgtggtggcgcgtcctgagcagggagcgcttcttcggggcctgttcctgccctcgtgcccgggctgcggccaccccgagctgctgcaggcggtgggcattgttggcgccatcatcatgccccacaacatctacctgcactcggccctggtcaagtctcgagagatagaccgggcccgccgagcggacatcagagaagccaacatgtacttcctgattgaggccaccatcgccctgtccgtctcctttatcatcaacctctttgtcatggctgtctttgggcaggccttctaccagaaaaccaaccaggctgcgttcaacatctgtgccaacagcagcctccacgactacgccaagatcttccccatgaacaacgccaccgtggccgtggacatttaccaggggggcgtgatcctgggctgcctgttcggccccgcggccctctacatctgggccataggtctcctggcggctgggcagagctccaccatgacgggcacctacgcgggacagttcgtgatggagggcttcctgaggctgcggtggtcacgcttcgcccgtgtcctcctcacccgctcctgcgccatcctgcccaccgtgctcgtggctgtcttccgggacctgagggacttgtcgggcctcaatgatctgctcaacgtgctgcagagcctgctgctcccgttcgccgtgctgcccatcctcacgttcaccagcatgcccaccctcatgcaggagtttgccaatggcctgctgaacaaggtcgtcacctcttccatcatggtgctagtctgcgccatcaacctctacttcgtggtcagctatctgcccagcctgccccaccctgcctacttcggccttgcagccttgctggccgcagcctacctgggcctcagcacctacctggtctggacctgttgccttgcccacggagccacctttctggcccacagctcccaccaccacttcctgtatgggctccttgaagaggaccagaaaggggagacctctggctaggcccacaccagggcctggctgggagtggcatgtatgacgtgactggcctgctggatgtggagggggcgcgtgcaggcagcaggatggagtgggacagttcctgagaccagccaacctgggggctttagggacctgctgtttcctagcgcagccatgtgattaccctctgggtctcagtgtcctcatctgtaaaatggagacaccaccacccttgccatggaggttaagcactttaacacagtgtctggcacttgggacaaaaacaaacaaacaaacaaaaaacatttcaaaaggtatttattgagcacctgcaggcgtgacctgacagcccaagggtgggtggggtgagggcttgaggacttgggcgggacacaggctccaaactggagcttgaaatagtgtctgatgaatgttaaattatctatctatctatttatttatttatttgagacagggaaagggtctccctctgttgccaaggctggagtgcagtggcgcaatcttaactcattgcaacctccaccttctgggttcaagcgattctctttattcagccccgggagtggcgcgcgccaccacgcccagctaatttgtgtattttcagcagagacggggtttgccatgctggccaggctggtctcgaactgctggattcaagtgatccgcccatctccgtctcccaaagtgctgggaattacaggcgtgagccaccaaacccggcctgattaaagttaaataaatactagttcccttctcgtccaaaggagcagggaatgggaaccgggaaggcacgaagtctctaaagcatccagaagacccctacaccagggtctggtccgctcctattcgccgcagcctttctgttccgcctgcaacccattttccagacagtaaaacggcggcgcacttctttctccgtcaggcaccaggtcataaggaacccaagagtctgtgcctctgaggcccaaattatttgctgtttcctcaggggagccggcggccgcgactcccacgccgcgccgttaccgctccctctctgctgactgctccccctaggggcagagacggtcccgacgcccgccatcccgccccggcctcacccctccccgccaggcggaacgacgcggggaggcgggcgctcggggctcgcgcccaggggccccagaatccttcggggagagtgggtgggaggaagctgtgtgggcggggagccccctctgccttagggagcggctgggcacccattcgccccattcaggggctgcactttatagacgttccctaggctgtttctaggctcccccaagtccctcctccagcctcgtcgggtccctcagaccccagcccaggacctgcggagggccgcagcgaggagaggccaacaggcctttccctagagttgaacctgggccgggtgttgcacctggaagaacccccgatttcctggggacccagcagggcaggcggcctggctccgcgctcaggtccggacgcttgtttatgagaagaatttcctctttcttaaaagggcaacgatgcgagtgggtccctcaaggagagaagagatgggaccggtctggtgcgacctgggcaagcgctgcagagggtacctgggcaagagggccgcccgcctcctctgggtttggcactggagaagatgggtccatgccagctgaaggaggagatggatgggggacgtttagcgaagaaaggcatctcccagatcctttagcctcctggaagtgcccccgttgtaccccctacacacccctcttggcattgagtgccagtcctctgccaggctctgtgttacaagttggggagggcggcaaagtcccgaattaaagatgtcagttctcaaggaccccacactccagcggcgggagacagctgtgcaaacaagtccctgtggcaggatgcggtg

SEQ ID NO: 297933 - DNA, 2529 bp, Homo sapiens
gaatcggccgatgtgaaccgaatgttgatgtaagaggcagggcactcggctgcggatgggtaacagggcgtgggctggcacacttacttgcaccagtgcccagagagggggtgcaggctgaggagctgcccagagcaccgctcacactcccagagtacctgaagtcggcatttcaatgacaggtgacaagggtccccaaaggctaagcgggtccagctatggttccatctccagcccgaccagcccgaccagcccagggccacagcaagcacctcccagagagacctacctgagtgagaagatccccatcccagacacaaaaccgggcaccttcagcctgcggaagctatgggccttcacggggcctggcttcctcatgagcattgctttcctggacccaggaaacatcgagtcagatcttcaggctggcgccgtggcgggattcaaacttctctgggtgctgctctgggccaccgtgttgggcttgctctgccagcgactggctgcacgtctgggcgtggtgacaggcaaggacttgggcgaggtctgccatctctactaccctaaggtgccccgcaccgtcctctggctgaccatcgagctagccattgtgggctccgacatgcaggaagtcatcggcacggccattgcattcaatctgctctcagctggacgaatcccactctggggtggcgtcctcatcaccatcgtggacaccttcttcttcctcttcctcgataactacgggctgcggaagctggaagctttttttggactccttataaccattatggccttgacctttggctatgagtatgtggtggcgcgtcctgagcagggagcgcttcttcggggcctgttcctgccctcgtgcccgggctgcggccaccccgagctgctgcaggcggtgggcattgttggcgccatcatcatgccccacaacatctacctgcactcggccctggtcaagtctcgagagatagaccgggcccgccgagcggacatcagagaagccaacatgtacttcctgattgaggccaccatcgccctgtccgtctcctttatcatcaacctctttgtcatggctgtctttgggcaggccttctaccagaaaaccaaccaggctgcgttcaacatctgtgccaacagcagcctccacgactacgccaagatcttccccatgaacaacgccaccgtggccgtggacatttaccaggggggcgtgatcctgggctgcctgttcggccccgcggccctctacatctgggccataggtctcctggcggctgggcagagctccaccatgacgggcacctacgcgggacagttcgtgatggagggcttcctgaggctgcggtggtcacgcttcgcccgtgtcctcctcacccgctcctgcgccatcctgcccaccgtgctcgtggctgtcttccgggacctgagggacttgtcgggcctcaatgatctgctcaacgtgctgcagagcctgctgctcccgttcgccgtgctgcccatcctcacgttcaccagcatgcccaccctcatgcaggagtttgccaatggcctgctgaacaaggtcgtcacctcttccatcatggtgctagtctgcgccatcaacctctacttcgtggtcagctatctgcccagcctgccccaccctgcctacttcggccttgcagccttgctggccgcagcctacctgggcctcagcacctacctggtctggacctgttgccttgcccacggagccacctttctggcccacagctcccaccaccacttcctgtatgggctccttgaagaggaccagaaaggggagacctctggctaggcccacaccagggcctggctgggagtggcatgtatgacgtgactggcctgctggatgtggagggggcgcgtgcaggcagcaggatggagtgggacagttcctgagaccagccaacctgggggctttagggacctgctgtttcctagcgcagccatgtgattaccctctgggtctcagtgtcctcatctgtaaaatggagacaccaccacccttgccatggaggttaagcactttaacacagtgtctggcacttgggacaaaaacaaacaaacaaacaaaaaacatttcaaaaggtatttattgagcacctgcaggcgtgacctgacagcccaagggtgggtggggtgagggcttgaggacttgggcgggacacaggctccaaactggagcttgaaatagtgtctgatgaatgttaaattatctatctatctatttatttatttatttgagacagggaaagggtctccctctgttgccaaggctggagtgcagtggcgcaatcttaactcattgcaacctccaccttctgggttcaagcgattctctttattcagccccgggagtggcgcgcgcctgtagtcccaacggctcgggaggctgaggcaggaaaatcgcttgaacccgggaggcaaaggttgcggtgagccgagattttgcccctgcccccctccagcctggggacagagcgagactttgtttca

SEQ ID NO: 297934 - DNA, 3179 bp, Homo sapiens
gaatcggccgatgtgaaccgaatgttgatgtaagaggcagggcactcggctgcggatgggtaacagggcgtgggctggcacacttacttgcaccagtgcccagagagggggtgcaggctgaggagctgcccagagcaccgctcacactcccagagtacctgaagtcggcatttcaatgacaggtgacaagggtccccaaaggctaagcgggtccagctatggttccatctccagcccgaccagcccgaccagcccagggccacagcaagcacctcccagagagacctacctgagtgagaagatccccatcccagacacaaaaccgggcaccttcagcctgcggaagctatgggccttcacggggcctggcttcctcatgagcattgctttcctggacccaggaaacatcgagtcagatcttcaggctggcgccgtggcgggattcaaacttctctgggtgctgctctgggccaccgtgttgggcttgctctgccagcgactggctgcacgtctgggcgtggtgacaggcaaggacttgggcgaggtctgccatctctactaccctaaggtgccccgcaccgtcctctggctgaccatcgagctagccattgtgggctccgacatgcaggaagtcatcggcacggccattgcattcaatctgctctcagctggacgaatcccactctggggtggcgtcctcatcaccatcgtggacaccttcttcttcctcttcctcgataactacgggctgcggaagctggaagctttttttggactccttataaccattatggccttgacctttggctatgagtatgtggtggcgcgtcctgagcagggagcgcttcttcggggcctgttcctgccctcgtgcccgggctgcggccaccccgagctgctgcaggcggtgggcattgttggcgccatcatcatgccccacaacatctacctgcactcggccctggtcaagtctcgagagatagaccgggcccgccgagcggacatcagagaagccaacatgtacttcctgattgaggccaccatcgccctgtccgtctcctttatcatcaacctctttgtcatggctgtctttgggcaggccttctaccagaaaaccaaccaggctgcgttcaacatctgtgccaacagcagcctccacgactacgccaagatcttccccatgaacaacgccaccgtggccgtggacatttaccaggggggcgtgatcctgggctgcctgttcggccccgcggccctctacatctgggccataggtctcctggcggctgggcagagctccaccatgacgggcacctacgcgggacagttcgtgatggagggcttcctgaggctgcggtggtcacgcttcgcccgtgtcctcctcacccgctcctgcgccatcctgcccaccgtgctcgtggctgtcttccgggacctgagggacttgtcgggcctcaatgatctgctcaacgtgctgcagagcctgctgctcccgttcgccgtgctgcccatcctcacgttcaccagcatgcccaccctcatgcaggagtttgccaatggcctgctgaacaaggtcgtcacctcttccatcatggtgctagtctgcgccatcaacctctacttcgtggtcagctatctgcccagcctgccccaccctgcctacttcggccttgcagccttgctggccgcagcctacctgggcctcagcacctacctggtctggacctgttgccttgcccacggagccacctttctggcccacagctcccaccaccacttcctgtatgggctccttgaagaggaccagaaaggggagacctctggctaggcccacaccagggcctggctgggagtggcatcagagacggggtttgccatgctggccaggctggtctcgaactgctggattcaagtgatccgcccatctccgtctcccaaagtgctgggaattacaggcgtgagccaccaaacccggcctgattaaagttaaataaatactagttcccttctcgtccaaaggagcagggaatgggaaccgggaaggcacgaagtctctaaagcatccagaagacccctacaccagggtctggtccgctcctattcgccgcagcctttctgttccgcctgcaacccattttccagacagtaaaacggcggcgcacttctttctccgtcaggcaccaggtcataaggaacccaagagtctgtgcctctgaggcccaaattatttgctgtttcctcaggggagccggcggccgcgactcccacgccgcgccgttaccgctccctctctgctgactgctccccctaggggcagagacggtcccgacgcccgccatcccgccccggcctcacccctccccgccaggcggaacgacgcggggaggcgggcgctcggggctcgcgcccaggggccccagaatccttcggggagagtgggtgggaggaagctgtgtgggcggggagccccctctgccttagggagcggctgggcacccattcgccccattcaggggctgcactttatagacgttccctaggctgtttctaggctcccccaagtccctcctccagcctcgtcgggtccctcagaccccagcccaggacctgcggagggccgcagcgaggagaggccaacaggcctttccctagagttgaacctgggccgggtgttgcacctggaagaacccccgatttcctggggacccagcagggcaggcggcctggctccgcgctcaggtccggacgcttgtttatgagaagaatttcctctttcttaaaagggcaacgatgcgagtgggtccctcaaggagagaagagatgggaccggtctggtgcgacctgggcaagcgctgcagagggtacctgggcaagagggccgcccgcctcctctgggtttggcactggagaagatgggtccatgccagctgaaggaggagatggatgggggacgtttagcgaagaaaggcatctcccagatcctttagcctcctggaagtgcccccgttgtaccccctacacacccctcttggcattgagtgccagtcctctgccaggctctgtgttacaagttggggagggcggcaaagtcccgaattaaagatgtcagttctcaaggaccccacactccagcggcgggagacagctgtgcaaacaagtccctgtggcaggatgcggtg

SEQ ID NO: 297935 - DNA, 4047 bp, Homo sapiens
gaatcggccgatgtgaaccgaatgttgatgtaagaggcagggcactcggctgcggatgggtaacagggcgtgggctggcacacttacttgcaccagtgcccagagagggggtgcaggctgaggagctgcccagagcaccgctcacactcccagagtacctgaagtcggcatttcaatgacaggtgacaagggtccccaaaggctaagcgggtccagctatggttccatctccagcccgaccagcccgaccagcccagggccacagcaagcacctcccagagagacctacctgagtgagaagatccccatcccagacacaaaaccgcttctctgggtgctgctctgggccaccgtgttgggcttgctctgccagcgactggctgcacgtctgggcgtggtgacaggcaaggacttgggcgaggtctgccatctctactaccctaaggtgccccgcaccgtcctctggctgaccatcgagctagccattgtgggctccgacatgcaggaagtcatcggcacggccattgcattcaatctgctctcagctggacggtaccaccccagtgtaccccaactcttcaggccaggcagagaacagctgctgctacttccccccctaaccagtccctcccagagtctattttatcctgctgtcccctctgaagcagggctgctgccctgttttccagaaatgtaaagtgacttgtctaaagtcacacagatgtgagtcatgcaggactttgggactgcagccccaaactccctgctgcgccgggtgccaggtctctcctctagctctgccctgcctcgactgttctatgccacactcccactccccttgccctagctgtctgggggcgcttagggtcctgctcccaggaggccagattcctgtctccagccctgaggctccgtaggagttagagacccctggaccaggctgggctgacccgggccactctggtttcagaatcccactctggggtggcgtcctcatcaccatcgtggacaccttcttcttcctcttcctcgataactacgggctgcggaagctggaagctttttttggactccttataaccattatggccttgacctttggctatgagtatgtggtggcgcgtcctgagcagggagcgcttcttcggggcctgttcctgccctcgtgcccgggctgcggccaccccgagctgctgcaggcggtgggcattgttggcgccatcatcatgccccacaacatctacctgcactcggccctggtcaagtctcgagagatagaccgggcccgccgagcggacatcagagaagccaacatgtacttcctgattgaggccaccatcgccctgtccgtctcctttatcatcaacctctttgtcatggctgtctttgggcaggccttctaccagaaaaccaaccaggctgcgttcaacatctgtgccaacagcagcctccacgactacgccaagatcttccccatgaacaacgccaccgtggccgtggacatttaccaggggggcgtgatcctgggctgcctgttcggccccgcggccctctacatctgggccataggtctcctggcggctgggcagagctccaccatgacgggcacctacgcgggacagttcgtgatggagggcttcctgaggctgcggtggtcacgcttcgcccgtgtcctcctcacccgctcctgcgccatcctgcccaccgtgctcgtggctgtcttccgggacctgagggacttgtcgggcctcaatgatctgctcaacgtgctgcagagcctgctgctcccgttcgccgtgctgcccatcctcacgttcaccagcatgcccaccctcatgcaggagtttgccaatggcctgctgaacaaggtcgtcacctcttccatcatggtgctagtctgcgccatcaacctctacttcgtggtcagctatctgcccagcctgccccaccctgcctacttcggccttgcagccttgctggccgcagcctacctgggcctcagcacctacctggtctggacctgttgccttgcccacggagccacctttctggcccacagctcccaccaccacttcctgtatgggctccttgaagaggaccagaaaggggagacctctggctaggcccacaccagggcctggctgggagtggcatgtatgacgtgactggcctgctggatgtggagggggcgcgtgcaggcagcaggatggagtgggacagttcctgagaccagccaacctgggggctttagggacctgctgtttcctagcgcagccatgtgattaccctctgggtctcagtgtcctcatctgtaaaatggagacaccaccacccttgccatggaggttaagcactttaacacagtgtctggcacttgggacaaaaacaaacaaacaaacaaaaaacatttcaaaaggtatttattgagcacctgcaggcgtgacctgacagcccaagggtgggtggggtgagggcttgaggacttgggcgggacacaggctccaaactggagcttgaaatagtgtctgatgaatgttaaattatctatctatctatttatttatttatttgagacagggaaagggtctccctctgttgccaaggctggagtgcagtggcgcaatcttaactcattgcaacctccaccttctgggttcaagcgattctctttattcagccccgggagtggcgcgcgccaccacgcccagctaatttgtgtattttcagcagagacggggtttgccatgctggccaggctggtctcgaactgctggattcaagtgatccgcccatctccgtctcccaaagtgctgggaattacaggcgtgagccaccaaacccggcctgattaaagttaaataaatactagttcccttctcgtccaaaggagcagggaatgggaaccgggaaggcacgaagtctctaaagcatccagaagacccctacaccagggtctggtccgctcctattcgccgcagcctttctgttccgcctgcaacccattttccagacagtaaaacggcggcgcacttctttctccgtcaggcaccaggtcataaggaacccaagagtctgtgcctctgaggcccaaattatttgctgtttcctcaggggagccggcggccgcgactcccacgccgcgccgttaccgctccctctctgctgactgctccccctaggggcagagacggtcccgacgcccgccatcccgccccggcctcacccctccccgccaggcggaacgacgcggggaggcgggcgctcggggctcgcgcccaggggccccagaatccttcggggagagtgggtgggaggaagctgtgtgggcggggagccccctctgccttagggagcggctgggcacccattcgccccattcaggggctgcactttatagacgttccctaggctgtttctaggctcccccaagtccctcctccagcctcgtcgggtccctcagaccccagcccaggacctgcggagggccgcagcgaggagaggccaacaggcctttccctagagttgaacctgggccgggtgttgcacctggaagaacccccgatttcctggggacccagcagggcaggcggcctggctccgcgctcaggtccggacgcttgtttatgagaagaatttcctctttcttaaaagggcaacgatgcgagtgggtccctcaaggagagaagagatgggaccggtctggtgcgacctgggcaagcgctgcagagggtacctgggcaagagggccgcccgcctcctctgggtttggcactggagaagatgggtccatgccagctgaaggaggagatggatgggggacgtttagcgaagaaaggcatctcccagatcctttagcctcctggaagtgcccccgttgtaccccctacacacccctcttggcattgagtgccagtcctctgccaggctctgtgttacaagttggggagggcggcaaagtcccgaattaaagatgtcagttctcaaggaccccacactccagcggcgggagacagctgtgcaaacaagtccctgtggcaggatgcggtg

SEQ ID NO: 297936 - DNA, 3904 bp, Homo sapiens
gaatcggccgatgtgaaccgaatgttgatgtaagaggcagggcactcggctgcggatgggtaacagggcgtgggctggcacacttacttgcaccagtgcccagagagggggtgcaggctgaggagctgcccagagcaccgctcacactcccagagtacctgaagtcggcatttcaatgacagcttctctgggtgctgctctgggccaccgtgttgggcttgctctgccagcgactggctgcacgtctgggcgtggtgacaggcaaggacttgggcgaggtctgccatctctactaccctaaggtgccccgcaccgtcctctggctgaccatcgagctagccattgtgggctccgacatgcaggaagtcatcggcacggccattgcattcaatctgctctcagctggacggtaccaccccagtgtaccccaactcttcaggccaggcagagaacagctgctgctacttccccccctaaccagtccctcccagagtctattttatcctgctgtcccctctgaagcagggctgctgccctgttttccagaaatgtaaagtgacttgtctaaagtcacacagatgtgagtcatgcaggactttgggactgcagccccaaactccctgctgcgccgggtgccaggtctctcctctagctctgccctgcctcgactgttctatgccacactcccactccccttgccctagctgtctgggggcgcttagggtcctgctcccaggaggccagattcctgtctccagccctgaggctccgtaggagttagagacccctggaccaggctgggctgacccgggccactctggtttcagaatcccactctggggtggcgtcctcatcaccatcgtggacaccttcttcttcctcttcctcgataactacgggctgcggaagctggaagctttttttggactccttataaccattatggccttgacctttggctatgagtatgtggtggcgcgtcctgagcagggagcgcttcttcggggcctgttcctgccctcgtgcccgggctgcggccaccccgagctgctgcaggcggtgggcattgttggcgccatcatcatgccccacaacatctacctgcactcggccctggtcaagtctcgagagatagaccgggcccgccgagcggacatcagagaagccaacatgtacttcctgattgaggccaccatcgccctgtccgtctcctttatcatcaacctctttgtcatggctgtctttgggcaggccttctaccagaaaaccaaccaggctgcgttcaacatctgtgccaacagcagcctccacgactacgccaagatcttccccatgaacaacgccaccgtggccgtggacatttaccaggggggcgtgatcctgggctgcctgttcggccccgcggccctctacatctgggccataggtctcctggcggctgggcagagctccaccatgacgggcacctacgcgggacagttcgtgatggagggcttcctgaggctgcggtggtcacgcttcgcccgtgtcctcctcacccgctcctgcgccatcctgcccaccgtgctcgtggctgtcttccgggacctgagggacttgtcgggcctcaatgatctgctcaacgtgctgcagagcctgctgctcccgttcgccgtgctgcccatcctcacgttcaccagcatgcccaccctcatgcaggagtttgccaatggcctgctgaacaaggtcgtcacctcttccatcatggtgctagtctgcgccatcaacctctacttcgtggtcagctatctgcccagcctgccccaccctgcctacttcggccttgcagccttgctggccgcagcctacctgggcctcagcacctacctggtctggacctgttgccttgcccacggagccacctttctggcccacagctcccaccaccacttcctgtatgggctccttgaagaggaccagaaaggggagacctctggctaggcccacaccagggcctggctgggagtggcatgtatgacgtgactggcctgctggatgtggagggggcgcgtgcaggcagcaggatggagtgggacagttcctgagaccagccaacctgggggctttagggacctgctgtttcctagcgcagccatgtgattaccctctgggtctcagtgtcctcatctgtaaaatggagacaccaccacccttgccatggaggttaagcactttaacacagtgtctggcacttgggacaaaaacaaacaaacaaacaaaaaacatttcaaaaggtatttattgagcacctgcaggcgtgacctgacagcccaagggtgggtggggtgagggcttgaggacttgggcgggacacaggctccaaactggagcttgaaatagtgtctgatgaatgttaaattatctatctatctatttatttatttatttgagacagggaaagggtctccctctgttgccaaggctggagtgcagtggcgcaatcttaactcattgcaacctccaccttctgggttcaagcgattctctttattcagccccgggagtggcgcgcgccaccacgcccagctaatttgtgtattttcagcagagacggggtttgccatgctggccaggctggtctcgaactgctggattcaagtgatccgcccatctccgtctcccaaagtgctgggaattacaggcgtgagccaccaaacccggcctgattaaagttaaataaatactagttcccttctcgtccaaaggagcagggaatgggaaccgggaaggcacgaagtctctaaagcatccagaagacccctacaccagggtctggtccgctcctattcgccgcagcctttctgttccgcctgcaacccattttccagacagtaaaacggcggcgcacttctttctccgtcaggcaccaggtcataaggaacccaagagtctgtgcctctgaggcccaaattatttgctgtttcctcaggggagccggcggccgcgactcccacgccgcgccgttaccgctccctctctgctgactgctccccctaggggcagagacggtcccgacgcccgccatcccgccccggcctcacccctccccgccaggcggaacgacgcggggaggcgggcgctcggggctcgcgcccaggggccccagaatccttcggggagagtgggtgggaggaagctgtgtgggcggggagccccctctgccttagggagcggctgggcacccattcgccccattcaggggctgcactttatagacgttccctaggctgtttctaggctcccccaagtccctcctccagcctcgtcgggtccctcagaccccagcccaggacctgcggagggccgcagcgaggagaggccaacaggcctttccctagagttgaacctgggccgggtgttgcacctggaagaacccccgatttcctggggacccagcagggcaggcggcctggctccgcgctcaggtccggacgcttgtttatgagaagaatttcctctttcttaaaagggcaacgatgcgagtgggtccctcaaggagagaagagatgggaccggtctggtgcgacctgggcaagcgctgcagagggtacctgggcaagagggccgcccgcctcctctgggtttggcactggagaagatgggtccatgccagctgaaggaggagatggatgggggacgtttagcgaagaaaggcatctcccagatcctttagcctcctggaagtgcccccgttgtaccccctacacacccctcttggcattgagtgccagtcctctgccaggctctgtgttacaagttggggagggcggcaaagtcccgaattaaagatgtcagttctcaaggaccccacactccagcggcgggagacagctgtgcaaacaagtccctgtggcaggatgcggtg

SEQ ID NO: 297937 - DNA, 3826 bp, Homo sapiens
gaatcggccgatgtgaaccgaatgttgatgtaagaggcagggcactcggctgcggatgggtaacagggcgtgggctggcacacttacttgcaccagtgcccagagagggggtgcaggctgaggagctgcccagagcaccgctcacactcccagagtacctgaagtcggcatttcaatgacaggtgacaagggtccccaaaggctaagcgggtccagctatggttccatctccagcccgaccagcccgaccagcccagggccacagcaagcacctcccagagagacctacctgagtgagaagatccccatcccagacacaaaaccgggcaccttcagcctgcggaagctatgggccttcacggggcctggcttcctcatgagcattgctttcctggacccaggaaacatcgagtcagatcttcaggctggcgccgtggcgggattcaaacttctctgggtgctgctctgggccaccgtgttgggcttgctctgccagcgactggctgcacgtctgggcgtggtgacaggcaaggacttgggcgaggtctgccatctctactaccctaagtcggagtctcgctccgtcgcccagtcaggagtgcaatggtgcgatgtcagctcactgcaacctctacctcccaggtgccccgcaccgtcctctggctgaccatcgagctagccattgtgggctccgacatgcaggaagtcatcggcacggccattgcattcaatctgctctcagctggacgaatcccactctggggtggcgtcctcatcaccatcgtggacaccttcttcttcctcttcctcgataactacgggctgcggaagctggaagctttttttggactccttataaccattatggccttgacctttggctatgagtatgtggtggcgcgtcctgagcagggagcgcttcttcggggcctgttcctgccctcgtgcccgggctgcggccaccccgagctgctgcaggcggtgggcattgttggcgccatcatcatgccccacaacatctacctgcactcggccctggtcaagtctcgagagatagaccgggcccgccgagcggacatcagagaagccaacatgtacttcctgattgaggccaccatcgccctgtccgtctcctttatcatcaacctctttgtcatggctgtctttgggcaggccttctaccagaaaaccaaccaggctgcgttcaacatctgtgccaacagcagcctccacgactacgccaagatcttccccatgaacaacgccaccgtggccgtggacatttaccaggggggcgtgatcctgggctgcctgttcggccccgcggccctctacatctgggccataggtctcctggcggctgggcagagctccaccatgacgggcacctacgcgggacagttcgtgatggagggcttcctgaggctgcggtggtcacgcttcgcccgtgtcctcctcacccgctcctgcgccatcctgcccaccgtgctcgtggctgtcttccgggacctgagggacttgtcgggcctcaatgatctgctcaacgtgctgcagagcctgctgctcccgttcgccgtgctgcccatcctcacgttcaccagcatgcccaccctcatgcaggagtttgccaatggcctgctgaacaaggtcgtcacctcttccatcatggtgctagtctgcgccatcaacctctacttcgtggtcagctatctgcccagcctgccccaccctgcctacttcggccttgcagccttgctggccgcagcctacctgggcctcagcacctacctggtctggacctgttgccttgcccacggagccacctttctggcccacagctcccaccaccacttcctgtatgggctccttgaagaggaccagaaaggggagacctctggctaggcccacaccagggcctggctgggagtggcatgtatgacgtgactggcctgctggatgtggagggggcgcgtgcaggcagcaggatggagtgggacagttcctgagaccagccaacctgggggctttagggacctgctgtttcctagcgcagccatgtgattaccctctgggtctcagtgtcctcatctgtaaaatggagacaccaccacccttgccatggaggttaagcactttaacacagtgtctggcacttgggacaaaaacaaacaaacaaacaaaaaacatttcaaaaggtatttattgagcacctgcaggcgtgacctgacagcccaagggtgggtggggtgagggcttgaggacttgggcgggacacaggctccaaactggagcttgaaatagtgtctgatgaatgttaaattatctatctatctatttatttatttatttgagacagggaaagggtctccctctgttgccaaggctggagtgcagtggcgcaatcttaactcattgcaacctccaccttctgggttcaagcgattctctttattcagccccgggagtggcgcgcgccaccacgcccagctaatttgtgtattttcagcagagacggggtttgccatgctggccaggctggtctcgaactgctggattcaagtgatccgcccatctccgtctcccaaagtgctgggaattacaggcgtgagccaccaaacccggcctgattaaagttaaataaatactagttcccttctcgtccaaaggagcagggaatgggaaccgggaaggcacgaagtctctaaagcatccagaagacccctacaccagggtctggtccgctcctattcgccgcagcctttctgttccgcctgcaacccattttccagacagtaaaacggcggcgcacttctttctccgtcaggcaccaggtcataaggaacccaagagtctgtgcctctgaggcccaaattatttgctgtttcctcaggggagccggcggccgcgactcccacgccgcgccgttaccgctccctctctgctgactgctccccctaggggcagagacggtcccgacgcccgccatcccgccccggcctcacccctccccgccaggcggaacgacgcggggaggcgggcgctcggggctcgcgcccaggggccccagaatccttcggggagagtgggtgggaggaagctgtgtgggcggggagccccctctgccttagggagcggctgggcacccattcgccccattcaggggctgcactttatagacgttccctaggctgtttctaggctcccccaagtccctcctccagcctcgtcgggtccctcagaccccagcccaggacctgcggagggccgcagcgaggagaggccaacaggcctttccctagagttgaacctgggccgggtgttgcacctggaagaacccccgatttcctggggacccagcagggcaggcggcctggctccgcgctcaggtccggacgcttgtttatgagaagaatttcctctttcttaaaagggcaacgatgcgagtgggtccctcaaggagagaagagatgggaccggtctggtgcgacctgggcaagcgctgcagagggtacctgggcaagagggccgcccgcctcctctgggtttggcactggagaagatgggtccatgccagctgaaggaggagatggatgggggacgtttagcgaagaaaggcatctcccagatcctttagcctcctggaagtgcccccgttgtaccccctacacacccctcttggcattgagtgccagtcctctgccaggctctgtgttacaagttggggagggcggcaaagtcccgaattaaagatgtcagttctcaaggaccccacactccagcggcgggagacagctgtgcaaacaagtccctgtggcaggatgcggtg

SEQ ID NO: 297938 - DNA, 3761 bp, Homo sapiens
gaatcggccgatgtgaaccgaatgttgatgtaagaggcagggcactcggctgcggatgggtaacagggcgtgggctggcacacttacttgcaccagtgcccagagagggggtgcaggctgaggagctgcccagagcaccgctcacactcccagagtacctgaagtcggcatttcaatgacaggtgacaagggtccccaaaggctaagcgggtccagctatggttccatctccagcccgaccagcccgaccagcccagggccacagcaagcacctcccagagagacctacctgagtgagaagatccccatcccagacacaaaaccgggcaccttcagcctgcggaagctatgggccttcacggggcctggcttcctcatgagcattgctttcctggacccaggaaacatcgagtcagatcttcaggctggcgccgtggcgggattcaaacttctctgggtgctgctctgggccaccgtgttgggcttgctctgccagcgactggctgcacgtctgggcgtggtgacaggcaaggacttgggcgaggtctgccatctctactaccctaaggtgccccgcaccgtcctctggctgaccatcgagctagccattgtgggctccgacatgcaggaagtcatcggcacggccattgcattcaatctgctctcagctggacgaatcccactctggggtggcgtcctcatcaccatcgtggacaccttcttcttcctcttcctcgataactacgggctgggggaaagctggaaagctttcgtcgggacttccttatagccattattggccttgaaccttggggctatgcagtatgtggtggcgcgtcctgagcagggagcgcttcttcggggcctgttcctgccctcgtgcccgggctgcggccaccccgagctgctgcaggcggtgggcattgttggcgccatcatcatgccccacaacatctacctgcactcggccctggtcaagtctcgagagatagaccgggcccgccgagcggacatcagagaagccaacatgtacttcctgattgaggccaccatcgccctgtccgtctcctttatcatcaacctctttgtcatggctgtctttgggcaggccttctaccagaaaaccaaccaggctgcgttcaacatctgtgccaacagcagcctccacgactacgccaagatcttccccatgaacaacgccaccgtggccgtggacatttaccaggggggcgtgatcctgggctgcctgttcggccccgcggccctctacatctgggccataggtctcctggcggctgggcagagctccaccatgacgggcacctacgcgggacagttcgtgatggagggcttcctgaggctgcggtggtcacgcttcgcccgtgtcctcctcacccgctcctgcgccatcctgcccaccgtgctcgtggctgtcttccgggacctgagggacttgtcgggcctcaatgatctgctcaacgtgctgcagagcctgctgctcccgttcgccgtgctgcccatcctcacgttcaccagcatgcccaccctcatgcaggagtttgccaatggcctgctgaacaaggtcgtcacctcttccatcatggtgctagtctgcgccatcaacctctacttcgtggtcagctatctgcccagcctgccccaccctgcctacttcggccttgcagccttgctggccgcagcctacctgggcctcagcacctacctggtctggacctgttgccttgcccacggagccacctttctggcccacagctcccaccaccacttcctgtatgggctccttgaagaggaccagaaaggggagacctctggctaggcccacaccagggcctggctgggagtggcatgtatgacgtgactggcctgctggatgtggagggggcgcgtgcaggcagcaggatggagtgggacagttcctgagaccagccaacctgggggctttagggacctgctgtttcctagcgcagccatgtgattaccctctgggtctcagtgtcctcatctgtaaaatggagacaccaccacccttgccatggaggttaagcactttaacacagtgtctggcacttgggacaaaaacaaacaaacaaacaaaaaacatttcaaaaggtatttattgagcacctgcaggcgtgacctgacagcccaagggtgggtggggtgagggcttgaggacttgggcgggacacaggctccaaactggagcttgaaatagtgtctgatgaatgttaaattatctatctatctatttatttatttatttgagacagggaaagggtctccctctgttgccaaggctggagtgcagtggcgcaatcttaactcattgcaacctccaccttctgggttcaagcgattctctttattcagccccgggagtggcgcgcgccaccacgcccagctaatttgtgtattttcagcagagacggggtttgccatgctggccaggctggtctcgaactgctggattcaagtgatccgcccatctccgtctcccaaagtgctgggaattacaggcgtgagccaccaaacccggcctgattaaagttaaataaatactagttcccttctcgtccaaaggagcagggaatgggaaccgggaaggcacgaagtctctaaagcatccagaagacccctacaccagggtctggtccgctcctattcgccgcagcctttctgttccgcctgcaacccattttccagacagtaaaacggcggcgcacttctttctccgtcaggcaccaggtcataaggaacccaagagtctgtgcctctgaggcccaaattatttgctgtttcctcaggggagccggcggccgcgactcccacgccgcgccgttaccgctccctctctgctgactgctccccctaggggcagagacggtcccgacgcccgccatcccgccccggcctcacccctccccgccaggcggaacgacgcggggaggcgggcgctcggggctcgcgcccaggggccccagaatccttcggggagagtgggtgggaggaagctgtgtgggcggggagccccctctgccttagggagcggctgggcacccattcgccccattcaggggctgcactttatagacgttccctaggctgtttctaggctcccccaagtccctcctccagcctcgtcgggtccctcagaccccagcccaggacctgcggagggccgcagcgaggagaggccaacaggcctttccctagagttgaacctgggccgggtgttgcacctggaagaacccccgatttcctggggacccagcagggcaggcggcctggctccgcgctcaggtccggacgcttgtttatgagaagaatttcctctttcttaaaagggcaacgatgcgagtgggtccctcaaggagagaagagatgggaccggtctggtgcgacctgggcaagcgctgcagagggtacctgggcaagagggccgcccgcctcctctgggtttggcactggagaagatgggtccatgccagctgaaggaggagatggatgggggacgtttagcgaagaaaggcatctcccagatcctttagcctcctggaagtgcccccgttgtaccccctacacacccctcttggcattgagtgccagtcctctgccaggctctgtgttacaagttggggagggcggcaaagtcccgaattaaagatgtcagttctcaaggaccccacactccagcggcgggagacagctgtgcaaacaagtccctgtggcaggatgcggtg

SEQ ID NO: 297939 - DNA, 2900 bp, Homo sapiens
accagcctaatttttgtatttttagaggggtggagttccaccatgttggccaggctggtctcgaactcctgggctcaagtgatcttcccgccttggcttcccaaagtgctgggattacagacgtgagccaccccactcagctttgtttccttcatgtagcccagagggcgacactataagccccattttacagatgagaaaacagatcctgacagatgaggtgacttgctggaagctgcagacccaggactaacagaagccttttccccaaaactgtttagtcttcagcaaccagctatgggatgggagctccccatttctccccacccatcccctcttgccacctagggacagagctgtcccagttcaacagtggaaaaacagagcatgcccccagggataaatcggttgagggactacagaggatctctcctctggaatccccagtcctgtctactcctcaccaaggagctcacccccaccccagggcttcctgaggctgcggtggtcacgcttcgcccgtgtcctcctcacccgctcctgcgccatcctgcccaccgtgctcgtggctgtcttccgggacctgagggacttgtcgggcctcaatgatctgctcaacgtgctgcagagcctgctgctcccgttcgccgtgctgcccatcctcacgttcaccagcatgcccaccctcatgcaggagtttgccaatggcctgctgaacaaggtcgtcacctcttccatcatggtgctagtctgcgccatcaacctctacttcgtggtcagctatctgcccagcctgccccaccctgcctacttcggccttgcagccttgctggccgcagcctacctgggcctcagcacctacctggtctggacctgttgccttgcccacggagccacctttctggcccacagctcccaccaccacttcctgtatgggctccttgaagaggaccagaaaggggagacctctggctaggcccacaccagggcctggctgggagtggcatgtatgacgtgactggcctgctggatgtggagggggcgcgtgcaggcagcaggatggagtgggacagttcctgagaccagccaacctgggggctttagggacctgctgtttcctagcgcagccatgtgattaccctctgggtctcagtgtcctcatctgtaaaatggagacaccaccacccttgccatggaggttaagcactttaacacagtgtctggcacttgggacaaaaacaaacaaacaaacaaaaaacatttcaaaaggtatttattgagcacctgcaggcgtgacctgacagcccaagggtgggtggggtgagggcttgaggacttgggcgggacacaggctccaaactggagcttgaaatagtgtctgatgaatgttaaattatctatctatctatttatttatttatttgagacagggaaagggtctccctctgttgccaaggctggagtgcagtggcgcaatcttaactcattgcaacctccaccttctgggttcaagcgattctctttattcagccccgggagtggcgcgcgccaccacgcccagctaatttgtgtattttcagcagagacggggtttgccatgctggccaggctggtctcgaactgctggattcaagtgatccgcccatctccgtctcccaaagtgctgggaattacaggcgtgagccaccaaacccggcctgattaaagttaaataaatactagttcccttctcgtccaaaggagcagggaatgggaaccgggaaggcacgaagtctctaaagcatccagaagacccctacaccagggtctggtccgctcctattcgccgcagcctttctgttccgcctgcaacccattttccagacagtaaaacggcggcgcacttctttctccgtcaggcaccaggtcataaggaacccaagagtctgtgcctctgaggcccaaattatttgctgtttcctcaggggagccggcggccgcgactcccacgccgcgccgttaccgctccctctctgctgactgctccccctaggggcagagacggtcccgacgcccgccatcccgccccggcctcacccctccccgccaggcggaacgacgcggggaggcgggcgctcggggctcgcgcccaggggccccagaatccttcggggagagtgggtgggaggaagctgtgtgggcggggagccccctctgccttagggagcggctgggcacccattcgccccattcaggggctgcactttatagacgttccctaggctgtttctaggctcccccaagtccctcctccagcctcgtcgggtccctcagaccccagcccaggacctgcggagggccgcagcgaggagaggccaacaggcctttccctagagttgaacctgggccgggtgttgcacctggaagaacccccgatttcctggggacccagcagggcaggcggcctggctccgcgctcaggtccggacgcttgtttatgagaagaatttcctctttcttaaaagggcaacgatgcgagtgggtccctcaaggagagaagagatgggaccggtctggtgcgacctgggcaagcgctgcagagggtacctgggcaagagggccgcccgcctcctctgggtttggcactggagaagatgggtccatgccagctgaaggaggagatggatgggggacgtttagcgaagaaaggcatctcccagatcctttagcctcctggaagtgcccccgttgtaccccctacacacccctcttggcattgagtgccagtcctctgccaggctctgtgttacaagttggggagggcggcaaagtcccgaattaaagatgtcagttctcaaggaccccacactccagcggcgggagacagctgtgcaaacaagtccctgtggcaggatgcggtg

SEQ ID NO: 297940 - DNA, 2846 bp, Homo sapiens
accagcctaatttttgtatttttagaggggtggagttccaccatgttggccaggctggtctcgaactcctgggctcaagtgatcttcccgccttggcttcccaaagtgctgggattacagacgtgagccaccccactcagctttgtttccttcatgtagcccagagggcgacactataagccccattttacagatgagaaaacagatcctgacagatgaggtgacttgctggaagctgcagacccaggactaacagaagccttttccccaaaactgtttagtcttcagcaaccagctatgggatgggagctccccatttctccccacccatcccctcttgccacctagggacagagctgtcccagttcaacagtggacctctggaatccccagtcctgtctactcctcaccaaggagctcacccccaccccagggcttcctgaggctgcggtggtcacgcttcgcccgtgtcctcctcacccgctcctgcgccatcctgcccaccgtgctcgtggctgtcttccgggacctgagggacttgtcgggcctcaatgatctgctcaacgtgctgcagagcctgctgctcccgttcgccgtgctgcccatcctcacgttcaccagcatgcccaccctcatgcaggagtttgccaatggcctgctgaacaaggtcgtcacctcttccatcatggtgctagtctgcgccatcaacctctacttcgtggtcagctatctgcccagcctgccccaccctgcctacttcggccttgcagccttgctggccgcagcctacctgggcctcagcacctacctggtctggacctgttgccttgcccacggagccacctttctggcccacagctcccaccaccacttcctgtatgggctccttgaagaggaccagaaaggggagacctctggctaggcccacaccagggcctggctgggagtggcatgtatgacgtgactggcctgctggatgtggagggggcgcgtgcaggcagcaggatggagtgggacagttcctgagaccagccaacctgggggctttagggacctgctgtttcctagcgcagccatgtgattaccctctgggtctcagtgtcctcatctgtaaaatggagacaccaccacccttgccatggaggttaagcactttaacacagtgtctggcacttgggacaaaaacaaacaaacaaacaaaaaacatttcaaaaggtatttattgagcacctgcaggcgtgacctgacagcccaagggtgggtggggtgagggcttgaggacttgggcgggacacaggctccaaactggagcttgaaatagtgtctgatgaatgttaaattatctatctatctatttatttatttatttgagacagggaaagggtctccctctgttgccaaggctggagtgcagtggcgcaatcttaactcattgcaacctccaccttctgggttcaagcgattctctttattcagccccgggagtggcgcgcgccaccacgcccagctaatttgtgtattttcagcagagacggggtttgccatgctggccaggctggtctcgaactgctggattcaagtgatccgcccatctccgtctcccaaagtgctgggaattacaggcgtgagccaccaaacccggcctgattaaagttaaataaatactagttcccttctcgtccaaaggagcagggaatgggaaccgggaaggcacgaagtctctaaagcatccagaagacccctacaccagggtctggtccgctcctattcgccgcagcctttctgttccgcctgcaacccattttccagacagtaaaacggcggcgcacttctttctccgtcaggcaccaggtcataaggaacccaagagtctgtgcctctgaggcccaaattatttgctgtttcctcaggggagccggcggccgcgactcccacgccgcgccgttaccgctccctctctgctgactgctccccctaggggcagagacggtcccgacgcccgccatcccgccccggcctcacccctccccgccaggcggaacgacgcggggaggcgggcgctcggggctcgcgcccaggggccccagaatccttcggggagagtgggtgggaggaagctgtgtgggcggggagccccctctgccttagggagcggctgggcacccattcgccccattcaggggctgcactttatagacgttccctaggctgtttctaggctcccccaagtccctcctccagcctcgtcgggtccctcagaccccagcccaggacctgcggagggccgcagcgaggagaggccaacaggcctttccctagagttgaacctgggccgggtgttgcacctggaagaacccccgatttcctggggacccagcagggcaggcggcctggctccgcgctcaggtccggacgcttgtttatgagaagaatttcctctttcttaaaagggcaacgatgcgagtgggtccctcaaggagagaagagatgggaccggtctggtgcgacctgggcaagcgctgcagagggtacctgggcaagagggccgcccgcctcctctgggtttggcactggagaagatgggtccatgccagctgaaggaggagatggatgggggacgtttagcgaagaaaggcatctcccagatcctttagcctcctggaagtgcccccgttgtaccccctacacacccctcttggcattgagtgccagtcctctgccaggctctgtgttacaagttggggagggcggcaaagtcccgaattaaagatgtcagttctcaaggaccccacactccagcggcgggagacagctgtgcaaacaagtccctgtggcaggatgcggtg

SEQ ID NO: 297941 - DNA, 1983 bp, Homo sapiens
gaatcggccgatgtgaaccgaatgttgatgtaagaggcagggcactcggctgcggatgggtaacagggcgtgggctggcacacttacttgcaccagtgcccagagagggggtgcaggctgaggagctgcccagagcaccgctcacactcccagagtacctgaagtcggcatttcaatgacaggtgacaagggtccccaaaggctaagcgggtccagctatggttccatctccagcccgaccagcccgaccagcccagggccacagcaagcacctcccagagagacctacctgagtgagaagatccccatcccagacacaaaaccgggcaccttcagcctgcggaagctatgggccttcacggggcctggcttcctcatgagcattgctttcctggacccaggaaacatcgagtcagatcttcaggctggcgccgtggcgggattcaaacttctctgggtgctgctctgggccaccgtgttgggcttgctctgccagcgactggctgcacgtctgggcgtggtgacaggcaaggacttgggcgaggtctgccatctctactaccctaaggtgccccgcaccgtcctctggctgaccatcgagctagccattgtgggctccgacatgcaggaagtcatcggcacggccattgcattcaatctgctctcagctggacgaatcccactctggggtggcgtcctcatcaccatcgtggacaccttcttcttcctcttcctcgataactacgggctgcggaagctggaagctttttttggactccttataaccattatggccttgacctttggctatgagtatgtggtggcgcgtcctgagcagggagcgcttcttcggggcctgttcctgccctcgtgcccgggctgcggccaccccgagctgctgcaggcggtgggcattgttggcgccatcatcatgccccacaacatctacctgcactcggccctggtcaagtctcgagagatagaccgggcccgccgagcggacatcagagaagccaacatgtacttcctgattgaggccaccatcgccctgtccgtctcctttatcatcaacctctttgtcatggctgtctttgggcaggccttctaccagaaaaccaaccaggctgcggtgagacacactttcccccgcacctgaggccacacacgtactcatgtcctgtaagccttgccgaggaccctaggcaatgcagctgagcccttctgagtctctgccctgatgatcttccctgttggcagatatcattcattcagcaaataatcattgagcatttgttatataccaagcacatcctagaccctggggatacagcagtcaatgctacaaagacccagctctctgcagcttaaatagggagggaggtgagcagacaggaatgaatacccaagggaagtacagagtgggaagaaataaagggggtgaagaagcatagttgggggtatgggggtggggtctgcattagcccaggtggtcaggaaaggcttcttggaagagatgacatttgtgctaatactggaaaaggaactagccagctcctccctgactctctgggatctgggacctgtgtctgtctccccttctgagtggatctcagtcatgaggctctaacaactgcagccagggttgggggcttcctgaatgctgagccctgtgggagaaggggtggccaggcctccaaggacctgggcactgccactgccttgctctgtgaccttgggaggtcacactcctccctgggtctcactctgttccttggcacaaggagggagatcaacatcaggactgcaaacccttgtcttcaagaccaggcaggcgcagagttgtgggaagtggacagtgtgaagagggcatggcagccagctgtctctgtggtgatgccagctcttacgaacctaaaagaagctggaaactgggttcttatgccaggccttctcaattttaaatgttggcaacaaatccacatt

SEQ ID NO: 297942 - DNA, 550 bp, Homo sapiens
caggtgtgagccaccttgcctggcgtaatttatttatttatttagagatgggggtctcactatgttgctcaggctgctcttgaactcctggactcaagcaatcctcccaccttagccttttaaagtgctgggattacagggtgagctaccagcgcccagccaggatgggactccatctctcccaccccctccccgaggagtatgcttggttagagggtaccacgagctcaggggctttctgaggctggcctctctggctgaaggcctctccctgcctcctcacagcttctctgggtgctgctctgggccaccgtgttgggcttgctctgccagcgactggctgcacgtctgggcgtggtgacaggcaaggacttgggcgaggtctgccatctctactaccctaaggtgagcttggggggcctggacagggagaaccactggccccaaaccccaaacagccattttcagcttccacgatcaaataaatacatcatctcacatggggcatcccaagtctgtttgtttttgttgttgtttgtttgtttttcag

SEQ ID NO: 297943 - DNA, 513 bp, Homo sapiens
ttccacccattttatagatgagggaactgagcttcagagaggctgggtgggccaggttcacctgggtagctgtaaacccaaggacggatggaagtggagcagcatggctttcacagcgtgcccagtgtactcagagtgaccccagagtctgagaagtccctgagcatctgtctccctcgactccaagtcaggaataccgtgggcttcctgccctcaccccacacctcaagaccatcccactgcttgcctgcttgccccctgccatctcgcactcagccctgggtgcctgtgaagcctggccccactgcctgccgggggttcctgcagcacccccctactccaggctccccatctccctgaagcttccagggtagcagctggtgggacactgatctgtgagctctggaatgtctgcttagaattctgagaggcaggaactgctctgtctttgtaactactcaaggccaactgtcacatgaaggaatgaataaagagtttttactgacttgtgca

SEQ ID NO: 297944 - DNA, 1505 bp, Homo sapiens
atgcagctggtacggtctgggagttacggatggagccgtgggacgagggcggcgatggcgtcccatgtagagtgccgtcctctgggagtgtttgagtgtgaactctgtaccttgacagctccgtacagctatgtgggacagaagccccccaacacccagtcgatggtcctcctggaggaaagctatgtcatgaaggatcccttcacctccgacaaggacagattcctggtcctcggctcgtgctgcagtttgtgcagcaggctggtgtgtgtgggcccggaatgcagtttattctactccaagagattctgcctcccttgtgtccgggagaacatcaatgcttttcctcaggaaattcggcaagacttggagaaaaggaaagctccatcaaagaggacccccagccagcccggttctcggacgtgagtgcaactggggctaggtcatcgggcggcaccctgcacagagctcctgggccagcctgcgccagggatgctgctgagctgggagccgccatgcctggccttgtttctggaccactgggagcagcactgcagcccaggggagctggagtccagcttggagcagccacaggcccagggagctgtagcaagagggtagtccaaaggcagatgccagacaagacacagccaggaacccggccaggtccccccacatgcccctcagggcccaggcctgagtgagtgctgctcagatgtgactgagagggatgacctccttcagcagggcagctcctaagaggctgcgtgcaggtgcgtgtggggggagatgccacactgtgtcggggccatggtgcactgtaggtggctgcaatggtctctctgtaaggaaaatcactgacagcagctccttctggacccagtctggaaggtctagagggggatagaatttttatttcatatccttatgtggtgcttggaaaatgtttttaaccttgaccatgtattatgtttataattaaaaacccaaagaaccagctcatgtttggaaaaggaatcttccactgaaacatttggatacccgacgttctccctggacacttggcccggcaatagttggggtctcctgggaagctgagtgctggcttctagcctctccagttccctcagactctgtcttcagctcgggcccctccgttctgtctccctcgactccaagtcaggaataccgtgggcttcctgccctcaccccacacctcaagaccatcccactgcttgcctgcttgccccctgccatctcgcactcagccctgggtgcctgtgaagcctggccccactgcctgccgggggttcctgcagcacccccctactccaggctccccatctccctgaagcttccagggtagcagctggtgggacactgatctgtgagctctggaatgtctgcttagaattctgagaggcaggaactgctctgtctttgtaactactcaaggccaactgtcacatgaaggaatgaataaagagtttttactgacttgtgca

SEQ ID NO: 297945 - DNA, 1794 bp, Homo sapiens
tgactggggcgagcgtgctgtggcccttccctgcgctgcctcagggtgcctcccgctcgccgggactgagttccgcgccggcgtggcctgctgggttccaagcgccaggagtcggcgcagccgctctcagctttggggacgggaccgagaagcggggtgtgggcctcacgggactgtcccccctgacctcgggcagcgctggggcgagagagggcaggcggaggctcgcggggaccaccagcatccccggaccctctcagccgtccctgttcacaggcgccgcccccaggagcctcggcaggggcctaggacgccccggcgtgcagaagagaagcgggatcagatggcgtcccatgtagagtgccgtcctctgggagtgtttgagtgtgaactctgtaccttgacagctccgtacagctatgtgggacagaagccccccaacacccagtcgatggtcctcctggaggaaagctatgtcatgaaggatcccttcacctccgacaaggacagattcctggtcctcggctcgtgctgcagtttgtgcagcaggctggtgtgtgtgggcccggaatgcagtttattctactccaagagattctgcctcccttgtgtccgggagaacatcaatgcttttcctcaggaaattcggcaagacttggagaaaaggaaagctccatcaaagaggacccccagccagcccggttctcggacgtgagtgcaactggggctaggtcatcgggcggcaccctgcacagagctcctgggccagcctgcgccagggatgctgctgagctgggagccgccatgcctggccttgtttctggaccactgggagcagcactgcagcccaggggagctggagtccagcttggagcagccacaggcccagggagctgtagcaagagggtagtccaaaggcagatgccagacaagacacagccaggaacccggccaggtccccccacatgcccctcagggcccaggcctgagtgagtgctgctcagatgtgactgagagggatgacctccttcagcagggcagctcctaagaggctgcgtgcaggtgcgtgtggggggagatgccacactgtgtcggggccatggtgcactgtaggtggctgcaatggtctctctgtaaggaaaatcactgacagcagctccttctggacccagtctggaaggtctagagggggatagaatttttatttcatatccttatgtggtgcttggaaaatgtttttaaccttgaccatgtattatgtttataattaaaaacccaaagaaccagctcatgtttggaaaaggaatcttccactgaaacatttggatacccgacgttctccctggacacttggcccggcaatagttggggtctcctgggaagctgagtgctggcttctagcctctccagttccctcagactctgtcttcagctcgggcccctccgttctgtctccctcgactccaagtcaggaataccgtgggcttcctgccctcaccccacacctcaagaccatcccactgcttgcctgcttgccccctgccatctcgcactcagccctgggtgcctgtgaagcctggccccactgcctgccgggggttcctgcagcacccccctactccaggctccccatctccctgaagcttccagggtagcagctggtgggacactgatctgtgagctctggaatgtctgcttagaattctgagaggcaggaactgctctgtctttgtaactactcaaggccaactgtcacatgaaggaatgaataaagagtttttactgacttgtgca

SEQ ID NO: 297946 - DNA, 1376 bp, Homo sapiens
aggcgccttggacgcggagccgtgggacgagggcggcgcctcctggaggaaagctatgtcatgaaggatcccttcacctccgacaaggacagattcctggtcctcggctcgtgctgcagtttgtgcagcaggctggtgtgtgtgggcccggaatgcagtttattctactccaagagattctgcctcccttgtgtccgggagaacatcaatgcttttcctcaggaaattcggcaagacttggagaaaaggaaagctccatcaaagaggacccccagccagcccggttctcggacgtgagtgcaactggggctaggtcatcgggcggcaccctgcacagagctcctgggccagcctgcgccagggatgctgctgagctgggagccgccatgcctggccttgtttctggaccactgggagcagcactgcagcccaggggagctggagtccagcttggagcagccacaggcccagggagctgtagcaagagggtagtccaaaggcagatgccagacaagacacagccaggaacccggccaggtccccccacatgcccctcagggcccaggcctgagtgagtgctgctcagatgtgactgagagggatgacctccttcagcagggcagctcctaagaggctgcgtgcaggtgcgtgtggggggagatgccacactgtgtcggggccatggtgcactgtaggtggctgcaatggtctctctgtaaggaaaatcactgacagcagctccttctggacccagtctggaaggtctagagggggatagaatttttatttcatatccttatgtggtgcttggaaaatgtttttaaccttgaccatgtattatgtttataattaaaaacccaaagaaccagctcatgtttggaaaaggaatcttccactgaaacatttggatacccgacgttctccctggacacttggcccggcaatagttggggtctcctgggaagctgagtgctggcttctagcctctccagttccctcagactctgtcttcagctcgggcccctccgttctgtctccctcgactccaagtcaggaataccgtgggcttcctgccctcaccccacacctcaagaccatcccactgcttgcctgcttgccccctgccatctcgcactcagccctgggtgcctgtgaagcctggccccactgcctgccgggggttcctgcagcacccccctactccaggctccccatctccctgaagcttccagggtagcagctggtgggacactgatctgtgagctctggaatgtctgcttagaattctgagaggcaggaactgctctgtctttgtaactactcaaggccaactgtcacatgaaggaatgaataaagagtttttactgacttgtgca

SEQ ID NO: 297947 - DNA, 1393 bp, Homo sapiens
atgcagctggtacggtctgggagttacggatggagccgtgggacgagggcggcgatggcgtcccatgtagagtgccgtcctctgggagtgtttgagtgtgaactctgtaccttgacagctccgtacagctatgtgggacagaagccccccaacacccagtcgatggtgaatgcagtttattctactccaagagattctgcctcccttgtgtccgggagaacatcaatgcttttcctcaggaaattcggcaagacttggagaaaaggaaagctccatcaaagaggacccccagccagcccggttctcggacgtgagtgcaactggggctaggtcatcgggcggcaccctgcacagagctcctgggccagcctgcgccagggatgctgctgagctgggagccgccatgcctggccttgtttctggaccactgggagcagcactgcagcccaggggagctggagtccagcttggagcagccacaggcccagggagctgtagcaagagggtagtccaaaggcagatgccagacaagacacagccaggaacccggccaggtccccccacatgcccctcagggcccaggcctgagtgagtgctgctcagatgtgactgagagggatgacctccttcagcagggcagctcctaagaggctgcgtgcaggtgcgtgtggggggagatgccacactgtgtcggggccatggtgcactgtaggtggctgcaatggtctctctgtaaggaaaatcactgacagcagctccttctggacccagtctggaaggtctagagggggatagaatttttatttcatatccttatgtggtgcttggaaaatgtttttaaccttgaccatgtattatgtttataattaaaaacccaaagaaccagctcatgtttggaaaaggaatcttccactgaaacatttggatacccgacgttctccctggacacttggcccggcaatagttggggtctcctgggaagctgagtgctggcttctagcctctccagttccctcagactctgtcttcagctcgggcccctccgttctgtctccctcgactccaagtcaggaataccgtgggcttcctgccctcaccccacacctcaagaccatcccactgcttgcctgcttgccccctgccatctcgcactcagccctgggtgcctgtgaagcctggccccactgcctgccgggggttcctgcagcacccccctactccaggctccccatctccctgaagcttccagggtagcagctggtgggacactgatctgtgagctctggaatgtctgcttagaattctgagaggcaggaactgctctgtctttgtaactactcaaggccaactgtcacatgaaggaatgaataaagagtttttactgacttgtgca

SEQ ID NO: 297948 - DNA, 1612 bp, Homo sapiens
aggcgccttggacgcggagccgtgggacgagggcggcgatggcgtcccatgtagagtgccgtcctctgggagtgtttgagtgtgaactctgtaccttgacagctccgtacagctatgtgggacagaagccccccaacacccagtcgatggtcctcctggaggaaagctatgtcatgaaggatcccttcacctccgacaaggacagattcctggtcctcggctcgtgctgcagtttgtgcagcaggctggtgtgtgtgggcccgatgttcttggagggatctccaggagaagggactgtcctttcatgagcacttgttgtgtgccaggtcctgtgcttgggacctgttttactgctgaggcttcattcagtcctgccccttagtcaggaatgcagtttattctactccaagagattctgcctcccttgtgtccgggagaacatcaatgcttttcctcaggaaattcggcaagacttggagaaaaggaaagctccatcaaagaggacccccagccagcccggttctcggacgtgagtgcaactggggctaggtcatcgggcggcaccctgcacagagctcctgggccagcctgcgccagggatgctgctgagctgggagccgccatgcctggccttgtttctggaccactgggagcagcactgcagcccaggggagctggagtccagcttggagcagccacaggcccagggagctgtagcaagagggtagtccaaaggcagatgccagacaagacacagccaggaacccggccaggtccccccacatgcccctcagggcccaggcctgagtgagtgctgctcagatgtgactgagagggatgacctccttcagcagggcagctcctaagaggctgcgtgcaggtgcgtgtggggggagatgccacactgtgtcggggccatggtgcactgtaggtggctgcaatggtctctctgtaaggaaaatcactgacagcagctccttctggacccagtctggaaggtctagagggggatagaatttttatttcatatccttatgtggtgcttggaaaatgtttttaaccttgaccatgtattatgtttataattaaaaacccaaagaaccagctcatgtttggaaaaggaatcttccactgaaacatttggatacccgacgttctccctggacacttggcccggcaatagttggggtctcctgggaagctgagtgctggcttctagcctctccagttccctcagactctgtcttcagctcgggcccctccgttctgtctccctcgactccaagtcaggaataccgtgggcttcctgccctcaccccacacctcaagaccatcccactgcttgcctgcttgccccctgccatctcgcactcagccctgggtgcctgtgaagcctggccccactgcctgccgggggttcctgcagcacccccctactccaggctccccatctccctgaagcttccagggtagcagctggtgggacactgatctgtgagctctggaatgtctgcttagaattctgagaggcaggaactgctctgtctttgtaactactcaaggccaactgtcacatgaaggaatgaataaagagtttttactgacttgtgca

SEQ ID NO: 297949 - DNA, 935 bp, Homo sapiens
atgcagctggtacggtctgggagttacggatggagccgtgggacgagggcggcgatggcgtcccatgtagagtgccgtcctctgggagtgtttgagtgtgaactctgtaccttgacagctccgtacagctatgtgggacagaagccccccaacacccagtcgatggtcctcctggaggaaagctatgtcatgaaggatcccttcacctccgacaaggacagattcctggtcctcggctcgtgctgcagtttgtgcagcaggctggtgtgtgtgggcccggaatgcagtttattctactccaagagattctgcctcccttgtgtccgggagaacatcaatgcttttcctcaggaaattcggcaagacttggagaaaaggaaagctccatcaaagaggacccccagccagcccggttctcggacaaccagctcatgtttggaaaaggaatcttccactgaaacatttggatacccgacgttctccctggacacttggcccggcaatagttggggtctcctgggaagctgagtgctggcttctagcctctccagttccctcagactctgtcttcagctcgggcccctccgttctgtctccctcgactccaagtcaggaataccgtgggcttcctgccctcaccccacacctcaagaccatcccactgcttgcctgcttgccccctgccatctcgcactcagccctgggtgcctgtgaagcctggccccactgcctgccgggggttcctgcagcacccccctactccaggctccccatctccctgaagcttccagggtagcagctggtgggacactgatctgtgagctctggaatgtctgcttagaattctgagaggcaggaactgctctgtctttgtaactactcaaggccaactgtcacatgaaggaatgaataaagagtttttactgacttgtgca

SEQ ID NO: 297950 - DNA, 1048 bp, Homo sapiens
tgactggggcgagcgtgctgtggcccttccctgcgctgcctcagggtgcctcccgctcgccgggactgagttccgcgccggcgtggcctgctgggttccaagcgccaggagtcggcgcagccgctctcagctttggggacgggaccgagaagcggggtgtgggcctcacgggactgtcccccctgacctcgggcagcgctggggcgagagagggcaggcggaggctcgcggggaccaccagcatccccggaccctctcagccgtccctgttcacaggcgccgcccccaggagcctcggcaggggcctaggacgccccggcgtgcagaagagaagcgggatcagatggcgtcccatgtagagtgccgtcctctgggagtgtttgagtgtgaactctgtaccttgacagctccgtacagctatgtgggacagaagccccccaacacccagtcgatggtcctcctggaggaaagctatgtcatgaaggatcccttcacctccgacaaggacagattcctggtcctcggctcgtgctgcagtttgtgcagcaggctggtgtgtgtgggcccggaatgcagtttattctactccaagagattctgcctcccttgtgtccgggagaacatcaatgcttttcctcaggaaattcggcaagacttggagaaaaggaaagctccatcaaagaggacccccagccagcccggttctcggacgtgagtgcaactggggctaggtcatcgggcggcaccctgcacagagctcctgggccagcctgcgccagggatgctgctgagctgggagccgccatgcctggccttgtttctggaccactgggagcagcatgcctgccgggggttcctgcagcacccccctactccaggctccccatctccctgaagcttccagggtagcagctggtgggacactgatctgtgagctctggaatgtctgcttagaattctgagaggcaggaactgctctgtctttgtaactactcaaggccaactgtcacatgaaggaatgaataaagagtttttactgacttgtgca

SEQ ID NO: 297951 - DNA, 1300 bp, Homo sapiens
gttacaatctgaagtgggagcggcggtgaaggtcctgggtgaggtaggggtggatggtgcttgccgcgtatcatggctgcctccggaaaactcagcacttgccgtctccctccgttgcccacgattcgagaaatcattaagttgttaagactgcaagcagcgaagcagctatcacagaatttcctcctggacttgaggctgacagataagattgtaaggaaagctggcaatctgacaaatgcttatgtttacgaagtgggccctgggccagggggaatcacaagatctattcttaatgccgacgtcgctgaacttctggtggttgaaaaggacactcgatttattcctggattacagatgctttctgatgcagcacctgggaaactgagaattgttcatggagatgtcttgacatttaaggtagaaaaggctttttcagaaagtcttaaaagaccctgggaagatgatcctccaaatgtacatattattggaaatctgccttttagtgtttcaactccactgattatcaagtggcttgaaaatatttcctgtagagatggaccttttgtttatggcagaactcagatgactttgacttttcaaaaggaagtggcagagagacttgcagccaatacaggaagcaaacagcgtagtcgcctctctgttatggctcagtacctctgcaatgttcgacacatctttacaattccaggacaagcttttgtccccaaaccagaggtggacgtgggcgtggtgcacttcactcccttgatacagcccaagatagagcagccattcaagctggtggaaaaagtggttcagaatgtatttcagttccgaaggaaatactgccatcgagggctcagaatgttattccctgaagcgcagcgcttggaaagcacgggcaggctgttagagttggcagacatagaccctactcttcggccccgccagctctccatctcacactttaagagcctctgtgatgtatacagaaaaatgtgtgatgaagacccacaactctttgcatataatttcagagaagaactcaagcgaagaaaaagcaaaaatgaagaaaaagaagaggatgacgcagagaattacagactctagctgctgcctgggggcgagcagcctaccagatgtcgatttgcactacgtggagcttcttatataggtactcttttgtctttacagaatgacgatacaaatgccaatgaccagatgtgacttattttccttttactatacagcttggcagagaaaataaatatcatcaaataagatacagtaaaaaaat

SEQ ID NO: 297952 - DNA, 1126 bp, Homo sapiens
gttacaatctgaagtgggagcggcggtgaaggtcctgggtgaggtaggggtggatggtgcttgccgcgtatcatggctgcctccggaaaactcagcacttgccgtctccctccgttgcccacgattcgagaaatcattaagttgttaagactgcaagcagcgaagcagctatcacagaatttcctcctggacttgaggctgacagataagattgtaaggaaagctggcaatctgacaaatgcttatgtttacgaagtgggccctgggccagggggaatcacaagatctattcttaatgccgacgtcgctgaacttctggtggttgaaaaggacactcgatttattcctggattacagatgctttctgatgcagcacctgggaaactgagaattgttcatggagatgtcttgacatttaaggtagaaaaggctttttcagaaagtcttaaaagaccctgggaagatgatcctccaaatgtacatattattggaaatctgccttttagtgtttcaactccactgattatcaagtggcttgaaaatatttcctgtagagatggaccttttgtttatggcagaactcagatgactttgacttttcaaaaggaagtggcagagagacttgcagccaatacaggaagcaaacagcgtagtcgcctctctgttatggctcagtacctctgcaatgttcgacacatctttacaattccaggacaagcttttgtccccaaaccagaggtggacgtgggcgtggtgcacttcactcccttgatacagcccaagatagagcagccattcaagctggtggaaaaagtggttcagaatgtatttcagttccgaaggaaatactgccatcgagggctcagagaagaactcaagcgaagaaaaagcaaaaatgaagaaaaagaagaggatgacgcagagaattacagactctagctgctgcctgggggcgagcagcctaccagatgtcgatttgcactacgtggagcttcttatataggtactcttttgtctttacagaatgacgatacaaatgccaatgaccagatgtgacttattttccttttactatacagcttggcagagaaaataaatatcatcaaataagatacagtaaaaaaat

SEQ ID NO: 297953 - DNA, 814 bp, Homo sapiens
gttacaatctgaagtgggagcggcggtgaaggtcctgggtgaggtaggggtggatggtgcttgccgcgtatcatggctgcctccggaaaactcagcacttgccgtctccctccgttgcccacgattcgagaaatcattaagttgttaagactgcaagcagcgaagcagctatcacagaatttcctcctggacttgaggctgacagataagattgtaaggaaagctggcaatctgacaaatgcttatgtttacgaagtgggccctgggccagggggaatcacaagatctattcttaatgccgacgtcgctgaacttctggtggttgaaaaggacactcgatttattcctggattacaggtgagatgcttaaagtgtctgctttaggaggcaaaagctgaatttaaatctttatgccatgatgcttaaaccccaaggtatccaaagattatgtaggtttttcctcaactatagatccccaaggccccattccagagattttgattccatagtctggagaaatctggaaatctccatttttaacaagcactctcagagggtctattgactacaccttgaaaaaaacctgctttaagcatttatgctaaacaaattaattgttttgtgtgatttttttttttaagtctgctaatagctatgcatgtcgtggcccattccttcaaaaataaataaaaataaataataaccatgtgggcggcttgggccatctaattttgatttagcaagttattttggcggcccaatttagcccttggcacatacccttatggaggggttacaatcaaggggcggggtt

SEQ ID NO: 297954 - DNA, 1867 bp, Homo sapiens
gttacaatctgaagtgggagcggcggtgaaggtcctgggtgaggtaggggtggatggtgcttgccgcgtatcatggctgcctccggaaaactcagcacttgccgtctccctccgttgcccacgattcgagaaatcattaagttgttaagactgcaagcagcgaagcagctatcacagaatttcctcctggacttgaggctgacagataagattgtaaggaaagctggcaatctgacaaatgcttatgtttacgaagtgggccctgggccagggggaatcacaagatctattcttaatgccgacgtcgctgaacttctggtggttgaaaaggacactcgatttattcctggattacagatgctttctgatgcagcacctgggaaactgagaattgttcatggagatgtcttgacatttaaggtagaaaaggctttttcagaaagtcttaaaagaccctgggaagatgatcctccaaatgtacatattattggaaatctgccttttagtgtttcaactccactgattatcaagtggcttgaaaatatttcctgtagagatggaccttttgtttatggcagaactcagatgactttgacttttcaaaaggaagtggcagagagacttgcagccaatacaggaagcaaacagcgtagtcgcctctctgttatggctcagtacctctgcaatgttcgacacatctttacaattccaggacaagcttttgtccccaaaccagagtcctgcctatgcctttcggggcatttaaaattgctactagaaagttctgtggcttttcagactacactcatgaattcagtccagctgattaatcagtgtctaccgaaaataagtggtgtctctatctgggaagtttagcactgagtggtccctgggggcctgtctgccatctctctgtgtcttgaagctgctgctgcggcttatttttttcctcattcaaaaactaaaatattctaatgccatctattatctgctgactgactttaatgatttggattgatttttaagccattgtgaaactgtgttttaaaattaagtgaccatcaagcacaggtctggtggatgtcattagagaacaggtgcagccggctgatttctccatgtcatttgcgaatccagaatgtaccatcttccatgcctagagatgaaaccgaagtacgtggaaaggtctgtttatgaaaacaggctgttgacagcccatcttcctgttttacaaggatgagttgattgatcacactatgccacatatcatgccacagaatgataatatgtttgcttacaacgaaggtggacgtgggcgtggtgcacttcactcccttgatacagcccaagatagagcagccattcaagctggtggaaaaagtggttcagaatgtatttcagttccgaaggaaatactgccatcgagggctcagaatgttattccctgaagcgcagcgcttggaaagcacgggcaggctgttagagttggcagacatagaccctactcttcggccccgccagctctccatctcacactttaagagcctctgtgatgtatacagaaaaatgtgtgatgaagacccacaactctttgcatataatttcagagaagaactcaagcgaagaaaaagcaaaaatgaagaaaaagaagaggatgacgcagagaattacagactctagctgctgcctgggggcgagcagcctaccagatgtcgatttgcactacgtggagcttcttatataggtactcttttgtctttacagaatgacgatacaaatgccaatgaccagatgtgacttattttccttttactatacagcttggcagagaaaataaatatcatcaaataagatacagtaaaaaaat

SEQ ID NO: 297955 - DNA, 1482 bp, Homo sapiens
gttacaatctgaagtgggagcggcggtgaaggtcctgggtgaggtaggggtggatggtgcttgccgcgtatcatggctgcctccggaaaactcagcacttgccgtctccctccgttgcccacgattcgagaaatcattaagttgttaagactgcaagcagcgaagcagctatcacagaatttcctcctggacttgaggctgacaggtggatggcttagcagtgctccccggatgtctccccagtgtccgtgggggcgtgggccggggggtcttgcacgtccccgcgggcggttgtccaggcactggcgtgcgacgggcttttggtcaggtccttcgacctctttgtatcagaagaactccggtcccaccgcccaggagacacgtgaaataagattgtaaggaaagctggcaatctgacaaatgcttatgtttacgaagtgggccctgggccagggggaatcacaagatctattcttaatgccgacgtcgctgaacttctggtggttgaaaaggacactcgatttattcctggattacagatgctttctgatgcagcacctgggaaactgagaattgttcatggagatgtcttgacatttaaggtagaaaaggctttttcagaaagtcttaaaagaccctgggaagatgatcctccaaatgtacatattattggaaatctgccttttagtgtttcaactccactgattatcaagtggcttgaaaatatttcctgtagagatggaccttttgtttatggcagaactcagatgactttgacttttcaaaaggaagtggcagagagacttgcagccaatacaggaagcaaacagcgtagtcgcctctctgttatggctcagtacctctgcaatgttcgacacatctttacaattccaggacaagcttttgtccccaaaccagaggtggacgtgggcgtggtgcacttcactcccttgatacagcccaagatagagcagccattcaagctggtggaaaaagtggttcagaatgtatttcagttccgaaggaaatactgccatcgagggctcagaatgttattccctgaagcgcagcgcttggaaagcacgggcaggctgttagagttggcagacatagaccctactcttcggccccgccagctctccatctcacactttaagagcctctgtgatgtatacagaaaaatgtgtgatgaagacccacaactctttgcatataatttcagagaagaactcaagcgaagaaaaagcaaaaatgaagaaaaagaagaggatgacgcagagaattacagactctagctgctgcctgggggcgagcagcctaccagatgtcgatttgcactacgtggagcttcttatataggtactcttttgtctttacagaatgacgatacaaatgccaatgaccagatgtgacttattttccttttactatacagcttggcagagaaaataaatatcatcaaataagatacagtaaaaaaat

SEQ ID NO: 297956 - DNA, 1407 bp, Homo sapiens
gttacaatctgaagtgggagcggcggtgaaggtcctgggtgaggtaggggtggatggtgcttgccgcgtatcatggctgcctccggaaaactcagcacttgccgtctccctccgttgcccacgattcgagaaatcattaagttgttaagactgcaagcagcgaagcagctatcacagaatttcctcctggacttgaggctgacagatggagtttcactcttgttgcccaagctggagtgcaatggcatgatctcagctcactgcaacctccgcctccccggttcaagtgattctcgtgcctcagcctcccagataagattgtaaggaaagctggcaatctgacaaatgcttatgtttacgaagtgggccctgggccagggggaatcacaagatctattcttaatgccgacgtcgctgaacttctggtggttgaaaaggacactcgatttattcctggattacagatgctttctgatgcagcacctgggaaactgagaattgttcatggagatgtcttgacatttaaggtagaaaaggctttttcagaaagtcttaaaagaccctgggaagatgatcctccaaatgtacatattattggaaatctgccttttagtgtttcaactccactgattatcaagtggcttgaaaatatttcctgtagagatggaccttttgtttatggcagaactcagatgactttgacttttcaaaaggaagtggcagagagacttgcagccaatacaggaagcaaacagcgtagtcgcctctctgttatggctcagtacctctgcaatgttcgacacatctttacaattccaggacaagcttttgtccccaaaccagaggtggacgtgggcgtggtgcacttcactcccttgatacagcccaagatagagcagccattcaagctggtggaaaaagtggttcagaatgtatttcagttccgaaggaaatactgccatcgagggctcagaatgttattccctgaagcgcagcgcttggaaagcacgggcaggctgttagagttggcagacatagaccctactcttcggccccgccagctctccatctcacactttaagagcctctgtgatgtatacagaaaaatgtgtgatgaagacccacaactctttgcatataatttcagagaagaactcaagcgaagaaaaagcaaaaatgaagaaaaagaagaggatgacgcagagaattacagactctagctgctgcctgggggcgagcagcctaccagatgtcgatttgcactacgtggagcttcttatataggtactcttttgtctttacagaatgacgatacaaatgccaatgaccagatgtgacttattttccttttactatacagcttggcagagaaaataaatatcatcaaataagatacagtaaaaaaat

SEQ ID NO: 297957 - DNA, 1435 bp, Homo sapiens
gaaagtgggaaactgatcgactcaaatattagggccgaacccgggaagccttttaacggcgggctgggcgcgtatcgtatcatacgattgtcagcaatcgcgaatgatcgtcagacgatcatacatagacaaaactcaacaagtaagcaaaaagtggcttacagccaaagtgactttttagtccatacaaagtataagtacggagatcagtggtagaagcaggcccactgacaactgtaagaagtaacagttgttacagtaacagaaagctataaaagacaaatataaacgcagaagaaacaataataataatagggtagcaaaaacaccttcgtaactattgaggccattattctaaagacaacagtaaccctaggtcatcaagaaaagggtgaaatttggtttagtgttcttggcctaaggaagaggattgtgccatatagcatccctatacattggcctaaggaagaaggttgtgtcgttggcatacctatgctttctgatgcagcacctgggaaactgagaattgttcatggagatgtcttgacatttaaggtagaaaaggctttttcagaaagtcttaaaagaccctgggaagatgatcctccaaatgtacatattattggaaatctgccttttagtgtttcaactccactgattatcaagtggcttgaaaatatttcctgtagagatggaccttttgtttatggcagaactcagatgactttgacttttcaaaaggaagtggcagagagacttgcagccaatacaggaagcaaacagcgtagtcgcctctctgttatggctcagtacctctgcaatgttcgacacatctttacaattccaggacaagcttttgtccccaaaccagaggtggacgtgggcgtggtgcacttcactcccttgatacagcccaagatagagcagccattcaagctggtggaaaaagtggttcagaatgtatttcagttccgaaggaaatactgccatcgagggctcagaatgttattccctgaagcgcagcgcttggaaagcacgggcaggctgttagagttggcagacatagaccctactcttcggccccgccagctctccatctcacactttaagagcctctgtgatgtatacagaaaaatgtgtgatgaagacccacaactctttgcatataatttcagagaagaactcaagcgaagaaaaagcaaaaatgaagaaaaagaagaggatgacgcagagaattacagactctagctgctgcctgggggcgagcagcctaccagatgtcgatttgcactacgtggagcttcttatataggtactcttttgtctttacagaatgacgatacaaatgccaatgaccagatgtgacttattttccttttactatacagcttggcagagaaaataaatatcatcaaataagatacagtaaaaaaat

SEQ ID NO: 297958 - DNA, 1548 bp, Homo sapiens
tgtttcttctcgttgatacattcactcctgccttttaaatgctttctgatgcagcacctgggaaactgagaattgttcatggagatgtcttgacatttaaggtagaaaaggctttttcagaaagtcttaaaagaccctgggaagatgatcctccaaatgtacatattattggaaatctgccttttagtgtttcaactccactgattatcaagtggcttgaaaatatttcctgtagagatggaccttttgtttatggcagaactcagatgactttgacttttcaaaaggaagtggcagagagacttgcagccaatacaggaagcaaacagcgtagtcgcctctctgttatggctcagtacctctgcaatgttcgacacatctttacaattccaggacaagcttttgtccccaaaccagagtcctgcctatgcctttcggggcatttaaaattgctactagaaagttctgtggcttttcagactacactcatgaattcagtccagctgattaatcagtgtctaccgaaaataagtggtgtctctatctgggaagtttagcactgagtggtccctgggggcctgtctgccatctctctgtgtcttgaagctgctgctgcggcttatttttttcctcattcaaaaactaaaatattctaatgccatctattatctgctgactgactttaatgatttggattgatttttaagccattgtgaaactgtgttttaaaattaagtgaccatcaagcacaggtctggtggatgtcattagagaacaggtgcagccggctgatttctccatgtcatttgcgaatccagaatgtaccatcttccatgcctagagatgaaaccgaagtacgtggaaaggtctgtttatgaaaacaggctgttgacagcccatcttcctgttttacaaggatgagttgattgatcacactatgccacatatcatgccacagaatgataatatgtttgcttacaacgaaggtggacgtgggcgtggtgcacttcactcccttgatacagcccaagatagagcagccattcaagctggtggaaaaagtggttcagaatgtatttcagttccgaaggaaatactgccatcgagggctcagaatgttattccctgaagcgcagcgcttggaaagcacgggcaggctgttagagttggcagacatagaccctactcttcggccccgccagctctccatctcacactttaagagcctctgtgatgtatacagaaaaatgtgtgatgaagacccacaactctttgcatataatttcagagaagaactcaagcgaagaaaaagcaaaaatgaagaaaaagaagaggatgacgcagagaattacagactctagctgctgcctgggggcgagcagcctaccagatgtcgatttgcactacgtggagcttcttatataggtactcttttgtctttacagaatgacgatacaaatgccaatgaccagatgtgacttattttccttttactatacagcttggcagagaaaataaatatcatcaaataagatacagtaaaaaaat

SEQ ID NO: 297959 - DNA, 343 bp, Homo sapiens
gcggccgcctactactactactactgctcgaattcaagcttctaacgatgtacggggacatgagggcagaggtgctacctggccttcctgccaggagctctccacccactcacattccgtccccgccgcctcactgcagccagcgtggccctaggacaggaggagcttcgggcccagcttcaccctgcggtggggctgaggggtggccatctcctgccctggggccactggcttcacattctgggctgactcataggggagtaggggtggagtcaccaaaaccagtgctgggacaaagatggggaaggtgtgtgaactttttaaaataaacacaaaaacacag

SEQ ID NO: 297960 - DNA, 4115 bp, Homo sapiens
aggccacttctgcaattacagacagttgcacttcaaggggacccttctttcacactacatccttctgtttttagactttttttgcgtttgaaaatgtgttttttgaggtggaatacccaactgacccctcatctctcctctctctctgctgccctgcagtgctacagttgaaactccagcagcgccggacccgggaagaactggtgagccaagggatcatgccgcctttgaaaagtccagccgcatttcatgagcagagaaggagcttggagcgggccaggacagaggactatctcaaacggaagattcgttcccggccggagagatcggagctggtcaggatgcacattttggaagagacctcggctgagccatccctccaggccaagcagctgaagctgaagagagccagactagccgatgacctcaatgagaagattgcacagaggcctggccccatggagctggtggagaagaacatccttcctgttgagtccagcctgaaggaagccatcattgtgggccaggtgaactatcccaaagtagcagacagctcttccttcgatgaggacagcagcgatgccttatcccccgagcagcctgccagccatgagtcccagggttctgtgccgtcacccctggaggcccgagtcagcgaaccactgctcagtgccacctctgcatcccccacccaggttgtgtctcaacttccgatgggccgggattccagagaaatgcttttcctggcagagcagcctcctctgcctcccccacctctgctgcctcccagcctcaccaatggaaccactatccccactgccaagtccacccccacactcattaagcaaagccaacccaagtctgccagtgagaagtcacagcgcagcaagaaggccaaggagctgaagccaaaggtgaagaagctcaagtaccaccagtacatccccccggaccagaagcaggacaggggggcaccccccatggactcatcctacgccaagatcctgcagcagcagcagctcttcctccagctgcagatcctcaaccagcagcagcagcagcaccacaactaccaggccatcctgcctgccccgccaaagtcagcaggcgaggccctgggaagcagcgggacccccccagtacgcagcctctccactaccaatagcagctccagctcgggcgcccctgggccctgtgggctggcacgtcagaacagcacctcactgactggcaagccgggagccctgccggccaacctggacgacatgaaggtggcagagctgaagcaggagctgaagttgcgatcactgcctgtctcgggcaccaaaactgagctgattgagcgccttcgagcctatcaagaccaaatcagccctgtgccaggagcccccaaggcccctgccgccacctctatcctgcacaaggctggcgaggtggtggtagccttcccagcggcccggctgagcacggggccagccctggtggcagcaggcctggctccagctgaggtggtggtggccacggtggccagcagtggggtggtgaagtttggcagcacgggctccacgccccccgtgtctcccaccccctcggagcgctcactgctcagcacgggcgatgaaaactccacccccggggacacctttggtgagatggtgacatcacctctgacgcagctgaccctgcaggcctcgccactgcagatcctcgtgaaggaggagggcccccgggccgggtcctgttgcctgagccctggggggcgggcggagctagaggggcgcgacaaggaccagatgctgcaggagaaagacaagcagatcgaggcgctgacgcgcatgctccggcagaagcagcagctggtggagcggctcaagctgcagctggagcaggagaagcgagcccagcagcccgcccccgcccccgcccccctcggcacccccgtgaagcaggagaacagcttctccagctgccagctgagccagcagcccctgggccccgctcacccattcaaccccagcctggcggccccagccaccaaccacatagacccttgtgctgtggccccggggcccccgtccgtggtggtgaagcaggaagccttgcagcctgagcccgagccggtccccgccccccagttgcttctggggcctcagggccccagcctcatcaagggggttgcacctcccaccctcatcaccgactccacagggacccaccttgtcctcaccgtgaccaataagaatgcagacagccctggcctgtccagtgggagcccccagcagccctcgtcccagcctggctctccagcgcctgccccctctgcccagatggacctggagcacccactgcagcccctctttgggacccccacttctctgctgaagaaggaaccacctggctatgaggaagccatgagccagcagcccaaacagcaggaaaatggttcctcaagccagcagatggacgacctgtttgacattctcattcagagcggagaaatttcagcagatttcaaggagccgccatccctgccagggaaggagaagccatccccgaagacagtctgtgggtcccccctggcagcacagccatcaccttctgctgagctcccccaggctgccccacctcctccaggctcaccctccctccctggacgcctggaggacttcctggagagcagcacggggctgcccctgctgaccagtgggcatgacgggccagagcccctttccctcattgacgacctccatagccagatgctgagcagcactgccatcctggaccaccccccgtcacccatggacacctcggaattgcactttgttcctgagcccagcagcaccatgggcctggacctggctgatggccacctggacagcatggactggctggagctgtcgtcaggtggtcccgtgctgagcctagcccccctcagcaccacagcccccagcctcttctccacagacttcctcgatggccatgatttgcagctgcactgggattcctgcttgtagctctctggctcaagacggggtggggaaggggctgggagccagggtactccaatgcgtggctctcctgcgtgattcggcctctccacatggttgtgagtcttgacaatcacagcccctgctttttcccttccctgggaggctagaacagagaagcccttactcctggttcagtgccacgcagggcagaggagagcagctgtcaagaagcagccctggctctcacgctggggttttggacacacggtcagggtcagggccatttcagcttgacctccttttttgaggtcagggggcactgtctgtctggctacaatttggctaaggtaggtgaagcctggccaggcgggaggcttctcttctgacccagggctgagacaggttaaggggtgaatctccttcctttctctccctgctttgctgtgaagggagaaattagcctgggcctctaccccctattccctgtgtctgccaaccccaggatcccagggctccctgccattttagtgtcttggtgtagtgtaaccatttagtggttggtggcaacaattttatgtacaggtgtatatacctctatattatatatcgacatacatatatatttttgggggggggcggacaggagatgggtgcaactccctcccatcctactctcacagaagggcctggatgcaaggttacccttgagctgtgtgccacagtctggtgcccagtctggcatgcagctacccaggcccacccatcacgtgtgattgacatgtaggtaccctgccacggcctatgccccacctgccctgcttcctggctccttatcagtgccatgagggcagaggtgctacctggccttcctgccaggagctctccacccactcacattccgtccccgccgcctcactgcagccagcgtggccctaggacaggaggagcttcgggcccagcttcaccctgcggtggggctgaggggtggccatctcctgccctggggccactggcttcacattctgggctgactcataggggagtaggggtggagtcaccaaaaccagtgctgggacaaagatggggaaggtgtgtgaactttttaaaataaacacaaaaacacag

SEQ ID NO: 297961 - DNA, 6783 bp, Homo sapiens
tgagactgtagaagagagagcaattggccaatgaggactgcggggcgggaccctgtgccgcggcggagtccaagatggcggcgtgcggttccgctgtgtgaaacgagcgcggggcggcgggttactcagctccgcggagacgacctccgacgacccgcaacaatgaagggaaaagagcgctcgccagtgaaggccaaacgctcccgtggtggtgaggactcgacttcccgcggtgagcggagcaagaagttagggggctctggtggcagcaatgggagcagcagcggaaagaccgatagcggcggtgggtcgcggcggagtctccacctggacaagtccagcagtcgaggtggcagccgcgagtatgataccggtgggggcagctccagtagccgcttgcatagttatagctccccgagcaccaaaaattcttcgggcgggggcgagtcgcgcagcagctcccggggtggaggcggggagtcacgttcctctggggccgcctcctcagctcccggcggcggggacggcgcggaatacaagactctgaagataagcgagttggggtcccagcttagtgacgaagcggtggaggacggcctgtttcatgagttcaaacgcttcggtgatgtaagtgtgaaaatcagtcatctgtcgggttctggcagcggggatgagcgggtagcctttgtgaacttccggcggccagaggacgcgcgggcggccaagcatgccagaggccgcctggtgctctatgaccggcctctgaagatagaagctgtgtatgtgagccggcgccgcagccgctcccctttagacaaagatacttatcctccatcagccagtgtggtcggggcctctgtaggtggtcaccggcacccccctggaggtggtggaggccagagatcactttcccctggtggcgctgctttgggatacagagactaccggctgcagcagttggctcttggccgcctgccccctccacctccgccaccattgcctcgagacctggagagagaaagagactacccgttctatgagagagtgcgccctgcatacagtcttgagccaagggtgggagctggagcaggtgctgctcctttcagagaagtggatgagatttcacccgaggatgatcagcgagctaaccggacgctcttcttgggcaacctagacatcactgtaacggagagtgatttaagaagggcgtttgatcgctttggagtcatcacagaagtagatatcaagaggccttctcgcggccagactagtacttacggctttctcaaatttgagaacttagatatgtctcaccgggccaaattagcaatgtctggcaaaattataattcggaatcctatcaaaattggttatggtaaagctacacccaccacccgcctctgggtgggaggcctgggaccttgggttcctcttgctgccctggcacgagaatttgatcgatttggcaccatacgcaccatagactaccgaaaaggtgatagttgggcatatatccagtatgaaagcctggatgcagcgcatgctgcctggacccatatgcggggcttcccacttggtggcccagatcgacgccttagagtagactttgccgacaccgaacatcgttaccagcagcagtatctgcagcctctgcccttgactcattatgagctggtgacagatgcttttggacatcgggcaccagaccctttgaggggtgctcgggataggacaccacccttactatacagagatcgtgatagggacctttatcctgactctgattgggtgccacccccacccccagtccgagaacgcagcactcggactgcagctacttctgtgcctgcttacgagccactggatagcctagatcgcaggcgggatggttggtccttggaccgggacagaggtgatcgagatctgcccagcagcagagaccagcctaggaagcgaaggctgcctgaggagagtggaggacgtcatctggataggtctcctgagagtgaccgcccacgaaaacgtcactgcgctccttctcctgaccgcagtccagaattgagcagtagccgggatcgttacaacagcgacaatgatcgatcttcccgtcttctcttggaaaggccctctccaatcagagacagacgaggtagtttggagaagagccagggtgacaagcgagaccgtaaaaactctgcatcagctgaacgagataggaagcaccggacaactgctcccactgagggaaaaagccctctgaaaaaagaagaccgctctgatgggagtgcacctagcaccagcactgcttcctccaagctgaagtccccgtcccagaaacaggatggggggacagcccctgtggcatcagcctctcccaaactctgtttggcctggcagggcatgcttctactgaagaacagcaactttccttccaacatgcatctgttgcagggtgacctccaagtggctagtagtcttcttgtggagggttcaactggaggcaaagtggcccagctcaagatcactcagcgtctccgtttggaccagcccaagttggatgaagtaactcgacgcatcaaagtagcagggcccaatggttatgccattcttttggctgtgcctggaagttctgacagccggtcctcctcttcctcagctgcatcagacactgccacttctactcagaggccacttaggaaccttgtgtcctatttaaagcaaaagcaggcagccggggtgatcagcctccctgtggggggcaacaaagacaaggaaaacaccggggtccttcatgccttcccaccttgtgagttctcccagcagttcctggattcccctgccaaggcactggccaaatctgaagaagattacctggtcatgatcattgtccgtgctttgaaaagtccagccgcatttcatgagcagagaaggagcttggagcgggccaggacagaggactatctcaaacggaagattcgttcccggccggagagatcggagctggtcaggatgcacattttggaagagacctcggctgagccatccctccaggccaagcagctgaagctgaagagagccagactagccgatgacctcaatgagaagattgcacagaggcctggccccatggagctggtggagaagaacatccttcctgttgagtccagcctgaaggaagccatcattgtgggccaggtgaactatcccaaagtagcagacagctcttccttcgatgaggacagcagcgatgccttatcccccgagcagcctgccagccatgagtcccagggttctgtgccgtcacccctggaggcccgagtcagcgaaccactgctcagtgccacctctgcatcccccacccaggttgtgtctcaacttccgatgggccgggattccagagaaatgcttttcctggcagagcagcctcctctgcctcccccacctctgctgcctcccagcctcaccaatggaaccactatccccactgccaagtccacccccacactcattaagcaaagccaacccaagtctgccagtgagaagtcacagcgcagcaagaaggccaaggagctgaagccaaaggtgaagaagctcaagtaccaccagtacatccccccggaccagaagcaggacaggggggcaccccccatggactcatcctacgccaagatcctgcagcagcagcagctcttcctccagctgcagatcctcaaccagcagcagcagcagcaccacaactaccaggccatcctgcctgccccgccaaagtcagcaggcgaggccctgggaagcagcgggacccccccagtacgcagcctctccactaccaatagcagctccagctcgggcgcccctgggccctgtgggctggcacgtcagaacagcacctcactgactggcaagccgggagccctgccggccaacctggacgacatgaaggtggcagagctgaagcaggagctgaagttgcgatcactgcctgtctcgggcaccaaaactgagctgattgagcgccttcgagcctatcaagaccaaatcagccctgtgccaggagcccccaaggcccctgccgccacctctatcctgcacaaggctggcgaggtggtggtagccttcccagcggcccggctgagcacggggccagccctggtggcagcaggcctggctccagctgaggtggtggtggccacggtggccagcagtggggtggtgaagtttggcagcacgggctccacgccccccgtgtctcccaccccctcggagcgctcactgctcagcacgggcgatgaaaactccacccccggggacacctttggtgagatggtgacatcacctctgacgcagctgaccctgcaggcctcgccactgcagatcctcgtgaaggaggagggcccccgggccgggtcctgttgcctgagccctggggggcgggcggagctagaggggcgcgacaaggaccagatgctgcaggagaaagacaagcagatcgaggcgctgacgcgcatgctccggcagaagcagcagctggtggagcggctcaagctgcagctggagcaggagaagcgagcccagcagcccgcccccgcccccgcccccctcggcacccccgtgaagcaggagaacagcttctccagctgccagctgagccagcagcccctgggccccgctcacccattcaaccccagcctggcggccccagccaccaaccacatagacccttgtgctgtggccccggggcccccgtccgtggtggtgaagcaggaagccttgcagcctgagcccgagccggtccccgccccccagttgcttctggggcctcagggccccagcctcatcaagggggttgcacctcccaccctcatcaccgactccacagggacccaccttgtcctcaccgtgaccaataagaatgcagacagccctggcctgtccagtgggagcccccagcagccctcgtcccagcctggctctccagcgcctgccccctctgcccagatggacctggagcacccactgcagcccctctttgggacccccacttctctgctgaagaaggaaccacctggctatgaggaagccatgagccagcagcccaaacagcaggaaaatggttcctcaagccagcagatggacgacctgtttgacattctcattcagagcggagaaatttcagcagatttcaaggagccgccatccctgccagggaaggagaagccatccccgaagacagtctgtgggtcccccctggcagcacagccatcaccttctgctgagctcccccaggctgccccacctcctccaggctcaccctccctccctggacgcctggaggacttcctggagagcagcacggggctgcccctgctgaccagtgggcatgacgggccagagcccctttccctcattgacgacctccatagccagatgctgagcagcactgccatcctggaccaccccccgtcacccatggacacctcggaattgcactttgttcctgagcccagcagcaccatgggcctggacctggctgatggccacctggacagcatggactggctggagctgtcgtcaggtggtcccgtgctgagcctagcccccctcagcaccacagcccccagcctcttctccacagacttcctcgatggccatgatttgcagctgcactgggattcctgcttgtagctctctggctcaagacggggtggggaaggggctgggagccagggtactccaatgcgtggctctcctgcgtgattcggcctctccacatggttgtgagtcttgacaatcacagcccctgctttttcccttccctgggaggctagaacagagaagcccttactcctggttcagtgccacgcagggcagaggagagcagctgtcaagaagcagccctggctctcacgctggggttttggacacacggtcagggtcagggccatttcagcttgacctccttttttgaggtcagggggcactgtctgtctggctacaatttggctaaggtaggtgaagcctggccaggcgggaggcttctcttctgacccagggctgagacaggttaaggggtgaatctccttcctttctctccctgctttgctgtgaagggagaaattagcctgggcctctaccccctattccctgtgtctgccaaccccaggatcccagggctccctgccattttagtgtcttggtgtagtgtaaccatttagtggttggtggcaacaattttatgtacaggtgtatatacctctatattatatatcgacatacatatatatttttgggggggggcggacaggagatgggtgcaactccctcccatcctactctcacagaagggcctggatgcaaggttacccttgagctgtgtgccacagtctggtgcccagtctggcatgcagctacccaggcccacccatcacgtgtgattgacatgtaggtaccctgccacggcctatgccccacctgccctgcttcctggctccttatcagtgccatgagggcagaggtgctacctggccttcctgccaggagctctccacccactcacattccgtccccgccgcctcactgcagccagcgtggccctaggacaggaggagcttcgggcccagcttcaccctgcggtggggctgaggggtggccatctcctgccctggggccactggcttcacattctgggctgactcataggggagtaggggtggagtcaccaaaaccagtgctgggacaaagatggggaaggtgtgtgaactttttaaaataaacacaaaaacacag

SEQ ID NO: 297962 - DNA, 757 bp, Homo sapiens
aggccacttctgcaattacagacagttgcacttcaaggggacccttctttcacactacatccttctgtttttagactttttttgcgtttgaaaatgtgttttttgaggtggaatacccaactgacccctcatctctcctctctctctgctgccctgcagtgctacagttgaaactccagcagcgccggacccgggaagaactggtgagccaagggatcatgccgcgtaagtgcctctctctctcagcatttggtagattgcttttaggacatggctgtgttcaccgagtatgccatgggaagcatctaacataaaacaagaatgaatgaagacagccagttgtaaagtacagtgtgtgcatgtgtatatgagagagagagtctgacaaactgaaatagataccgctctattgaaaacctgttggaattctgggcatggagtttgaaacaacactcccattctgtcaggagcccggattctaaaattgtcctgaatatctaattgtatactttgggttgttctctgtgtctgtgaagtgagaataattgcctttcctgtgggaatagaaatgacctgcttctatgagaatattgcattttcccatataccaagatccaccttcagctatggacatagtcttgttatcagcttttctagagaaggaagtaggtaagaaatgcttagattatgagagagaatgttgaggactgggaatagtttcaggtgtgaatttcctcctcatttacgtccctgttgg

SEQ ID NO: 297963 - DNA, 4397 bp, Homo sapiens
agcatggcatggatcacagccggctttaactcggtcacagggcagatgtgttaaggtacagtggtcccttcgatcacagctgatattagccggatcgggcacgggtctccgaccaggtgagttatggaccagctcactggattgctagtctatactcatttgtcagtccatacacacaactaaagctctgacaacatgtggcctattaccctggctactagacaggtgaccctgctgcctacagacagtcaatgattccggccctgccttcacaaagtgagcggacagagtgaaaaatgtctcaaattgggtataacaaatcagcgtgattgcctttcacctccactttggagtgctttgagccagtttggacacaaggaggttggagttaaaatgactcctgaaggaagtaagcaagcatgagaagagagggcagcactgtgctacagttgaaactccagcagcgccggacccgggaagaactggtgagccaagggatcatgccgcctttgaaaagtccagccgcatttcatgagcagagaaggagcttggagcgggccaggacagaggactatctcaaacggaagattcgttcccggccggagagatcggagctggtcaggatgcacattttggaagagacctcggctgagccatccctccaggccaagcagctgaagctgaagagagccagactagccgatgacctcaatgagaagattgcacagaggcctggccccatggagctggtggagaagaacatccttcctgttgagtccagcctgaaggaagccatcattgtgggccaggtgaactatcccaaagtagcagacagctcttccttcgatgaggacagcagcgatgccttatcccccgagcagcctgccagccatgagtcccagggttctgtgccgtcacccctggaggcccgagtcagcgaaccactgctcagtgccacctctgcatcccccacccaggttgtgtctcaacttccgatgggccgggattccagagaaatgcttttcctggcagagcagcctcctctgcctcccccacctctgctgcctcccagcctcaccaatggaaccactatccccactgccaagtccacccccacactcattaagcaaagccaacccaagtctgccagtgagaagtcacagcgcagcaagaaggccaaggagctgaagccaaaggtgaagaagctcaagtaccaccagtacatccccccggaccagaagcaggacaggggggcaccccccatggactcatcctacgccaagatcctgcagcagcagcagctcttcctccagctgcagatcctcaaccagcagcagcagcagcaccacaactaccaggccatcctgcctgccccgccaaagtcagcaggcgaggccctgggaagcagcgggacccccccagtacgcagcctctccactaccaatagcagctccagctcgggcgcccctgggccctgtgggctggcacgtcagaacagcacctcactgactggcaagccgggagccctgccggccaacctggacgacatgaaggtggcagagctgaagcaggagctgaagttgcgatcactgcctgtctcgggcaccaaaactgagctgattgagcgccttcgagcctatcaagaccaaatcagccctgtgccaggagcccccaaggcccctgccgccacctctatcctgcacaaggctggcgaggtggtggtagccttcccagcggcccggctgagcacggggccagccctggtggcagcaggcctggctccagctgaggtggtggtggccacggtggccagcagtggggtggtgaagtttggcagcacgggctccacgccccccgtgtctcccaccccctcggagcgctcactgctcagcacgggcgatgaaaactccacccccggggacacctttggtgagatggtgacatcacctctgacgcagctgaccctgcaggcctcgccactgcagatcctcgtgaaggaggagggcccccgggccgggtcctgttgcctgagccctggggggcgggcggagctagaggggcgcgacaaggaccagatgctgcaggagaaagacaagcagatcgaggcgctgacgcgcatgctccggcagaagcagcagctggtggagcggctcaagctgcagctggagcaggagaagcgagcccagcagcccgcccccgcccccgcccccctcggcacccccgtgaagcaggagaacagcttctccagctgccagctgagccagcagcccctgggccccgctcacccattcaaccccagcctggcggccccagccaccaaccacatagacccttgtgctgtggccccggggcccccgtccgtggtggtgaagcaggaagccttgcagcctgagcccgagccggtccccgccccccagttgcttctggggcctcagggccccagcctcatcaagggggttgcacctcccaccctcatcaccgactccacagggacccaccttgtcctcaccgtgaccaataagaatgcagacagccctggcctgtccagtgggagcccccagcagccctcgtcccagcctggctctccagcgcctgccccctctgcccagatggacctggagcacccactgcagcccctctttgggacccccacttctctgctgaagaaggaaccacctggctatgaggaagccatgagccagcagcccaaacagcaggaaaatggttcctcaagccagcagatggacgacctgtttgacattctcattcagagcggagaaatttcagcagatttcaaggagccgccatccctgccagggaaggagaagccatccccgaagacagtctgtgggtcccccctggcagcacagccatcaccttctgctgagctcccccaggctgccccacctcctccaggctcaccctccctccctggacgcctggaggacttcctggagagcagcacggggctgcccctgctgaccagtgggcatgacgggccagagcccctttccctcattgacgacctccatagccagatgctgagcagcactgccatcctggaccaccccccgtcacccatggacacctcggaattgcactttgttcctgagcccagcagcaccatgggcctggacctggctgatggccacctggacagcatggactggctggagctgtcgtcaggtggtcccgtgctgagcctagcccccctcagcaccacagcccccagcctcttctccacagacttcctcgatggccatgatttgcagctgcactgggattcctgcttgtagctctctggctcaagacggggtggggaaggggctgggagccagggtactccaatgcgtggctctcctgcgtgattcggcctctccacatggttgtgagtcttgacaatcacagcccctgctttttcccttccctgggaggctagaacagagaagcccttactcctggttcagtgccacgcagggcagaggagagcagctgtcaagaagcagccctggctctcacgctggggttttggacacacggtcagggtcagggccatttcagcttgacctccttttttgaggtcagggggcactgtctgtctggctacaatttggctaaggtaggtgaagcctggccaggcgggaggcttctcttctgacccagggctgagacaggttaaggggtgaatctccttcctttctctccctgctttgctgtgaagggagaaattagcctgggcctctaccccctattccctgtgtctgccaaccccaggatcccagggctccctgccattttagtgtcttggtgtagtgtaaccatttagtggttggtggcaacaattttatgtacaggtgtatatacctctatattatatatcgacatacatatatatttttgggggggggcggacaggagatgggtgcaactccctcccatcctactctcacagaagggcctggatgcaaggttacccttgagctgtgtgccacagtctggtgcccagtctggcatgcagctacccaggcccacccatcacgtgtgattgacatgtaggtaccctgccacggcctatgccccacctgccctgcttcctggctccttatcagtgccatgagggcagaggtgctacctggccttcctgccaggagctctccacccactcacattccgtccccgccgcctcactgcagccagcgtggccctaggacaggaggagcttcgggcccagcttcaccctgcggtggggctgaggggtggccatctcctgccctggggccactggcttcacattctgggctgactcataggggagtaggggtggagtcaccaaaaccagtgctgggacaaagatggggaaggtgtgtgaactttttaaaataaacacaaaaacacag

SEQ ID NO: 297964 - DNA, 4354 bp, Homo sapiens
gctgagaggagccggcggcggcagtgtctgtggtggccgcggcggcgagagcgacggtcccatctttcccaccctcttggttgccgctggccacacgccctccgctggcggcgacttctcagctccgtgcgcccgggctggacagtgagcctcgagaggagacgcgggcggctagagccggagtggggcgagccgcggaacccggccgggagccgcgcgaggcgtgatcggagggtatggttggcatggaattgaatttcatctgtctgtgggaattgtaagcaagattgccatcacgaaagccaaagtggatttctccagtgtggtgtgcctgcccccttccgtcattgctgtgaatgggctggacggaggaggggccggcgaaaatgatgatgaaccagtgctcgtgtccttatctgcggcacccagtccccagagtgaagctgttgccaatgaactgcaggagctctccttgcagcccgagctgaccctaggcctccaccctggcaggaatcccaatttgcctccacttagtgagcggaagaatgtgctacagttgaaactccagcagcgccggacccgggaagaactggtgagccaagggatcatgccgcctttgaaaagtccagccgcatttcatgagcagagaaggagcttggagcgggccaggacagaggactatctcaaacggaagattcgttcccggccggagagatcggagctggtcaggatgcacattttggaagagacctcggctgagccatccctccaggccaagcagctgaagctgaagagagccagactagccgatgacctcaatgagaagattgcacagaggcctggccccatggagctggtggagaagaacatccttcctgttgagtccagcctgaaggaagccatcattgtgggccaggtgaactatcccaaagtagcagacagctcttccttcgatgaggacagcagcgatgccttatcccccgagcagcctgccagccatgagtcccagggttctgtgccgtcacccctggaggcccgagtcagcgaaccactgctcagtgccacctctgcatcccccacccagcaaagccaacccaagtctgccagtgagaagtcacagcgcagcaagaaggccaaggagctgaagccaaaggtgaagaagctcaagtaccaccagtacatccccccggaccagaagcaggacaggggggcaccccccatggactcatcctacgccaagatcctgcagcagcagcagctcttcctccagctgcagatcctcaaccagcagcagcagcagcaccacaactaccaggccatcctgcctgccccgccaaagtcagcaggcgaggccctgggaagcagcgggacccccccagtacgcagcctctccactaccaatagcagctccagctcgggcgcccctgggccctgtgggctggcacgtcagaacagcacctcactgactggcaagccgggagccctgccggccaacctggacgacatgaaggtggcagagctgaagcaggagctgaagttgcgatcactgcctgtctcgggcaccaaaactgagctgattgagcgccttcgagcctatcaagaccaaatcagccctgtgccaggagcccccaaggcccctgccgccacctctatcctgcacaaggctggcgaggtggtggtagccttcccagcggcccggctgagcacggggccagccctggtggcagcaggcctggctccagctgaggtggtggtggccacggtggccagcagtggggtggtgaagtttggcagcacgggctccacgccccccgtgtctcccaccccctcggagcgctcactgctcagcacgggcgatgaaaactccacccccggggacacctttggtgagatggtgacatcacctctgacgcagctgaccctgcaggcctcgccactgcagatcctcgtgaaggaggagggcccccgggccgggtcctgttgcctgagccctggggggcgggcggagctagaggggcgcgacaaggaccagatgctgcaggagaaagacaagcagatcgaggcgctgacgcgcatgctccggcagaagcagcagctggtggagcggctcaagctgcagctggagcaggagaagcgagcccagcagcccgcccccgcccccgcccccctcggcacccccgtgaagcaggagaacagcttctccagctgccagctgagccagcagcccctgggccccgctcacccattcaaccccagcctggcggccccagccaccaaccacatagacccttgtgctgtggccccggggcccccgtccgtggtggtgaagcaggaagccttgcagcctgagcccgagccggtccccgccccccagttgcttctggggcctcagggccccagcctcatcaagggggttgcacctcccaccctcatcaccgactccacagggacccaccttgtcctcaccgtgaccaataagaatgcagacagccctggcctgtccagtgggagcccccagcagccctcgtcccagcctggctctccagcgcctgccccctctgcccagatggacctggagcacccactgcagcccctctttgggacccccacttctctgctgaagaaggaaccacctggctatgaggaagccatgagccagcagcccaaacagcaggaaaatggttcctcaagccagcagatggacgacctgtttgacattctcattcagagcggagaaatttcagcagatttcaaggagccgccatccctgccagggaaggagaagccatccccgaagacagtctgtgggtcccccctggcagcacagccatcaccttctgctgagctcccccaggctgccccacctcctccaggctcaccctccctccctggacgcctggaggacttcctggagagcagcacggggctgcccctgctgaccagtgggcatgacgggccagagcccctttccctcattgacgacctccatagccagatgctgagcagcactgccatcctggaccaccccccgtcacccatggacacctcggaattgcactttgttcctgagcccagcagcaccatgggcctggacctggctgatggccacctggacagcatggactggctggagctgtcgtcaggtggtcccgtgctgagcctagcccccctcagcaccacagcccccagcctcttctccacagacttcctcgatggccatgatttgcagctgcactgggattcctgcttgtagctctctggctcaagacggggtggggaaggggctgggagccagggtactccaatgcgtggctctcctgcgtgattcggcctctccacatggttgtgagtcttgacaatcacagcccctgctttttcccttccctgggaggctagaacagagaagcccttactcctggttcagtgccacgcagggcagaggagagcagctgtcaagaagcagccctggctctcacgctggggttttggacacacggtcagggtcagggccatttcagcttgacctccttttttgaggtcagggggcactgtctgtctggctacaatttggctaaggtaggtgaagcctggccaggcgggaggcttctcttctgacccagggctgagacaggttaaggggtgaatctccttcctttctctccctgctttgctgtgaagggagaaattagcctgggcctctaccccctattccctgtgtctgccaaccccaggatcccagggctccctgccattttagtgtcttggtgtagtgtaaccatttagtggttggtggcaacaattttatgtacaggtgtatatacctctatattatatatcgacatacatatatatttttgggggggggcggacaggagatgggtgcaactccctcccatcctactctcacagaagggcctggatgcaaggttacccttgagctgtgtgccacagtctggtgcccagtctggcatgcagctacccaggcccacccatcacgtgtgattgacatgtaggtaccctgccacggcctatgccccacctgccctgcttcctggctccttatcagtgccatgagggcagaggtgctacctggccttcctgccaggagctctccacccactcacattccgtccccgccgcctcactgcagccagcgtggccctaggacaggaggagcttcgggcccagcttcaccctgcggtggggctgaggggtggccatctcctgccctggggccactggcttcacattctgggctgactcataggggagtaggggtggagtcaccaaaaccagtgctgggacaaagatggggaaggtgtgtgaactttttaaaataaacacaaaaacacag

SEQ ID NO: 297965 - DNA, 3816 bp, Homo sapiens
cctcgggaccattcctagcctgggcaataagagctggtcaggctgtacattttggaagagacctcggctgagccatccctccaggccaagcagctgaagctgaagagagccagactagccgatgacctcaatgagaagattgcacagaggcctggccccatggagctggtggagaagaacatccttcctgttgagtccagcctgaaggaagccatcattgtgggccaggtgaactatcccaaagtagcagacagctcttccttcgatgaggacagcagcgatgccttatcccccgagcagcctgccagccatgagtcccagggttctgtgccgtcacccctggaggcccgagtcagcgaaccactgctcagtgccacctctgcatcccccacccaggttgtgtctcaacttccgatgggccgggattccagagaaatgcttttcctggcagagcagcctcctctgcctcccccacctctgctgcctcccagcctcaccaatggaaccactatccccactgccaagtccacccccacactcattaagcaaagccaacccaagtctgccagtgagaagtcacagcgcagcaagaaggccaaggagctgaagccaaaggtgaagaagctcaagtaccaccagtacatccccccggaccagaagcaggacaggggggcaccccccatggactcatcctacgccaagatcctgcagcagcagcagctcttcctccagctgcagatcctcaaccagcagcagcagcagcaccacaactaccaggccatcctgcctgccccgccaaagtcagcaggcgaggccctgggaagcagcgggacccccccagtacgcagcctctccactaccaatagcagctccagctcgggcgcccctgggccctgtgggctggcacgtcagaacagcacctcactgactggcaagccgggagccctgccggccaacctggacgacatgaaggtggcagagctgaagcaggagctgaagttgcgatcactgcctgtctcgggcaccaaaactgagctgattgagcgccttcgagcctatcaagaccaaatcagccctgtgccaggagcccccaaggcccctgccgccacctctatcctgcacaaggctggcgaggtggtggtagccttcccagcggcccggctgagcacggggccagccctggtggcagcaggcctggctccagctgaggtggtggtggccacggtggccagcagtggggtggtgaagtttggcagcacgggctccacgccccccgtgtctcccaccccctcggagcgctcactgctcagcacgggcgatgaaaactccacccccggggacacctttggtgagatggtgacatcacctctgacgcagctgaccctgcaggcctcgccactgcagatcctcgtgaaggaggagggcccccgggccgggtcctgttgcctgagccctggggggcgggcggagctagaggggcgcgacaaggaccagatgctgcaggagaaagacaagcagatcgaggcgctgacgcgcatgctccggcagaagcagcagctggtggagcggctcaagctgcagctggagcaggagaagcgagcccagcagcccgcccccgcccccgcccccctcggcacccccgtgaagcaggagaacagcttctccagctgccagctgagccagcagcccctgggccccgctcacccattcaaccccagcctggcggccccagccaccaaccacatagacccttgtgctgtggccccggggcccccgtccgtggtggtgaagcaggaagccttgcagcctgagcccgagccggtccccgccccccagttgcttctggggcctcagggccccagcctcatcaagggggttgcacctcccaccctcatcaccgactccacagggacccaccttgtcctcaccgtgaccaataagaatgcagacagccctggcctgtccagtgggagcccccagcagccctcgtcccagcctggctctccagcgcctgccccctctgcccagatggacctggagcacccactgcagcccctctttgggacccccacttctctgctgaagaaggaaccacctggctatgaggaagccatgagccagcagcccaaacagcaggaaaatggttcctcaagccagcagatggacgacctgtttgacattctcattcagagcggagaaatttcagcagatttcaaggagccgccatccctgccagggaaggagaagccatccccgaagacagtctgtgggtcccccctggcagcacagccatcaccttctgctgagctcccccaggctgccccacctcctccaggctcaccctccctccctggacgcctggaggacttcctggagagcagcacggggctgcccctgctgaccagtgggcatgacgggccagagcccctttccctcattgacgacctccatagccagatgctgagcagcactgccatcctggaccaccccccgtcacccatggacacctcggaattgcactttgttcctgagcccagcagcaccatgggcctggacctggctgatggccacctggacagcatggactggctggagctgtcgtcaggtggtcccgtgctgagcctagcccccctcagcaccacagcccccagcctcttctccacagacttcctcgatggccatgatttgcagctgcactgggattcctgcttgtagctctctggctcaagacggggtggggaaggggctgggagccagggtactccaatgcgtggctctcctgcgtgattcggcctctccacatggttgtgagtcttgacaatcacagcccctgctttttcccttccctgggaggctagaacagagaagcccttactcctggttcagtgccacgcagggcagaggagagcagctgtcaagaagcagccctggctctcacgctggggttttggacacacggtcagggtcagggccatttcagcttgacctccttttttgaggtcagggggcactgtctgtctggctacaatttggctaaggtaggtgaagcctggccaggcgggaggcttctcttctgacccagggctgagacaggttaaggggtgaatctccttcctttctctccctgctttgctgtgaagggagaaattagcctgggcctctaccccctattccctgtgtctgccaaccccaggatcccagggctccctgccattttagtgtcttggtgtagtgtaaccatttagtggttggtggcaacaattttatgtacaggtgtatatacctctatattatatatcgacatacatatatatttttgggggggggcggacaggagatgggtgcaactccctcccatcctactctcacagaagggcctggatgcaaggttacccttgagctgtgtgccacagtctggtgcccagtctggcatgcagctacccaggcccacccatcacgtgtgattgacatgtaggtaccctgccacggcctatgccccacctgccctgcttcctggctccttatcagtgccatgagggcagaggtgctacctggccttcctgccaggagctctccacccactcacattccgtccccgccgcctcactgcagccagcgtggccctaggacaggaggagcttcgggcccagcttcaccctgcggtggggctgaggggtggccatctcctgccctggggccactggcttcacattctgggctgactcataggggagtaggggtggagtcaccaaaaccagtgctgggacaaagatggggaaggtgtgtgaactttttaaaataaacacaaaaacacag

SEQ ID NO: 297966 - DNA, 4412 bp, Homo sapiens
gctgagaggagccggcggcggcagtgtctgtggtggccgcggcggcgagagcgacggtcccatctttcccaccctcttggttgccgctggccacacgccctccgctggcggcgacttctcagctccgtgcgcccgggctggacagtgagcctcgagaggagacgcgggcggctagagccggagtggggcgagccgcggaacccggccgggagccgcgcgaggcgtgatcggagggtatggttggcatggaattgaatttcatctgtctgtgggaattgtaagcaagattgccatcacgaaagccaaagtggatttctccagtgtggtgtgcctgcccccttccgtcattgctgtgaatgggctggacggaggaggggccggcgaaaatgatgatgaaccagtgctcgtgtccttatctgcggcacccagtccccagagtgaagctgttgccaatgaactgcaggagctctccttgcagcccgagctgaccctaggcctccaccctggcaggaatcccaatttgcctccacttagtgagcggaagaatgtgctacagttgaaactccagcagcgccggacccgggaagaactggtgagccaagggatcatgccgcctttgaaaagtccagccgcatttcatgagcagagaaggagcttggagcgggccaggacagaggactatctcaaacggaagattcgttcccggccggagagatcggagctggtcaggatgcacattttggaagagacctcggctgagccatccctccaggccaagcagctgaagctgaagagagccagactagccgatgacctcaatgagaagattgcacagaggcctggccccatggagctggtggagaagaacatccttcctgttgagtccagcctgaaggaagccatcattgtgggccaggtgaactatcccaaagtagcagacagctcttccttcgatgaggacagcagcgatgccttatcccccgagcagcctgccagccatgagtcccagggttctgtgccgtcacccctggaggcccgagtcagcgaaccactgctcagtgccacctctgcatcccccacccaggttgtgtctcaacttccgatgggccgggattccagagaaatgcttttcctggcagagcagcctcctctgcctcccccacctctgctgcctcccagcctcaccaatggaaccactatccccactgccaagtccacccccacactcattaagcaaagccaacccaagtctgccagtgagaagtcacagcgcagcaagaaggccaaggagctgaagccaaaggtgaagaagctcaagtaccaccagtacatccccccggaccagaagcaggacaggggggcaccccccatggactcatcctacgccaagatcctgcagcagcagcagctcttcctccagctgcagatcctcaaccagcagcagcagcagcaccacaactaccaggccatcctgcctgccccgccaaagtcagcaggcgaggccctgggaagcagcgggacccccccagtacgcagcctctccactaccaatagcagctccagctcgggcgcccctgggccctgtgggctggcacgtcagaacagcacctcactgactggcaagccgggagccctgccggccaacctggacgacatgaaggtggcagagctgaagcaggagctgaagttgcgatcactgcctgtctcgggcaccaaaactgagctgattgagcgccttcgagcctatcaagaccaaatcagccctgtgccaggagcccccaaggcccctgccgccacctctatcctgcacaaggctggcgaggtggtggtagccttcccagcggcccggctgagcacggggccagccctggtggcagcaggcctggctccagctgaggtggtggtggccacggtggccagcagtggggtggtgaagtttggcagcacgggctccacgccccccgtgtctcccaccccctcggagcgctcactgctcagcacgggcgatgaaaactccacccccggggacacctttggtgagatggtgacatcacctctgacgcagctgaccctgcaggcctcgccactgcagatcctcgtgaaggaggagggcccccgggccgggtcctgttgcctgagccctggggggcgggcggagctagaggggcgcgacaaggaccagatgctgcaggagaaagacaagcagatcgaggcgctgacgcgcatgctccggcagaagcagcagctggtggagcggctcaagctgcagctggagcaggagaagcgagcccagcagcccgcccccgcccccgcccccctcggcacccccgtgaagcaggagaacagcttctccagctgccagctgagccagcagcccctgggccccgctcacccattcaaccccagcctggcggccccagccaccaaccacatagacccttgtgctgtggccccggggcccccgtccgtggtggtgaagcaggaagccttgcagcctgagcccgagccggtccccgccccccagttgcttctggggcctcagggccccagcctcatcaagggggttgcacctcccaccctcatcaccgactccacagggacccaccttgtcctcaccgtgaccaataagaatgcagacagccctggcctgtccagtgggagcccccagcagccctcgtcccagcctggctctccagcgcctgccccctctgcccagatggacctggagcacccactgcagcccctctttgggacccccacttctctgctgaagaaggaaccacctggctatgaggaagccatgagccagcagcccaaacagcaggaaaatggttcctcaagccagcagatggacgacctgtttgacattctcattcagagcggagaaatttcagcagatttcaaggagccgccatccctgccagggaaggagaagccatccccgaagacagtctgtgggtcccccctggcagcacagccatcaccttctgctgagctcccccaggctgccccacctcctccaggctcaccctccctccctggacgcctggaggacttcctggagagcagcacggggctgcccctgctgaccagtgggcatgacgggccagagcccctttccctcattgacgacctccatagccagatgctgagcagcactgccatcctggaccaccccccgtcacccatggacacctcggaattgcactttgttcctgagcccagcagcaccatgggcctggacctggctgatggccacctggacagcatggactggctggagctgtcgtcaggtggtcccgtgctgagcctagcccccctcagcaccacagcccccagcctcttctccacagacttcctcgatggccatgatttgcagctgcactgggattcctgcttgtagctctctggctcaagacggggtggggaaggggctgggagccagggtactccaatgcgtggctctcctgcgtgattcggcctctccacatggttgtgagtcttgacaatcacagcccctgctttttcccttccctgggaggctagaacagagaagcccttactcctggttcagtgccacgcagggcagaggagagcagctgtcaagaagcagccctggctctcacgctggggttttggacacacggtcagggtcagggccatttcagcttgacctccttttttgaggtcagggggcactgtctgtctggctacaatttggctaaggtaggtgaagcctggccaggcgggaggcttctcttctgacccagggctgagacaggttaaggggtgaatctccttcctttctctccctgctttgctgtgaagggagaaattagcctgggcctctaccccctattccctgtgtctgccaaccccaggatcccagggctccctgccattttagtgtcttggtgtagtgtaaccatttagtggttggtggcaacaattttatgtacaggtgtatatacctctatattatatatcgacatacatatatatttttgggggggggcggacaggagatgggtgcaactccctcccatcctactctcacagaagggcctggatgcaaggttacccttgagctgtgtgccacagtctggtgcccagtctggcatgcagctacccaggcccacccatcacgtgtgattgacatgtaggtaccctgccacggcctatgccccacctgccctgcttcctggctccttatcagtgccatgagggcagaggtgctacctggccttcctgccaggagctctccacccactcacattccgtccccgccgcctcactgtggcttcacattctgggctgactcataggggagtaggggtggagtcaccaaaaccagtgctgggacaaagatggggaaggtgtgtgaactttttaaaataaacacaaaaacacag

SEQ ID NO: 297967 - DNA, 1874 bp, Homo sapiens
agccccctggccactggtcctctccctgctctcctgtccagccctcgtcccagcctggctctccagcgcctgccccctctgcccagatggacctggagcacccactgcagcccctctttgggacccccacttctctgctgaagaaggaaccacctggctatgaggaagccatgagccagcagcccaaacagcaggaaaatggttcctcaagccagcagatggacgacctgtttgacattctcattcagagcggagaaatttcagcagatttcaaggagccgccatccctgccagggaaggagaagccatccccgaagacagtctgtgggtcccccctggcagcacagccatcaccttctgctgagctcccccaggctgccccacctcctccaggctcaccctccctccctggacgcctggaggacttcctggagagcagcacggggctgcccctgctgaccagtgggcatgacgggccagagcccctttccctcattgacgacctccatagccagatgctgagcagcactgccatcctggaccaccccccgtcacccatggacacctcggaattgcactttgttcctgagcccagcagcaccatgggcctggacctggctgatggccacctggacagcatggactggctggagctgtcgtcaggtggtcccgtgctgagcctagcccccctcagcaccacagcccccagcctcttctccacagacttcctcgatggccatgatttgcagctgcactgggattcctgcttgtagctctctggctcaagacggggtggggaaggggctgggagccagggtactccaatgcgtggctctcctgcgtgattcggcctctccacatggttgtgagtcttgacaatcacagcccctgctttttcccttccctgggaggctagaacagagaagcccttactcctggttcagtgccacgcagggcagaggagagcagctgtcaagaagcagccctggctctcacgctggggttttggacacacggtcagggtcagggccatttcagcttgacctccttttttgaggtcagggggcactgtctgtctggctacaatttggctaaggtaggtgaagcctggccaggcgggaggcttctcttctgacccagggctgagacaggttaaggggtgaatctccttcctttctctccctgctttgctgtgaagggagaaattagcctgggcctctaccccctattccctgtgtctgccaaccccaggatcccagggctccctgccattttagtgtcttggtgtagtgtaaccatttagtggttggtggcaacaattttatgtacaggtgtatatacctctatattatatatcgacatacatatatatttttgggggggggcggacaggagatgggtgcaactccctcccatcctactctcacagaagggcctggatgcaaggttacccttgagctgtgtgccacagtctggtgcccagtctggcatgcagctacccaggcccacccatcacgtgtgattgacatgtaggtaccctgccacggcctatgccccacctgccctgcttcctggctccttatcagtgccatgagggcagaggtgctacctggccttcctgccaggagctctccacccactcacattccgtccccgccgcctcactgcagccagcgtggccctaggacaggaggagcttcgggcccagcttcaccctgcggtggggctgaggggtggccatctcctgccctggggccactggcttcacattctgggctgactcataggggagtaggggtggagtcaccaaaaccagtgctgggacaaagatggggaaggtgtgtgaactttttaaaataaacacaaaaacacag

SEQ ID NO: 297968 - DNA, 3232 bp, Homo sapiens
gctgagaggagccggcggcggcagtgtctgtggtggccgcggcggcgagagcgacggtcccatctttcccaccctcttggttgccgctggccacacgccctccgctggcggcgacttctcagctccgtgcgcccgggctggacagtgagcctcgagaggagacgcgggcggctagagccggagtggggcgagccgcggaacccggccgggagccgcgcgaggcgtgatcggagggtatggttggcatggaattgaatttcatctgtctgtgggaattgtaagcaagattgccatcacgaaagccaaagtggatttctccagtgtggtgtgcctgcccccttccgtcattgctgtgaatgggctggacggaggaggggccggcgaaaatgatgatgaaccagtgctcgtgtccttatctgcggcacccagtccccagagtgaagctgttgccaatgaactgcaggagctctccttgcagcccgagctgaccctaggcctccaccctggcaggaatcccaatttgcctccacttagtgagcggaagaatgtgctacagttgaaactccagcagcgccggacccgggaagaactggtgagccaagggatcatgccgcctttgaaaagtccagccgcatttcatgagcagagaaggagcttggagcgggccaggacagaggactatctcaaacggaagattcgttcccggccggagagatcggagctggtcaggatgcacattttggaagagacctcggctgagccatccctccaggccaagcagctgaagctgaagagagccagactagccgatgacctcaatgagaagattgcacagaggcctggccccatggagctggtggagaagaacatccttcctgttgagtccagcctgaaggaagccatcattgtgggccaggtgaactatcccaaagtagcagacagctcttccttcgatgaggacagcagcgatgccttatcccccgagcagcctgccagccatgagtcccagggttctgtgccgtcacccctggaggcccgagtcagcgaaccactgctcagtgccacctctgcatcccccacccaggttgtgtctcaacttccgatgggccgggattccagagaaatgcttttcctggcagagcagcctcctctgcctcccccacctctgctgcctcccagcctcaccaatggaaccactatccccactgccaagtccacccccacactcattaagcaaagccaacccaagtctgccagtgagaagtcacagcgcagcaagaaggccaaggagctgaagccaaaggtgaagaagctcaagtaccaccagtacatccccccggaccagaagcaggacaggggggcaccccccatggactcatcctacgccaagatcctgcagcagcagcagctcttcctccagctgcagatcctcaaccagcagcagcagcagcaccacaactaccaggccatcctgcctgccccgccaaagtcagcaggcgaggccctgggaagcagcgggacccccccagtacgcagcctctccactaccaatagcagctccagctcgggcgcccctgggccctgtgggctggcacgtcagaacagcacctcactgactggcaagccgggagccctgccggccaacctggacgacatgaaggtggcagagctgaagcaggagctgaagttgcgatcactgcctgtctcgggcaccaaaactgagctgattgagcgccttcgagcctatcaagaccaaatcagccctgtgccaggagcccccaaggcccctgccgccacctctatcctgcacaaggctggcgaggtggtggtagccttcccagcggcccggctgagcacggggccagccctggtggcagcaggcctggctccagctgaggtggtggtggccacggtggccagcagtggggtggtgaagtttggcagcacgggctccacgccccccgtgtctcccaccccctcggagcgctcactgctcagcacgggcgatgaaaactccacccccggggacacctttggtgagatggtgacatcacctctgacgcagctgaccctgcaggcctcgccactgcagatcctcgtgaaggaggagggcccccgggccgggtcctgttgcctgagccctggggggcgggcggagctagaggggcgcgacaaggaccagatgctgcaggagaaagacaagcagatcgaggcgctgacgcgcatgctccggcagaagcagcagctggtggagcggctcaagctgcagctggagcaggagaagcgagcccagcagcccgcccccgcccccgcccccctcggcacccccgtgaagcaggagaacagcttctccagctgccagctgagccagcagcccctgggccccgctcacccattcaaccccagcctggcggccccagccaccaaccacatagacccttgtgctgtggccccggggcccccgtccgtggtggtgaagcaggaagccttgcagcctgagcccgagccggtccccgccccccagttgcttctggggcctcagggccccagcctcatcaagggggttgcacctcccaccctcatcaccgactccacagggacccaccttgtcctcaccgtgaccaataagaatgcagacagccctggcctgtccagtgggagcccccagcagccctcgtcccagcctggctctccagcgcctgccccctctgcccagatggacctggagcacccactgcagcccctctttgggacccccacttctctgctgaagaaggaaccacctggctatgaggaagccatgagccagcagcccaaacagcaggaaaatggttcctcaagccagcagatggacgacctgtttgacattctcattcagagcggagaaatttcagcagatttcaaggagccgccatccctgccctgcttcctggctccttatcagtgccatgagggcagaggtgctacctggccttcctgccaggagctctccacccactcacattccgtccccgccgcctcactgcagccagcgtggccctaggacaggaggagcttcgggcccagcttcaccctgcggtggggctgaggggtggccatctcctgccctggggccactggcttcacattctgggctgactcataggggagtaggggtggagtcaccaaaaccagtgctgggacaaagatggggaaggtgtgtgaactttttaaaataaacacaaaaacacag

SEQ ID NO: 297969 - DNA, 1536 bp, Homo sapiens
gctgagaggagccggcggcggcagtgtctgtggtggccgcggcggcgagagcgacggtcccatctttcccaccctcttggttgccgctggccacacgccctccgctggcggcgacttctcagctccgtgcgcccgggctggacagtgagcctcgagaggagacgcgggcggctagagccggagtggggcgagccgcggaacccggccgggagccgcgcgaggcgtgatcggagggtatggttggcatggaattgaatttcatctgtctgtgggaattgtaagcaagattgccatcacgaaagccaaagtggatttctccagtgtggtgtgcctgcccccttccgtcattgctgtgaatgggctggacggaggaggggccggcgaaaatgatgatgaaccagtgctcgtgtccttatctgcggcacccagtccccagagtgaagctgttgccaatgaactgcaggagctctccttgcagcccgagctgaccctaggcctccaccctggcaggaatcccaatttgcctccacttagtgagcggaagaatgtgctacagttgaaactccagcagcgccggacccgggaagaactggtgagccaagggatcatgccgcctttgaaaagtccagccgcatttcatgagcagagaaggagcttggagcgggccaggacagaggactatctcaaacggaagattcgttcccggccggagagatcggagctggtcaggatgcacattttggaagagacctcggctgagccatccctccaggccaagcagctgaagctgaagagagccagactagccgatgacctcaatgagaagattgcacagaggcctggccccatggagctggtggagaagaacatccttcctgttgagtccagcctgaaggaagccatcattgtgggccaggtgaactatcccaaagtagcagacagctcttccttcgatgaggacagcagcgatgccttatcccccgagcagcctgccagccatgagtcccagggttctgtgccgtcacccctggaggcccgagtcagcgaaccactgctcagtgccacctctgcatcccccacccaggttgtgtctcaacttccgatgggccgggattccagagaaatgcttttcctggcagagcagcctcctctgcctcccccacctctgctgcctcccagcctcaccaatggaaccactatccccactgccaagtccacccccacactcattaagcaaagccaacccaagtctgccagtgagaagtcacagcgcagcaagaaggccaaggactctccacccactcacattccgtccccgccgcctcactgcagccagcgtggccctaggacaggaggagcttcgggcccagcttcaccctgcggtggggctgaggggtggccatctcctgccctggggccactggcttcacattctgggctgactcataggggagtaggggtggagtcaccaaaaccagtgctgggacaaagatggggaaggtgtgtgaactttttaaaataaacacaaaaacacag

SEQ ID NO: 297970 - DNA, 1173 bp, Homo sapiens
gctgagaggagccggcggcggcagtgtctgtggtggccgcggcggcgagagcgacggtcccatctttcccaccctcttggttgccgctggccacacgccctccgctggcggcgacttctcagctccgtgcgcccgggctggacagtgagcctcgagaggagacgcgggcggctagagccggagtggggcgagccgcggaacccggccgggagccgcgcgaggcgtgatcggagggtatggttggcatggaattgaatttcatctgtctgtgggaattgtaagcaagattgccatcacgaaagccaaagtggatttctccagtgtggtgtgcctgcccccttccgtcattgctgtgaatgggctggacggaggaggggccggcgaaaatgatgatgaaccagtgctcgtgtccttatctgcggcacccagtccccagagtgaagctgttgccaatgaactgcaggagctctccttgcagcccgagctgaccctaggcctccaccctggcaggaatcccaatttgcctccacttagtgagcggaagaatgtgctacagttgaaactccagcagcgccggacccgggaagaactggtgagccaagggatcatgccgcctttgaaaagtccagccgcatttcatgagcagagaaggagcttggagcgggccaggacagaggactatctcaaacggaagattcgttcccggccggagagatcggagctggtcaggatgcacattttggaagagacctcggctgagccatccctccaggccaagcagctgaagctgaagagagccagactagccgatgacctcaatgagaagattgcacagaggcctggccccatggagctggtggagaagaacatccttcctgttgagtccagcctgaaggaagccatcattgtgaggaggacccagccaccctgtgtgagaggcagctgagatgcaggaggggagggagtgccaggctgaagcagaattgggctgaggctcttgacttcttaatctttgacttcctgcttagccttgggagaaccaaggcacagagtttgagagcctcatgcacaggttgtatgaacttgggatagtgcctgttgctttaagaaacagggacatacaacaataaataataacagaggccttgctctgttcactttcatctttgtaaa

SEQ ID NO: 297971 - DNA, 764 bp, Homo sapiens
gctgagaggagccggcggcggcagtgtctgtggtggccgcggcggcgagagcgacggtcccatctttcccaccctcttggttgccgctggccacacgccctccgctggcggcgacttctcagctccgtgcgcccgggctggacagtgagcctcgagaggagacgcgggcggctagagccggagtggggcgagccgcggaacccggccgggagccgcgcgaggcgtgatcggagggtatggttggcatggaattgaatttcatctgtctgtgggaattgtaagcaagattgccatcacgaaagccaaagtggatttctccagtgtggtgtgcctgcccccttccgtcattgctgtgaatgggctggacggaggaggggccggcgaaaatgatgatgaaccagtgctcgtgtccttatctgcggcacccagtccccagagtgaagctgttgccaatgaactgcaggagctctccttgcagcccgagctgaccctaggcctccaccctggcaggaatcccaatttgcctccacttagtgagcggaagaatgtgctacagttgaaactccagcagcgccggacccgggaagaactggtgagccaagggatcatgccgccaaaactggttgaacagcggatgaagatatggaattcaaagctctaatggacctttttgaagagaagttgtggcttatgtggagtttacatgggcctctgatggaagaaagctaatctgtttagtatttgtgcattttactaaaatggca

SEQ ID NO: 297972 - DNA, 1008 bp, Homo sapiens
agcatggcatggatcacagccggctttaactcggtcacagggcagatgtgttaaggtacagtggtcccttcgatcacagctgatattagccggatcgggcacgggtctccgaccaggtgagttatggaccagctcactggattgctagtctatactcatttgtcagtccatacacacaactaaagctctgacaacatgtggcctattaccctggctactagacaggtgaccctgctgcctacagacagtcaatgattccggccctgccttcacaaagtgagcggacagagtgaaaaatgtctcaaattgggtataacaaatcagcgtgattgcctttcacctccactttggagtgctttgagccagtttggacacaaggaggttggagttaaaatgactcctgaaggaagtaagcaagcatgagaagagagggcagcactgtgctacagttgaaactccagcagcgccggacccgggaagaactggtgagccaagggatcatgccgcctttgaaaagtccagccgcatttcatgagcagagaaggagcttggagcgggccaggacagaggactatctcaaacggaagattcgttcccggccggagagatcggagctggtcaggatgcacattttggaagagacctcggctgagccatccctccaggccaagcagctgaagctgaagagagccagactagccgatgacctcaatgagaagattgcacagaggcctggccccatggagctggtggagaagaacatccttcctgttgagtccagcctgaaggaagccatcattgcagccagcgtggccctaggacaggaggagcttcgggcccagcttcaccctgcggtggggctgaggggtggccatctcctgccctggggccactggcttcacattctgggctgactcataggggagtaggggtggagtcaccaaaaccagtgctgggacaaagatggggaaggtgtgtgaactttttaaaataaacacaaaaacacag

SEQ ID NO: 297973 - DNA, 326 bp, Homo sapiens
tgtttttagactttttttgcgtttgaaaatgtgttttttgaggtggaatacccaactgacccctcatctctcctctctctctgctgccctgcagtgctacagttgaaactccagcagcgccggacccgggaagaactggtgagccaagggatcatgccgcgtaagtgcctctctctctcagcatttggtagattgcttttaggacatggctgtgttcaccgagtatgccatgggaagcatctaacataaaacaaggatgatgcgttttattttccactctcttctttctcatgactttccaagtttagagctcaatcactaaatag

SEQ ID NO: 297974 - DNA, 4504 bp, Homo sapiens
gctgagaggagccggcggcggcagtgtctgtggtggccgcggcggcgagagcgacggtcccatctttcccaccctcttggttgccgctggccacacgccctccgctggcggcgacttctcagctccgtgcgcccgggctggacagtgagcctcgagaggagacgcgggcggctagagccggagtggggcgagccgcggaacccggccgggagccgcgcgaggcgtgatcggagggtatggttggcatggaattgaatttcatctgtctgtgggaattgtaagcaagattgccatcacgaaagccaaagtggatttctccagtgtggtgtgcctgcccccttccgtcattgctgtgaatgggctggacggaggaggggccggcgaaaatgatgatgaaccagtgctcgtgtccttatctgcggcacccagtccccagagtgaagctgttgccaatgaactgcaggagctctccttgcagcccgagctgaccctaggcctccaccctggcaggaatcccaatttgcctccacttagtgagcggaagaatgtgctacagttgaaactccagcagcgccggacccgggaagaactggtgagccaagggatcatgccgcctttgaaaagtccagccgcatttcatgagcagagaaggagcttggagcgggccaggacagaggactatctcaaacggaagattcgttcccggccggagagatcggagctggtcaggatgcacattttggaagagacctcggctgagccatccctccaggccaagcagctgaagctgaagagagccagactagccgatgacctcaatgagaagattgcacagaggcctggccccatggagctggtggagaagaacatccttcctgttgagtccagcctgaaggaagccatcattgtgggccaggtgaactatcccaaagtagcagacagctcttccttcgatgaggacagcagcgatgccttatcccccgagcagcctgccagccatgagtcccagggttctgtgccgtcacccctggaggcccgagtcagcgaaccactgctcagtgccacctctgcatcccccacccaggttgtgtctcaacttccgatgggccgggattccagagaaatgcttttcctggcagagcagcctcctctgcctcccccacctctgctgcctcccagcctcaccaatggaaccactatccccactgccaagtccacccccacactcattaagcaaagccaacccaagtctgccagtgagaagtcacagcgcagcaagaaggccaaggagctgaagccaaaggtgaagaagctcaagtaccaccagtacatccccccggaccagaagcaggacaggggggcaccccccatggactcatcctacgccaagatcctgcagcagcagcagctcttcctccagctgcagatcctcaaccagcagcagcagcagcaccacaactaccaggccatcctgcctgccccgccaaagtcagcaggcgaggccctgggaagcagcgggacccccccagtacgcagcctctccactaccaatagcagctccagctcgggcgcccctgggccctgtgggctggcacgtcagaacagcacctcactgactggcaagccgggagccctgccggccaacctggacgacatgaaggtggcagagctgaagcaggagctgaagttgcgatcactgcctgtctcgggcaccaaaactgagctgattgagcgccttcgagcctatcaagaccaaatcagccctgtgccaggagcccccaaggcccctgccgccacctctatcctgcacaaggctggcgaggtggtggtagccttcccagcggcccggctgagcacggggccagccctggtggcagcaggcctggctccagctgaggtggtggtggccacggtggccagcagtggggtggtgaagtttggcagcacgggctccacgccccccgtgtctcccaccccctcggagcgctcactgctcagcacgggcgatgaaaactccacccccggggacacctttggtgagatggtgacatcacctctgacgcagctgaccctgcaggcctcgccactgcagatcctcgtgaaggaggagggcccccgggccgggtcctgttgcctgagccctggggggcgggcggagctagaggggcgcgacaaggaccagatgctgcaggagaaagacaagcagatcgaggcgctgacgcgcatgctccggcagaagcagcagctggtggagcggctcaagctgcagctggagcaggagaagcgagcccagcagcccgcccccgcccccgcccccctcggcacccccgtgaagcaggagaacagcttctccagctgccagctgagccagcagcccctgggccccgctcacccattcaaccccagcctggcggccccagccaccaaccacatagacccttgtgctgtggccccggggcccccgtccgtggtggtgaagcaggaagccttgcagcctgagcccgagccggtccccgccccccagttgcttctggggcctcagggccccagcctcatcaagggggttgcacctcccaccctcatcaccgactccacagggacccaccttgtcctcaccgtgaccaataagaatgcagacagccctggcctgtccagtgggagcccccagcagccctcgtcccagcctggctctccagcgcctgccccctctgcccagatggacctggagcacccactgcagcccctctttgggacccccacttctctgctgaagaaggaaccacctggctatgaggaagccatgagccagcagcccaaacagcaggaaaatggttcctcaagccagcagatggacgacctgtttgacattctcattcagagcggagaaatttcagcagatttcaaggagccgccatccctgccagggaaggagaagccatccccgaagacagtctgtgggtcccccctggcagcacagccatcaccttctgctgagctcccccaggctgccccacctcctccaggctcaccctccctccctggacgcctggaggacttcctggagagcagcacggggctgcccctgctgaccagtgggcatgacgggccagagcccctttccctcattgacgacctccatagccagatgctgagcagcactgccatcctggaccaccccccgtcacccatggacacctcggaattgcactttgttcctgagcccagcagcaccatgggcctggacctggctgatggccacctggacagcatggactggctggagctgtcgtcaggtggtcccgtgctgagcctagcccccctcagcaccacagcccccagcctcttctccacagacttcctcgatggccatgatttgcagctgcactgggattcctgcttgtagctctctggctcaagacggggtggggaaggggctgggagccagggtactccaatgcgtggctctcctgcgtgattcggcctctccacatggttgtgagtcttgacaatcacagcccctgctttttcccttccctgggaggctagaacagagaagcccttactcctggttcagtgccacgcagggcagaggagagcagctgtcaagaagcagccctggctctcacgctggggttttggacacacggtcagggtcagggccatttcagcttgacctccttttttgaggtcagggggcactgtctgtctggctacaatttggctaaggtaggtgaagcctggccaggcgggaggcttctcttctgacccagggctgagacaggttaaggggtgaatctccttcctttctctccctgctttgctgtgaagggagaaattagcctgggcctctaccccctattccctgtgtctgccaaccccaggatcccagggctccctgccattttagtgtcttggtgtagtgtaaccatttagtggttggtggcaacaattttatgtacaggtgtatatacctctatattatatatcgacatacatatatatttttgggggggggcggacaggagatgggtgcaactccctcccatcctactctcacagaagggcctggatgcaaggttacccttgagctgtgtgccacagtctggtgcccagtctggcatgcagctacccaggcccacccatcacgtgtgattgacatgtaggtaccctgccacggcctatgccccacctgccctgcttcctggctccttatcagtgccatgagggcagaggtgctacctggccttcctgccaggagctctccacccactcacattccgtccccgccgcctcactgcagccagcgtggccctaggacaggaggagcttcgggcccagcttcaccctgcggtggggctgaggggtggccatctcctgccctggggccactggcttcacattctgggctgactcataggggagtaggggtggagtcaccaaaaccagtgctgggacaaagatggggaaggtgtgtgaactttttaaaataaacacaaaaacacag

SEQ ID NO: 297975 - DNA, 6849 bp, Homo sapiens
tgagactgtagaagagagagcaattggccaatgaggactgcggggcgggaccctgtgccgcggcggagtccaagatggcggcgtgcggttccgctgtgtgaaacgagcgcggggcggcgggttactcagctccgcggagacgacctccgacgacccgcaacaatgaagggaaaagagcgctcgccagtgaaggccaaacgctcccgtggtggtgaggactcgacttcccgcggtgagcggagcaagaagttagggggctctggtggcagcaatgggagcagcagcggaaagaccgatagcggcggtgggtcgcggcggagtctccacctggacaagtccagcagtcgaggtggcagccgcgagtatgataccggtgggggcagctccagtagccgcttgcatagttatagctccccgagcaccaaaaattcttcgggcgggggcgagtcgcgcagcagctcccggggtggaggcggggagtcacgttcctctggggccgcctcctcagctcccggcggcggggacggcgcggaatacaagactctgaagataagcgagttggggtcccagcttagtgacgaagcggtggaggacggcctgtttcatgagttcaaacgcttcggtgatgtaagtgtgaaaatcagtcatctgtcgggttctggcagcggggatgagcgggtagcctttgtgaacttccggcggccagaggacgcgcgggcggccaagcatgccagaggccgcctggtgctctatgaccggcctctgaagatagaagctgtgtatgtgagccggcgccgcagccgctcccctttagacaaagatacttatcctccatcagccagtgtggtcggggcctctgtaggtggtcaccggcacccccctggaggtggtggaggccagagatcactttcccctggtggcgctgctttgggatacagagactaccggctgcagcagttggctcttggccgcctgccccctccacctccgccaccattgcctcgagacctggagagagaaagagactacccgttctatgagagagtgcgccctgcatacagtcttgagccaagggtgggagctggagcaggtgctgctcctttcagagaagtggatgagatttcacccgaggatgatcagcgagctaaccggacgctcttcttgggcaacctagacatcactgtaacggagagtgatttaagaagggcgtttgatcgctttggagtcatcacagaagtagatatcaagaggccttctcgcggccagactagtacttacggctttctcaaatttgagaacttagatatgtctcaccgggccaaattagcaatgtctggcaaaattataattcggaatcctatcaaaattggttatggtaaagctacacccaccacccgcctctgggtgggaggcctgggaccttgggttcctcttgctgccctggcacgagaatttgatcgatttggcaccatacgcaccatagactaccgaaaaggtgatagttgggcatatatccagtatgaaagcctggatgcagcgcatgctgcctggacccatatgcggggcttcccacttggtggcccagatcgacgccttagagtagactttgccgacaccgaacatcgttaccagcagcagtatctgcagcctctgcccttgactcattatgagctggtgacagatgcttttggacatcgggcaccagaccctttgaggggtgctcgggataggacaccacccttactatacagagatcgtgatagggacctttatcctgactctgattgggtgccacccccacccccagtccgagaacgcagcactcggactgcagctacttctgtgcctgcttacgagccactggatagcctagatcgcaggcgggatggttggtccttggaccgggacagaggtgatcgagatctgcccagcagcagagaccagcctaggaagcgaaggctgcctgaggagagtggaggacgtcatctggataggtctcctgagagtgaccgcccacgaaaacgtcactgcgctccttctcctgaccgcagtccagaattgagcagtagccgggatcgttacaacagcgacaatgatcgatcttcccgtcttctcttggaaaggccctctccaatcagagacagacgaggtagtttggagaagagccagggtgacaagcgagaccgtaaaaactctgcatcagctgaacgagataggaagcaccggacaactgctcccactgagggaaaaagccctctgaaaaaagaagaccgctctgatgggagtgcacctagcaccagcactgcttcctccaagctgaagtccccgtcccagaaacaggatggggggacagcccctgtggcatcagcctctcccaaactctgtttggcctggcagggcatgcttctactgaagaacagcaactttccttccaacatgcatctgttgcagggtgacctccaagtggctagtagtcttcttgtggagggttcaactggaggcaaagtggcccagctcaagatcactcagcgtctccgtttggaccagcccaagttggatgaagtaactcgacgcatcaaagtagcagggcccaatggttatgccattcttttggctgtgcctggaagttctgacagccggtcctcctcttcctcagctgcatcagacactgccacttctactcagaggccacttaggaaccttgtgtcctatttaaagcaaaagcaggcagccggggtgatcagcctccctgtggggggcaacaaagacaaggaaaacaccggggtccttcatgccttcccaccttgtgagttctcccagcagttcctggattcccctgccaaggcactggccaaatctgaagaagattacctggtcatgatcattgtccgtgtgctacagttgaaactccagcagcgccggacccgggaagaactggtgagccaagggatcatgccgcctttgaaaagtccagccgcatttcatgagcagagaaggagcttggagcgggccaggacagaggactatctcaaacggaagattcgttcccggccggagagatcggagctggtcaggatgcacattttggaagagacctcggctgagccatccctccaggccaagcagctgaagctgaagagagccagactagccgatgacctcaatgagaagattgcacagaggcctggccccatggagctggtggagaagaacatccttcctgttgagtccagcctgaaggaagccatcattgtgggccaggtgaactatcccaaagtagcagacagctcttccttcgatgaggacagcagcgatgccttatcccccgagcagcctgccagccatgagtcccagggttctgtgccgtcacccctggaggcccgagtcagcgaaccactgctcagtgccacctctgcatcccccacccaggttgtgtctcaacttccgatgggccgggattccagagaaatgcttttcctggcagagcagcctcctctgcctcccccacctctgctgcctcccagcctcaccaatggaaccactatccccactgccaagtccacccccacactcattaagcaaagccaacccaagtctgccagtgagaagtcacagcgcagcaagaaggccaaggagctgaagccaaaggtgaagaagctcaagtaccaccagtacatccccccggaccagaagcaggacaggggggcaccccccatggactcatcctacgccaagatcctgcagcagcagcagctcttcctccagctgcagatcctcaaccagcagcagcagcagcaccacaactaccaggccatcctgcctgccccgccaaagtcagcaggcgaggccctgggaagcagcgggacccccccagtacgcagcctctccactaccaatagcagctccagctcgggcgcccctgggccctgtgggctggcacgtcagaacagcacctcactgactggcaagccgggagccctgccggccaacctggacgacatgaaggtggcagagctgaagcaggagctgaagttgcgatcactgcctgtctcgggcaccaaaactgagctgattgagcgccttcgagcctatcaagaccaaatcagccctgtgccaggagcccccaaggcccctgccgccacctctatcctgcacaaggctggcgaggtggtggtagccttcccagcggcccggctgagcacggggccagccctggtggcagcaggcctggctccagctgaggtggtggtggccacggtggccagcagtggggtggtgaagtttggcagcacgggctccacgccccccgtgtctcccaccccctcggagcgctcactgctcagcacgggcgatgaaaactccacccccggggacacctttggtgagatggtgacatcacctctgacgcagctgaccctgcaggcctcgccactgcagatcctcgtgaaggaggagggcccccgggccgggtcctgttgcctgagccctggggggcgggcggagctagaggggcgcgacaaggaccagatgctgcaggagaaagacaagcagatcgaggcgctgacgcgcatgctccggcagaagcagcagctggtggagcggctcaagctgcagctggagcaggagaagcgagcccagcagcccgcccccgcccccgcccccctcggcacccccgtgaagcaggagaacagcttctccagctgccagctgagccagcagcccctgggccccgctcacccattcaaccccagcctggcggccccagccaccaaccacatagacccttgtgctgtggccccggggcccccgtccgtggtggtgaagcaggaagccttgcagcctgagcccgagccggtccccgccccccagttgcttctggggcctcagggccccagcctcatcaagggggttgcacctcccaccctcatcaccgactccacagggacccaccttgtcctcaccgtgaccaataagaatgcagacagccctggcctgtccagtgggagcccccagcagccctcgtcccagcctggctctccagcgcctgccccctctgcccagatggacctggagcacccactgcagcccctctttgggacccccacttctctgctgaagaaggaaccacctggctatgaggaagccatgagccagcagcccaaacagcaggaaaatggttcctcaagccagcagatggacgacctgtttgacattctcattcagagcggagaaatttcagcagatttcaaggagccgccatccctgccagggaaggagaagccatccccgaagacagtctgtgggtcccccctggcagcacagccatcaccttctgctgagctcccccaggctgccccacctcctccaggctcaccctccctccctggacgcctggaggacttcctggagagcagcacggggctgcccctgctgaccagtgggcatgacgggccagagcccctttccctcattgacgacctccatagccagatgctgagcagcactgccatcctggaccaccccccgtcacccatggacacctcggaattgcactttgttcctgagcccagcagcaccatgggcctggacctggctgatggccacctggacagcatggactggctggagctgtcgtcaggtggtcccgtgctgagcctagcccccctcagcaccacagcccccagcctcttctccacagacttcctcgatggccatgatttgcagctgcactgggattcctgcttgtagctctctggctcaagacggggtggggaaggggctgggagccagggtactccaatgcgtggctctcctgcgtgattcggcctctccacatggttgtgagtcttgacaatcacagcccctgctttttcccttccctgggaggctagaacagagaagcccttactcctggttcagtgccacgcagggcagaggagagcagctgtcaagaagcagccctggctctcacgctggggttttggacacacggtcagggtcagggccatttcagcttgacctccttttttgaggtcagggggcactgtctgtctggctacaatttggctaaggtaggtgaagcctggccaggcgggaggcttctcttctgacccagggctgagacaggttaaggggtgaatctccttcctttctctccctgctttgctgtgaagggagaaattagcctgggcctctaccccctattccctgtgtctgccaaccccaggatcccagggctccctgccattttagtgtcttggtgtagtgtaaccatttagtggttggtggcaacaattttatgtacaggtgtatatacctctatattatatatcgacatacatatatatttttgggggggggcggacaggagatgggtgcaactccctcccatcctactctcacagaagggcctggatgcaaggttacccttgagctgtgtgccacagtctggtgcccagtctggcatgcagctacccaggcccacccatcacgtgtgattgacatgtaggtaccctgccacggcctatgccccacctgccctgcttcctggctccttatcagtgccatgagggcagaggtgctacctggccttcctgccaggagctctccacccactcacattccgtccccgccgcctcactgcagccagcgtggccctaggacaggaggagcttcgggcccagcttcaccctgcggtggggctgaggggtggccatctcctgccctggggccactggcttcacattctgggctgactcataggggagtaggggtggagtcaccaaaaccagtgctgggacaaagatggggaaggtgtgtgaactttttaaaataaacacaaaaacacag

SEQ ID NO: 297976 - DNA, 4247 bp, Homo sapiens
ggattgtaagctggattgacataacgacaggactaaagctgagactaggcttaaggtggggcgatgtcctgtcctcttcgcgctctatagctgtgacacgggggctggacggaggaggggccggcgaaaatgatgatgaaccagtgctcgtgtccttatctgcggcacccagtccccagagtgaagctgttgccaatgaactgcaggagctctccttgcagcccgagctgaccctaggcctccaccctggcaggaatcccaatttgcctccacttagtgagcggaagaatgtgctacagttgaaactccagcagcgccggacccgggaagaactggtgagccaagggatcatgccgcctttgaaaagtccagccgcatttcatgagcagagaaggagcttggagcgggccaggacagaggactatctcaaacggaagattcgttcccggccggagagatcggagctggtcaggatgcacattttggaagagacctcggctgagccatccctccaggccaagcagctgaagctgaagagagccagactagccgatgacctcaatgagaagattgcacagaggcctggccccatggagctggtggagaagaacatccttcctgttgagtccagcctgaaggaagccatcattgtgggccaggtgaactatcccaaagtagcagacagctcttccttcgatgaggacagcagcgatgccttatcccccgagcagcctgccagccatgagtcccagggttctgtgccgtcacccctggaggcccgagtcagcgaaccactgctcagtgccacctctgcatcccccacccaggttgtgtctcaacttccgatgggccgggattccagagaaatgcttttcctggcagagcagcctcctctgcctcccccacctctgctgcctcccagcctcaccaatggaaccactatccccactgccaagtccacccccacactcattaagcaaagccaacccaagtctgccagtgagaagtcacagcgcagcaagaaggccaaggagctgaagccaaaggtgaagaagctcaagtaccaccagtacatccccccggaccagaagcaggacaggggggcaccccccatggactcatcctacgccaagatcctgcagcagcagcagctcttcctccagctgcagatcctcaaccagcagcagcagcagcaccacaactaccaggccatcctgcctgccccgccaaagtcagcaggcgaggccctgggaagcagcgggacccccccagtacgcagcctctccactaccaatagcagctccagctcgggcgcccctgggccctgtgggctggcacgtcagaacagcacctcactgactggcaagccgggagccctgccggccaacctggacgacatgaaggtggcagagctgaagcaggagctgaagttgcgatcactgcctgtctcgggcaccaaaactgagctgattgagcgccttcgagcctatcaagaccaaatcagccctgtgccaggagcccccaaggcccctgccgccacctctatcctgcacaaggctggcgaggtggtggtagccttcccagcggcccggctgagcacggggccagccctggtggcagcaggcctggctccagctgaggtggtggtggccacggtggccagcagtggggtggtgaagtttggcagcacgggctccacgccccccgtgtctcccaccccctcggagcgctcactgctcagcacgggcgatgaaaactccacccccggggacacctttggtgagatggtgacatcacctctgacgcagctgaccctgcaggcctcgccactgcagatcctcgtgaaggaggagggcccccgggccgggtcctgttgcctgagccctggggggcgggcggagctagaggggcgcgacaaggaccagatgctgcaggagaaagacaagcagatcgaggcgctgacgcgcatgctccggcagaagcagcagctggtggagcggctcaagctgcagctggagcaggagaagcgagcccagcagcccgcccccgcccccgcccccctcggcacccccgtgaagcaggagaacagcttctccagctgccagctgagccagcagcccctgggccccgctcacccattcaaccccagcctggcggccccagccaccaaccacatagacccttgtgctgtggccccggggcccccgtccgtggtggtgaagcaggaagccttgcagcctgagcccgagccggtccccgccccccagttgcttctggggcctcagggccccagcctcatcaagggggttgcacctcccaccctcatcaccgactccacagggacccaccttgtcctcaccgtgaccaataagaatgcagacagccctggcctgtccagtgggagcccccagcagccctcgtcccagcctggctctccagcgcctgccccctctgcccagatggacctggagcacccactgcagcccctctttgggacccccacttctctgctgaagaaggaaccacctggctatgaggaagccatgagccagcagcccaaacagcaggaaaatggttcctcaagccagcagatggacgacctgtttgacattctcattcagagcggagaaatttcagcagatttcaaggagccgccatccctgccagggaaggagaagccatccccgaagacagtctgtgggtcccccctggcagcacagccatcaccttctgctgagctcccccaggctgccccacctcctccaggctcaccctccctccctggacgcctggaggacttcctggagagcagcacggggctgcccctgctgaccagtgggcatgacgggccagagcccctttccctcattgacgacctccatagccagatgctgagcagcactgccatcctggaccaccccccgtcacccatggacacctcggaattgcactttgttcctgagcccagcagcaccatgggcctggacctggctgatggccacctggacagcatggactggctggagctgtcgtcaggtggtcccgtgctgagcctagcccccctcagcaccacagcccccagcctcttctccacagacttcctcgatggccatgatttgcagctgcactgggattcctgcttgtagctctctggctcaagacggggtggggaaggggctgggagccagggtactccaatgcgtggctctcctgcgtgattcggcctctccacatggttgtgagtcttgacaatcacagcccctgctttttcccttccctgggaggctagaacagagaagcccttactcctggttcagtgccacgcagggcagaggagagcagctgtcaagaagcagccctggctctcacgctggggttttggacacacggtcagggtcagggccatttcagcttgacctccttttttgaggtcagggggcactgtctgtctggctacaatttggctaaggtaggtgaagcctggccaggcgggaggcttctcttctgacccagggctgagacaggttaaggggtgaatctccttcctttctctccctgctttgctgtgaagggagaaattagcctgggcctctaccccctattccctgtgtctgccaaccccaggatcccagggctccctgccattttagtgtcttggtgtagtgtaaccatttagtggttggtggcaacaattttatgtacaggtgtatatacctctatattatatatcgacatacatatatatttttgggggggggcggacaggagatgggtgcaactccctcccatcctactctcacagaagggcctggatgcaaggttacccttgagctgtgtgccacagtctggtgcccagtctggcatgcagctacccaggcccacccatcacgtgtgattgacatgtaggtaccctgccacggcctatgccccacctgccctgcttcctggctccttatcagtgccatgagggcagaggtgctacctggccttcctgccaggagctctccacccactcacattccgtccccgccgcctcactgcagccagcgtggccctaggacaggaggagcttcgggcccagcttcaccctgcggtggggctgaggggtggccatctcctgccctggggccactggcttcacattctgggctgactcataggggagtaggggtggagtcaccaaaaccagtgctgggacaaagatggggaaggtgtgtgaactttttaaaataaacacaaaaacacag

SEQ ID NO: 297977 - DNA, 4328 bp, Homo sapiens
gctgagaggagccggcggcggcagtgtctgtggtggccgcggcggcgagagcgacggtcccatctttcccaccctcttggttgccgctggccacacgccctccgctggcggcgacttctcagctccgtgcgcccgggctggacagtgagcctcgagaggagacgcgggcggctagagccggagtggggcgagccgcggaacccggccgggagccgcgcgaggcgtgatcggagggtatggttggcatggaattgaatttcatctgtctgtgggaattgtaagcaagattgccatcacgaaagccaaagtggatttctccagtgtggtgtgcctgcccccttccgtcattgctgtgaatgggctggacggaggaggggccggcgaaaatgatgatgaaccagtgctcgtgtccttatctgcggcacccagtccccagagtgaagctgttgccaatgaactgcaggagctctccttgcagcccgagctgaccctaggcctccaccctggcaggaatcccaatttgcctccacttagtgagcggaagaatgtgctacagttgaaactccagcagcgccggacccgggaagaactggtgagccaagggatcatgccgcctttgaaaagtccagccgcatttcatgagcagagaaggagcttggagcgggccaggacagaggactatctcaaacggaagattcgttcccggccggagagatcggagctggtcaggatgcacattttggaagagacctcggctgagccatccctccaggccaagcagctgaagctgaagagagccagactagccgatgacctcaatgagaagattgcacagaggcctggccccatggagctggtggagaagaacatccttcctgttgagtccagcctgaaggaagccatcattggttgtgtctcaacttccgatgggccgggattccagagaaatgcttttcctggcagagcagcctcctctgcctcccccacctctgctgcctcccagcctcaccaatggaaccactatccccactgccaagtccacccccacactcattaagcaaagccaacccaagtctgccagtgagaagtcacagcgcagcaagaaggccaaggagctgaagccaaaggtgaagaagctcaagtaccaccagtacatccccccggaccagaagcaggacaggggggcaccccccatggactcatcctacgccaagatcctgcagcagcagcagctcttcctccagctgcagatcctcaaccagcagcagcagcagcaccacaactaccaggccatcctgcctgccccgccaaagtcagcaggcgaggccctgggaagcagcgggacccccccagtacgcagcctctccactaccaatagcagctccagctcgggcgcccctgggccctgtgggctggcacgtcagaacagcacctcactgactggcaagccgggagccctgccggccaacctggacgacatgaaggtggcagagctgaagcaggagctgaagttgcgatcactgcctgtctcgggcaccaaaactgagctgattgagcgccttcgagcctatcaagaccaaatcagccctgtgccaggagcccccaaggcccctgccgccacctctatcctgcacaaggctggcgaggtggtggtagccttcccagcggcccggctgagcacggggccagccctggtggcagcaggcctggctccagctgaggtggtggtggccacggtggccagcagtggggtggtgaagtttggcagcacgggctccacgccccccgtgtctcccaccccctcggagcgctcactgctcagcacgggcgatgaaaactccacccccggggacacctttggtgagatggtgacatcacctctgacgcagctgaccctgcaggcctcgccactgcagatcctcgtgaaggaggagggcccccgggccgggtcctgttgcctgagccctggggggcgggcggagctagaggggcgcgacaaggaccagatgctgcaggagaaagacaagcagatcgaggcgctgacgcgcatgctccggcagaagcagcagctggtggagcggctcaagctgcagctggagcaggagaagcgagcccagcagcccgcccccgcccccgcccccctcggcacccccgtgaagcaggagaacagcttctccagctgccagctgagccagcagcccctgggccccgctcacccattcaaccccagcctggcggccccagccaccaaccacatagacccttgtgctgtggccccggggcccccgtccgtggtggtgaagcaggaagccttgcagcctgagcccgagccggtccccgccccccagttgcttctggggcctcagggccccagcctcatcaagggggttgcacctcccaccctcatcaccgactccacagggacccaccttgtcctcaccgtgaccaataagaatgcagacagccctggcctgtccagtgggagcccccagcagccctcgtcccagcctggctctccagcgcctgccccctctgcccagatggacctggagcacccactgcagcccctctttgggacccccacttctctgctgaagaaggaaccacctggctatgaggaagccatgagccagcagcccaaacagcaggaaaatggttcctcaagccagcagatggacgacctgtttgacattctcattcagagcggagaaatttcagcagatttcaaggagccgccatccctgccagggaaggagaagccatccccgaagacagtctgtgggtcccccctggcagcacagccatcaccttctgctgagctcccccaggctgccccacctcctccaggctcaccctccctccctggacgcctggaggacttcctggagagcagcacggggctgcccctgctgaccagtgggcatgacgggccagagcccctttccctcattgacgacctccatagccagatgctgagcagcactgccatcctggaccaccccccgtcacccatggacacctcggaattgcactttgttcctgagcccagcagcaccatgggcctggacctggctgatggccacctggacagcatggactggctggagctgtcgtcaggtggtcccgtgctgagcctagcccccctcagcaccacagcccccagcctcttctccacagacttcctcgatggccatgatttgcagctgcactgggattcctgcttgtagctctctggctcaagacggggtggggaaggggctgggagccagggtactccaatgcgtggctctcctgcgtgattcggcctctccacatggttgtgagtcttgacaatcacagcccctgctttttcccttccctgggaggctagaacagagaagcccttactcctggttcagtgccacgcagggcagaggagagcagctgtcaagaagcagccctggctctcacgctggggttttggacacacggtcagggtcagggccatttcagcttgacctccttttttgaggtcagggggcactgtctgtctggctacaatttggctaaggtaggtgaagcctggccaggcgggaggcttctcttctgacccagggctgagacaggttaaggggtgaatctccttcctttctctccctgctttgctgtgaagggagaaattagcctgggcctctaccccctattccctgtgtctgccaaccccaggatcccagggctccctgccattttagtgtcttggtgtagtgtaaccatttagtggttggtggcaacaattttatgtacaggtgtatatacctctatattatatatcgacatacatatatatttttgggggggggcggacaggagatgggtgcaactccctcccatcctactctcacagaagggcctggatgcaaggttacccttgagctgtgtgccacagtctggtgcccagtctggcatgcagctacccaggcccacccatcacgtgtgattgacatgtaggtaccctgccacggcctatgccccacctgccctgcttcctggctccttatcagtgccatgagggcagaggtgctacctggccttcctgccaggagctctccacccactcacattccgtccccgccgcctcactgcagccagcgtggccctaggacaggaggagcttcgggcccagcttcaccctgcggtggggctgaggggtggccatctcctgccctggggccactggcttcacattctgggctgactcataggggagtaggggtggagtcaccaaaaccagtgctgggacaaagatggggaaggtgtgtgaactttttaaaataaacacaaaaacacag

SEQ ID NO: 297978 - DNA, 1744 bp, Homo sapiens
gcagatcaggccgggggtattcggacgaggtataggaagccattgagcagcagccaaacagcaggaaaatggttcctcaagccagcagatggacgacctgtttgacattctcattcagagcggagaaatttcagcagatttcaaggagccgccatccctgccagggaaggagaagccatccccgaagacagtctgtgggtcccccctggcagcacagccatcaccttctgctgagctcccccaggctgccccacctcctccaggctcaccctccctccctggacgcctggaggacttcctggagagcagcacggggctgcccctgctgaccagtgggcatgacgggccagagcccctttccctcattgacgacctccatagccagatgctgagcagcactgccatcctggaccaccccccgtcacccatggacacctcggaattgcactttgttcctgagcccagcagcaccatgggcctggacctggctgatggccacctggacagcatggactggctggagctgtcgtcaggtggtcccgtgctgagcctagcccccctcagcaccacagcccccagcctcttctccacagacttcctcgatggccatgatttgcagctgcactgggattcctgcttgtagctctctggctcaagacggggtggggaaggggctgggagccagggtactccaatgcgtggctctcctgcgtgattcggcctctccacatggttgtgagtcttgacaatcacagcccctgctttttcccttccctgggaggctagaacagagaagcccttactcctggttcagtgccacgcagggcagaggagagcagctgtcaagaagcagccctggctctcacgctggggttttggacacacggtcagggtcagggccatttcagcttgacctccttttttgaggtcagggggcactgtctgtctggctacaatttggctaaggtaggtgaagcctggccaggcgggaggcttctcttctgacccagggctgagacaggttaaggggtgaatctccttcctttctctccctgctttgctgtgaagggagaaattagcctgggcctctaccccctattccctgtgtctgccaaccccaggatcccagggctccctgccattttagtgtcttggtgtagtgtaaccatttagtggttggtggcaacaattttatgtacaggtgtatatacctctatattatatatcgacatacatatatatttttgggggggggcggacaggagatgggtgcaactccctcccatcctactctcacagaagggcctggatgcaaggttacccttgagctgtgtgccacagtctggtgcccagtctggcatgcagctacccaggcccacccatcacgtgtgattgacatgtaggtaccctgccacggcctatgccccacctgccctgcttcctggctccttatcagtgccatgagggcagaggtgctacctggccttcctgccaggagctctccacccactcacattccgtccccgccgcctcactgcagccagcgtggccctaggacaggaggagcttcgggcccagcttcaccctgcggtggggctgaggggtggccatctcctgccctggggccactggcttcacattctgggctgactcataggggagtaggggtggagtcaccaaaaccagtgctgggacaaagatggggaaggtgtgtgaactttttaaaataaacacaaaaacacag

SEQ ID NO: 297979 - DNA, 1572 bp, Homo sapiens
gctgagaggagccggcggcggcagtgtctgtggtggccgcggcggcgagagcgacggtcccatctttcccaccctcttggttgccgctggccacacgccctccgctggcggcgacttctcagctccgtgcgcccgggctggacagtgagcctcgagaggagacgcgggcggctagagccggagtggggcgagccgcggaacccggccgggagccgcgcgaggcgtgatcggagggtatggttggcatggaattgaatttcatctgtctgtgggaattgtaagcaagattgccatcacgaaagccaaagtggatttctccagtgtggtgtgcctgcccccttccgtcattgctgtgaatgggctggacggaggaggggccggcgaaaatgatgatgaaccagtgctcgtgtccttatctgcggcacccagtccccagagtgaagctgttgccaatgaactgcaggagctctccttgcagcccgagctgaccctaggcctccaccctggcaggaatcccaatttgcctccacttagtgagcggaagaatgtgctacagttgaaactccagcagcgccggacccgggaagaactggtgagccaagggatcatgccgcctttgaaaagtccagccgcatttcatgagcagagaaggagcttggagcgggccaggacagaggactatctcaaacggaagattcgttcccggccggagagatcggagctggtcaggatgcacattttggaagagacctcggctgagccatccctccaggccaagcagctgaagctgaagagagccagactagccgatgacctcaatgagaagattgcacagaggcctggccccatggagctggtggagaagaacatccttcctgttgagtccagcctgaaggaagccatcattgtgggccaggtgaactatcccaaagtagcagacagctcttccttcgatgaggacagcagcgatgccttatcccccgagcagcctgccagccatgagtcccagggttctgtgccgtcacccctggaggcccgagtcagcgaaccactgctcagtgccacctctgcatcccccacccaggttgtgtctcaacttccgatgggccgggattccagagaaatgcttttcctggcagagcagcctcctctgcctcccccacctctgctgcctcccagcctcaccaatggaaccactatccccactgccaagtccacccccacactcattaagcaaagccaacccaagtctgccagtgagaagtcacagcgcagcaagaaggccaaggagctgaagccaaaggtgaagaagctcaagtaccaccagtacatccccccggaccagaagcaggacaggggggcaccccccatggactcatcctacgccaagatcctgcagcagcagcagctcttcctccagctgcagatcctcaaccagcagcagcagcagcaccacaactaccaggccatcctgcctgccccgccaaagtcagcaggcgaggccctgggaagcagcagcctccctctttatcgccatcctgcaagctacacagcccgcggcctgtaagctga

SEQ ID NO: 297980 - DNA, 1146 bp, Homo sapiens
gctgagaggagccggcggcggcagtgtctgtggtggccgcggcggcgagagcgacggtcccatctttcccaccctcttggttgccgctggccacacgccctccgctggcggcgacttctcagctccgtgcgcccgggctggacagtgagcctcgagaggagacgcgggcggctagagccggagtggggcgagccgcggaacccggccgggagccgcgcgaggcgtgatcggagggtatggttggcatggaattgaatttcatctgtctgtgggaattgtaagcaagattgccatcacgaaagccaaagtggatttctccagtgtggtgtgcctgcccccttccgtcattgctgtgaatgggctggacggaggaggggccggcgaaaatgatgatgaaccagtgctcgtgtccttatctgcggcacccagtccccagagtgaagctgttgccaatgaactgcaggagctctccttgcagcccgagctgaccctaggcctccaccctggcaggaatcccaatttgcctccacttagtgagcggaagaatgtgctacagttgaaactccagcagcgccggacccgggaagaactggtgagccaagggatcatgccgcgtaagtgcctctctctctcagcatttggtagattgcttttaggacatggctgtgttcaccgagtatgccatgggaagcatctaacataaaacaagaatgaatgaagacagccagttgtaaagtacagtgtgtgcatgtgtatatgagagagagagtctgacaaactgaaatagataccgctctattgaaaacctgttggaattctgggcatggagtttgaaacaacactcccattctgtcaggagcccggattctaaaattgtcctgaatatctaattgtatactttgggttgttctctgtgtctgtgaagtgagaataattgcctttcctgtgggaatagaaatgacctgcttctatgagaatattgcattttcccatataccaagatccaccttcagctatggacatagtcttgttatcagcttttctagagaaggaagtaggtaagaaatgcttagattatgagagagaatgttgaggactgggaatagtttcaggtgtgaatttcctcctcatttacgtccctgttgg

SEQ ID NO: 297981 - DNA, 875 bp, Homo sapiens
gctgagaggagccggcggcggcagtgtctgtggtggccgcggcggcgagagcgacggtcccatctttcccaccctcttggttgccgctggccacacgccctccgctggcggcgacttctcagctccgtgcgcccgggctggacagtgagcctcgagaggagacgcgggcggctagagccggagtggggcgagccgcggaacccggccgggagccgcgcgaggcgtgatcggagggtatggttggcatggaattgaatttcatctgtctgtgggaattgtaagcaagattgccatcacgaaagccaaagtggatttctccagtgtggtgtgcctgcccccttccgtcattgctgtgaatgggctggacggaggaggggccggcgaaaatgatgatgaaccagtgctcgtgtccttatctgcggcacccagtccccagagtgaagctgttgccaatgaactgcaggagctctccttgcagcccgagctgaccctaggcctccaccctggcaggaatcccaatttgcctccacttagtgagcggaagaatgtgctacagttgaaactccagcagcgccggacccgggaagaactggtgagccaagggatcatgccgcggtttggttttcagataggagttaggtatgagaacaagaagagagaaaacttggcgctgaccctgttatagtggttatagtggtgtccctaaagggaggaaatgatttcagcaaaactggttgaacagcggatgaagatatggaattcaaagctctaatggacctttttgaagagaagttgtggcttatgtggagtttacatgggcctctgatggaagaaagctaatctgtttagtatttgtgcattttactaaaatggca

SEQ ID NO: 297982 - DNA, 879 bp, Homo sapiens
ccgaggaaaaccgtgtgctattagccatggtcaaccccaccgtgttcttcgacattgccgtcgacgggagcccttgggccgcgtctcctttgagctgtttgcagacaaggtcccaaagacagcagaaaattttcgtgctctgagcactggagagaaaggatttggttataagggttcctgctttcacagaattattccagggtttatgtgtcagggtggtgacttcacacgccataatggcactggtggcaagtccatctatggggagaaatttgaagatgagaacttcatcctaaagcatacgggtcctggcatcttgtccatggcaaatgctggacccaacacaaatggttcccagtttttcatctgcactgccaagactgagtggttggatggcaagcatgtggtgtttggcaaagtgaaagaaggcatgaatattgtggaggccatggagcgctttgggtccaggaatggcaagaccagcaagaagatcaccattgctgactgtggacaactcgaataagtttgacttgtgttttatcttaaccaccagatcattccttctgtagctcaggagagcacccctccaccccatttgctcgcagtatcctagaatcttgtgctctcgctgcagttccctttgggttccatgttttccttgttccctcccatgcctagctggattgcagagttaagtttatgattatgaaataaaataatacaaaaaaaaaggggggcgtcaaaattccttgagggccagtacgtccagttctgtaaggccaaagggcggaaaagaaggaggggcgcgtaagcggtggcaacgctggcttgggaaggaccctggggcatggacacaaaagtgaaaaaagtggaagttgg

SEQ ID NO: 297983 - DNA, 657 bp, Homo sapiens
  misc_feature (607)..(607): n is a, c, g, or t
  misc_feature (613)..(613): n is a, c, g, or t
ccgaggaaaaccgtgtgctattagccatggtcaaccccaccgtgttcttcgacattgccgtcgacgggagcccttgggccgcgtctcctttgagctgtttgcagacaaggtcccaaagacagcagaaaattttcgtgctctgagcactggagagaaaggatttggttataagggttcctgctttcacagaattattccagggtttatgtgtcagggtggtgacttcacacgccataatggcactggtggcaagtccatctatggggagaaatttgaagatgagaacttcatcctaaagcatacgggtcctggcatcttgtccatggcaaatgctggacccaacacaaatggttcccagtttttcatctgcactgccaagactgagtggttggatggcaagcatgtggtgtttggcaaagtgaaagaaggcatgaatattgtggaggccatggagcgctttgggtccaggaatggcaagaccagcaagaagatcaccattgctgactgtggacaactcgaataagtttgacttgtgttttatcttaaccaccagatcattccttctgtagctcaggagagcacccctccaccccattagccacccgangagccncaccaagagcacgcgaagagccacacaaagcgccgcacaaagag

SEQ ID NO: 297984 - DNA, 414 bp, Homo sapiens
  misc_feature (364)..(364): n is a, c, g, or t
  misc_feature (370)..(370): n is a, c, g, or t
tttcttcttgtaggtcgatgaggtgatgctgactctcaaacaggctttcagtacggccgctgccctgcagagtgccaagacccagattaagctgtgcgaggcctgccctatgcactctttgcataagctctgtgaacggattgaaggtcaccgtatcagttggccttggccaaacaagagtttgctttggcatttggacgcgtttgcgacacgctttgggtccaggaatggcaagaccagcaagaagatcaccattgctgactgtggacaactcgaataagtttgacttgtgttttatcttaaccaccagatcattccttctgtagctcaggagagcacccctccaccccattagccacccgangagccncaccaagagcacgcgaagagccacacaaagcgccgcacaaagag

SEQ ID NO: 297985 - DNA, 191 bp, Homo sapiens
gaaaaccgtgtgctattagccatggtcaaccccaccgtgttcttcgacattgccgtcgacgggagcccttgggccgcgtctcctttgaggtaaggggcctggaaaccaagaagtgactgctcatctaatccataaagctatgttaacagattggagctgtttgcagacaaggtcccaaagacagcagaaaa

SEQ ID NO: 297986 - DNA, 1727 bp, Homo sapiens
cggtagtctctttggaaacttctgcaggggaaaagagctaggaaagagctgcaaagcagtgtgggctttttcccttttttgctccttttcattacccctcctccgttttcacccttctccggacttcgcgtagaacctgcgaatttcgaagaggaggtggcaaagtgggagaaaagaggtgttagggtttggggtttttttgtttttgtttttgttttttaatttcttgatttcaacattttctcccaccctctcggctgcagccaacgcctcttacctgttctgcggcgccgcgcaccgctggcagctgagggttagaaagcggggtgtattttagattttaagcaaaaattttaaagataaatccatttttctctcccacccccaacgccatctccactgcatccgatctcattatttcggtggttgcttgggggtgaacaattttgtggctttttttcccctataattctgacccgctcaggcttgagggtttctccggcctccgctcactgcgtgcacctggcgctgccctgcttcccccaacctgttgcaaggctttaattcttgcaactgggacctgctcgcaggcaccccagccctccacctctctctacatttttgcaagtgtctgggggagggcacctgctctacctgccagaaattttaaaacaaaaacaaaaacaaaaaaatctccgggggccctcttggcccctttatccctgcactctcgctctcctgccccaccccgaggtaaagggggcgactaagagaagatggtgttgctcaccgcggtcctcctgctgctggccgcctatgcggggccggcccagagcctgggctccttcgtgcactgcgagccctgcgacgagaaagccctctccatgtgcccccccagccccctgggctgcgagctggtcaaggagccgggctgcggctgctgcatgacctgcgccctggccgaggggcagtcgtgcggcgtctacaccgagcgctgcgcccaggggctgcgctgcctcccccggcaggacgaggagaagccgctgcacgccctgctgcacggccgcggggtttgcctcaacgaaaagagctaccgcgagcaagtcaagatcgagagagactcccgtgagcacgaggagcccaccacctctgagatggccgaggagacctactcccccaagatcttccggcccaaacacacccgcatctccgagctgaaggctgaagcagtgaagaaggaccgcagaaagaagctgacccagtccaagtttgtcgggggagccgagaacactgcccacccccggatcatctctgcacctgagatgagacaggagtctgagcagggcccctgccgcagacacatggaggcttccctgcaggagctcaaagccagcccacgcatggtgccccgtgctgtgtacctgcccaattgtgaccgcaaaggattctacaagagaaagcagtgcaaaccttcccgtggccgcaagcgtggcatctgctggtgcgtggacaagtacgggatgaagctgccaggcatggagtacgttgacggggactttcagtgccacaccttcgacagcagcaacgttgagtgatgcgtccccccccaacctttccctcaccccctcccacccccagccccgactccagccagcgcctccctccaccccaggacgccactcatttcatctcatttaagggaaaaatatatatctatctatttgagg

SEQ ID NO: 297987 - DNA, 587 bp, Homo sapiens
ccggcggcgcatggacggtcttctagggcccaggtcagggggcttgacttctggccccttgtagaatttcctgaggttttctttctgagtctggttaataactgtgagaacacggcaaatggatttccggacgactcggatcttaaagagcttggaggccgcaccgcctgtcactttggcgacgcgcagctgggacagctccaccttcaggtcgtccagctgtttcagcagctcctcctttttcttcccgcgaagatctcgagccttgattttggccattgctgcacaaaccgccaacatctttactggtgaaaaggatggaaaaataaatcaacaaatgcaaccagtttgtgagaaaaaaaaaaaaaagccgaaaaaaaaaaaaaaaacacctgaatgcggaagagctcggctcccgtttagcattttgtacttaaggaaataaaaaaccaacaaaggatctcacattttcttaaaaagtgaagattgctgtatactatttattcaacttataatttatgttactccttgatctttgtcttttgtcatgacaaagcatttatttaataaagttatgcattcagtta

SEQ ID NO: 297988 - DNA, 6009 bp, Homo sapiens
cggtagtctctttggaaacttctgcaggggaaaagagctaggaaagagctgcaaagcagtgtgggctttttcccttttttgctccttttcattacccctcctccgttttcacccttctccggacttcgcgtagaacctgcgaatttcgaagaggaggtggcaaagtgggagaaaagaggtgttagggtttggggtttttttgtttttgtttttgttttttaatttcttgatttcaacattttctcccaccctctcggctgcagccaacgcctcttacctgttctgcggcgccgcgcaccgctggcagctgagggttagaaagcggggtgtattttagattttaagcaaaaattttaaagataaatccatttttctctcccacccccaacgccatctccactgcatccgatctcattatttcggtggttgcttgggggtgaacaattttgtggctttttttcccctataattctgacccgctcaggcttgagggtttctccggcctccgctcactgcgtgcacctggcgctgccctgcttcccccaacctgttgcaaggctttaattcttgcaactgggacctgctcgcaggcaccccagccctccacctctctctacatttttgcaagtgtctgggggagggcacctgctctacctgccagaaattttaaaacaaaaacaaaaacaaaaaaatctccgggggccctcttggcccctttatccctgcactctcgctctcctgccccaccccgaggtaaagggggcgactaagagaagatggtgttgctcaccgcggtcctcctgctgctggccgcctatgcggggccggcccagagcctgggctccttcgtgcactgcgagccctgcgacgagaaagccctctccatgtgcccccccagccccctgggctgcgagctggtcaaggagccgggctgcggctgctgcatgacctgcgccctggccgaggggcagtcgtgcggcgtctacaccgagcgctgcgcccaggggctgcgctgcctcccccggcaggacgaggagaagccgctgcacgccctgctgcacggccgcggggtttgcctcaacgaaaagagctaccgcgagcaagtcaagatcgagagagactcccgtgagcacgaggagcccaccacctctgagatggccgaggagacctactcccccaagatcttccggcccaaacacacccgcatctccgagctgaaggctgaagcagtgaagaaggaccgcagaaagaagctgacccagtccaagtttgtcgggggagccgagaacactgcccacccccggatcatctctgcacctgagatgagacaggagtctgagcagggcccctgccgcagacacatggaggcttccctgcaggagctcaaagccagcccacgcatggtgccccgtgctgtgtacctgcccaattgtgaccgcaaaggattctacaagagaaagcagtgcaaaccttcccgtggccgcaagcgtggcatctgctggtgcgtggacaagtacgggatgaagctgccaggcatggagtacgttgacggggactttcagtgccacaccttcgacagcagcaacgttgagtgatgcgtccccccccaacctttccctcaccccctcccacccccagccccgactccagccagcgcctccctccaccccaggacgccactcatttcatctcatttaagggaaaaatatatatctatctatttgaggaaactgaggacctcggaatctctagcaagggctcaacttcgaaaatggcaacaacagagatgcaaaaagctaaaaagacaccccccccctttaaatggttttctttttgaggcaagttggatgaacagagaagggaagagaggaagaacgagaggaagagaagggaaggaagtgtttgtgtagaagagagagaaagacgaatagagttaggaaaaggaagacaagcaggtgggcaggaaggacatgcaccgagaccaggcaggggcccaactttcacgtccagccctggcctggggtcgggagaggtgggcgctagaagatgcagcccaggatgtggcaatcaatgacactattggggtttcccaggatggattggtcagggggagaaaggaaaaggcaaaacactccaggacctctcccggatctgtctcctcctctagccagcagtatggacagctggacccctgaacttcctctcctcttacctgggcagagtgttgtctctccccaaatttataaaaactaaaatgcattccattcctctgaaagcaaaacaaattcataattgagtgatattaaatagagaggttttcggaagcagatctgtgaatatgaaatacatgtgcatatttcattccccaggcagacattttttagaaatcaatacatgccccaatattggaaagacttgttcttccacggtgactacagtacatgctgaagcgtgccgtttcagccctcatttaattcaatttgtaagtagcgcagcagcctctgtgggggaggataggctgaaaaaaaaaagtgggctcgtatttatctacaggactccatatagtcatatataggcatataaatctattctttttctttgtttttttctttcttcctttctttcaaaggtttgcattaacttttcaaagtagttcctataggggcattgaggagcttcctcattctgggaaaactgagaaaacccatattctcctaatacaacccgtaatagcatttttgcctgcctcgaggcagagtttcccgtgagcaataaactcagcttttttgtggggcacagtactggatttgacagtgattccccacgtgtgttcatctgcacccaccgagccaggcagaggccagccctccgtggtgcacacagcacgcgcctcagtccatcccattttagtctttaaaccctcaggaagtcacagtctccggacaccacaccacatgagcccaacaggtccacgatggatccaccagtcccaccccagccttttcctttcatctgaacagaatgtgcatttttggaagcctccctcactctccatgctggcagagcaggagggagactgaagtaagagatggcagagggagatggtggcaaaaaggtttagatgcaggagaacagtaagatggatggttccggccagagtcgatgtggggaggaacagagggctgaagggagagggggctgactgttccattctagctttggcacaaagcagcagaaagggggaaaagccaatagaaatttccttagcttccccaccatatgtattttctaggatttgagaggaaagagaggaaaatgggggaatgggttgcaaaatagaaatgagcttaatccaggccgcagagccagggaaggtgagtaactttaggagggtgctagactttagaagccagataggaagaatcagtctaaactggccatgctttggaagggacaagactatgtgctccgctgcccaccttcagcctgcaatgagggactgaggcccacgagtctttccagctcttcctccattctggccagtccctgcatcctccctggggtggaggatggaaggaaagctgggacaagcagggaacgcatgattcagggatgctgtcactcggcagccagattccgaaactcccattctccaatgacttcctcaaccaatgggtggccttgtgactgttctttaaggctgaagatatccaggaaagggggcttggacactggccaaggagaccccttcgtgctgtggacacagctctcttcactctttgctcatggcatgacacagcggagaccgcctccaacaacgaatttggggctacgaagaggaatagcgaaaaagcaaatctgtttcaactgatgggaaccctatagctatagaacttgggggctatctcctatgcccctggacaggacagttggctggggacaggagaagtgctcaatcttcatgagacaaaggggcccgatagggccagcagccacaaggccttgacctgccgagtcagcatgccccatctctctgcacagctgtcccctaaacccaactcacgtttctgtatgtcttaggccagtatcccaaacctcttccacgtcactgttctttccacccattctccctttgcatcttgagcagttatccaactaggatctgccaagtggatactggggtgccactcccctgagaaaagactgagccaggaactacaagctccccccacattcctcccagcctggacctaattcttgagaggggctctctcttcacggactgtgtctggactttgagcaggcttctgccccttgcgttggctctttgctgccagccatcaggtgggggattagagcctggtgtaagtgcgccagactcttccggtttccaaagttcgtgcctgcgaacccaaacctgtgagtctcttctgcatgcaggagtttctcctgggcagctggtcactccccagagaagctgggccttcatggacacatggaactaagcctcccaaatgggagttctggctgagcccagggtggggagatcctgggaagggaggcactggaggaagacggcacctcttcccccatggcagggtgtgagggaggcaggtttggaatggtgcgagtatggcaatctaagcaggggtctggtctctttgactccaggctggcctttggccgactgtctgctcacccagagaccttggactccggactatccatggctccgaatctaagtgctgcccactcccatgctcacacccacagaaggtcttcccatcccctttagattcgtgcctcactccaccagtgaggaagatgcctctgtctttcccacgactgccaggagatagggaagcccagccaggactgaccctccttcctccagcctgccctgacccacctggcaaagcagggcacatggggaggaagagactggaacctttctttgacagccaggcctagacagacaggcctggggacactggccccatgaggggaggaaggcaggcgcacgaggtccagggaggcccttttctgatcatgccccttctctcccaccccatctccccaccaccacctctgtggcctccatggtacccccacagggctggcctcccctagagggtgggcctcaaccacctgctcccgccacgcaccggttagtgagacagggctgccacggcaaccgccaagcccccctcaaggtgggacagtaccccggacccatccactcactcctgagagggctccggcccagaatgggaacctcagagaagagctctaaggagaagaaaccccatagcgtcagagaggatatgtctggcttccaagagaaaggaggctccgttttgcaaagtggaggagggacgagggacaggggtttcaccagccagcaacctgggccttgtactgtctgtgtttttaaaaccactaaagtgcaagaattacattgcactgtttctccactttttattttctcttaggcttttgtttctatttcaaacatactttcttggttttctaatggagtatatagtttagtcatttcacagactctggcctcctctcctgaaatccttttggatggggaaagggaaggtggggagggtccgaggggaaggggaccccagcttccctgtgcccgctcaccccactccaccagtccccggtcgccagccggagtctcctctctaccgccactgtcacaccgtagcccacatggatagcacagttgtcagacaagattccttcagattccgagttgcctaccggttgttttcgttgttgttgttgttgtttttctttttctttttttttttgaagacagcaataaccacagtacatattactgtagttctctatagttttacatacattcataccataactctgttctctcctcttttttgttttcaactttaaaaacaaaaataaacgatgataatctttactggtgaaaaggatggaaaaataaatcaacaaatgcaaccagtttgtgag

SEQ ID NO: 297989 - DNA, 5956 bp, Homo sapiens
cggtagtctctttggaaacttctgcaggggaaaagagctaggaaagagctgcaaagcagtgtgggctttttcccttttttgctccttttcattacccctcctccgttttcacccttctccggacttcgcgtagaacctgcgaatttcgaagaggaggtggcaaagtgggagaaaagaggtgttagggtttggggtttttttgtttttgtttttgttttttaatttcttgatttcaacattttctcccaccctctcggctgcagccaacgcctcttacctgttctgcggcgccgcgcaccgctggcagctgagggttagaaagcggggtgtattttagattttaagcatgcatccgatctcattatttcggtggttgcttgggggtgaacaattttgtggctttttttcccctataattctgacccgctcaggcttgagggtttctccggcctccgctcactgcgtgcacctggcgctgccctgcttcccccaacctgttgcaaggctttaattcttgcaactgggacctgctcgcaggcaccccagccctccacctctctctacatttttgcaagtgtctgggggagggcacctgctctacctgccagaaattttaaaacaaaaacaaaaacaaaaaaatctccgggggccctcttggcccctttatccctgcactctcgctctcctgccccaccccgaggtaaagggggcgactaagagaagatggtgttgctcaccgcggtcctcctgctgctggccgcctatgcggggccggcccagagcctgggctccttcgtgcactgcgagccctgcgacgagaaagccctctccatgtgcccccccagccccctgggctgcgagctggtcaaggagccgggctgcggctgctgcatgacctgcgccctggccgaggggcagtcgtgcggcgtctacaccgagcgctgcgcccaggggctgcgctgcctcccccggcaggacgaggagaagccgctgcacgccctgctgcacggccgcggggtttgcctcaacgaaaagagctaccgcgagcaagtcaagatcgagagagactcccgtgagcacgaggagcccaccacctctgagatggccgaggagacctactcccccaagatcttccggcccaaacacacccgcatctccgagctgaaggctgaagcagtgaagaaggaccgcagaaagaagctgacccagtccaagtttgtcgggggagccgagaacactgcccacccccggatcatctctgcacctgagatgagacaggagtctgagcagggcccctgccgcagacacatggaggcttccctgcaggagctcaaagccagcccacgcatggtgccccgtgctgtgtacctgcccaattgtgaccgcaaaggattctacaagagaaagcagtgcaaaccttcccgtggccgcaagcgtggcatctgctggtgcgtggacaagtacgggatgaagctgccaggcatggagtacgttgacggggactttcagtgccacaccttcgacagcagcaacgttgagtgatgcgtccccccccaacctttccctcaccccctcccacccccagccccgactccagccagcgcctccctccaccccaggacgccactcatttcatctcatttaagggaaaaatatatatctatctatttgaggaaactgaggacctcggaatctctagcaagggctcaacttcgaaaatggcaacaacagagatgcaaaaagctaaaaagacaccccccccctttaaatggttttctttttgaggcaagttggatgaacagagaagggaagagaggaagaacgagaggaagagaagggaaggaagtgtttgtgtagaagagagagaaagacgaatagagttaggaaaaggaagacaagcaggtgggcaggaaggacatgcaccgagaccaggcaggggcccaactttcacgtccagccctggcctggggtcgggagaggtgggcgctagaagatgcagcccaggatgtggcaatcaatgacactattggggtttcccaggatggattggtcagggggagaaaggaaaaggcaaaacactccaggacctctcccggatctgtctcctcctctagccagcagtatggacagctggacccctgaacttcctctcctcttacctgggcagagtgttgtctctccccaaatttataaaaactaaaatgcattccattcctctgaaagcaaaacaaattcataattgagtgatattaaatagagaggttttcggaagcagatctgtgaatatgaaatacatgtgcatatttcattccccaggcagacattttttagaaatcaatacatgccccaatattggaaagacttgttcttccacggtgactacagtacatgctgaagcgtgccgtttcagccctcatttaattcaatttgtaagtagcgcagcagcctctgtgggggaggataggctgaaaaaaaaaagtgggctcgtatttatctacaggactccatatagtcatatataggcatataaatctattctttttctttgtttttttctttcttcctttctttcaaaggtttgcattaacttttcaaagtagttcctataggggcattgaggagcttcctcattctgggaaaactgagaaaacccatattctcctaatacaacccgtaatagcatttttgcctgcctcgaggcagagtttcccgtgagcaataaactcagcttttttgtggggcacagtactggatttgacagtgattccccacgtgtgttcatctgcacccaccgagccaggcagaggccagccctccgtggtgcacacagcacgcgcctcagtccatcccattttagtctttaaaccctcaggaagtcacagtctccggacaccacaccacatgagcccaacaggtccacgatggatccaccagtcccaccccagccttttcctttcatctgaacagaatgtgcatttttggaagcctccctcactctccatgctggcagagcaggagggagactgaagtaagagatggcagagggagatggtggcaaaaaggtttagatgcaggagaacagtaagatggatggttccggccagagtcgatgtggggaggaacagagggctgaagggagagggggctgactgttccattctagctttggcacaaagcagcagaaagggggaaaagccaatagaaatttccttagcttccccaccatatgtattttctaggatttgagaggaaagagaggaaaatgggggaatgggttgcaaaatagaaatgagcttaatccaggccgcagagccagggaaggtgagtaactttaggagggtgctagactttagaagccagataggaagaatcagtctaaactggccatgctttggaagggacaagactatgtgctccgctgcccaccttcagcctgcaatgagggactgaggcccacgagtctttccagctcttcctccattctggccagtccctgcatcctccctggggtggaggatggaaggaaagctgggacaagcagggaacgcatgattcagggatgctgtcactcggcagccagattccgaaactcccattctccaatgacttcctcaaccaatgggtggccttgtgactgttctttaaggctgaagatatccaggaaagggggcttggacactggccaaggagaccccttcgtgctgtggacacagctctcttcactctttgctcatggcatgacacagcggagaccgcctccaacaacgaatttggggctacgaagaggaatagcgaaaaagcaaatctgtttcaactgatgggaaccctatagctatagaacttgggggctatctcctatgcccctggacaggacagttggctggggacaggagaagtgctcaatcttcatgagacaaaggggcccgatagggccagcagccacaaggccttgacctgccgagtcagcatgccccatctctctgcacagctgtcccctaaacccaactcacgtttctgtatgtcttaggccagtatcccaaacctcttccacgtcactgttctttccacccattctccctttgcatcttgagcagttatccaactaggatctgccaagtggatactggggtgccactcccctgagaaaagactgagccaggaactacaagctccccccacattcctcccagcctggacctaattcttgagaggggctctctcttcacggactgtgtctggactttgagcaggcttctgccccttgcgttggctctttgctgccagccatcaggtgggggattagagcctggtgtaagtgcgccagactcttccggtttccaaagttcgtgcctgcgaacccaaacctgtgagtctcttctgcatgcaggagtttctcctgggcagctggtcactccccagagaagctgggccttcatggacacatggaactaagcctcccaaatgggagttctggctgagcccagggtggggagatcctgggaagggaggcactggaggaagacggcacctcttcccccatggcagggtgtgagggaggcaggtttggaatggtgcgagtatggcaatctaagcaggggtctggtctctttgactccaggctggcctttggccgactgtctgctcacccagagaccttggactccggactatccatggctccgaatctaagtgctgcccactcccatgctcacacccacagaaggtcttcccatcccctttagattcgtgcctcactccaccagtgaggaagatgcctctgtctttcccacgactgccaggagatagggaagcccagccaggactgaccctccttcctccagcctgccctgacccacctggcaaagcagggcacatggggaggaagagactggaacctttctttgacagccaggcctagacagacaggcctggggacactggccccatgaggggaggaaggcaggcgcacgaggtccagggaggcccttttctgatcatgccccttctctcccaccccatctccccaccaccacctctgtggcctccatggtacccccacagggctggcctcccctagagggtgggcctcaaccacctgctcccgccacgcaccggttagtgagacagggctgccacggcaaccgccaagcccccctcaaggtgggacagtaccccggacccatccactcactcctgagagggctccggcccagaatgggaacctcagagaagagctctaaggagaagaaaccccatagcgtcagagaggatatgtctggcttccaagagaaaggaggctccgttttgcaaagtggaggagggacgagggacaggggtttcaccagccagcaacctgggccttgtactgtctgtgtttttaaaaccactaaagtgcaagaattacattgcactgtttctccactttttattttctcttaggcttttgtttctatttcaaacatactttcttggttttctaatggagtatatagtttagtcatttcacagactctggcctcctctcctgaaatccttttggatggggaaagggaaggtggggagggtccgaggggaaggggaccccagcttccctgtgcccgctcaccccactccaccagtccccggtcgccagccggagtctcctctctaccgccactgtcacaccgtagcccacatggatagcacagttgtcagacaagattccttcagattccgagttgcctaccggttgttttcgttgttgttgttgttgtttttctttttctttttttttttgaagacagcaataaccacagtacatattactgtagttctctatagttttacatacattcataccataactctgttctctcctcttttttgttttcaactttaaaaacaaaaataaacgatgataatctttactggtgaaaaggatggaaaaataaatcaacaaatgcaaccagtttgtgag

SEQ ID NO: 297990 - DNA, 5947 bp, Homo sapiens
cggtagtctctttggaaacttctgcaggggaaaagagctaggaaagagctgcaaagcagtgtgggctttttcccttttttgctccttttcattacccctcctccgttttcacccttctccggacttcgcgtagaacctgcgaatttcgaagaggaggtggcaaagtgggagaaaagaggtgttagggtttggggtttttttgtttttgtttttgttttttaatttcttgatttcaacattttctcccaccctctcggctgcagccaacgcctcttacctgttctgcggcgccgcgcaccgctggcagctgagggttagaaagcggggtgtattttagattttaagcaaaaattttaaagataaatccatttttctctcccacccccaacgccatctccactgcatccgatctcattatttcggtggttgcttgggggtgaacaattttgtggctttttttcccctataattctgacccgctcaggcttgagggtttctccggcctccgctcactgcgtgcacctggcgctgccctgcttcccccaacctgttgcaaggctttaattcttgcaactgggacctgctcgcaggcaccccagccctccacctctctctacatttttgcaagtgtctgggggagggcacctgctctacctgccagaaattttaaaacaaaaacaaaaacaaaaaaatctccgggggccctcttggcccctttatccctgcactctcgctctcctgccccaccccgaggtaaagggggcgactaagagaagatggtgttgctcaccgcggtcctcctgctgctggccgcctatgcggggccggcccagagcctgggctccttcgtgcactgcgagccctgcgacgagaaagccctctccatgtgcccccccagccccctgggctgcgagctggtcaaggagccgggctgcggctgctgcatgacctgcgccctggccgaggggcagtcgtgcggcgtctacaccgagcgctgcgcccaggggctgcgctgcctcccccggcaggacgaggagaagccgctgcacgccctgctgcacggccgcggggtttgcctcaacgaaaagagctaccgcgagcaagtcaagatcgagagagactcccgtgagcacgaggagcccaccacctctgagatggccgaggagacctactcccccaagatcttccggcccaaacacacccgcatctccgagctgaaggctgaagcagtgaagaaggaccgcagaaagaagctgacccagtccaagtttgtcgggggagccgagaacactgcccacccccggatcatctctgcacctgagatgagacaggagtctgagcagggcccctgccgcagacacatggaggcttccctgcaggagctcaaagccagcccacgcatggtgccccgtgctgtgtacctgcccaattgtgaccgcaaaggattctacaagagaaagcagtgcaaaccttcccgtggccgcaagcgtggcatctgctggtgcgtggacaagtacgggatgaagctgccaggcatggagtacgttgacggggactttcagtgccacaccttcgacagcagcaacgttgagtgatgcgtccccccccaacctttccctcaccccctcccacccccagccccgactccagccagcgcctccctccaccccaggacgccactcatttcatctcatttaagggaaaaatatatatctatctatttgaggaaactgaggacctcggaatctctagcaagggctcaacttcgaaaatggcaacaacagagatgcaaaaagctaaaaagacaccccccccctttaaatggttttctttttgaggcaagttggatgaacagagaagggaagagaggaagaacgagaggaagagaagggaaggaagtgtttgtgtagaagagagagaaagacgaatagagttaggaaaaggaagacaagcaggtgggcaggaaggacatgcaccgagaccaggcaggggcccaactttcacgtccagccctggcctggggtcgggagaggtgggcgctagaagatgcagcccaggatgtggcaatcaatgacactattggggtttcccaggatggattggtcagggggagaaaggaaaaggcaaaacactccaggacctctcccggatctgtctcctcctctagccagcagtatggacagctggacccctgaacttcctctcctcttacctgggcagagtgttgtctctccccaaatttataaaaactaaaatgcattccattcctctgaaagcaaaacaaattcataattgagtgatattaaatagagaggttttcggaagcagatctgtgaatatgaaatacatgtgcatatttcattccccaggcagacattttttagaaatcaatacatgccccaatattggaaagacttgttcttccacggtgactacagtacatgctgaagcgtgccgtttcagccctcatttaattcaatttgtaagtagcgcagcagcctctgtgggggaggataggctgatctattctttttctttgtttttttctttcttcctttctttcaaaggtttgcattaacttttcaaagtagttcctataggggcattgaggagcttcctcattctgggaaaactgagaaaacccatattctcctaatacaacccgtaatagcatttttgcctgcctcgaggcagagtttcccgtgagcaataaactcagcttttttgtggggcacagtactggatttgacagtgattccccacgtgtgttcatctgcacccaccgagccaggcagaggccagccctccgtggtgcacacagcacgcgcctcagtccatcccattttagtctttaaaccctcaggaagtcacagtctccggacaccacaccacatgagcccaacaggtccacgatggatccaccagtcccaccccagccttttcctttcatctgaacagaatgtgcatttttggaagcctccctcactctccatgctggcagagcaggagggagactgaagtaagagatggcagagggagatggtggcaaaaaggtttagatgcaggagaacagtaagatggatggttccggccagagtcgatgtggggaggaacagagggctgaagggagagggggctgactgttccattctagctttggcacaaagcagcagaaagggggaaaagccaatagaaatttccttagcttccccaccatatgtattttctaggatttgagaggaaagagaggaaaatgggggaatgggttgcaaaatagaaatgagcttaatccaggccgcagagccagggaaggtgagtaactttaggagggtgctagactttagaagccagataggaagaatcagtctaaactggccatgctttggaagggacaagactatgtgctccgctgcccaccttcagcctgcaatgagggactgaggcccacgagtctttccagctcttcctccattctggccagtccctgcatcctccctggggtggaggatggaaggaaagctgggacaagcagggaacgcatgattcagggatgctgtcactcggcagccagattccgaaactcccattctccaatgacttcctcaaccaatgggtggccttgtgactgttctttaaggctgaagatatccaggaaagggggcttggacactggccaaggagaccccttcgtgctgtggacacagctctcttcactctttgctcatggcatgacacagcggagaccgcctccaacaacgaatttggggctacgaagaggaatagcgaaaaagcaaatctgtttcaactgatgggaaccctatagctatagaacttgggggctatctcctatgcccctggacaggacagttggctggggacaggagaagtgctcaatcttcatgagacaaaggggcccgatagggccagcagccacaaggccttgacctgccgagtcagcatgccccatctctctgcacagctgtcccctaaacccaactcacgtttctgtatgtcttaggccagtatcccaaacctcttccacgtcactgttctttccacccattctccctttgcatcttgagcagttatccaactaggatctgccaagtggatactggggtgccactcccctgagaaaagactgagccaggaactacaagctccccccacattcctcccagcctggacctaattcttgagaggggctctctcttcacggactgtgtctggactttgagcaggcttctgccccttgcgttggctctttgctgccagccatcaggtgggggattagagcctggtgtaagtgcgccagactcttccggtttccaaagttcgtgcctgcgaacccaaacctgtgagtctcttctgcatgcaggagtttctcctgggcagctggtcactccccagagaagctgggccttcatggacacatggaactaagcctcccaaatgggagttctggctgagcccagggtggggagatcctgggaagggaggcactggaggaagacggcacctcttcccccatggcagggtgtgagggaggcaggtttggaatggtgcgagtatggcaatctaagcaggggtctggtctctttgactccaggctggcctttggccgactgtctgctcacccagagaccttggactccggactatccatggctccgaatctaagtgctgcccactcccatgctcacacccacagaaggtcttcccatcccctttagattcgtgcctcactccaccagtgaggaagatgcctctgtctttcccacgactgccaggagatagggaagcccagccaggactgaccctccttcctccagcctgccctgacccacctggcaaagcagggcacatggggaggaagagactggaacctttctttgacagccaggcctagacagacaggcctggggacactggccccatgaggggaggaaggcaggcgcacgaggtccagggaggcccttttctgatcatgccccttctctcccaccccatctccccaccaccacctctgtggcctccatggtacccccacagggctggcctcccctagagggtgggcctcaaccacctgctcccgccacgcaccggttagtgagacagggctgccacggcaaccgccaagcccccctcaaggtgggacagtaccccggacccatccactcactcctgagagggctccggcccagaatgggaacctcagagaagagctctaaggagaagaaaccccatagcgtcagagaggatatgtctggcttccaagagaaaggaggctccgttttgcaaagtggaggagggacgagggacaggggtttcaccagccagcaacctgggccttgtactgtctgtgtttttaaaaccactaaagtgcaagaattacattgcactgtttctccactttttattttctcttaggcttttgtttctatttcaaacatactttcttggttttctaatggagtatatagtttagtcatttcacagactctggcctcctctcctgaaatccttttggatggggaaagggaaggtggggagggtccgaggggaaggggaccccagcttccctgtgcccgctcaccccactccaccagtccccggtcgccagccggagtctcctctctaccgccactgtcacaccgtagcccacatggatagcacagttgtcagacaagattccttcagattccgagttgcctaccggttgttttcgttgttgttgttgttgtttttctttttctttttttttttgaagacagcaataaccacagtacatattactgtagttctctatagttttacatacattcataccataactctgttctctcctcttttttgttttcaactttaaaaacaaaaataaacgatgataatctttactggtgaaaaggatggaaaaataaatcaacaaatgcaaccagtttgtgag

SEQ ID NO: 297991 - DNA, 3959 bp, Homo sapiens
tatcgatgccacccacaggacacaaacaagctcacccaacaaagccaaccgtggactagtgagaaaggaaaaggcaaaacactccaggacctctcccggatctgtctcctcctctagccagcagtatggacagctggacccctgaacttcctctcctcttacctgggcagagtgttgtctctccccaaatttataaaaactaaaatgcattccattcctctgaaagcaaaacaaattcataattgagtgatattaaatagagaggttttcggaagcagatctgtgaatatgaaatacatgtgcatatttcattccccaggcagacattttttagaaatcaatacatgccccaatattggaaagacttgttcttccacggtgactacagtacatgctgaagcgtgccgtttcagccctcatttaattcaatttgtaagtagcgcagcagcctctgtgggggaggataggctgaaaaaaaaaagtgggctcgtatttatctacaggactccatatagtcatatataggcatataaatctattctttttctttgtttttttctttcttcctttctttcaaaggtttgcattaacttttcaaagtagttcctataggggcattgaggagcttcctcattctgggaaaactgagaaaacccatattctcctaatacaacccgtaatagcatttttgcctgcctcgaggcagagtttcccgtgagcaataaactcagcttttttgtggggcacagtactggatttgacagtgattccccacgtgtgttcatctgcacccaccgagccaggcagaggccagccctccgtggtgcacacagcacgcgcctcagtccatcccattttagtctttaaaccctcaggaagtcacagtctccggacaccacaccacatgagcccaacaggtccacgatggatccaccagtcccaccccagccttttcctttcatctgaacagaatgtgcatttttggaagcctccctcactctccatgctggcagagcaggagggagactgaagtaagagatggcagagggagatggtggcaaaaaggtttagatgcaggagaacagtaagatggatggttccggccagagtcgatgtggggaggaacagagggctgaagggagagggggctgactgttccattctagctttggcacaaagcagcagaaagggggaaaagccaatagaaatttccttagcttccccaccatatgtattttctaggatttgagaggaaagagaggaaaatgggggaatgggttgcaaaatagaaatgagcttaatccaggccgcagagccagggaaggtgagtaactttaggagggtgctagactttagaagccagataggaagaatcagtctaaactggccatgctttggaagggacaagactatgtgctccgctgcccaccttcagcctgcaatgagggactgaggcccacgagtctttccagctcttcctccattctggccagtccctgcatcctccctggggtggaggatggaaggaaagctgggacaagcagggaacgcatgattcagggatgctgtcactcggcagccagattccgaaactcccattctccaatgacttcctcaaccaatgggtggccttgtgactgttctttaaggctgaagatatccaggaaagggggcttggacactggccaaggagaccccttcgtgctgtggacacagctctcttcactctttgctcatggcatgacacagcggagaccgcctccaacaacgaatttggggctacgaagaggaatagcgaaaaagcaaatctgtttcaactgatgggaaccctatagctatagaacttgggggctatctcctatgcccctggacaggacagttggctggggacaggagaagtgctcaatcttcatgagacaaaggggcccgatagggccagcagccacaaggccttgacctgccgagtcagcatgccccatctctctgcacagctgtcccctaaacccaactcacgtttctgtatgtcttaggccagtatcccaaacctcttccacgtcactgttctttccacccattctccctttgcatcttgagcagttatccaactaggatctgccaagtggatactggggtgccactcccctgagaaaagactgagccaggaactacaagctccccccacattcctcccagcctggacctaattcttgagaggggctctctcttcacggactgtgtctggactttgagcaggcttctgccccttgcgttggctctttgctgccagccatcaggtgggggattagagcctggtgtaagtgcgccagactcttccggtttccaaagttcgtgcctgcgaacccaaacctgtgagtctcttctgcatgcaggagtttctcctgggcagctggtcactccccagagaagctgggccttcatggacacatggaactaagcctcccaaatgggagttctggctgagcccagggtggggagatcctgggaagggaggcactggaggaagacggcacctcttcccccatggcagggtgtgagggaggcaggtttggaatggtgcgagtatggcaatctaagcaggggtctggtctctttgactccaggctggcctttggccgactgtctgctcacccagagaccttggactccggactatccatggctccgaatctaagtgctgcccactcccatgctcacacccacagaaggtcttcccatcccctttagattcgtgcctcactccaccagtgaggaagatgcctctgtctttcccacgactgccaggagatagggaagcccagccaggactgaccctccttcctccagcctgccctgacccacctggcaaagcagggcacatggggaggaagagactggaacctttctttgacagccaggcctagacagacaggcctggggacactggccccatgaggggaggaaggcaggcgcacgaggtccagggaggcccttttctgatcatgccccttctctcccaccccatctccccaccaccacctctgtggcctccatggtacccccacagggctggcctcccctagagggtgggcctcaaccacctgctcccgccacgcaccggttagtgagacagggctgccacggcaaccgccaagcccccctcaaggtgggacagtaccccggacccatccactcactcctgagagggctccggcccagaatgggaacctcagagaagagctctaaggagaagaaaccccatagcgtcagagaggatatgtctggcttccaagagaaaggaggctccgttttgcaaagtggaggagggacgagggacaggggtttcaccagccagcaacctgggccttgtactgtctgtgtttttaaaaccactaaagtgcaagaattacattgcactgtttctccactttttattttctcttaggcttttgtttctatttcaaacatactttcttggttttctaatggagtatatagtttagtcatttcacagactctggcctcctctcctgaaatccttttggatggggaaagggaaggtggggagggtccgaggggaaggggaccccagcttccctgtgcccgctcaccccactccaccagtccccggtcgccagccggagtctcctctctaccgccactgtcacaccgtagcccacatggatagcacagttgtcagacaagattccttcagattccgagttgcctaccggttgttttcgttgttgttgttgttgtttttctttttctttttttttttgaagacagcaataaccacagtacatattactgtagttctctatagttttacatacattcataccataactctgttctctcctcttttttgttttcaactttaaaaacaaaaataaacgatgataatctttactggtgaaaaggatggaaaaataaatcaacaaatgcaaccagtttgtgag

SEQ ID NO: 297992 - DNA, 6241 bp, Homo sapiens
cggtagtctctttggaaacttctgcaggggaaaagagctaggaaagagctgcaaagcagtgtgggctttttcccttttttgctccttttcattacccctcctccgttttcacccttctccggacttcgcgtagaacctgcgaatttcgaagaggaggtggcaaagtgggagaaaagaggtgttagggtttggggtttttttgtttttgtttttgttttttaatttcttgatttcaacattttctcccaccctctcggctgcagccaacgcctcttacctgttctgcggcgccgcgcaccgctggcagctgagggttagaaagcggggtgtattttagattttaagcaaaaattttaaagataaatccatttttctctcccacccccaacgccatctccactgcatccgatctcattatttcggtggttgcttgggggtgaacaattttgtggctttttttcccctataattctgacccgctcaggcttgagggtttctccggcctccgctcactgcgtgcacctggcgctgccctgcttcccccaacctgttgcaaggctttaattcttgcaactgggacctgctcgcaggcaccccagccctccacctctctctacatttttgcaagtgtctgggggagggcacctgctctacctgccagaaattttaaaacaaaaacaaaaacaaaaaaatctccgggggccctcttggcccctttatccctgcactctcgctctcctgccccaccccgaggtaaagggggcgactaagagaagatggtgttgctcaccgcggtcctcctgctgctggccgcctatgcggggccggcccagagcctgggctccttcgtgcactgcgagccctgcgacgagaaagccctctccatgtgcccccccagccccctgggctgcgagctggtcaaggagccgggctgcggctgctgcatgacctgcgccctggccgaggggcagtcgtgcggcgtctacaccgagcgctgcgcccaggggctgcgctgcctcccccggcaggacgaggagaagccgctgcacgccctgctgcacggccgcggggtttgcctcaacgaaaagagctaccgcgagcaagtcaagatcgagagagactcccgtgagcacgaggagcccaccacctctgagatggccgaggagacctactcccccaagatcttccggcccaaacacacccgcatctccgagctgaaggctgaagcagtgaagaaggaccgcagaaagaagctgacccagtccaagtttgtcgggggagccgagaacactgcccacccccggatcatctctgcacctgagatgagacaggagtctgagcagggcccctgccgcagacacatggaggcttccctgcaggagctcaaagccagcccacgcatggtgccccgtgctgtgtacctgcccaattgtgaccgcaaaggattctacaagagaaagcagtgcaaaccttcccgtggccgcaagcgtggcatctgctggtgcgtggacaagtacgggatgaagctgccaggcatggagtacgttgacggggactttcagtgccacaccttcgacagcagcaacgttgagtgatgcgtccccccccaacctttccctcaccccctcccacccccagccccgactccagccagcgcctccctccaccccaggacgccactcatttcatctcatttaagggaaaaatatatatctatctatttgaggaaactgaggacctcggaatctctagcaagggctcaacttcgaaaatggcaacaacagagatgcaaaaagctaaaaagacaccccccccctttaaatggttttctttttgaggcaagttggatgaacagagaagggaagagaggaagaacgagaggaagagaagggaaggaagtgtttgtgtagaagagagagaaagacgaatagagttaggaaaaggaagacaagcaggtgggcaggaaggacatgcaccgagaccaggcaggggcccaactttcacgtccagccctggcctggggtcgggagaggtgggcgctagaagatgcagcccaggatgtggcaatcaatgacactattggggtttcccaggatggattggtcagggggagaaaggaaaaggcaaaacactccaggacctctcccggatctgtctcctcctctagccagcagtatggacagctggacccctgaacttcctctcctcttacctgggcagagtgttgtctctccccaaatttataaaaactaaaatgcattccattcctctgaaagcaaaacaaattcataattgagtgatattaaatagagaggttttcggaagcagatctgtgaatatgaaatacatgtgcatatttcattccccaggcagacattttttagaaatcaatacatgccccaatattggaaagacttgttcttccacggtgactacagtacatgctgaagcgtgccgtttcagccctcatttaattcaatttgtaagtagcgcagcagcctctgtgggggaggataggctgaaaaaaaaaagtgggctcgtatttatctacaggactccatatagtcatatataggcatataaatctattctttttctttgtttttttctttcttcctttctttcaaaggtttgcattaacttttcaaagtagttcctataggggcattgaggagcttcctcattctgggaaaactgagaaaacccatattctcctaatacaacccgtaatagcatttttgcctgcctcgaggcagagtttcccgtgagcaataaactcagcttttttgtggggcacagtactggatttgacagtgattccccacgtgtgttcatctgcacccaccgagccaggcagaggccagccctccgtggtgcacacagcacgcgcctcagtccatcccattttagtctttaaaccctcaggaagtcacagtctccggacaccacaccacatgagcccaacaggtccacgatggatccaccagtcccaccccagccttttcctttcatctgaacagaatgtgcatttttggaagcctccctcactctccatgctggcagagcaggagggagactgaagtaagagatggcagagggagatggtggcaaaaaggtttagatgcaggagaacagtaagatggatggttccggccagagtcgatgtggggaggaacagagggctgaagggagagggggctgactgttccattctagctttggcacaaagcagcagaaagggggaaaagccaatagaaatttccttagcttccccaccatatgtattttctaggatttgagaggaaagagaggaaaatgggggaatgggttgcaaaatagaaatgagcttaatccaggccgcagagccagggaaggtgagtaactttaggagggtgctagactttagaagccagataggaagaatcagtctaaactggccatgctttggaagggacaagactatgtgctccgctgcccaccttcagcctgcaatgagggactgaggcccacgagtctttccagctcttcctccattctggccagtccctgcatcctccctggggtggaggatggaaggaaagctgggacaagcagggaacgcatgattcagggatgctgtcactcggcagccagattccgaaactcccattctccaatgacttcctcaaccaatgggtggccttgtgactgttctttaaggctgaagatatccaggaaagggggcttggacactggccaaggagaccccttcgtgctgtggacacagctctcttcactctttgctcatggcatgacacagcggagaccgcctccaacaacgaatttggggctacgaagaggaatagcgaaaaagcaaatctgtttcaactgatgggaaccctatagctatagaacttgggggctatctcctatgcccctggacaggacagttggctggggacaggagaagtgctcaatcttcatgagacaaaggggcccgatagggccagcagccacaaggccttgacctgccgagtcagcatgccccatctctctgcacagctgtcccctaaacccaactcacgtttctgtatgtcttaggccagtatcccaaacctcttccacgtcactgttctttccacccattctccctttgcatcttgagcagttatccaactaggatctgccaagtggatactggggtgccactcccctgagaaaagactgagccaggaactacaagctccccccacattcctcccagcctggacctaattcttgagaggggctctctcttcacggactgtgtctggactttgagcaggcttctgccccttgcgttggctctttgctgccagccatcaggtgggggattagagcctggtgtaagtgcgccagactcttccggtttccaaagttcgtgcctgcgaacccaaacctgtgagtctcttctgcatgcaggagtttctcctgggcagctggtcactccccagagaagctgggccttcatggacacatggaactaagcctcccaaatgggagttctggctgagcccagggtggggagatcctgggaagggaggcactggaggaagacggcacctcttcccccatggcagggtgtgagggaggcaggtttggaatggtgcgagtatggcaatctaagcaggggtctggtctctttgactccaggctggcctttggccgactgtctgctcacccagagaccttggactccggactatccatggctccgaatctaagtgctgcccactcccatgctcacacccacagaaggtcttcccatcccctttagattcgtgcctcactccaccagtgaggaagatgcctctgtctttcccacgactgccaggagatagggaagcccagccaggactgaccctccttcctccagcctgccctgacccacctggcaaagcagggcacatggggaggaagagactggaacctttctttgacagccaggcctagacagacaggcctggggacactggccccatgaggggaggaaggcaggcgcacgaggtccagggaggcccttttctgatcatgccccttctctcccaccccatctccccaccaccacctctgtggcctccatggtacccccacagggctggcctcccctagagggtgggcctcaaccacctgctcccgccacgcaccggttagtgagacagggctgccacggcaaccgccaagcccccctcaaggtgggacagtaccccggacccatccactcactcctgagagggctccggcccagaatgggaacctcagagaagagctctaaggagaagaaaccccatagcgtcagagaggatatgtctggcttccaagagaaaggaggctccgttttgcaaagtggaggagggacgagggacaggggtttcaccagccagcaacctgggccttgtactgtctgtgtttttaaaaccactaaagtgcaagaattacattgcactgtttctccactttttattttctcttaggcttttgtttctatttcaaacatactttcttggttttctaatggagtatatagtttagtcatttcacagactctggcctcctctcctgaaatccttttggatggggaaagggaaggtggggagggtccgaggggaaggggaccccagcttccctgtgcccgctcaccccactccaccagtccccggtcgccagccggagtctcctctctaccgccactgtcacaccgtagcccacatggatagcacagttgtcagacaagattccttcagattccgagttgcctaccggttgttttcgttgttgttgttgttgtttttctttttctttttttttttgaagacagcaataaccacagtacatattactgtagttctctatagttttacatacattcataccataactctgttctctcctcttttttgttttcaactttaaaaacaaaaataaacgatgataatctttactggtgaaaaggatggaaaaataaatcaacaaatgcaaccagtttgtgagaaaaaaaaaaaaaagccgaaaaaaaaaaaaaaaacacctgaatgcggaagagctcggctcccgtttagcattttgtacttaaggaaataaaaaaccaacaaaggatctcacattttcttaaaaagtgaagattgctgtatactatttattcaacttataatttatgttactccttgatctttgtcttttgtcatgacaaagcatttatttaataaagttatgcattcagtta

SEQ ID NO: 297993 - DNA, 6564 bp, Homo sapiens
cggtagtctctttggaaacttctgcaggggaaaagagctaggaaagagctgcaaagcagtgtgggctttttcccttttttgctccttttcattacccctcctccgttttcacccttctccggacttcgcgtagaacctgcgaatttcgaagaggaggtggcaaagtgggagaaaagaggtgttagggtttggggtttttttgtttttgtttttgttttttaatttcttgatttcaacattttctcccaccctctcggctgcagccaacgcctcttacctgttctgcggcgccgcgcaccgctggcagctgagggttagaaagcggggtgtattttagattttaagcaaaaattttaaagataaatccatttttctctcccacccccaacgccatctccactgcatccgatctcattatttcggtggttgcttgggggtgaacaattttgtggctttttttcccctataattctgacccgctcaggcttgagggtttctccggcctccgctcactgcgtgcacctggcgctgccctgcttcccccaacctgttgcaaggctttaattcttgcaactgggacctgctcgcaggcaccccagccctccacctctctctacatttttgcaagtgtctgggggagggcacctgctctacctgccagaaattttaaaacaaaaacaaaaacaaaaaaatctccgggggccctcttggcccctttatccctgcactctcgctctcctgccccaccccgaggtaaagggggcgactaagagaagatggtgttgctcaccgcggtcctcctgctgctggccgcctatgcggggccggcccagagcctgggctccttcgtgcactgcgagccctgcgacgagaaagccctctccatgtgcccccccagccccctgggctgcgagctggtcaaggagccgggctgcggctgctgcatgacctgcgccctggccgaggggcagtcgtgcggcgtctacaccgagcgctgcgcccaggggctgcgctgcctcccccggcaggacgaggagaagccgctgcacgccctgctgcacggccgcggggtttgcctcaacgaaaagagctaccgcgagcaagtcaagatcgagagagactcccgtgagcacgaggagcccaccacctctgagatggccgaggagacctactcccccaagatcttccggcccaaacacacccgcatctccgagctgaaggctgaagcagtgaagaaggaccgcagaaagaagctgacccagtccaagtttgtcgggggagccgagaacactgcccacccccggatcatctctgcacctgagatgagacaggagtctgagcagggcccctgccgcagacacatggaggcttccctgcaggagctcaaagccagcccacgcatggtgccccgtgctgtgtacctgcccaattgtgaccgcaaaggattctacaagagaaagcagtgcaaaccttcccgtggccgcaagcgtggcatctgctggtgcgtggacaagtacgggatgaagctgccaggcatggagtacgttgacggggactttcagtgccacaccttcgacagcagcaacgttgagtgatgcgtccccccccaacctttccctcaccccctcccacccccagccccgactccagccagcgcctccctccaccccaggacgccactcatttcatctcatttaagggaaaaatatatatctatctatttgaggaaactgaggacctcggaatctctagcaagggctcaacttcgaaaatggcaacaacagagatgcaaaaagctaaaaagacaccccccccctttaaatggttttctttttgaggcaagttggatgaacagagaagggaagagaggaagaacgagaggaagagaagggaaggaagtgtttgtgtagaagagagagaaagacgaatagagttaggaaaaggaagacaagcaggtgggcaggaaggacatgcaccgagaccaggcaggggcccaactttcacgtccagccctggcctggggtcgggagaggtgggcgctagaagatgcagcccaggatgtggcaatcaatgacactattggggtttcccaggatggattggtcagggggagaaaggaaaaggcaaaacactccaggacctctcccggatctgtctcctcctctagccagcagtatggacagctggacccctgaacttcctctcctcttacctgggcagagtgttgtctctccccaaatttataaaaactaaaatgcattccattcctctgaaagcaaaacaaattcataattgagtgatattaaatagagaggttttcggaagcagatctgtgaatatgaaatacatgtgcatatttcattccccaggcagacattttttagaaatcaatacatgccccaatattggaaagacttgttcttccacggtgactacagtacatgctgaagcgtgccgtttcagccctcatttaattcaatttgtaagtagcgcagcagcctctgtgggggaggataggctgaaaaaaaaaagtgggctcgtatttatctacaggactccatatagtcatatataggcatataaatctattctttttctttgtttttttctttcttcctttctttcaaaggtttgcattaacttttcaaagtagttcctataggggcattgaggagcttcctcattctgggaaaactgagaaaacccatattctcctaatacaacccgtaatagcatttttgcctgcctcgaggcagagtttcccgtgagcaataaactcagcttttttgtggggcacagtactggatttgacagtgattccccacgtgtgttcatctgcacccaccgagccaggcagaggccagccctccgtggtgcacacagcacgcgcctcagtccatcccattttagtctttaaaccctcaggaagtcacagtctccggacaccacaccacatgagcccaacaggtccacgatggatccaccagtcccaccccagccttttcctttcatctgaacagaatgtgcatttttggaagcctccctcactctccatgctggcagagcaggagggagactgaagtaagagatggcagagggagatggtggcaaaaaggtttagatgcaggagaacagtaagatggatggttccggccagagtcgatgtggggaggaacagagggctgaagggagagggggctgactgttccattctagctttggcacaaagcagcagaaagggggaaaagccaatagaaatttccttagcttccccaccatatgtattttctaggatttgagaggaaagagaggaaaatgggggaatgggttgcaaaatagaaatgagcttaatccaggccgcagagccagggaaggtgagtaactttaggagggtgctagactttagaagccagataggaagaatcagtctaaactggccatgctttggaagggacaagactatgtgctccgctgcccaccttcagcctgcaatgagggactgaggcccacgagtctttccagctcttcctccattctggccagtccctgcatcctccctggggtggaggatggaaggaaagctgggacaagcagggaacgcatgattcagggatgctgtcactcggcagccagattccgaaactcccattctccaatgacttcctcaaccaatgggtggccttgtgactgttctttaaggctgaagatatccaggaaagggggcttggacactggccaaggagaccccttcgtgctgtggacacagctctcttcactctttgctcatggcatgacacagcggagaccgcctccaacaacgaatttggggctacgaagaggaatagcgaaaaagcaaatctgtttcaactgatgggaaccctatagctatagaacttgggggctatctcctatgcccctggacaggacagttggctggggacaggagaagtgctcaatcttcatgagacaaaggggcccgatagggccagcagccacaaggccttgacctgccgagtcagcatgccccatctctctgcacagctgtcccctaaacccaactcacgtttctgtatgtcttaggccagtatcccaaacctcttccacgtcactgttctttccacccattctccctttgcatcttgagcagttatccaactaggatctgccaagtggatactggggtgccactcccctgagaaaagactgagccaggaactacaagctccccccacattcctcccagcctggacctaattcttgagaggggctctctcttcacggactgtgtctggactttgagcaggcttctgccccttgcgttggctctttgctgccagccatcaggtgggggattagagcctggtgtaagtgcgccagactcttccggtttccaaagttcgtgcctgcgaacccaaacctgtgagtctcttctgcatgcaggagtttctcctgggcagctggtcactccccagagaagctgggccttcatggacacatggaactaagcctcccaaatgggagttctggctgagcccagggtggggagatcctgggaagggaggcactggaggaagacggcacctcttcccccatggcagggtgtgagggaggcaggtttggaatggtgcgagtatggcaatctaagcaggggtctggtctctttgactccaggctggcctttggccgactgtctgctcacccagagaccttggactccggactatccatggctccgaatctaagtgctgcccactcccatgctcacacccacagaaggtcttcccatcccctttagattcgtgcctcactccaccagtgaggaagatgcctctgtctttcccacgactgccaggagatagggaagcccagccaggactgaccctccttcctccagcctgccctgacccacctggcaaagcagggcacatggggaggaagagactggaacctttctttgacagccaggcctagacagacaggcctggggacactggccccatgaggggaggaaggcaggcgcacgaggtccagggaggcccttttctgatcatgccccttctctcccaccccatctccccaccaccacctctgtggcctccatggtacccccacagggctggcctcccctagagggtgggcctcaaccacctgctcccgccacgcaccggttagtgagacagggctgccacggcaaccgccaagcccccctcaaggtgggacagtaccccggacccatccactcactcctgagagggctccggcccagaatgggaacctcagagaagagctctaaggagaagaaaccccatagcgtcagagaggatatgtctggcttccaagagaaaggaggctccgttttgcaaagtggaggagggacgagggacaggggtttcaccagccagcaacctgggccttgtactgtctgtgtttttaaaaccactaaagtgcaagaattacattgcactgtttctccactttttattttctcttaggcttttgtttctatttcaaacatactttcttggttttctaatggagtatatagtttagtcatttcacagactctggcctcctctcctgaaatccttttggatggggaaagggaaggtggggagggtccgaggggaaggggaccccagcttccctgtgcccgctcaccccactccaccagtccccggtcgccagccggagtctcctctctaccgccactgtcacaccgtagcccacatggatagcacagttgtcagacaagattccttcagattccgagttgcctaccggttgttttcgttgttgttgttgttgtttttctttttctttttttttttgaagacagcaataaccacagtacatattactgtagttctctatagttttacatacattcataccataactctgttctctcctcttttttgttttcaactttaaaaacaaaaataaacgatgataatctttactggtgaaaaggatggaaaaataaatcaacaaatgcaaccagtttgtgagaaaaaaaaaaaaaagccgaaaaaaaaaaaaaaccctgtgtagtgggggaagagagctcgcggccccgcgttaaagccttgggcgcttagggaattaaaaaccccacagaggggtcctcacttttttcttaaacaagggggacagaagtggcggtattccctattttatcccacgcttatctaattgtgttaccccctgggaaatcttgggccttgtgtctgtgcacaagcgctttcttcaagccaacgggtttgggcttttcgcgggacaaaaaaaaagcacagaactcacaccaaaaacaacactgtgttggcggggcgcgacgcgccacggaaaaaaggctttttaaaaaacacactcgtggggggcgcggggccgcccactggtgtatacagtgaacacgtgctcacaaggcgtgcccaggagacaccggtggtccagcaacgtgcggtgggtctcccaccaataaaaaagcgcccgcgggggacccggcggggtttgaccacctcagggggggtccgggccaatccggcttcacccggggcccggggcgaa

SEQ ID NO: 297994 - DNA, 6308 bp, Homo sapiens
cggtagtctctttggaaacttctgcaggggaaaagagctaggaaagagctgcaaagcagtgtgggctttttcccttttttgctccttttcattacccctcctccgttttcacccttctccggacttcgcgtagaacctgcgaatttcgaagaggaggtggcaaagtgggagaaaagaggtgttagggtttggggtttttttgtttttgtttttgttttttaatttcttgatttcaacattttctcccaccctctcggctgcagccaacgcctcttacctgttctgcggcgccgcgcaccgctggcagctgagggttagaaagcggggtgtattttagattttaagcaaaaattttaaagataaatccatttttctctcccacccccaacgccatctccactgcatccgatctcattatttcggtggttgcttgggggtgaacaattttgtggctttttttcccctataattctgacccgctcaggcttgagggtttctccggcctccgctcactgcgtgcacctggcgctgccctgcttcccccaacctgttgcaaggctttaattcttgcaactgggacctgctcgcaggcaccccagccctccacctctctctacatttttgcaagtgtctgggggagggcacctgctctacctgccagaaattttaaaacaaaaacaaaaacaaaaaaatctccgggggccctcttggcccctttatccctgcactctcgctctcctgccccaccccgaggtaaagggggcgactaagagaagatggtgttgctcaccgcggtcctcctgctgctggccgcctatgcggggccggcccagagcctgggctccttcgtgcactgcgagccctgcgacgagaaagccctctccatgtgcccccccagccccctgggctgcgagctggtcaaggagccgggctgcggctgctgcatgacctgcgccctggccgaggggcagtcgtgcggcgtctacaccgagcgctgcgcccaggggctgcgctgcctcccccggcaggacgaggagaagccgctgcacgccctgctgcacggccgcggggtttgcctcaacgaaaagagctaccgcgagcaagtcaagatcgagagagactcccgtgagcacgaggagcccaccacctctgagatggccgaggagacctactcccccaagatcttccggcccaaacacacccgcatctccgagctgaaggctgaagcagtgaagaaggaccgcagaaagaagctgacccagtccaagtttgtcgggggagccgagaacactgcccacccccggatcatctctgcacctgagatgagacaggagtctgagcagggcccctgccgcagacacatggaggcttccctgcaggagctcaaagccagcccacgcatggtgccccgtgctgtgtacctgcccaattgtgaccgcaaaggattctacaagagaaagcagtgcaaaccttcccgtggccgcaagcgtggcatctgctggtgcgtggacaagtacgggatgaagctgccaggcatggagtacgttgacggggactttcagtgccacaccttcgacagcagcaacgttgagtgatgcgtccccccccaacctttccctcaccccctcccacccccagccccgactccagccagcgcctccctccaccccaggacgccactcatttcatctcatttaagggaaaaatatatatctatctatttgaggaaactgaggacctcggaatctctagcaagggctcaacttcgaaaatggcaacaacagagatgcaaaaagctaaaaagacaccccccccctttaaatggttttctttttgaggcaagttggatgaacagagaagggaagagaggaagaacgagaggaagagaagggaaggaagtgtttgtgtagaagagagagaaagacgaatagagttaggaaaaggaagacaagcaggtgggcaggaaggacatgcaccgagaccaggcaggggcccaactttcacgtccagccctggcctggggtcgggagaggtgggcgctagaagatgcagcccaggatgtggcaatcaatgacactattggggtttcccaggatggattggtcagggggagaaaggaaaaggcaaaacactccaggacctctcccggatctgtctcctcctctagccagcagtatggacagctggacccctgaacttcctctcctcttacctgggcagagtgttgtctctccccaaatttataaaaactaaaatgcattccattcctctgaaagcaaaacaaattcataattgagtgatattaaatagagaggttttcggaagcagatctgtgaatatgaaatacatgtgcatatttcattccccaggcagacattttttagaaatcaatacatgccccaatattggaaagacttgttcttccacggtgactacagtacatgctgaagcgtgccgtttcagccctcatttaattcaatttgtaagtagcgcagcagcctctgtgggggaggataggctgaaaaaaaaaagtgggctcgtatttatctacaggactccatatagtcatatataggcatataaatctattctttttctttgtttttttctttcttcctttctttcaaaggtttgcattaacttttcaaagtagttcctataggggcattgaggagcttcctcattctgggaaaactgagaaaacccatattctcctaatacaacccgtaatagcatttttgcctgcctcgaggcagagtttcccgtgagcaataaactcagcttttttgtggggcacagtactggatttgacagtgattccccacgtgtgttcatctgcacccaccgagccaggcagaggccagccctccgtggtgcacacagcacgcgcctcagtccatcccattttagtctttaaaccctcaggaagtcacagtctccggacaccacaccacatgagcccaacaggtccacgatggatccaccagtcccaccccagccttttcctttcatctgaacagaatgtgcatttttggaagcctccctcactctccatgctggcagagcaggagggagactgaagtaagagatggcagagggagatggtggcaaaaaggtttagatgcaggagaacagtaagatggatggttccggccagagtcgatgtggggaggaacagagggctgaagggagagggggctgactgttccattctagctttggcacaaagcagcagaaagggggaaaagccaatagaaatttccttagcttccccaccatatgtattttctaggatttgagaggaaagagaggaaaatgggggaatgggttgcaaaatagaaatgagcttaatccaggccgcagagccagggaaggtgagtaactttaggagggtgctagactttagaagccagataggaagaatcagtctaaactggccatgctttggaagggacaagactatgtgctccgctgcccaccttcagcctgcaatgagggactgaggcccacgagtctttccagctcttcctccattctggccagtccctgcatcctccctggggtggaggatggaaggaaagctgggacaagcagggaacgcatgattcagggatgctgtcactcggcagccagattccgaaactcccattctccaatgacttcctcaaccaatgggtggccttgtgactgttctttaaggctgaagatatccaggaaagggggcttggacactggccaaggagaccccttcgtgctgtggacacagctctcttcactctttgctcatggcatgacacagcggagaccgcctccaacaacgaatttggggctacgaagaggaatagcgaaaaagcaaatctgtttcaactgatgggaaccctatagctatagaacttgggggctatctcctatgcccctggacaggacagttggctggggacaggagaagtgctcaatcttcatgagacaaaggggcccgatagggccagcagccacaaggccttgacctgccgagtcagcatgccccatctctctgcacagctgtcccctaaacccaactcacgtttctgtatgtcttaggccagtatcccaaacctcttccacgtcactgttctttccacccattctccctttgcatcttgagcagttatccaactaggatctgccaagtggatactggggtgccactcccctgagaaaagactgagccaggaactacaagctccccccacattcctcccagcctggacctaattcttgagaggggctctctcttcacggactgtgtctggactttgagcaggcttctgccccttgcgttggctctttgctgccagccatcaggtgggggattagagcctggtgtaagtgcgccagactcttccggtttccaaagttcgtgcctgcgaacccaaacctgtgagtctcttctgcatgcaggagtttctcctgggcagctggtcactccccagagaagctgggccttcatggacacatggaactaagcctcccaaatgggagttctggctgagcccagggtggggagatcctgggaagggaggcactggaggaagacggcacctcttcccccatggcagggtgtgagggaggcaggtttggaatggtgcgagtatggcaatctaagcaggggtctggtctctttgactccaggctggcctttggccgactgtctgctcacccagagaccttggactccggactatccatggctccgaatctaagtgctgcccactcccatgctcacacccacagaaggtcttcccatcccctttagattcgtgcctcactccaccagtgaggaagatgcctctgtctttcccacgactgccaggagatagggaagcccagccaggactgaccctccttcctccagcctgccctgacccacctggcaaagcagggcacatggggaggaagagactggaacctttctttgacagccaggcctagacagacaggcctggggacactggccccatgaggggaggaaggcaggcgcacgaggtccagggaggcccttttctgatcatgccccttctctcccaccccatctccccaccaccacctctgtggcctccatggtacccccacagggctggcctcccctagagggtgggcctcaaccacctgctcccgccacgcaccggttagtgagacagggctgccacggcaaccgccaagcccccctcaaggtgggacagtaccccggacccatccactcactcctgagagggctccggcccagaatgggaacctcagagaagagctctaaggagaagaaaccccatagcgtcagagaggatatgtctggcttccaagagaaaggaggctccgttttgcaaagtggaggagggacgagggacaggggtttcaccagccagcaacctgggccttgtactgtctgtgtttttaaaaccactaaagtgcaagaattacattgcactgtttctccactttttattttctcttaggcttttgtttctatttcaaacatactttcttggttttctaatggagtatatagtttagtcatttcacagactctggcctcctctcctgaaatccttttggatggggaaagggaaggtggggagggtccgaggggaaggggaccccagcttccctgtgcccgctcaccccactccaccagtccccggtcgccagccggagtctcctctctaccgccactgtcacaccgtagcccacatggatagcacagttgtcagacaagattccttcagattccgagttgcctaccggttgttttcgttgttgttgttgttgtttttctttttctttttttttttgaagacagcaataaccacagtacatattactgtagttctctatagttttacatacattcataccataactctgttctctcctcttttttgttttcaactttaaaaacaaaaataaacgatgataatctttactggtgaaaaggatggaaaaataaatcaacaaatgcaaccagtttgtgagaaaaaaaaaaaaaagccgaaaaaaaaaaaaaaggggcggccgcccttttttttttttttttttttttaacgcttaatacactttatttttttggaataaaaaccctatgttgtagccacagctggagcctgagtccgctgcacggaaactctggtgtgggtcttgacaaggtggtcaatgaactcctgatagggagacttggtgaatacagtctccttccaaaggtcgggggtcaggtagctgtaggtcttaaaaatggcatcaaaggtggccttggcgaatatgcccagtgtggtagt

SEQ ID NO: 297995 - DNA, 3870 bp, Homo sapiens
tgatcttcctgccctaactctattcgtctttctctctcttctacacaaacacttccttcccttctctcccggatctgtctcctcctctagccagcagtatggacagctggacccctgaacttcctctcctcttacctgggcagagtgttgtctctccccaaatttataaaaactaaaatgcattccattcctctgaaagcaaaacaaattcataattgagtgatattaaatagagaggttttcggaagcagatctgtgaatatgaaatacatgtgcatatttcattccccaggcagacattttttagaaatcaatacatgccccaatattggaaagacttgttcttccacggtgactacagtacatgctgaagcgtgccgtttcagccctcatttaattcaatttgtaagtagcgcagcagcctctgtgggggaggataggctgatctattctttttctttgtttttttctttcttcctttctttcaaaggtttgcattaacttttcaaagtagttcctataggggcattgaggagcttcctcattctgggaaaactgagaaaacccatattctcctaatacaacccgtaatagcatttttgcctgcctcgaggcagagtttcccgtgagcaataaactcagcttttttgtggggcacagtactggatttgacagtgattccccacgtgtgttcatctgcacccaccgagccaggcagaggccagccctccgtggtgcacacagcacgcgcctcagtccatcccattttagtctttaaaccctcaggaagtcacagtctccggacaccacaccacatgagcccaacaggtccacgatggatccaccagtcccaccccagccttttcctttcatctgaacagaatgtgcatttttggaagcctccctcactctccatgctggcagagcaggagggagactgaagtaagagatggcagagggagatggtggcaaaaaggtttagatgcaggagaacagtaagatggatggttccggccagagtcgatgtggggaggaacagagggctgaagggagagggggctgactgttccattctagctttggcacaaagcagcagaaagggggaaaagccaatagaaatttccttagcttccccaccatatgtattttctaggatttgagaggaaagagaggaaaatgggggaatgggttgcaaaatagaaatgagcttaatccaggccgcagagccagggaaggtgagtaactttaggagggtgctagactttagaagccagataggaagaatcagtctaaactggccatgctttggaagggacaagactatgtgctccgctgcccaccttcagcctgcaatgagggactgaggcccacgagtctttccagctcttcctccattctggccagtccctgcatcctccctggggtggaggatggaaggaaagctgggacaagcagggaacgcatgattcagggatgctgtcactcggcagccagattccgaaactcccattctccaatgacttcctcaaccaatgggtggccttgtgactgttctttaaggctgaagatatccaggaaagggggcttggacactggccaaggagaccccttcgtgctgtggacacagctctcttcactctttgctcatggcatgacacagcggagaccgcctccaacaacgaatttggggctacgaagaggaatagcgaaaaagcaaatctgtttcaactgatgggaaccctatagctatagaacttgggggctatctcctatgcccctggacaggacagttggctggggacaggagaagtgctcaatcttcatgagacaaaggggcccgatagggccagcagccacaaggccttgacctgccgagtcagcatgccccatctctctgcacagctgtcccctaaacccaactcacgtttctgtatgtcttaggccagtatcccaaacctcttccacgtcactgttctttccacccattctccctttgcatcttgagcagttatccaactaggatctgccaagtggatactggggtgccactcccctgagaaaagactgagccaggaactacaagctccccccacattcctcccagcctggacctaattcttgagaggggctctctcttcacggactgtgtctggactttgagcaggcttctgccccttgcgttggctctttgctgccagccatcaggtgggggattagagcctggtgtaagtgcgccagactcttccggtttccaaagttcgtgcctgcgaacccaaacctgtgagtctcttctgcatgcaggagtttctcctgggcagctggtcactccccagagaagctgggccttcatggacacatggaactaagcctcccaaatgggagttctggctgagcccagggtggggagatcctgggaagggaggcactggaggaagacggcacctcttcccccatggcagggtgtgagggaggcaggtttggaatggtgcgagtatggcaatctaagcaggggtctggtctctttgactccaggctggcctttggccgactgtctgctcacccagagaccttggactccggactatccatggctccgaatctaagtgctgcccactcccatgctcacacccacagaaggtcttcccatcccctttagattcgtgcctcactccaccagtgaggaagatgcctctgtctttcccacgactgccaggagatagggaagcccagccaggactgaccctccttcctccagcctgccctgacccacctggcaaagcagggcacatggggaggaagagactggaacctttctttgacagccaggcctagacagacaggcctggggacactggccccatgaggggaggaaggcaggcgcacgaggtccagggaggcccttttctgatcatgccccttctctcccaccccatctccccaccaccacctctgtggcctccatggtacccccacagggctggcctcccctagagggtgggcctcaaccacctgctcccgccacgcaccggttagtgagacagggctgccacggcaaccgccaagcccccctcaaggtgggacagtaccccggacccatccactcactcctgagagggctccggcccagaatgggaacctcagagaagagctctaaggagaagaaaccccatagcgtcagagaggatatgtctggcttccaagagaaaggaggctccgttttgcaaagtggaggagggacgagggacaggggtttcaccagccagcaacctgggccttgtactgtctgtgtttttaaaaccactaaagtgcaagaattacattgcactgtttctccactttttattttctcttaggcttttgtttctatttcaaacatactttcttggttttctaatggagtatatagtttagtcatttcacagactctggcctcctctcctgaaatccttttggatggggaaagggaaggtggggagggtccgaggggaaggggaccccagcttccctgtgcccgctcaccccactccaccagtccccggtcgccagccggagtctcctctctaccgccactgtcacaccgtagcccacatggatagcacagttgtcagacaagattccttcagattccgagttgcctaccggttgttttcgttgttgttgttgttgtttttctttttctttttttttttgaagacagcaataaccacagtacatattactgtagttctctatagttttacatacattcataccataactctgttctctcctcttttttgttttcaactttaaaaacaaaaataaacgatgataatctttactggtgaaaaggatggaaaaataaatcaacaaatgcaaccagtttgtgag

SEQ ID NO: 297996 - DNA, 3475 bp, Homo sapiens
accattgatagtgcacacggcattgagagtgcacacgggcatgagagtgatctattctttttctttgtttttttctttcttcctttctttcaaaggtttgcattaacttttcaaagtagttcctataggggcattgaggagcttcctcattctgggaaaactgagaaaacccatattctcctaatacaacccgtaatagcatttttgcctgcctcgaggcagagtttcccgtgagcaataaactcagcttttttgtggggcacagtactggatttgacagtgattccccacgtgtgttcatctgcacccaccgagccaggcagaggccagccctccgtggtgcacacagcacgcgcctcagtccatcccattttagtctttaaaccctcaggaagtcacagtctccggacaccacaccacatgagcccaacaggtccacgatggatccaccagtcccaccccagccttttcctttcatctgaacagaatgtgcatttttggaagcctccctcactctccatgctggcagagcaggagggagactgaagtaagagatggcagagggagatggtggcaaaaaggtttagatgcaggagaacagtaagatggatggttccggccagagtcgatgtggggaggaacagagggctgaagggagagggggctgactgttccattctagctttggcacaaagcagcagaaagggggaaaagccaatagaaatttccttagcttccccaccatatgtattttctaggatttgagaggaaagagaggaaaatgggggaatgggttgcaaaatagaaatgagcttaatccaggccgcagagccagggaaggtgagtaactttaggagggtgctagactttagaagccagataggaagaatcagtctaaactggccatgctttggaagggacaagactatgtgctccgctgcccaccttcagcctgcaatgagggactgaggcccacgagtctttccagctcttcctccattctggccagtccctgcatcctccctggggtggaggatggaaggaaagctgggacaagcagggaacgcatgattcagggatgctgtcactcggcagccagattccgaaactcccattctccaatgacttcctcaaccaatgggtggccttgtgactgttctttaaggctgaagatatccaggaaagggggcttggacactggccaaggagaccccttcgtgctgtggacacagctctcttcactctttgctcatggcatgacacagcggagaccgcctccaacaacgaatttggggctacgaagaggaatagcgaaaaagcaaatctgtttcaactgatgggaaccctatagctatagaacttgggggctatctcctatgcccctggacaggacagttggctggggacaggagaagtgctcaatcttcatgagacaaaggggcccgatagggccagcagccacaaggccttgacctgccgagtcagcatgccccatctctctgcacagctgtcccctaaacccaactcacgtttctgtatgtcttaggccagtatcccaaacctcttccacgtcactgttctttccacccattctccctttgcatcttgagcagttatccaactaggatctgccaagtggatactggggtgccactcccctgagaaaagactgagccaggaactacaagctccccccacattcctcccagcctggacctaattcttgagaggggctctctcttcacggactgtgtctggactttgagcaggcttctgccccttgcgttggctctttgctgccagccatcaggtgggggattagagcctggtgtaagtgcgccagactcttccggtttccaaagttcgtgcctgcgaacccaaacctgtgagtctcttctgcatgcaggagtttctcctgggcagctggtcactccccagagaagctgggccttcatggacacatggaactaagcctcccaaatgggagttctggctgagcccagggtggggagatcctgggaagggaggcactggaggaagacggcacctcttcccccatggcagggtgtgagggaggcaggtttggaatggtgcgagtatggcaatctaagcaggggtctggtctctttgactccaggctggcctttggccgactgtctgctcacccagagaccttggactccggactatccatggctccgaatctaagtgctgcccactcccatgctcacacccacagaaggtcttcccatcccctttagattcgtgcctcactccaccagtgaggaagatgcctctgtctttcccacgactgccaggagatagggaagcccagccaggactgaccctccttcctccagcctgccctgacccacctggcaaagcagggcacatggggaggaagagactggaacctttctttgacagccaggcctagacagacaggcctggggacactggccccatgaggggaggaaggcaggcgcacgaggtccagggaggcccttttctgatcatgccccttctctcccaccccatctccccaccaccacctctgtggcctccatggtacccccacagggctggcctcccctagagggtgggcctcaaccacctgctcccgccacgcaccggttagtgagacagggctgccacggcaaccgccaagcccccctcaaggtgggacagtaccccggacccatccactcactcctgagagggctccggcccagaatgggaacctcagagaagagctctaaggagaagaaaccccatagcgtcagagaggatatgtctggcttccaagagaaaggaggctccgttttgcaaagtggaggagggacgagggacaggggtttcaccagccagcaacctgggccttgtactgtctgtgtttttaaaaccactaaagtgcaagaattacattgcactgtttctccactttttattttctcttaggcttttgtttctatttcaaacatactttcttggttttctaatggagtatatagtttagtcatttcacagactctggcctcctctcctgaaatccttttggatggggaaagggaaggtggggagggtccgaggggaaggggaccccagcttccctgtgcccgctcaccccactccaccagtccccggtcgccagccggagtctcctctctaccgccactgtcacaccgtagcccacatggatagcacagttgtcagacaagattccttcagattccgagttgcctaccggttgttttcgttgttgttgttgttgtttttctttttctttttttttttgaagacagcaataaccacagtacatattactgtagttctctatagttttacatacattcataccataactctgttctctcctcttttttgttttcaactttaaaaacaaaaataaacgatgataatctttactggtgaaaaggatggaaaaataaatcaacaaatgcaaccagtttgtgag

SEQ ID NO: 297997 - DNA, 3154 bp, Homo sapiens
cacgtttctgtatgtcttaggccagtatcccaaacctcttccacgtcactgttctttccacccattctccctttgcatcttgagcagttatccaactaggatctgccaagtggatactggggtgccactcccctgagaaaagactgagccaggaactacaagctccccccacattcctcccagcctccctcactctccatgctggcagagcaggagggagactgaagtaagagatggcagagggagatggtggcaaaaaggtttagatgcaggagaacagtaagatggatggttccggccagagtcgatgtggggaggaacagagggctgaagggagagggggctgactgttccattctagctttggcacaaagcagcagaaagggggaaaagccaatagaaatttccttagcttccccaccatatgtattttctaggatttgagaggaaagagaggaaaatgggggaatgggttgcaaaatagaaatgagcttaatccaggccgcagagccagggaaggtgagtaactttaggagggtgctagactttagaagccagataggaagaatcagtctaaactggccatgctttggaagggacaagactatgtgctccgctgcccaccttcagcctgcaatgagggactgaggcccacgagtctttccagctcttcctccattctggccagtccctgcatcctccctggggtggaggatggaaggaaagctgggacaagcagggaacgcatgattcagggatgctgtcactcggcagccagattccgaaactcccattctccaatgacttcctcaaccaatgggtggccttgtgactgttctttaaggctgaagatatccaggaaagggggcttggacactggccaaggagaccccttcgtgctgtggacacagctctcttcactctttgctcatggcatgacacagcggagaccgcctccaacaacgaatttggggctacgaagaggaatagcgaaaaagcaaatctgtttcaactgatgggaaccctatagctatagaacttgggggctatctcctatgcccctggacaggacagttggctggggacaggagaagtgctcaatcttcatgagacaaaggggcccgatagggccagcagccacaaggccttgacctgccgagtcagcatgccccatctctctgcacagctgtcccctaaacccaactcacgtttctgtatgtcttaggccagtatcccaaacctcttccacgtcactgttctttccacccattctccctttgcatcttgagcagttatccaactaggatctgccaagtggatactggggtgccactcccctgagaaaagactgagccaggaactacaagctccccccacattcctcccagcctggacctaattcttgagaggggctctctcttcacggactgtgtctggactttgagcaggcttctgccccttgcgttggctctttgctgccagccatcaggtgggggattagagcctggtgtaagtgcgccagactcttccggtttccaaagttcgtgcctgcgaacccaaacctgtgagtctcttctgcatgcaggagtttctcctgggcagctggtcactccccagagaagctgggccttcatggacacatggaactaagcctcccaaatgggagttctggctgagcccagggtggggagatcctgggaagggaggcactggaggaagacggcacctcttcccccatggcagggtgtgagggaggcaggtttggaatggtgcgagtatggcaatctaagcaggggtctggtctctttgactccaggctggcctttggccgactgtctgctcacccagagaccttggactccggactatccatggctccgaatctaagtgctgcccactcccatgctcacacccacagaaggtcttcccatcccctttagattcgtgcctcactccaccagtgaggaagatgcctctgtctttcccacgactgccaggagatagggaagcccagccaggactgaccctccttcctccagcctgccctgacccacctggcaaagcagggcacatggggaggaagagactggaacctttctttgacagccaggcctagacagacaggcctggggacactggccccatgaggggaggaaggcaggcgcacgaggtccagggaggcccttttctgatcatgccccttctctcccaccccatctccccaccaccacctctgtggcctccatggtacccccacagggctggcctcccctagagggtgggcctcaaccacctgctcccgccacgcaccggttagtgagacagggctgccacggcaaccgccaagcccccctcaaggtgggacagtaccccggacccatccactcactcctgagagggctccggcccagaatgggaacctcagagaagagctctaaggagaagaaaccccatagcgtcagagaggatatgtctggcttccaagagaaaggaggctccgttttgcaaagtggaggagggacgagggacaggggtttcaccagccagcaacctgggccttgtactgtctgtgtttttaaaaccactaaagtgcaagaattacattgcactgtttctccactttttattttctcttaggcttttgtttctatttcaaacatactttcttggttttctaatggagtatatagtttagtcatttcacagactctggcctcctctcctgaaatccttttggatggggaaagggaaggtggggagggtccgaggggaaggggaccccagcttccctgtgcccgctcaccccactccaccagtccccggtcgccagccggagtctcctctctaccgccactgtcacaccgtagcccacatggatagcacagttgtcagacaagattccttcagattccgagttgcctaccggttgttttcgttgttgttgttgttgtttttctttttctttttttttttgaagacagcaataaccacagtacatattactgtagttctctatagttttacatacattcataccataactctgttctctcctcttttttgttttcaactttaaaaacaaaaataaacgatgataatctttactggtgaaaaggatggaaaaataaatcaacaaatgcaaccagtttgtgag

SEQ ID NO: 297998 - DNA, 6197 bp, Homo sapiens
cggtagtctctttggaaacttctgcaggggaaaagagctaggaaagagctgcaaagcagtgtgggctttttcccttttttgctccttttcattacccctcctccgttttcacccttctccggacttcgcgtagaacctgcgaatttcgaagaggaggtggcaaagtgggagaaaagaggtgttagggtttggggtttttttgtttttgtttttgttttttaatttcttgatttcaacattttctcccaccctctcggctgcagccaacgcctcttacctgttctgcggcgccgcgcaccgctggcagctgagggttagaaagcggggtgtattttagattttaagcaaaaattttaaagataaatccatttttctctcccacccccaacgccatctccactgcatccgatctcattatttcggtggttgcttgggggtgaacaattttgtggctttttttcccctataattctgacccgctcaggcttgagggtttctccggcctccgctcactgcgtgcacctggcgctgccctgcttcccccaacctgttgcaaggctttaattcttgcaactgggacctgctcgcaggcaccccagccctccacctctctctacatttttgcaagtgtctgggggagggcacctgctctacctgccagaaattttaaaacaaaaacaaaaacaaaaaaatctccgggggccctcttggcccctttatccctgcactctcgctctcctgccccaccccgaggtaaagggggcgactaagagaagatggtgttgctcaccgcggtcctcctgctgctggccgcctatgcggggccggcccagagcctgggctccttcgtgcactgcgagccctgcgacgagaaagccctctccatgtgcccccccagccccctgggctgcgagctggtcaaggagccgggctgcggctgctgcatgacctgcgccctggccgaggggcagtcgtgcggcgtctacaccgagcgctgcgcccaggggctgcgctgcctcccccggcaggacgaggagaagccgctgcacgccctgctgcacggccgcggggtttgcctcaacgaaaagagctaccgcgagcaagtcaagatcgagagagactcccgtgagcacgaggagcccaccacctctgagatggccgaggagacctactcccccaagatcttccggcccaaacacacccgcatctccgagctgaaggctgaagcagtgaagaaggaccgcagaaagaagctgacccagtccaagtttgtcgggggagccgagaacactgcccacccccggatcatctctgcacctgagatgagacaggagtctgagcagggcccctgccgcagacacatggaggcttccctgcaggagctcaaagccagcccacgcatggtgccccgtgctgtgtacctgcccaattgtgaccgcaaaggattctacaagagaaagcagtgcaaaccttcccgtggccgcaagcgtggcatctgctggtgcgtggacaagtacgggatgaagctgccaggcatggagtacgttgacggggactttcagtgccacaccttcgacagcagcaacgttgagtgatgcgtccccccccaacctttccctcaccccctcccacccccagccccgactccagccagcgcctccctccaccccaggacgccactcatttcatctcatttaagggaaaaatatatatctatctatttgaggaaactgaggacctcggaatctctagcaagggctcaacttcgaaaatggcaacaacagagatgcaaaaagctaaaaagacaccccccccctttaaatggttttctttttgaggcaagttggatgaacagagaagggaagagaggaagaacgagaggaagagaagggaaggaagtgtttgtgtagaagagagagaaagacgaatagagttaggaaaaggaagacaagcaggtgggcaggaaggacatgcaccgagaccaggcaggggcccaactttcacgtccagccctggcctggggtcgggagaggtgggcgctagaagatgcagcccaggatgtggcaatcaatgacactattggggtttcccaggatggattggtcagggggagaaaggaaaaggcaaaacactccaggacctctcccggatctgtctcctcctctagccagcagtatggacagctggacccctgaacttcctctcctcttacctgggcagagtgttgtctctccccaaatttataaaaactaaaatgcattccattcctctgaaagcaaaacaaattcataattgagtgatattaaatagagaggttttcggaagcagatctgtgaatatgaaatacatgtgcatatttcattccccaggcagacattttttagaaatcaatacatgccccaatattggaaagacttgttcttccacggtgactacagtacatgctgaagcgtgccgtttcagccctcatttaattcaatttgtaagtagcgcagcagcctctgtgggggaggataggctgaaaaaaaaaagtgggctcgtatttatctacaggactccatatagtcatatataggcatataaatctattctttttctttgtttttttctttcttcctttctttcaaaggtttgcattaacttttcaaagtagttcctataggggcattgaggagcttcctcattctgggaaaactgagaaaacccatattctcctaatacaacccgtaatagcatttttgcctgcctcgaggcagagtttcccgtgagcaataaactcagcttttttgtggggcacagtactggatttgacagtgattccccacgtgtgttcatctgcacccaccgagccaggcagaggccagccctccgtggtgcacacagcacgcgcctcagtccatcccattttagtctttaaaccctcaggaagtcacagtctccggacaccacaccacatgagcccaacaggtccacgatggatccaccagtcccaccccagccttttcctttcatctgaacagaatgtgcatttttggaagcctccctcactctccatgctggcagagcaggagggagactgaagtaagagatggcagagggagatggtggcaaaaaggtttagatgcaggagaacagtaagatggatggttccggccagagtcgatgtggggaggaacagagggctgaagggagagggggctgactgttccattctagctttggcacaaagcagcagaaagggggaaaagccaatagaaatttccttagcttccccaccatatgtattttctaggatttgagaggaaagagaggaaaatgggggaatgggttgcaaaatagaaatgagcttaatccaggccgcagagccagggaaggtgagtaactttaggagggtgctagactttagaagccagataggaagaatcagtctaaactggccatgctttggaagggacaagactatgtgctccgctgcccaccttcagcctgcaatgagggactgaggcccacgagtctttccagctcttcctccattctggccagtccctgcatcctccctggggtggaggatggaaggaaagctgggacaagcagggaacgcatgattcagggatgctgtcactcggcagccagattccgaaactcccattctccaatgacttcctcaaccaatgggtggccttgtgactgttctttaaggctgaagatatccaggaaagggggcttggacactggccaaggagaccccttcgtgctgtggacacagctctcttcactctttgctcatggcatgacacagcggagaccgcctccaacaacgaatttggggctacgaagaggaatagcgaaaaagcaaatctgtttcaactgatgggaaccctatagctatagaacttgggggctatctcctatgcccctggacaggacagttggctggggacaggagaagtgctcaatcttcatgagacaaaggggcccgatagggccagcagccacaaggccttgacctgccgagtcagcatgccccatctctctgcacagctgtcccctaaacccaactcacgtttctgtatgtcttaggccagtatcccaaacctcttccacgtcactgttctttccacccattctccctttgcatcttgagcagttatccaactaggatctgccaagtggatactggggtgccactcccctgagaaaagactgagccaggaactacaagctccccccacattcctcccagcctggacctaattcttgagaggggctctctcttcacggactgtgtctggactttgagcaggcttctgccccttgcgttggctctttgctgccagccatcaggtgggggattagagcctggtgtaagtgcgccagactcttccggtttccaaagttcgtgcctgcgaacccaaacctgtgagtctcttctgcatgcaggagtttctcctgggcagctggtcactccccagagaagctgggccttcatggacacatggaactaagcctcccaaatgggagttctggctgagcccagggtggggagatcctgggaagggaggcactggaggaagacggcacctcttcccccatggcagggtgtgagggaggcaggtttggaatggtgcgagtatggcaatctaagcaggggtctggtctctttgactccaggctggcctttggccgactgtctgctcacccagagaccttggactccggactatccatggctccgaatctaagtgctgcccactcccatgctcacacccacagaaggtcttcccatcccctttagattcgtgcctcactccaccagtgaggaagatgcctctgtctttcccacgactgccaggagatagggaagcccagccaggactgaccctccttcctccagcctgccctgacccacctggcaaagcagggcacatggggaggaagagactggaacctttctttgacagccaggcctagacagacaggcctggggacactggccccatgaggggaggaaggcaggcgcacgaggtccagggaggcccttttctgatcatgccccttctctcccaccccatctccccaccaccacctctgtggcctccatggtacccccacagggctggcctcccctagagggtgggcctcaaccacctgctcccgccacgcaccggttagtgagacagggctgccacggcaaccgccaagcccccctcaaggtgggacagtaccccggacccatccactcactcctgagagggctccggcccagaatgggaacctcagagaagagctctaaggagaagaaaccccatagcgtcagagaggatatgtctggcttccaagagaaaggaggctccgttttgcaaagtggaggagggacgagggacaggggtttcaccagccagcaacctgggccttgtactgtctgtgtttttaaaaccactaaagtgcaagaattacattgcactgtttctccactttttattttctcttaggcttttgtttctatttcaaacatactttcttggttttctaatggagtatatagtttagtcatttcacagactctggcctcctctcctgaaatccttttggatggggaaagggaaggtggggagggtccgaggggaaggggaccccagcttccctgtgcccgctcaccccactccaccagtccccggtcgccagccggagtctcctctctaccgccactgtcacaccgtagcccacatggatagcacagttgtcagacaagattccttcagattccgagttgcctaccggttgttttcgttgttgttgttgttgtttttctttttctttttttttttgaagacagcaataacccttccaccagcacggcaaaggatgcgtgggactatgtaaacggcgccagggggctgaaggccactcgcaatgggaggagacaagcgggctcgaggacttacgctggaaggccgttggtgtgagcatattttctccgggctcccaaaagtgtacgacacgctgatgcagatgggacgggggtccggctatcgacggggttactgggactggtgtcgtctctacaccacgagggatcgggtggatgggtccgagcacttggccgacgcaggggaagagtggcgagccgaatccgacttcatgaaagatagcgggctgaccccacgtcagtatgctggggggaagggagggggatc

SEQ ID NO: 297999 - DNA, 2841 bp, Homo sapiens
gcgttcccttcgacacggtgcggcggcgcatgatgatgcagtccgggcgcaaaggagctgacatcatgtacacgggcaccgtcgactgttggaggaagatcttcagagatgaggggggcaaggccttcttcaagggtgcgtggtccaacgtcctgcggggcatggggggcgccttcgtgctggtcctgtacgacgagctcaggaaggtgagtaactttaggagggtgctagactttagaagccagataggaagaatcagtctaaactggccatgctttggaagggacaagactatgtgctccgctgcccaccttcagcctgcaatgagggactgaggcccacgagtctttccagctcttcctccattctggccagtccctgcatcctccctggggtggaggatggaaggaaagctgggacaagcagggaacgcatgattcagggatgctgtcactcggcagccagattccgaaactcccattctccaatgacttcctcaaccaatgggtggccttgtgactgttctttaaggctgaagatatccaggaaagggggcttggacactggccaaggagaccccttcgtgctgtggacacagctctcttcactctttgctcatggcatgacacagcggagaccgcctccaacaacgaatttggggctacgaagaggaatagcgaaaaagcaaatctgtttcaactgatgggaaccctatagctatagaacttgggggctatctcctatgcccctggacaggacagttggctggggacaggagaagtgctcaatcttcatgagacaaaggggcccgatagggccagcagccacaaggccttgacctgccgagtcagcatgccccatctctctgcacagctgtcccctaaacccaactcacgtttctgtatgtcttaggccagtatcccaaacctcttccacgtcactgttctttccacccattctccctttgcatcttgagcagttatccaactaggatctgccaagtggatactggggtgccactcccctgagaaaagactgagccaggaactacaagctccccccacattcctcccagcctggacctaattcttgagaggggctctctcttcacggactgtgtctggactttgagcaggcttctgccccttgcgttggctctttgctgccagccatcaggtgggggattagagcctggtgtaagtgcgccagactcttccggtttccaaagttcgtgcctgcgaacccaaacctgtgagtctcttctgcatgcaggagtttctcctgggcagctggtcactccccagagaagctgggccttcatggacacatggaactaagcctcccaaatgggagttctggctgagcccagggtggggagatcctgggaagggaggcactggaggaagacggcacctcttcccccatggcagggtgtgagggaggcaggtttggaatggtgcgagtatggcaatctaagcaggggtctggtctctttgactccaggctggcctttggccgactgtctgctcacccagagaccttggactccggactatccatggctccgaatctaagtgctgcccactcccatgctcacacccacagaaggtcttcccatcccctttagattcgtgcctcactccaccagtgaggaagatgcctctgtctttcccacgactgccaggagatagggaagcccagccaggactgaccctccttcctccagcctgccctgacccacctggcaaagcagggcacatggggaggaagagactggaacctttctttgacagccaggcctagacagacaggcctggggacactggccccatgaggggaggaaggcaggcgcacgaggtccagggaggcccttttctgatcatgccccttctctcccaccccatctccccaccaccacctctgtggcctccatggtacccccacagggctggcctcccctagagggtgggcctcaaccacctgctcccgccacgcaccggttagtgagacagggctgccacggcaaccgccaagcccccctcaaggtgggacagtaccccggacccatccactcactcctgagagggctccggcccagaatgggaacctcagagaagagctctaaggagaagaaaccccatagcgtcagagaggatatgtctggcttccaagagaaaggaggctccgttttgcaaagtggaggagggacgagggacaggggtttcaccagccagcaacctgggccttgtactgtctgtgtttttaaaaccactaaagtgcaagaattacattgcactgtttctccactttttattttctcttaggcttttgtttctatttcaaacatactttcttggttttctaatggagtatatagtttagtcatttcacagactctggcctcctctcctgaaatccttttggatggggaaagggaaggtggggagggtccgaggggaaggggaccccagcttccctgtgcccgctcaccccactccaccagtccccggtcgccagccggagtctcctctctaccgccactgtcacaccgtagcccacatggatagcacagttgtcagacaagattccttcagattccgagttgcctaccggttgttttcgttgttgttgttgttgtttttctttttctttttttttttgaagacagcaataaccacagtacatattactgtagttctctatagttttacatacattcataccataactctgttctctcctcttttttgttttcaactttaaaaacaaaaataaacgatgataatctttactggtgaaaaggatggaaaaataaatcaacaaatgcaaccagtttgtgag

SEQ ID NO: 298000 - DNA, 2702 bp, Homo sapiens
ccaccttgctgcttagtcgccccctttaccctggctagacccagggtaaagggggcgactaaggaaggtgagtaactttaggagggtgctagactttagaagccagataggaagaatcagtctaaactggccatgctttggaagggacaagactatgtgctccgctgcccaccttcagcctgcaatgagggactgaggcccacgagtctttccagctcttcctccattctggccagtccctgcatcctccctggggtggaggatggaaggaaagctgggacaagcagggaacgcatgattcagggatgctgtcactcggcagccagattccgaaactcccattctccaatgacttcctcaaccaatgggtggccttgtgactgttctttaaggctgaagatatccaggaaagggggcttggacactggccaaggagaccccttcgtgctgtggacacagctctcttcactctttgctcatggcatgacacagcggagaccgcctccaacaacgaatttggggctacgaagaggaatagcgaaaaagcaaatctgtttcaactgatgggaaccctatagctatagaacttgggggctatctcctatgcccctggacaggacagttggctggggacaggagaagtgctcaatcttcatgagacaaaggggcccgatagggccagcagccacaaggccttgacctgccgagtcagcatgccccatctctctgcacagctgtcccctaaacccaactcacgtttctgtatgtcttaggccagtatcccaaacctcttccacgtcactgttctttccacccattctccctttgcatcttgagcagttatccaactaggatctgccaagtggatactggggtgccactcccctgagaaaagactgagccaggaactacaagctccccccacattcctcccagcctggacctaattcttgagaggggctctctcttcacggactgtgtctggactttgagcaggcttctgccccttgcgttggctctttgctgccagccatcaggtgggggattagagcctggtgtaagtgcgccagactcttccggtttccaaagttcgtgcctgcgaacccaaacctgtgagtctcttctgcatgcaggagtttctcctgggcagctggtcactccccagagaagctgggccttcatggacacatggaactaagcctcccaaatgggagttctggctgagcccagggtggggagatcctgggaagggaggcactggaggaagacggcacctcttcccccatggcagggtgtgagggaggcaggtttggaatggtgcgagtatggcaatctaagcaggggtctggtctctttgactccaggctggcctttggccgactgtctgctcacccagagaccttggactccggactatccatggctccgaatctaagtgctgcccactcccatgctcacacccacagaaggtcttcccatcccctttagattcgtgcctcactccaccagtgaggaagatgcctctgtctttcccacgactgccaggagatagggaagcccagccaggactgaccctccttcctccagcctgccctgacccacctggcaaagcagggcacatggggaggaagagactggaacctttctttgacagccaggcctagacagacaggcctggggacactggccccatgaggggaggaaggcaggcgcacgaggtccagggaggcccttttctgatcatgccccttctctcccaccccatctccccaccaccacctctgtggcctccatggtacccccacagggctggcctcccctagagggtgggcctcaaccacctgctcccgccacgcaccggttagtgagacagggctgccacggcaaccgccaagcccccctcaaggtgggacagtaccccggacccatccactcactcctgagagggctccggcccagaatgggaacctcagagaagagctctaaggagaagaaaccccatagcgtcagagaggatatgtctggcttccaagagaaaggaggctccgttttgcaaagtggaggagggacgagggacaggggtttcaccagccagcaacctgggccttgtactgtctgtgtttttaaaaccactaaagtgcaagaattacattgcactgtttctccactttttattttctcttaggcttttgtttctatttcaaacatactttcttggttttctaatggagtatatagtttagtcatttcacagactctggcctcctctcctgaaatccttttggatggggaaagggaaggtggggagggtccgaggggaaggggaccccagcttccctgtgcccgctcaccccactccaccagtccccggtcgccagccggagtctcctctctaccgccactgtcacaccgtagcccacatggatagcacagttgtcagacaagattccttcagattccgagttgcctaccggttgttttcgttgttgttgttgttgtttttctttttctttttttttttgaagacagcaataaccacagtacatattactgtagttctctatagttttacatacattcataccataactctgttctctcctcttttttgttttcaactttaaaaacaaaaataaacgatgataatctttactggtgaaaaggatggaaaaataaatcaacaaatgcaaccagtttgtgag

SEQ ID NO: 298001 - DNA, 1921 bp, Homo sapiens
ccccaggggaaaacagcctattgacacattgattacgggaattgcggagcttcgggtagcccgtacgggatagctggccaagtggatactggggtgccactcccctgagaaaagactgagccaggaactacaagctccccccacattcctcccagcctggacctaattcttgagaggggctctctcttcacggactgtgtctggactttgagcaggcttctgccccttgcgttggctctttgctgccagccatcaggtgggggattagagcctggtgtaagtgcgccagactcttccggtttccaaagttcgtgcctgcgaacccaaacctgtgagtctcttctgcatgcaggagtttctcctgggcagctggtcactccccagagaagctgggccttcatggacacatggaactaagcctcccaaatgggagttctggctgagcccagggtggggagatcctgggaagggaggcactggaggaagacggcacctcttcccccatggcagggtgtgagggaggcaggtttggaatggtgcgagtatggcaatctaagcaggggtctggtctctttgactccaggctggcctttggccgactgtctgctcacccagagaccttggactccggactatccatggctccgaatctaagtgctgcccactcccatgctcacacccacagaaggtcttcccatcccctttagattcgtgcctcactccaccagtgaggaagatgcctctgtctttcccacgactgccaggagatagggaagcccagccaggactgaccctccttcctccagcctgccctgacccacctggcaaagcagggcacatggggaggaagagactggaacctttctttgacagccaggcctagacagacaggcctggggacactggccccatgaggggaggaaggcaggcgcacgaggtccagggaggcccttttctgatcatgccccttctctcccaccccatctccccaccaccacctctgtggcctccatggtacccccacagggctggcctcccctagagggtgggcctcaaccacctgctcccgccacgcaccggttagtgagacagggctgccacggcaaccgccaagcccccctcaaggtgggacagtaccccggacccatccactcactcctgagagggctccggcccagaatgggaacctcagagaagagctctaaggagaagaaaccccatagcgtcagagaggatatgtctggcttccaagagaaaggaggctccgttttgcaaagtggaggagggacgagggacaggggtttcaccagccagcaacctgggccttgtactgtctgtgtttttaaaaccactaaagtgcaagaattacattgcactgtttctccactttttattttctcttaggcttttgtttctatttcaaacatactttcttggttttctaatggagtatatagtttagtcatttcacagactctggcctcctctcctgaaatccttttggatggggaaagggaaggtggggagggtccgaggggaaggggaccccagcttccctgtgcccgctcaccccactccaccagtccccggtcgccagccggagtctcctctctaccgccactgtcacaccgtagcccacatggatagcacagttgtcagacaagattccttcagattccgagttgcctaccggttgttttcgttgttgttgttgttgtttttctttttctttttttttttgaagacagcaataaccacagtacatattactgtagttctctatagttttacatacattcataccataactctgttctctcctcttttttgttttcaactttaaaaacaaaaataaacgatgataatctttactggtgaaaaggatggaaaaataaatcaacaaatgcaaccagtttgtgag

SEQ ID NO: 298002 - DNA, 5009 bp, Homo sapiens
cggtagtctctttggaaacttctgcaggggaaaagagctaggaaagagctgcaaagcagtgtgggctttttcccttttttgctccttttcattacccctcctccgttttcacccttctccggacttcgcgtagaacctgcgaatttcgaagaggaggtggcaaagtgggagaaaagaggtgttagggtttggggtttttttgtttttgtttttgttttttaatttcttgatttcaacattttctcccaccctctcggctgcagccaacgcctcttacctgttctgcggcgccgcgcaccgctggcagctgagggttagaaagcggggtgtattttagattttaagcaaaaattttaaagataaatccatttttctctcccacccccaacgccatctccactgcatccgatctcattatttcggtggttgcttgggggtgaacaattttgtggctttttttcccctataattctgacccgctcaggcttgagggtttctccggcctccgctcactgcgtgcacctggcgctgccctgcttcccccaacctgttgcaaggctttaattcttgcaactgggacctgctcgcaggcaccccagccctccacctctctctacatttttgcaagtgtctgggggagggcacctgctctacctgccagaaattttaaaacaaaaacaaaaacaaaaaaatctccgggggccctcttggcccctttatccctgcactctcgctctcctgccccaccccgaggtaaagggggcgactaagagaagatggtgttgctcaccgcggtcctcctgctgctggccgcctatgcggggccggcccagagcctgggctccttcgtgcactgcgagccctgcgacgagaaagccctctccatgtgcccccccagccccctgggctgcgagctggtcaaggagccgggctgcggctgctgcatgacctgcgccctggccgaggggcagtcgtgcggcgtctacaccgagcgctgcgcccaggggctgcgctgcctcccccggcaggacgaggagaagccgctgcacgccctgctgcacggccgcggggtttgcctcaacgaaaagagctaccgcgagcaagtcaagatcgagagagactcccgtgagcacgaggagcccaccacctctgagatggccgaggagacctactcccccaagatcttccggcccaaacacacccgcatctccgagctgaaggctgaagcagtgaagaaggaccgcagaaagaagctgacccagtccaagtttgtcgggggagccgagaacactgcccacccccggatcatctctgcacctgagatgagacaggagtctgagcagggcccctgccgcagacacatggaggcttccctgcaggagctcaaagccagcccacgcatggtgccccgtgctgtgtacctgcccaattgtgaccgcaaaggattctacaagagaaagcagtgcaaaccttcccgtggccgcaagcgtggcatctgctggtgcgtggacaagtacgggatgaagctgccaggcatggagtacgttgacggggactttcagtgccacaccttcgacagcagcaacgttgagtgatgcgtccccccccaacctttccctcaccccctcccacccccagccccgactccagccagcgcctccctccaccccaggacgccactcatttcatctcatttaagggaaaaatatatatctatctatttgaggaaactgaggacctcggaatctctagcaagggctcaacttcgaaaatggcaacaacagagatgcaaaaagctaaaaagacaccccccccctttaaatggttttctttttgaggcaagttggatgaacagagaagggaagagaggaagaacgagaggaagagaagggaaggaagtgtttgtgtagaagagagagaaagacgaatagagttaggaaaaggaagacaagcaggtgggcaggaaggacatgcaccgagaccaggcaggggcccaactttcacgtccagccctggcctggggtcgggagaggtgggcgctagaagatgcagcccaggatgtggcaatcaatgacactattggggtttcccaggatggattggtcagggggagaaaggaaaaggcaaaacactccaggacctctcccggatctgtctcctcctctagccagcagtatggacagctggacccctgaacttcctctcctcttacctgggcagagtgttgtctctccccaaatttataaaaactaaaatgcattccattcctctgaaagcaaaacaaattcataattgagtgatattaaatagagaggttttcggaagcagatctgtgaatatgaaatacatgtgcatatttcattccccaggcagacattttttagaaatcaatacatgccccaatattggaaagacttgttcttccacggtgactacagtacatgctgaagcgtgccgtttcagccctcatttaattcaatttgtaagtagcgcagcagcctctgtgggggaggataggctgaaaaaaaaaagtgggctcgtatttatctacaggactccatatagtcatatataggcatataaatctattctttttctttgtttttttctttcttcctttctttcaaaggtttgcattaacttttcaaagtagttcctataggggcattgaggagcttcctcattctgggaaaactgagaaaacccatattctcctaatacaacccgtaatagcatttttgcctgcctcgaggcagagtttcccgtgagcaataaactcagcttttttgtggggcacagtactggatttgacagtgattccccacgtgtgttcatctgcacccaccgagccaggcagaggccagccctccgtggtgcacacagcacgcgcctcagtccatcccattttagtctttaaaccctcaggaagtcacagtctccggacaccacaccacatgagcccaacaggtccacgatggatccaccagtcccaccccagccttttcctttcatctgaacagaatgtgcatttttggaagcctccctcactctccatgctggcagagcaggagggagactgaagtaagagatggcagagggagatggtggcaaaaaggtttagatgcaggagaacagtaagatggatggttccggccagagtcgatgtggggaggaacagagggctgaagggagagggggctgactgttccattctagctttggcacaaagcagcagaaagggggaaaagccaatagaaatttccttagcttccccaccatatgtattttctaggatttgagaggaaagagaggaaaatgggggaatgggttgcaaaatagaaatgagcttaatccaggccgcagagccagggaaggtgagtaactttaggagggtgctagactttagaagccagataggaagaatcagtctaaactggccatgctttggaagggacaagactatgtgctccgctgcccaccttcagcctgcaatgagggactgaggcccacgagtctttccagctcttcctccattctggccagtccctgcatcctccctggggtggaggatggaaggaaagctgggacaagcagggaacgcatgattcagggatgctgtcactcggcagccagattccgaaactcccattctccaatgacttcctcaaccaatgggtggccttgtgactgttctttaaggctgaagatatccaggaaagggggcttggacactggccaaggagaccccttcgtgctgtggacacagctctcttcactctttgctcatggcatgacacagcggagaccgcctccaacaacgaatttggggctacgaagaggaatagcgaaaaagcaaatctgtttcaactgatgggaaccctatagctatagaacttgggggctatctcctatgcccctggacaggacagttggctggggacaggagaagtgctcaatcttcatgagacaaaggggcccgatagggccagcagccacaaggccttgacctgccgagtcagcatgccccatctctctgcacagctgtcccctaaacccaactcacgtttctgtatgtcttaggccagtatcccaaacctcttccacgtcactgttctttccacccattctccctttgcatcttgagcagttatccaactaggatctgccaagtggatactggggtgccactcccctgagaaaagactgagccaggaactacaagctccccccacattcctcccagcctggacctaattcttgagaggggctctctcttcacggactgtgtctggactttgagcaggcttctgccccttgcgttggctctttgctgccagccatcaggtgggggattagagcctggtgtaagtgcgccagactcttccggtttccaaagttcgtgcctgcgaacccaaacctgtgagtctcttctgcatgcaggagtttctcctgggcagctggtcactccccagagaagctgggccttcatggacacatggatagcacagttgtcagacaagattccttcagattccgagttgcctaccggttgttttcgttgttgttgttgttgtttttctttttctttttttttttgaagacagcaataaccacagtacatattactgtagttctctatagttttacatacattcataccataactctgttctctcctcttttttgttttcaactttaaaaacaaaaataaacgatgataatctttactggtgaaaaggatggaaaaataaatcaacaaatgcaaccagtttgtgagaaaaaaaaaaaaaagccgaaaaaaaaaaaaaaaacacctgaatgcggaagagctcggctcccgtttagcattttgtacttaaggaaataaaaaaccaacaaaggatctcacattttcttaaaaagtgaagattgctgtatactatttattcaacttataatttatgttactccttgatctttgtcttttgtcatgacaaagcatttatttaataaagttatgcattcagtta

SEQ ID NO: 298003 - DNA, 4904 bp, Homo sapiens
cggtagtctctttggaaacttctgcaggggaaaagagctaggaaagagctgcaaagcagtgtgggctttttcccttttttgctccttttcattacccctcctccgttttcacccttctccggacttcgcgtagaacctgcgaatttcgaagaggaggtggcaaagtgggagaaaagaggtgttagggtttggggtttttttgtttttgtttttgttttttaatttcttgatttcaacattttctcccaccctctcggctgcagccaacgcctcttacctgttctgcggcgccgcgcaccgctggcagctgagggttagaaagcggggtgtattttagattttaagcaaaaattttaaagataaatccatttttctctcccacccccaacgccatctccactgcatccgatctcattatttcggtggttgcttgggggtgaacaattttgtggctttttttcccctataattctgacccgctcaggcttgagggtttctccggcctccgctcactgcgtgcacctggcgctgccctgcttcccccaacctgttgcaaggctttaattcttgcaactgggacctgctcgcaggcaccccagccctccacctctctctacatttttgcaagtgtctgggggagggcacctgctctacctgccagaaattttaaaacaaaaacaaaaacaaaaaaatctccgggggccctcttggcccctttatccctgcactctcgctctcctgccccaccccgaggtaaagggggcgactaagagaagatggtgttgctcaccgcggtcctcctgctgctggccgcctatgcggggccggcccagagcctgggctccttcgtgcactgcgagccctgcgacgagaaagccctctccatgtgcccccccagccccctgggctgcgagctggtcaaggagccgggctgcggctgctgcatgacctgcgccctggccgaggggcagtcgtgcggcgtctacaccgagcgctgcgcccaggggctgcgctgcctcccccggcaggacgaggagaagccgctgcacgccctgctgcacggccgcggggtttgcctcaacgaaaagagctaccgcgagcaagtcaagatcgagagagactcccgtgagcacgaggagcccaccacctctgagatggccgaggagacctactcccccaagatcttccggcccaaacacacccgcatctccgagctgaaggctgaagcagtgaagaaggaccgcagaaagaagctgacccagtccaagtttgtcgggggagccgagaacactgcccacccccggatcatctctgcacctgagatgagacaggagtctgagcagggcccctgccgcagacacatggaggcttccctgcaggagctcaaagccagcccacgcatggtgccccgtgctgtgtacctgcccaattgtgaccgcaaaggattctacaagagaaagcagtgcaaaccttcccgtggccgcaagcgtggcatctgctggtgcgtggacaagtacgggatgaagctgccaggcatggagtacgttgacggggactttcagtgccacaccttcgacagcagcaacgttgagtgatgcgtccccccccaacctttccctcaccccctcccacccccagccccgactccagccagcgcctccctccaccccaggacgccactcatttcatctcatttaagggaaaaatatatatctatctatttgaggaaactgaggacctcggaatctctagcaagggctcaacttcgaaaatggcaacaacagagatgcaaaaagctaaaaagacaccccccccctttaaatggttttctttttgaggcaagttggatgaacagagaagggaagagaggaagaacgagaggaagagaagggaaggaagtgtttgtgtagaagagagagaaagacgaatagagttaggaaaaggaagacaagcaggtgggcaggaaggacatgcaccgagaccaggcaggggcccaactttcacgtccagccctggcctggggtcgggagaggtgggcgctagaagatgcagcccaggatgtggcaatcaatgacactattggggtttcccaggatggattggtcagggggagaaaggaaaaggcaaaacactccaggacctctcccggatctgtctcctcctctagccagcagtatggacagctggacccctgaacttcctctcctcttacctgggcagagtgttgtctctccccaaatttataaaaactaaaatgcattccattcctctgaaagcaaaacaaattcataattgagtgatattaaatagagaggttttcggaagcagatctgtgaatatgaaatacatgtgcatatttcattccccaggcagacattttttagaaatcaatacatgccccaatattggaaagacttgttcttccacggtgactacagtacatgctgaagcgtgccgtttcagccctcatttaattcaatttgtaagtagcgcagcagcctctgtgggggaggataggctgaaaaaaaaaagtgggctcgtatttatctacaggactccatatagtcatatataggcatataaatctattctttttctttgtttttttctttcttcctttctttcaaaggtttgcattaacttttcaaagtagttcctataggggcattgaggagcttcctcattctgggaaaactgagaaaacccatattctcctaatacaacccgtaatagcatttttgcctgcctcgaggcagagtttcccgtgagcaataaactcagcttttttgtggggcacagtactggatttgacagtgattccccacgtgtgttcatctgcacccaccgagccaggcagaggccagccctccgtggtgcacacagcacgcgcctcagtccatcccattttagtctttaaaccctcaggaagtcacagtctccggacaccacaccacatgagcccaacaggtccacgatggatccaccagtcccaccccagccttttcctttcatctgaacagaatgtgcatttttggaagcctccctcactctccatgctggcagagcaggagggagactgaagtaagagatggcagagggagatggtggcaaaaaggtttagatgcaggagaacagtaagatggatggttccggccagagtcgatgtggggaggaacagagggctgaagggagagggggctgactgttccattctagctttggcacaaagcagcagaaagggggaaaagccaatagaaatttccttagcttccccaccatatgtattttctaggatttgagaggaaagagaggaaaatgggggaatgggttgcaaaatagaaatgagcttaatccaggccgcagagccagggaaggtgagtaactttaggagggtgctagactttagaagccagataggaagaatcagtctaaactggccatgctttggaagggacaagactatgtgctccgctgcccaccttcagcctgcaatgagggactgaggcccacgagtctttccagctcttcctccattctggccagtccctgcatcctccctggggtggaggatggaaggaaagctgggacaagcagggaacgcatgattcagggatgctgtcactcggcagccagattccgaaactcccattctccaatgacttcctcaaccaatgggtggccttgtgactgttctttaaggctgaagatatccaggaaagggggcttggacactggccaaggagaccccttcgtgctgtggacacagctctcttcactctttgctcatggcatgacacagcggagaccgcctccaacaacgaatttggggctacgaagaggaatagcgaaaaagcaaatctgtttcaactgatgggaaccctatagctatagaacttgggggctatctcctatgcccctggacaggacagttggctggggacaggagaagtgctcaatcttcatgagacaaaggggcccgatagggccagcagccacaaggccttgacctgccgagtcagcatgccccatctctctgcacagctgtcccctaaacccaactcacgtttctgtatgtcttaggccagtatcccaaacctcttccacgtcactgttctttccacccattctccctttgcatcttgagcagttatccaactaggatctgccaagtggatactggggtgccactcccctgagaaaagactgagccaggaactacaagctccccccacattcctcccagcctggacctaattcttgagaggggctctctcttcacggactgtgtctggactttgagcaggcttctgccccttgcgttggctctttgctgccagccatcaggtgggggattagagcctggtgtaagtgcgccagactcttccggtttccaaagttcgtgcctgcgaacccaaacctgtgagtctcttctgcatgcaggagtttctcctgggcagctggtcactccccagagaagctgggccttcatggacacatggaactaagcctcccaaatgggagttctggctgagcccagggtggggagatcctgggaagggaggcactggaggaagacggcacctcttcccccatggcagggtgtgagggaggcaggtttggaatggtgcgagtatggcaatctaagcaggggtctggtctctttgactccaggctggcctttggccgactgtctgctcacccagagaccttggactccggactatccatggtcccgtttagcattttgtacttaaggaaataaaaaaccaacaaaggatctcacattttcttaaaaagtgaagattgctgtatactatttattcaacttataatttatgttactccttgatctttgtcttttgtcatgacaaagcatttatttaataaagttatgcattcagtta

SEQ ID NO: 298004 - DNA, 4657 bp, Homo sapiens
cggtagtctctttggaaacttctgcaggggaaaagagctaggaaagagctgcaaagcagtgtgggctttttcccttttttgctccttttcattacccctcctccgttttcacccttctccggacttcgcgtagaacctgcgaatttcgaagaggaggtggcaaagtgggagaaaagaggtgttagggtttggggtttttttgtttttgtttttgttttttaatttcttgatttcaacattttctcccaccctctcggctgcagccaacgcctcttacctgttctgcggcgccgcgcaccgctggcagctgagggttagaaagcggggtgtattttagattttaagcaaaaattttaaagataaatccatttttctctcccacccccaacgccatctccactgcatccgatctcattatttcggtggttgcttgggggtgaacaattttgtggctttttttcccctataattctgacccgctcaggcttgagggtttctccggcctccgctcactgcgtgcacctggcgctgccctgcttcccccaacctgttgcaaggctttaattcttgcaactgggacctgctcgcaggcaccccagccctccacctctctctacatttttgcaagtgtctgggggagggcacctgctctacctgccagaaattttaaaacaaaaacaaaaacaaaaaaatctccgggggccctcttggcccctttatccctgcactctcgctctcctgccccaccccgaggtaaagggggcgactaagagaagatggtgttgctcaccgcggtcctcctgctgctggccgcctatgcggggccggcccagagcctgggctccttcgtgcactgcgagccctgcgacgagaaagccctctccatgtgcccccccagccccctgggctgcgagctggtcaaggagccgggctgcggctgctgcatgacctgcgccctggccgaggggcagtcgtgcggcgtctacaccgagcgctgcgcccaggggctgcgctgcctcccccggcaggacgaggagaagccgctgcacgccctgctgcacggccgcggggtttgcctcaacgaaaagagctaccgcgagcaagtcaagatcgagagagactcccgtgagcacgaggagcccaccacctctgagatggccgaggagacctactcccccaagatcttccggcccaaacacacccgcatctccgagctgaaggctgaagcagtgaagaaggaccgcagaaagaagctgacccagtccaagtttgtcgggggagccgagaacactgcccacccccggatcatctctgcacctgagatgagacaggagtctgagcagggcccctgccgcagacacatggaggcttccctgcaggagctcaaagccagcccacgcatggtgccccgtgctgtgtacctgcccaattgtgaccgcaaaggattctacaagagaaagcagtgcaaaccttcccgtggccgcaagcgtggcatctgctggtgcgtggacaagtacgggatgaagctgccaggcatggagtacgttgacggggactttcagtgccacaccttcgacagcagcaacgttgagtgatgcgtccccccccaacctttccctcaccccctcccacccccagccccgactccagccagcgcctccctccaccccaggacgccactcatttcatctcatttaagggaaaaatatatatctatctatttgaggaaactgaggacctcggaatctctagcaagggctcaacttcgaaaatggcaacaacagagatgcaaaaagctaaaaagacaccccccccctttaaatggttttctttttgaggcaagttggatgaacagagaagggaagagaggaagaacgagaggaagagaagggaaggaagtgtttgtgtagaagagagagaaagacgaatagagttaggaaaaggaagacaagcaggtgggcaggaaggacatgcaccgagaccaggcaggggcccaactttcacgtccagccctggcctggggtcgggagaggtgggcgctagaagatgcagcccaggatgtggcaatcaatgacactattggggtttcccaggatggattggtcagggggagaaaggaaaaggcaaaacactccaggacctctcccggatctgtctcctcctctagccagcagtatggacagctggacccctgaacttcctctcctcttacctgggcagagtgttgtctctccccaaatttataaaaactaaaatgcattccattcctctgaaagcaaaacaaattcataattgagtgatattaaatagagaggttttcggaagcagatctgtgaatatgaaatacatgtgcatatttcattccccaggcagacattttttagaaatcaatacatgccccaatattggaaagacttgttcttccacggtgactacagtacatgctgaagcgtgccgtttcagccctcatttaattcaatttgtaagtagcgcagcagcctctgtgggggaggataggctgaaaaaaaaaagtgggctcgtatttatctacaggactccatatagtcatatataggcatataaatctattctttttctttgtttttttctttcttcctttctttcaaaggtttgcattaacttttcaaagtagttcctataggggcattgaggagcttcctcattctgggaaaactgagaaaacccatattctcctaatacaacccgtaatagcatttttgcctgcctcgaggcagagtttcccgtgagcaataaactcagcttttttgtggggcacagtactggatttgacagtgattccccacgtgtgttcatctgcacccaccgagccaggcagaggccagccctccgtggtgcacacagcacgcgcctcagtccatcccattttagtctttaaaccctcaggaagtcacagtctccggacaccacaccacatgagcccaacaggtccacgatggatccaccagtcccaccccagccttttcctttcatctgaacagaatgtgcatttttggaagcctccctcactctccatgctggcagagcaggagggagactgaagtaagagatggcagagggagatggtggcaaaaaggtttagatgcaggagaacagtaagatggatggttccggccagagtcgatgtggggaggaacagagggctgaagggagagggggctgactgttccattctagctttggcacaaagcagcagaaagggggaaaagccaatagaaatttccttagcttccccaccatatgtattttctaggatttgagaggaaagagaggaaaatgggggaatgggttgcaaaatagaaatgagcttaatccaggccgcagagccagggaaggtgagtaactttaggagggtgctagactttagaagccagataggaagaatcagtctaaactggccatgctttggaagggacaagactatgtgctccgctgcccaccttcagcctgcaatgagggactgaggcccacgagtctttccagctcttcctccattctggccagtccctgcatcctccctggggtggaggatggaaggaaagctgggacaagcagggaacgcatgattcagggatgctgtcactcggcagccagattccgaaactcccattctccaatgacttcctcaaccaatgggtggccttgtgactgttctttaaggctgaagatatccaggaaagggggcttggacactggccaaggagaccccttcgtgctgtggacacagctctcttcactctttgctcatggcatgacacagcggagaccgcctccaacaacgaatttggggctacgaagaggaatagcgaaaaagcaaatctgtttcaactgatgggaaccctatagctatagaacttgggggctatctcctatgcccctggacaggacagttggctggggacaggagaagtgctcaatcttcatgagacaaaggggcccgatagggccagcagccacaaggccttgacctgccgagtcagcatgccccatctctctgcacagctgtcccctaaacccaactcacgtttctgtatgtcttaggccagtatcccaaacctcttccacgtcactgttctttccacccattctccctttgcatcttgagcagttatccaactaggatctgccaagtggatactggggtgccactcccctgagaaaagactgagccaggaactacaagctccccccacattcctcccagcctggacctaattcttgagaggggctctctcttcacggactgtgtctggactttgagcaggcttctgccccttgcgttggctctttgctgccagccatcaggtgggggattagagcctggtgtaagtgcgccagactcttccggtttccaaagttcgtgcctgcgaacccaaacctgtgagtaaaaaaaaaaaaaagccgaaaaaaaaaaaaaaaacacctgaatgcggaagagctcggctcccgtttagcattttgtacttaaggaaataaaaaaccaacaaaggatctcacattttcttaaaaagtgaagattgctgtatactatttattcaacttataatttatgttactccttgatctttgtcttttgtcatgacaaagcatttatttaataaagttatgcattcagtta

SEQ ID NO: 298005 - DNA, 3551 bp, Homo sapiens
cggtagtctctttggaaacttctgcaggggaaaagagctaggaaagagctgcaaagcagtgtgggctttttcccttttttgctccttttcattacccctcctccgttttcacccttctccggacttcgcgtagaacctgcgaatttcgaagaggaggtggcaaagtgggagaaaagaggtgttagggtttggggtttttttgtttttgtttttgttttttaatttcttgatttcaacattttctcccaccctctcggctgcagccaacgcctcttacctgttctgcggcgccgcgcaccgctggcagctgagggttagaaagcggggtgtattttagattttaagcaaaaattttaaagataaatccatttttctctcccacccccaacgccatctccactgcatccgatctcattatttcggtggttgcttgggggtgaacaattttgtggctttttttcccctataattctgacccgctcaggcttgagggtttctccggcctccgctcactgcgtgcacctggcgctgccctgcttcccccaacctgttgcaaggctttaattcttgcaactgggacctgctcgcaggcaccccagccctccacctctctctacatttttgcaagtgtctgggggagggcacctgctctacctgccagaaattttaaaacaaaaacaaaaacaaaaaaatctccgggggccctcttggcccctttatccctgcactctcgctctcctgccccaccccgaggtaaagggggcgactaagagaagatggtgttgctcaccgcggtcctcctgctgctggccgcctatgcggggccggcccagagcctgggctccttcgtgcactgcgagccctgcgacgagaaagccctctccatgtgcccccccagccccctgggctgcgagctggtcaaggagccgggctgcggctgctgcatgacctgcgccctggccgaggggcagtcgtgcggcgtctacaccgagcgctgcgcccaggggctgcgctgcctcccccggcaggacgaggagaagccgctgcacgccctgctgcacggccgcggggtttgcctcaacgaaaagagctaccgcgagcaagtcaagatcgagagagactcccgtgagcacgaggagcccaccacctctgagatggccgaggagacctactcccccaagatcttccggcccaaacacacccgcatctccgagctgaaggctgaagcagtgaagaaggaccgcagaaagaagctgacccagtccaagtttgtcgggggagccgagaacactgcccacccccggatcatctctgcacctgagatgagacaggagtctgagcagggcccctgccgcagacacatggaggcttccctgcaggagctcaaagccagcccacgcatggtgccccgtgctgtgtacctgcccaattgtgaccgcaaaggattctacaagagaaagcagtgcaaaccttcccgtggccgcaagcgtggcatctgctggtgcgtggacaagtacgggatgaagctgccaggcatggagtacgttgacggggactttcagtgccacaccttcgacagcagcaacgttgagtgatgcgtccccccccaacctttccctcaccccctcccacccccagccccgactccagccagcgcctccctccaccccaggacgccactcatttcatctcatttaagggaaaaatatatatctatctatttgaggaaactgaggacctcggaatctctagcaagggctcaacttcgaaaatggcaacaacagagatgcaaaaagctaaaaagacaccccccccctttaaatggttttctttttgaggcaagttggatgaacagagaagggaagagaggaagaacgagaggaagagaagggaaggaagtgtttgtgtagaagagagagaaagacgaatagagttaggaaaaggaagacaagcaggtgggcaggaaggacatgcaccgagaccaggcaggggcccaactttcacgtccagccctggcctggggtcgggagaggtgggcgctagaagatgcagcccaggatgtggcaatcaatgacactattggggtttcccaggatggattggtcagggggagaaaggaaaaggcaaaacactccaggacctctcccggatctgtctcctcctctagccagcagtatggacagctggacccctgaacttcctctcctcttacctgggcagagtgttgtctctccccaaatttataaaaactaaaatgcattccattcctctgaaagcaaaacaaattcataattgagtgatattaaatagagaggttttcggaagcagatctgtgaatatgaaatacatgtgcatatttcattccccaggcagacattttttagaaatcaatacatgccccaatattggaaagacttgttcttccacggtgactacagtacatgctgaagcgtgccgtttcagccctcatttaattcaatttgtaagtagcgcagcagcctctgtgggggaggataggctgaaaaaaaaaagtgggctcgtatttatctacaggactccatatagtcatatataggcatataaatctattctttttctttgtttttttctttcttcctttctttcaaaggtttgcattaacttttcaaagtagttcctataggggcattgaggagcttcctcattctgggaaaactgagaaaacccatattctcctaatacaacccgtaatagcatttttgcctgcctcgaggcagagtttcccgtgagcaataaactcagcttttttgtggggcacagtactggatttgacagtgattccccacgtgtgttcatctgcacccaccgagccaggcagaggccagccctccgtggtgcacacagcacgcgcctcagtccatcccattttagtctttaaaccctcaggaagtcacagtctccggacaccacaccacatgagcccaacaggtccacgatggatccaccagtcccaccccagccttttcctttcatctgaacagaatgtgcatttttggaagcctccctcactctccatgctggcagagcaggagggagactgaagtaagagatggcagagggagatggtggcaaaaaggtttagatgcaggagaacagtaagatggatggttccggccagagtcgatgtggggaggaacagagggttccctgtgcccgctcaccccactccaccagtccccggtcgccagccggagtctcctctctaccgccactgtcacaccgtagcccacatggatagcacagttgtcagacaagattccttcagattccgagttgcctaccggttgttttcgttgttgttgttgttgtttttctttttctttttttttttgaagacagcaataaccacagtacatattactgtagttctctatagttttacatacattcataccataactctgttctctcctcttttttgttttcaactttaaaaacaaaaataaacgatgataatctttactggtgaaaaggatggaaaaataaatcaacaaatgcaaccagtttgtgag

SEQ ID NO: 298006 - DNA, 4115 bp, Homo sapiens
cggtagtctctttggaaacttctgcaggggaaaagagctaggaaagagctgcaaagcagtgtgggctttttcccttttttgctccttttcattacccctcctccgttttcacccttctccggacttcgcgtagaacctgcgaatttcgaagaggaggtggcaaagtgggagaaaagaggtgttagggtttggggtttttttgtttttgtttttgttttttaatttcttgatttcaacattttctcccaccctctcggctgcagccaacgcctcttacctgttctgcggcgccgcgcaccgctggcagctgagggttagaaagcggggtgtattttagattttaagcaaaaattttaaagataaatccatttttctctcccacccccaacgccatctccactgcatccgatctcattatttcggtggttgcttgggggtgaacaattttgtggctttttttcccctataattctgacccgctcaggcttgagggtttctccggcctccgctcactgcgtgcacctggcgctgccctgcttcccccaacctgttgcaaggctttaattcttgcaactgggacctgctcgcaggcaccccagccctccacctctctctacatttttgcaagtgtctgggggagggcacctgctctacctgccagaaattttaaaacaaaaacaaaaacaaaaaaatctccgggggccctcttggcccctttatccctgcactctcgctctcctgccccaccccgaggtaaagggggcgactaagagaagatggtgttgctcaccgcggtcctcctgctgctggccgcctatgcggggccggcccagagcctgggctccttcgtgcactgcgagccctgcgacgagaaagccctctccatgtgcccccccagccccctgggctgcgagctggtcaaggagccgggctgcggctgctgcatgacctgcgccctggccgaggggcagtcgtgcggcgtctacaccgagcgctgcgcccaggggctgcgctgcctcccccggcaggacgaggagaagccgctgcacgccctgctgcacggccgcggggtttgcctcaacgaaaagagctaccgcgagcaagtcaagatcgagagagactcccgtgagcacgaggagcccaccacctctgagatggccgaggagacctactcccccaagatcttccggcccaaacacacccgcatctccgagctgaaggctgaagcagtgaagaaggaccgcagaaagaagctgacccagtccaagtttgtcgggggagccgagaacactgcccacccccggatcatctctgcacctgagatgagacaggagtctgagcagggcccctgccgcagacacatggaggcttccctgcaggagctcaaagccagcccacgcatggtgccccgtgctgtgtacctgcccaattgtgaccgcaaaggattctacaagagaaagcagtgcaaaccttcccgtggccgcaagcgtggcatctgctggtgcgtggacaagtacgggatgaagctgccaggcatggagtacgttgacggggactttcagtgccacaccttcgacagcagcaacgttgagtgatgcgtccccccccaacctttccctcaccccctcccacccccagccccgactccagccagcgcctccctccaccccaggacgccactcatttcatctcatttaagggaaaaatatatatctatctatttgaggaaactgaggacctcggaatctctagcaagggctcaacttcgaaaatggcaacaacagagatgcaaaaagctaaaaagacaccccccccctttaaatggttttctttttgaggcaagttggatgaacagagaagggaagagaggaagaacgagaggaagagaagggaaggaagtgtttgtgtagaagagagagaaagacgaatagagttaggaaaaggaagacaagcaggtgggcaggaaggacatgcaccgagaccaggcaggggcccaactttcacgtccagccctggcctggggtcgggagaggtgggcgctagaagatgcagcccaggatgtggcaatcaatgacactattggggtttcccaggatggattggtcagggggagaaaggaaaaggcaaaacactccaggacctctcccggatctgtctcctcctctagccagcagtatggacagctggacccctgaacttcctctcctcttacctgggcagagtgttgtctctccccaaatttataaaaactaaaatgcattccattcctctgaaagcaaaacaaattcataattgagtgatattaaatagagaggttttcggaagcagatctgtgaatatgaaatacatgtgcatatttcattccccaggcagacattttttagaaatcaatacatgccccaatattggaaagacttgttcttccacggtgactacagtacatgctgaagcgtgccgtttcagccctcatttaattcaatttgtaagtagcgcagcagcctctgtgggggaggataggctgaaaaaaaaaagtgggctcgtatttatctacaggactccatatagtcatatataggcatataaatctattctttttctttgtttttttctttcttcctttctttcaaaggtttgcattaacttttcaaagtagttcctataggggcattgaggagcttcctcattctgggaaaactgagaaaacccatattctcctaatacaacccgtaatagcatttttgcctgcctcgaggcagagtttcccgtgagcaataaactcagcttttttgtggggcacagtactggatttgacagtgattccccacgtgtgttcatctgcacccaccgagccaggcagaggccagccctccgtggtgcacacagcacgcgcctcagtccatcccattttagtctttaaaccctcaggaagtcacagtctccggacaccacaccacatgagcccaacaggtccacgatggatccaccagtcccaccccagccttttcctttcatctgaacagaatgtgcatttttggaagcctccctcactctccatgctggcagagcaggagggagactgaagtaagagatggcagagggagatggtggcaaaaaggtttagatgcaggagaacagtaagatggatggttccggccagagtcgatgtggggaggaacagagggctgaagggagagggggctgactgttccattctagctttggcacaaagcagcagaaagggggaaaagccaatagaaatttccttagcttccccaccatatgtattttctaggatttgagaggaaagagaggaaaatgggggaatgggttgcaaaatagaaatgagcttaatccaggccgcagagccagggaaggtgagtaactttaggagggtgctagactttagaagccagataggaagaatcagtctaaactggccatgctttggaagggacaagactatgtgctccgctgcccaccttcagcctgcaatgagggactgaggcccacgagtctttccagctcttcctccattctggccagtccctgcatcctccctggggtggaggatggaaggaaagctgggacaagcagggaacgcatgattcagggatgctgtcactcggcagccagattccgaaactcccattctccaatgacttcctcaaccaatgggtggccttgtgactgttctttaaggctgaagatatccaggaaagggggcttggacactggccaaggagaccccttcgtgctgtggacacagctctcttcactctttgctcatggcatgacacagcggagaccgcctccaacaacgaatttggggctacgaagaggaatagcgaaaaagcaaatctgtttcaactgatgggaaccctatagctatagaacttgggggctatctcctatgcccctggacaggacagttggctggggacaggagaagtgctcaatcttcatgagacaaaggggcccgatagggccagcagccacaaggccttgacctgccgagtcagcatgccccatctctctgcacagctgtcgggctagtcggggactgtcgggctagtcggggactgtcgggctagtcggggggtacctagctcgattcc

SEQ ID NO: 298007 - DNA, 3830 bp, Homo sapiens
cggtagtctctttggaaacttctgcaggggaaaagagctaggaaagagctgcaaagcagtgtgggctttttcccttttttgctccttttcattacccctcctccgttttcacccttctccggacttcgcgtagaacctgcgaatttcgaagaggaggtggcaaagtgggagaaaagaggtgttagggtttggggtttttttgtttttgtttttgttttttaatttcttgatttcaacattttctcccaccctctcggctgcagccaacgcctcttacctgttctgcggcgccgcgcaccgctggcagctgagggttagaaagcggggtgtattttagattttaagcaaaaattttaaagataaatccatttttctctcccacccccaacgccatctccactgcatccgatctcattatttcggtggttgcttgggggtgaacaattttgtggctttttttcccctataattctgacccgctcaggcttgagggtttctccggcctccgctcactgcgtgcacctggcgctgccctgcttcccccaacctgttgcaaggctttaattcttgcaactgggacctgctcgcaggcaccccagccctccacctctctctacatttttgcaagtgtctgggggagggcacctgctctacctgccagaaattttaaaacaaaaacaaaaacaaaaaaatctccgggggccctcttggcccctttatccctgcactctcgctctcctgccccaccccgaggtaaagggggcgactaagagaagatggtgttgctcaccgcggtcctcctgctgctggccgcctatgcggggccggcccagagcctgggctccttcgtgcactgcgagccctgcgacgagaaagccctctccatgtgcccccccagccccctgggctgcgagctggtcaaggagccgggctgcggctgctgcatgacctgcgccctggccgaggggcagtcgtgcggcgtctacaccgagcgctgcgcccaggggctgcgctgcctcccccggcaggacgaggagaagccgctgcacgccctgctgcacggccgcggggtttgcctcaacgaaaagagctaccgcgagcaagtcaagatcgagagagactcccgtgagcacgaggagcccaccacctctgagatggccgaggagacctactcccccaagatcttccggcccaaacacacccgcatctccgagctgaaggctgaagcagtgaagaaggaccgcagaaagaagctgacccagtccaagtttgtcgggggagccgagaacactgcccacccccggatcatctctgcacctgagatgagacaggagtctgagcagggcccctgccgcagacacatggaggcttccctgcaggagctcaaagccagcccacgcatggtgccccgtgctgtgtacctgcccaattgtgaccgcaaaggattctacaagagaaagcagtgcaaaccttcccgtggccgcaagcgtggcatctgctggtgcgtggacaagtacgggatgaagctgccaggcatggagtacgttgacggggactttcagtgccacaccttcgacagcagcaacgttgagtgatgcgtccccccccaacctttccctcaccccctcccacccccagccccgactccagccagcgcctccctccaccccaggacgccactcatttcatctcatttaagggaaaaatatatatctatctatttgaggaaactgaggacctcggaatctctagcaagggctcaacttcgaaaatggcaacaacagagatgcaaaaagctaaaaagacaccccccccctttaaatggttttctttttgaggcaagttggatgaacagagaagggaagagaggaagaacgagaggaagagaagggaaggaagtgtttgtgtagaagagagagaaagacgaatagagttaggaaaaggaagacaagcaggtgggcaggaaggacatgcaccgagaccaggcaggggcccaactttcacgtccagccctggcctggggtcgggagaggtgggcgctagaagatgcagcccaggatgtggcaatcaatgacactattggggtttcccaggatggattggtcagggggagaaaggaaaaggcaaaacactccaggacctctcccggatctgtctcctcctctagccagcagtatggacagctggacccctgaacttcctctcctcttacctgggcagagtgttgtctctccccaaatttataaaaactaaaatgcattccattcctctgaaagcaaaacaaattcataattgagtgatattaaatagagaggttttcggaagcagatctgtgaatatgaaatacatgtgcatatttcattccccaggcagacattttttagaaatcaatacatgccccaatattggaaagacttgttcttccacggtgactacagtacatgctgaagcgtgccgtttcagccctcatttaattcaatttgtaagtagcgcagcagcctctgtgggggaggataggctgaaaaaaaaaagtgggctcgtatttatctacaggactccatatagtcatatataggcatataaatctattctttttctttgtttttttctttcttcctttctttcaaaggtttgcattaacttttcaaagtagttcctataggggcattgaggagcttcctcattctgggaaaactgagaaaacccatattctcctaatacaacccgtaatagcatttttgcctgcctcgaggcagagtttcccgtgagcaataaactcagcttttttgtggggcacagtactggatttgacagtgattccccacgtgtgttcatctgcacccaccgagccaggcagaggccagccctccgtggtgcacacagcacgcgcctcagtccatcccattttagtctttaaaccctcaggaagtcacagtctccggacaccacaccacatgagcccaacaggtccacgatggatccaccagtcccaccccagccttttcctttcatctgaacagaatgtgcatttttggaagcctccctcactctccatgctggcagagcaggagggagactgaagtaagagatggcagagggagatggtggcaaaaaggtttagatgcaggagaacagtaagatggatggttccggccagagtcgatgtggggaggaacagagggctgaagggagagggggctgactgttccattctagctttggcacaaagcagcagaaagggggaaaagccaatagaaatttccttagcttccccaccatatgtattttctaggatttgagaggaaagagaggaaaatgggggaatgggttgcaaaatagaaatgagcttaatccaggccgcagagccagggaaggtgagtaactttaggagggtgctagactttagaagccagataggaagaatcagtctaaactggccatgctttggaagggacaagactatgtgctccgctgcccaccttcagcctgcaatgagggactgaggcccacgagtctttccagctcttcctccattctggccagtccctgcatcctccctggggtggaggatggaaggaaagctgggacaagcagggaacgcatgattcagggatgctgtcactcggcagccagattccgaaactcccattctccaatgacttcctcaaccaatgggtggccttgtgactgttctttaaggctgaagatatccaggaaagggggcttggacactggccaaggagaccccttcgtgctgtggacacagctctcttcactctttgctcatgtcatgacaaagcatttatttaataaagttatgcattcagtta

SEQ ID NO: 298008 - DNA, 3031 bp, Homo sapiens
cggtagtctctttggaaacttctgcaggggaaaagagctaggaaagagctgcaaagcagtgtgggctttttcccttttttgctccttttcattacccctcctccgttttcacccttctccggacttcgcgtagaacctgcgaatttcgaagaggaggtggcaaagtgggagaaaagaggtgttagggtttggggtttttttgtttttgtttttgttttttaatttcttgatttcaacattttctcccaccctctcggctgcagccaacgcctcttacctgttctgcggcgccgcgcaccgctggcagctgagggttagaaagcggggtgtattttagattttaagcaaaaattttaaagataaatccatttttctctcccacccccaacgccatctccactgcatccgatctcattatttcggtggttgcttgggggtgaacaattttgtggctttttttcccctataattctgacccgctcaggcttgagggtttctccggcctccgctcactgcgtgcacctggcgctgccctgcttcccccaacctgttgcaaggctttaattcttgcaactgggacctgctcgcaggcaccccagccctccacctctctctacatttttgcaagtgtctgggggagggcacctgctctacctgccagaaattttaaaacaaaaacaaaaacaaaaaaatctccgggggccctcttggcccctttatccctgcactctcgctctcctgccccaccccgaggtaaagggggcgactaagagaagatggtgttgctcaccgcggtcctcctgctgctggccgcctatgcggggccggcccagagcctgggctccttcgtgcactgcgagccctgcgacgagaaagccctctccatgtgcccccccagccccctgggctgcgagctggtcaaggagccgggctgcggctgctgcatgacctgcgccctggccgaggggcagtcgtgcggcgtctacaccgagcgctgcgcccaggggctgcgctgcctcccccggcaggacgaggagaagccgctgcacgccctgctgcacggccgcggggtttgcctcaacgaaaagagctaccgcgagcaagtcaagatcgagagagactcccgtgagcacgaggagcccaccacctctgagatggccgaggagacctactcccccaagatcttccggcccaaacacacccgcatctccgagctgaaggctgaagcagtgaagaaggaccgcagaaagaagctgacccagtccaagtttgtcgggggagccgagaacactgcccacccccggatcatctctgcacctgagatgagacaggagtctgagcagggcccctgccgcagacacatggaggcttccctgcaggagctcaaagccagcccacgcatggtgccccgtgctgtgtacctgcccaattgtgaccgcaaaggattctacaagagaaagcagtgcaaaccttcccgtggccgcaagcgtggcatctgctggtgcgtggacaagtacgggatgaagctgccaggcatggagtacgttgacggggactttcagtgccacaccttcgacagcagcaacgttgagtgatgcgtccccccccaacctttccctcaccccctcccacccccagccccgactccagccagcgcctccctccaccccaggacgccactcatttcatctcatttaagggaaaaatatatatctatctatttgaggaaactgaggacctcggaatctctagcaagggctcaacttcgaaaatggcaacaacagagatgcaaaaagctaaaaagacaccccccccctttaaatggttttctttttgaggcaagttggatgaacagagaagggaagagaggaagaacgagaggaagagaagggaaggaagtgtttgtgtagaagagagagaaagacgaatagagttaggaaaaggaagacaagcaggtgggcaggaaggacatgcaccgagaccaggcaggggcccaactttcacgtccagccctggcctggggtcgggagaggtgggcgctagaagatgcagcccaggatgtggcaatcaatgacactattggggtttcccaggatggattggtcagggggagaaaggaaaaggcaaaacactccaggacctctcccggatctgtctcctcctctagccagcagtatggacagctggacccctgaacttcctctcctcttacctgggcagagtgttgtctctccccaaatttataaaaactaaaatgcattccattcctctgaaagcaaaacaaattcataattgagtgatattaaatagagaggttttcggaagcagatctgtgaatatgaaatacatgtgcatatttcattccccaggcagacattttttagaaatcaatacatgccccaatattggaaagacttgttcttccacggtgactacagtacatgctgaagcgtgccgtttcagccctcatttaattcaatttgtaagtagcgcagcagcctctgtgggggaggataggctgaaaaaaaaaagtgggctcgtatttatctacaggactccatatagtcatatataggcatataaatctattctttttctttgtttttttctttcttcctttctttcaaaggtttgcattaacttttcaaagtagttcctataggggcattgaggagcttcctcattctgggaaaactgagaaaacccatattctcctaatacaacccgtaatagcatttttgcctgcctcgaggcagagtttcccgtgagcaataaactcagcttttttgtggggcacagtactggatttgacagtgattccccacgtgtgttcatctgcacccaccgagccaggcagaggccagccctccgtggtgcacacagcacgcgcctcagtccatcccattttagtctttaaaccctcaggaagtcgtaaatctatcagatgaggatctgcctagagatagggagtgggaaggacctctcaaacaagaatagatgacaacttctgtcagagcaggacagcagcgat

SEQ ID NO: 298009 - DNA, 798 bp, Homo sapiens
  misc_feature (612)..(612): n is a, c, g, or t
ggccaagttatgaggctctgagaacaagagcttgaggggaagactgttaaccccatccacgccaccagaattagctctttcccttttggtttgcaagcactgcctgtaaagccctcgcatgagaggccagcctgctagggaaatccaggaatctgcaacaaaaacgatgacagtctgaaatactctctggtgccaacctccaaattctcgtctgtcacttcagacccccactagttgacagagcagcagaatttcaactccagtagacttgaatatgcctctgggcaaagaagcagagctaacgaggaaagggatttaaagagtttttcttgggtgtttgtcaaacttttattccctgtctgtgtgcagaggggattcaacttcaatttttctgcagtggctctgggtccagccccttacttaaagatctggaaagcatgaagactgggctttttttcctatgtctcttgggaactgcagctgcaatcccgacaaatgcaagattattatctgatcattccaaaccaactgctgaaacggtagcacccgacaacactgcaatccccagtttaagggctgaagctgaagaaaatgaaaaagaaaaaaaaaaanttggggggcgcgcgggccgggaagaacttttcaaccctcgcggtgggggcgggggccaggggtaagggcaatggcacagggtgccaaggacaccggccgcacagggggggtttccccaaaaaaacgccgggggcccgggttcgacaacacccacggtcgggcgtcaggttacacagcgccggctat

SEQ ID NO: 298010 - DNA, 2790 bp, Homo sapiens
cccccgggctgcaggattcggcacgtgtaaagccctcgcatgagaggccagcctgctagggaaatccaggaatctgcaacaaaaacgatgacagtctgaaatactctctggtgccaacctccaaattctcgtctgtcacttcagacccccactagttgacagagcagcagaatttcaactccagtagacttgaatatgcctctgggcaaagaagcagagctaacgaggaaagggatttaaagagtttttcttgggtgtttgtcaaacttttattccctgtctgtgtgcagaggggattcaacttcaatttttctgcagtggctctgggtccagccccttacttaaagatctggaaagcatgaagactgggctttttttcctatgtctcttgggaactgcagctgcaatcccgacaaatgcaagattattatctgatcattccaaaccaactgctgaaacggtagcacccgacaacactgcaatccccagtttaagggctgaagctgaagaaaatgaaaaagaaacagcagtatccacagaagacgattcccaccataaggctgaaaaatcatcagtactaaagtcaaaagaggaaagccatgaacagtcagcagaacagggcaagagttctagccaagagctgggattgaaggatcaagaggacagtgatggtcacttaagtgtgaatttggagtatgcaccaactgaaggtacattggacataaaagaagatatgagtgagcctcaggagaaaaaactctcagagaacactgattttttggctcctggtgttagttccttcacagattctaaccaacaagaaagtatcacaaagagagaggaaaaccaagaacaacctagaaattattcacatcatcagttgaacaggagcagtaaacatagccaaggcctaagggatcaaggaaaccaagagcaggatccaaatatttccaatggagaagaggaagaagaaaaagagccaggtgaagttggtacccacaatgataaccaagaaagaaagacagaattgcccagggagcatgctaacagcaagcaggaggaagacaatacccaatctgatgatattttggaagagtctgatcaaccaactcaagtaagcaagatgcaggaggatgaatttgatcagggtaaccaagaacaagaagataactccaatgcagaaatggaagaggaaaatgcatcgaacgtcaataagcacattcaagaaactgaatggcagagtcaagagggtaaaactggcctagaagctatcagcaaccacaaagagacagaagaaaagactgtttctgaggctctgctcatggaacctactgatgatggtaataccacgcccagaaatcatggagttgatgatgatggcgatgatgatggcgatgatggcggcactgatggccccaggcacagtgcaagtgatgactacttcatcccaagccaggcctttctggaggccgagagagctcaatccattgcctatcacctcaaaattgaggagcaaagagaaaaagtacatgaaaatgaaaatataggtaccactgagcctggagagcaccaagaggccaagaaagcagagaactcatcaaatgaggaggaaacgtcaagtgaaggcaacatgagggtgcatgctgtggattcttgcatgagcttccagtgtaaaagaggccacatctgtaaggcagaccaacagggaaaacctcactgtgtctgccaggatccagtgacttgtcctccaacaaaaccccttgatcaagtttgtggcactgacaatcagacctatgctagttcctgtcatctattcgctactaaatgcagactggaggggaccaaaaaggggcatcaactccagctggattattttggagcctgcaaatctattcctacttgtacggactttgaagtgattcagtttcctctacggatgagagactggctcaagaatatcctcatgcagctttatgaagccaactctgaacacgctggttatctaaatgagaagcagagaaataaagtcaagaaaatttacctggatgaaaagaggcttttggctggggaccatcccattgaccttctcttaagggactttaagaaaaactaccacatgtatgtgtatcctgtgcactggcagtttagtgaacttgaccaacaccctatggatagagtcttgacacattctgaacttgctcctctgcgagcatctctggtgcccatggaacactgcataacccgtttctttgaggagtgtgaccccaacaaggataagcacatcaccctgaaggagtggggccactgctttggaattaaagaagaggacatagatgaaaatctcttgttttgaacgaagattttaaagaactcaactttccagcatcctcctctgttctaaccacttcagaaatatatgcagctgtgatacttgtagatttatatttagcaaaatgttagcatgtatgacaagacaatgagagtaattgcttgacaacaacctatgcaccaggtatttaacattaactttggaaacaaaaatgtacaattaagtaaagtcaacatatgcaaaatactgtacattgtgaacagaagtttaattcatagtaatttcactctctgcattgacttatgagataattaatgattaaactattaatgataaaaataatgcatttgtattgttcataatatcatgtgcacttcaagaaaatggaatgctactcttttgtggtttacgtgtattattttcaatatcttaataccctaataaagagtccataaaaatcc

SEQ ID NO: 298011 - DNA, 2800 bp, Homo sapiens
  misc_feature (30)..(30): n is a, c, g, or t
  misc_feature (33)..(33): n is a, c, g, or t
tctgattcctcggagcatgttggcctactnggnagtgtaaagccctcgcatgagaggccagcctgctagggaaatccaggaatctgcaacaaaaacgatgacagtctgaaatactctctggtgccaacctccaaattctcgtctgtcacttcagacccccactagttgacagagcagcagaatttcaactccagtagacttgaatatgcctctgggcaaagaagcagagctaacgaggaaagggatttaaagagtttttcttgggtgtttgtcaaacttttattccctgtctgtgtgcagaggggattcaacttcaatttttctgcagtggctctgggtccagccccttacttaaagatctggaaagcatgaagactgggctttttttcctatgtctcttgggaactgcagctgcaatcccgacaaatgcaagattattatctgatcattccaaaccaactgctgaaacggtagcacccgacaacactgcaatccccagtttaagggctgaagctgaagaaaatgaaaaagaaacagcagtatccacagaagacgattcccaccataaggctgaaaaatcatcagtactaaagtcaaaagaggaaagccatgaacagtcagcagaacagggcaagagttctagccaagagctgggattgaaggatcaagaggacagtgatggtcacttaagtgtgaatttggagtatgcaccaactgaaggtacattggacataaaagaagatatgagtgagcctcaggagaaaaaactctcagagaacactgattttttggctcctggtgttagttccttcacagattctaaccaacaagaaagtatcacaaagagagaggaaaaccaagaacaacctagaaattattcacatcatcagttgaacaggagcagtaaacatagccaaggcctaagggatcaaggaaaccaagagcaggatccaaatatttccaatggagaagaggaagaagaaaaagagccaggtgaagttggtacccacaatgataaccaagaaagaaagacagaattgcccagggagcatgctaacagcaagcaggaggaagacaatacccaatctgatgatattttggaagagtctgatcaaccaactcaagtaagcaagatgcaggaggatgaatttgatcagggtaaccaagaacaagaagataactccaatgcagaaatggaagaggaaaatgcatcgaacgtcaataagcacattcaagaaactgaatggcagagtcaagagggtaaaactggcctagaagctatcagcaaccacaaagagacagaagaaaagactgtttctgaggctctgctcatggaacctactgatgatggtaataccacgcccagaaatcatggagttgatgatgatggcgatgatgatggcgatgatggcggcactgatggccccaggcacagtgcaagtgatgactacttcatcccaagccaggcctttctggaggccgagagagctcaatccattgcctatcacctcaaaattgaggagcaaagagaaaaagtacatgaaaatgaaaatataggtaccactgagcctggagagcaccaagaggccaagaaagcagagaactcatcaaatgaggaggaaacgtcaagtgaaggcaacatgagggtgcatgctgtggattcttgcatgagcttccagtgtaaaagaggccacatctgtaaggcagaccaacagggaaaacctcactgtgtctgccaggatccagtgacttgtcctccaacaaaaccccttgatcaagtttgtggcactgacaatcagacctatgctagttcctgtcatctattcgctactaaatgcagactggaggggaccaaaaaggggcatcaactccagctggattattttggagcctgcaaatctattcctacttgtacggactttgaagtgattcagtttcctctacggatgagagactggctcaagaatatcctcatgcagctttatgaagccaactctgaacacgctggttatctaaatgagaagcagagaaataaagtcaagaaaatttacctggatgaaaagaggcttttggctggggaccatcccattgaccttctcttaagggactttaagaaaaactaccacatgtatgtgtatcctgtgcactggcagtttagtgaacttgaccaacaccctatggatagagtcttgacacattctgaacttgctcctctgcgagcatctctggtgcccatggaacactgcataacccgtttctttgaggagtgtgaccccaacaaggataagcacatcaccctgaaggagtggggccactgctttggaattaaagaagaggacatagatgaaaatctcttgttttgaacgaagattttaaagaactcaactttccagcatcctcctctgttctaaccacttcagaaatatatgcagctgtgatacttgtagatttatatttagcaaaatgttagcatgtatgacaagacaatgagagtaattgcttgacaacaacctatgcaccaggtatttaacattaactttggaaacaaaaatgtacaattaagtaaagtcaacatatgcaaaatactgtacattgtgaacagaagtttaattcatagtaatttcactctctgcattgacttatgagataattaatgattaaactattaatgataaaaataatgcatttgtattgttcataatatcatgtgcacttcaagaaaatggaatgctactcttttgtggtttacgtgtattattttcaatatcttaataccctaataaagagtccataaaaatcc

SEQ ID NO: 298012 - DNA, 2701 bp, Homo sapiens
gcggccgctccaacatcagaatggtcaacctccaaattctcgtctgtcacttcagacccccactagttgacagagcagcagaatttcaactccagtagacttgaatatgcctctgggcaaagaagcagagctaacgaggaaagggatttaaagagtttttcttgggtgtttgtcaaacttttattccctgtctgtgtgcagaggggattcaacttcaatttttctgcagtggctctgggtccagccccttacttaaagatctggaaagcatgaagactgggctttttttcctatgtctcttgggaactgcagctgcaatcccgacaaatgcaagattattatctgatcattccaaaccaactgctgaaacggtagcacccgacaacactgcaatccccagtttaagggctgaagctgaagaaaatgaaaaagaaacagcagtatccacagaagacgattcccaccataaggctgaaaaatcatcagtactaaagtcaaaagaggaaagccatgaacagtcagcagaacagggcaagagttctagccaagagctgggattgaaggatcaagaggacagtgatggtcacttaagtgtgaatttggagtatgcaccaactgaaggtacattggacataaaagaagatatgagtgagcctcaggagaaaaaactctcagagaacactgattttttggctcctggtgttagttccttcacagattctaaccaacaagaaagtatcacaaagagagaggaaaaccaagaacaacctagaaattattcacatcatcagttgaacaggagcagtaaacatagccaaggcctaagggatcaaggaaaccaagagcaggatccaaatatttccaatggagaagaggaagaagaaaaagagccaggtgaagttggtacccacaatgataaccaagaaagaaagacagaattgcccagggagcatgctaacagcaagcaggaggaagacaatacccaatctgatgatattttggaagagtctgatcaaccaactcaagtaagcaagatgcaggaggatgaatttgatcagggtaaccaagaacaagaagataactccaatgcagaaatggaagaggaaaatgcatcgaacgtcaataagcacattcaagaaactgaatggcagagtcaagagggtaaaactggcctagaagctatcagcaaccacaaagagacagaagaaaagactgtttctgaggctctgctcatggaacctactgatgatggtaataccacgcccagaaatcatggagttgatgatgatggcgatgatgatggcgatgatggcggcactgatggccccaggcacagtgcaagtgatgactacttcatcccaagccaggcctttctggaggccgagagagctcaatccattgcctatcacctcaaaattgaggagcaaagagaaaaagtacatgaaaatgaaaatataggtaccactgagcctggagagcaccaagaggccaagaaagcagagaactcatcaaatgaggaggaaacgtcaagtgaaggcaacatgagggtgcatgctgtggattcttgcatgagcttccagtgtaaaagaggccacatctgtaaggcagaccaacagggaaaacctcactgtgtctgccaggatccagtgacttgtcctccaacaaaaccccttgatcaagtttgtggcactgacaatcagacctatgctagttcctgtcatctattcgctactaaatgcagactggaggggaccaaaaaggggcatcaactccagctggattattttggagcctgcaaatctattcctacttgtacggactttgaagtgattcagtttcctctacggatgagagactggctcaagaatatcctcatgcagctttatgaagccaactctgaacacgctggttatctaaatgagaagcagagaaataaagtcaagaaaatttacctggatgaaaagaggcttttggctggggaccatcccattgaccttctcttaagggactttaagaaaaactaccacatgtatgtgtatcctgtgcactggcagtttagtgaacttgaccaacaccctatggatagagtcttgacacattctgaacttgctcctctgcgagcatctctggtgcccatggaacactgcataacccgtttctttgaggagtgtgaccccaacaaggataagcacatcaccctgaaggagtggggccactgctttggaattaaagaagaggacatagatgaaaatctcttgttttgaacgaagattttaaagaactcaactttccagcatcctcctctgttctaaccacttcagaaatatatgcagctgtgatacttgtagatttatatttagcaaaatgttagcatgtatgacaagacaatgagagtaattgcttgacaacaacctatgcaccaggtatttaacattaactttggaaacaaaaatgtacaattaagtaaagtcaacatatgcaaaatactgtacattgtgaacagaagtttaattcatagtaatttcactctctgcattgacttatgagataattaatgattaaactattaatgataaaaataatgcatttgtattgttcataatatcatgtgcacttcaagaaaatggaatgctactcttttgtggtttacgtgtattattttcaatatcttaataccctaataaagagtccataaaaatcc

SEQ ID NO: 298013 - DNA, 2253 bp, Homo sapiens
ggccaagttatgaggctctgagaacaagagcttgaggggaagactgttaaccccatccacgccaccagaattagctctttcccttttggtttgcaagcactgcctgtaaagccctcgcatgagaggccagcctgctagggaaatccaggaatctgcaacaaaaacgatgacagtctgaaatactctctggtgccaacctccaaattctcgtctgtcacttcagacccccactagttgacagagcagcagaatttcaactccagtagacttgaatatgcctctgggcaaagaagcagagctaacgaggaaagggatttaaagagtttttcttgggtgtttgtcaaacttttattccctgtctgtgtgcagaggggattcaacttcaatttttctgcagtggctctgggtccagccccttacttaaagatctggaaagcatgaagactgggctttttttcctatgtctcttgggaactgcagctgcaatcccgacaaatgcaagattattatctgatcattccaaaccaactgctgaaacggtagcacccgacaacactgcaatccccagtttaagggctgaagctgaagaaaatgaaaaagaaacagcagtatccacagaagacgattcccaccataaggctgaaaaatcatcagtactaaagtcaaaagaggaaagccatgaacagtcagcagaacagggcaagagttctagccaagagctgggattgaaggatcaagaggacagtgatggtcacttaagtgtgaatttggagtatgcaccaactgaaggtacattggacataaaagaagatatgagtgagcctcaggagaaaaaactctcagagaacactgattttttggctcctggtgttagttccttcacagattctaaccaacaagaaagtatcacaaagagagaggaaaaccaagaacaacctagaaattattcacatcatcagttgaacaggagcagtaaacatagccaaggcctaagggatcaaggaaaccaagagcaggatccaaatatttccaatggagaagaggaagaagaaaaagagccaggtgaagttggtacccacaatgataaccaagaaagaaagacagaattgcccagggagcatgctaacagcaagcaggaggaagacaatacccaatctgatgatattttggaagagtctgatcaaccaactcaagtaagcaagatgcaggaggatgaatttgatcagggtaaccaagaacaagaagataactccaatgcagaaatggaagaggaaaatgcatcgaacgtcaataagcacattcaagaaactgaatggcagagtcaagagggtaaaactggcctagaagctatcagcaaccacaaagagacagaagaaaagactgtttctgaggctctgctcatggaacctactgatgatggtaataccacgcccagaaatcatggagttgatgatgatggcgatgatgatggcgatgatggcggcactgatggccccaggcacagtgcaagtgatgactacttcatcccaagccaggcctttctggaggccgagagagctcaatccattgcctatcacctcaaaattgaggagcaaagagaaaaagtacatgaaaatgaaaatataggtaccactgagcctggagagcaccaagaggccaagaaagcagagaactcatcaaatgaggaggaaacgtcaagtgaaggcaacatgagggtgcatgctgtggattcttgcatgagcttccagtgtaaaagaggccacatctgtaaggcagaccaacagggaaaacctcactgtgtctgccaggatccagtgacttgtcctccaacaaaaccccttgatcaagtttgtggcactgacaatcagacctatgctagttcctgtcatctattcgctactaaatgcagactggaggggaccaaaaaggggcatcaactccagctggattattttggagcctgcaaatctattcctacttgtacggactttgaagtgattcagtttcctctacggatgagagactggctcaagaatatcctcatgcaggtatgaagcaagcggaaagctggtttttaatgaagacgaagaaggtcgcaaattccgtgggggttgggggggaacctagatgttaatgggggtagaaatacacgattgtcggaggggatgaagatacaagatagtaacttaagaacacgatatgtgaagaacatggtgaaggaacatggcgggaaactattttcttttgtattcg

SEQ ID NO: 298014 - DNA, 1768 bp, Homo sapiens
ggccaagttatgaggctctgagaacaagagcttgaggggaagactgttaaccccatccacgccaccagaattagctctttcccttttggtttgcaagcactgcctgtaaagccctcgcatgagaggccagcctgctagggaaatccaggaatctgcaacaaaaacgatgacagtctgaaatactctctggtgccaacctccaaattctcgtctgtcacttcagacccccactagttgacagagcagcagaatttcaactccagtagacttgaatatgcctctgggcaaagaagcagagctaacgaggaaagggatttaaagagtttttcttgggtgtttgtcaaacttttattccctgtctgtgtgcagaggggattcaacttcaatttttctgcagtggctctgggtccagccccttacttaaagatctggaaagcatgaagactgggctttttttcctatgtctcttgggaactgcagctgcaatcccgacaaatgcaagattattatctgatcattccaaaccaactgctgaaacggtagcacccgacaacactgcaatccccagtttaagggctgaagctgaagaaaatgaaaaagaaacagcagtatccacagaagacgattcccaccataaggctgaaaaatcatcagtactaaagtcaaaagaggaaagccatgaacagtcagcagaacagggcaagagttctagccaagagctgggattgaaggatcaagaggacagtgatggtcacttaagtgtgaatttggagtatgcaccaactgaaggtacattggacataaaagaagatatgagtgagcctcaggagaaaaaactctcagagaacactgattttttggctcctggtgttagttccttcacagattctaaccaacaagaaagtatcacaaagagagaggaaaaccaagaacaacctagaaattattcacatcatcagttgaacaggagcagtaaacatagccaaggcctaagggatcaaggaaaccaagagcaggatccaaatatttccaatggagaagaggaagaagaaaaagagccaggtgaagttggtacccacaatgataaccaagaaagaaagacagaattgcccagggagcatgctaacagcaagcaggaggaagacaatacccaatctgatgatattttggaagagtctgatcaaccaactcaagtaagcaagatgcaggaggatgaatttgatcagggtaaccaagaacaagaagataactccaatgcagaaatggaagaggaaaatgcatcgaacgtcaataagcacattcaagaaactgaatggcagagtcaagagggtaaaactggcctagaagctatcagcaaccacaaagagacagaagaaaagactgtttctgaggctctgctcatggaacctactgatgatggtaataccacgcccagaaatcatggagttgatgatgatggcgatgatgatggcgatgatggcggcactgatggccccaggcacagtgcaagtgatgactacttcatcccaagccaggcctttctggaggccgagagagctcaatccattgcctatcacctcaaaattgaggagcaaagagagaggaaaaccaagaacaacctagaaattattcacatcatcagttgaacaggagcagtaaacatagccaaggcctaagggatcaaggaaaccaagagcaggatccaaatatttccaatggagaagaggaagaagaaaaagagccaggtgaagttggtacccacaatgat

SEQ ID NO: 298015 - DNA, 1581 bp, Homo sapiens
ggccaagttatgaggctctgagaacaagagcttgaggggaagactgttaaccccatccacgccaccagaattagctctttcccttttggtttgcaagcactgcctgtaaagccctcgcatgagaggccagcctgctagggaaatccaggaatctgcaacaaaaacgatgacagtctgaaatactctctggtgccaacctccaaattctcgtctgtcacttcagacccccactagttgacagagcagcagaatttcaactccagtagacttgaatatgcctctgggcaaagaagcagagctaacgaggaaagggatttaaagagtttttcttgggtgtttgtcaaacttttattccctgtctgtgtgcagaggggattcaacttcaatttttctgcagtggctctgggtccagccccttacttaaagatctggaaagcatgaagactgggctttttttcctatgtctcttgggaactgcagctgcaatcccgacaaatgcaagattattatctgatcattccaaaccaactgctgaaacggtagcacccgacaacactgcaatccccagtttaagggctgaagctgaagaaaatgaaaaagaaacagcagtatccacagaagacgattcccaccataaggctgaaaaatcatcagtactaaagtcaaaagaggaaagccatgaacagtcagcagaacagggcaagagttctagccaagagctgggattgaaggatcaagaggacagtgatggtcacttaagtgtgaatttggagtatgcaccaactgaaggtacattggacataaaagaagatatgagtgagcctcaggagaaaaaactctcagagaacactgattttttggctcctggtgttagttccttcacagattctaaccaacaagaaagtatcacaaagagagaggaaaaccaagaacaacctagaaattattcacatcatcagttgaacaggagcagtaaacatagccaaggcctaagggatcaaggaaaccaagagcaggatccaaatatttccaatggagaagaggaagaagaaaaagagccaggtgaagttggtacccacaatgataaccaagaaagaaagacagaattgcccagggagcatgctaacagcaagcaggaggaagacaatacccaatctgatgatattttggaagagtctgatcaaccaactcaagtaagcaagatgcaggaggatgaatttgatcagggtaaccaagaacaagaagataactccaatgcagaaatggaagaggaaaatgcatcgaacgtcaataagcacattcaagaaactgaatggcagagtcaagagggtaaaactggcctagaagctatcagcaaccacaaagagacagaagaaaagactgtttctgaggctctgctcatggaacctactgatgatggtacccacaatgataaccaagaaagaaagacagaattgcccagggagcatgctaacagcaagcaggaggaagacaatacccaatctgatgatattttggaagagtctgatcaaccaactcaagtaagcaagatgcaggaggatgaatttgatcagggtaacc

SEQ ID NO: 298016 - DNA, 2971 bp, Homo sapiens
ggccaagttatgaggctctgagaacaagagcttgaggggaagactgttaaccccatccacgccaccagaattagctctttcccttttggtttgcaagcactgcctgtaaagccctcgcatgagaggccagcctgctagggaaatccaggaatctgcaacaaaaacgatgacagtctgaaatactctctggtgccaacctccaaattctcgtctgtcacttcagacccccactagttgacagagcagcagaatttcaactccagtagacttgaatatgcctctgggcaaagaagcagagctaacgaggaaagggatttaaagagtttttcttgggtgtttgtcaaacttttattccctgtctgtgtgcagaggggattcaacttcaatttttctgcagtggctctgggtccagccccttacttaaaggccataagatgttttattgaaagaaactttcaatatcaagtaatccaaccaaccttctaagataagccttttccttcaacacaaagaagtgcattttgccaaatctggaaagcatgaagactgggctttttttcctatgtctcttgggaactgcagctgcaatcccgacaaatgcaagattattatctgatcattccaaaccaactgctgaaacggtagcacccgacaacactgcaatccccagtttaagggctgaagctgaagaaaatgaaaaagaaacagcagtatccacagaagacgattcccaccataaggctgaaaaatcatcagtactaaagtcaaaagaggaaagccatgaacagtcagcagaacagggcaagagttctagccaagagctgggattgaaggatcaagaggacagtgatggtcacttaagtgtgaatttggagtatgcaccaactgaaggtacattggacataaaagaagatatgagtgagcctcaggagaaaaaactctcagagaacactgattttttggctcctggtgttagttccttcacagattctaaccaacaagaaagtatcacaaagagagaggaaaaccaagaacaacctagaaattattcacatcatcagttgaacaggagcagtaaacatagccaaggcctaagggatcaaggaaaccaagagcaggatccaaatatttccaatggagaagaggaagaagaaaaagagccaggtgaagttggtacccacaatgataaccaagaaagaaagacagaattgcccagggagcatgctaacagcaagcaggaggaagacaatacccaatctgatgatattttggaagagtctgatcaaccaactcaagtaagcaagatgcaggaggatgaatttgatcagggtaaccaagaacaagaagataactccaatgcagaaatggaagaggaaaatgcatcgaacgtcaataagcacattcaagaaactgaatggcagagtcaagagggtaaaactggcctagaagctatcagcaaccacaaagagacagaagaaaagactgtttctgaggctctgctcatggaacctactgatgatggtaataccacgcccagaaatcatggagttgatgatgatggcgatgatgatggcgatgatggcggcactgatggccccaggcacagtgcaagtgatgactacttcatcccaagccaggcctttctggaggccgagagagctcaatccattgcctatcacctcaaaattgaggagcaaagagaaaaagtacatgaaaatgaaaatataggtaccactgagcctggagagcaccaagaggccaagaaagcagagaactcatcaaatgaggaggaaacgtcaagtgaaggcaacatgagggtgcatgctgtggattcttgcatgagcttccagtgtaaaagaggccacatctgtaaggcagaccaacagggaaaacctcactgtgtctgccaggatccagtgacttgtcctccaacaaaaccccttgatcaagtttgtggcactgacaatcagacctatgctagttcctgtcatctattcgctactaaatgcagactggaggggaccaaaaaggggcatcaactccagctggattattttggagcctgcaaatctattcctacttgtacggactttgaagtgattcagtttcctctacggatgagagactggctcaagaatatcctcatgcagctttatgaagccaactctgaacacgctggttatctaaatgagaagcagagaaataaagtcaagaaaatttacctggatgaaaagaggcttttggctggggaccatcccattgaccttctcttaagggactttaagaaaaactaccacatgtatgtgtatcctgtgcactggcagtttagtgaacttgaccaacaccctatggatagagtcttgacacattctgaacttgctcctctgcgagcatctctggtgcccatggaacactgcataacccgtttctttgaggagtgtgaccccaacaaggataagcacatcaccctgaaggagtggggccactgctttggaattaaagaagaggacatagatgaaaatctcttgttttgaacgaagattttaaagaactcaactttccagcatcctcctctgttctaaccacttcagaaatatatgcagctgtgatacttgtagatttatatttagcaaaatgttagcatgtatgacaagacaatgagagtaattgcttgacaacaacctatgcaccaggtatttaacattaactttggaaacaaaaatgtacaattaagtaaagtcaacatatgcaaaatactgtacattgtgaacagaagtttaattcatagtaatttcactctctgcattgacttatgagataattaatgattaaactattaatgataaaaataatgcatttgtattgttcataatatcatgtgcacttcaagaaaatggaatgctactcttttgtggtttacgtgtattattttcaatatcttaataccctaataaagagtccataaaaatcc

SEQ ID NO: 298017 - DNA, 2530 bp, Homo sapiens
ggccaagttatgaggctctgagaacaagagcttgaggggaagactgttaaccccatccacgccaccagaattagctctttcccttttggtttgcaagcactgcctgtaaagccctcgcatgagaggccagcctgctagggaaatccaggaatctgcaacaaaaacgatgacagtctgaaatactctctggtgccaacctccaaattctcgtctgtcacttcagacccccactagttgacagagcagcagaatttcaactccagtagacttgaatatgcctctgggcaaagaagcagagctaacgaggaaagggatttaaagagtttttcttgggtgtttgtcaaacttttattccctgtctgtgtgcagaggggattcaacttcaatttttctgcagtggctctgggtccagccccttacttaaagatctggaaagcatgaagactgggctttttttcctatgtctcttgggaactgcagctgcaatcccgacaaatgcaagattattatctgatcattccaaaccaactgctgaaacggtagcacccgacaacactgcaatccccagtttaagggctgaagctgaagaaaatgaaaaagaaacagcagtatccacagaagacgattcccaccataaggctgaaaaatcatcagtactaaagtcaaaagaggaaagccatgaacagtcagcagaacagggcaagagttctagccaagagctgggattgaaggatcaagaggacagtgatggtcacttaagtgtgaatttggagtatgcaccaactgaaggtacattggacataaaagaagatatgagtgagcctcaggagaaaaaactctcagagaacactgattttttggctcctggtgttagttccttcacagattctaaccaagaacaagaagataactccaatgcagaaatggaagaggaaaatgcatcgaacgtcaataagcacattcaagaaactgaatggcagagtcaagagggtaaaactggcctagaagctatcagcaaccacaaagagacagaagaaaagactgtttctgaggctctgctcatggaacctactgatgatggtaataccacgcccagaaatcatggagttgatgatgatggcgatgatgatggcgatgatggcggcactgatggccccaggcacagtgcaagtgatgactacttcatcccaagccaggcctttctggaggccgagagagctcaatccattgcctatcacctcaaaattgaggagcaaagagaaaaagtacatgaaaatgaaaatataggtaccactgagcctggagagcaccaagaggccaagaaagcagagaactcatcaaatgaggaggaaacgtcaagtgaaggcaacatgagggtgcatgctgtggattcttgcatgagcttccagtgtaaaagaggccacatctgtaaggcagaccaacagggaaaacctcactgtgtctgccaggatccagtgacttgtcctccaacaaaaccccttgatcaagtttgtggcactgacaatcagacctatgctagttcctgtcatctattcgctactaaatgcagactggaggggaccaaaaaggggcatcaactccagctggattattttggagcctgcaaatctattcctacttgtacggactttgaagtgattcagtttcctctacggatgagagactggctcaagaatatcctcatgcagctttatgaagccaactctgaacacgctggttatctaaatgagaagcagagaaataaagtcaagaaaatttacctggatgaaaagaggcttttggctggggaccatcccattgaccttctcttaagggactttaagaaaaactaccacatgtatgtgtatcctgtgcactggcagtttagtgaacttgaccaacaccctatggatagagtcttgacacattctgaacttgctcctctgcgagcatctctggtgcccatggaacactgcataacccgtttctttgaggagtgtgaccccaacaaggataagcacatcaccctgaaggagtggggccactgctttggaattaaagaagaggacatagatgaaaatctcttgttttgaacgaagattttaaagaactcaactttccagcatcctcctctgttctaaccacttcagaaatatatgcagctgtgatacttgtagatttatatttagcaaaatgttagcatgtatgacaagacaatgagagtaattgcttgacaacaacctatgcaccaggtatttaacattaactttggaaacaaaaatgtacaattaagtaaagtcaacatatgcaaaatactgtacattgtgaacagaagtttaattcatagtaatttcactctctgcattgacttatgagataattaatgattaaactattaatgataaaaataatgcatttgtattgttcataatatcatgtgcacttcaagaaaatggaatgctactcttttgtggtttacgtgtattattttcaatatcttaataccctaataaagagtccataaaaatcc

SEQ ID NO: 298018 - DNA, 2472 bp, Homo sapiens
agctcggtaccccctggctctgaacttagatctggaaagcatgaagactgggctttttttcctatgtctcttgggaactgcagctgcaatcccgacaaatgcaagattattatctgatcattccaaaccaactgctgaaacggtagcacccgacaacactgcaatccccagtttaagggctgaagctgaagaaaatgaaaaagaaacagcagtatccacagaagacgattcccaccataaggctgaaaaatcatcagtactaaagtcaaaagaggaaagccatgaacagtcagcagaacagggcaagagttctagccaagagctgggattgaaggatcaagaggacagtgatggtcacttaagtgtgaatttggagtatgcaccaactgaaggtacattggacataaaagaagatatgagtgagcctcaggagaaaaaactctcagagaacactgattttttggctcctggtgttagttccttcacagattctaaccaacaagaaagtatcacaaagagagaggaaaaccaagaacaacctagaaattattcacatcatcagttgaacaggagcagtaaacatagccaaggcctaagggatcaaggaaaccaagagcaggatccaaatatttccaatggagaagaggaagaagaaaaagagccaggtgaagttggtacccacaatgataaccaagaaagaaagacagaattgcccagggagcatgctaacagcaagcaggaggaagacaatacccaatctgatgatattttggaagagtctgatcaaccaactcaagtaagcaagatgcaggaggatgaatttgatcagggtaaccaagaacaagaagataactccaatgcagaaatggaagaggaaaatgcatcgaacgtcaataagcacattcaagaaactgaatggcagagtcaagagggtaaaactggcctagaagctatcagcaaccacaaagagacagaagaaaagactgtttctgaggctctgctcatggaacctactgatgatggtaataccacgcccagaaatcatggagttgatgatgatggcgatgatgatggcgatgatggcggcactgatggccccaggcacagtgcaagtgatgactacttcatcccaagccaggcctttctggaggccgagagagctcaatccattgcctatcacctcaaaattgaggagcaaagagaaaaagtacatgaaaatgaaaatataggtaccactgagcctggagagcaccaagaggccaagaaagcagagaactcatcaaatgaggaggaaacgtcaagtgaaggcaacatgagggtgcatgctgtggattcttgcatgagcttccagtgtaaaagaggccacatctgtaaggcagaccaacagggaaaacctcactgtgtctgccaggatccagtgacttgtcctccaacaaaaccccttgatcaagtttgtggcactgacaatcagacctatgctagttcctgtcatctattcgctactaaatgcagactggaggggaccaaaaaggggcatcaactccagctggattattttggagcctgcaaatctattcctacttgtacggactttgaagtgattcagtttcctctacggatgagagactggctcaagaatatcctcatgcagctttatgaagccaactctgaacacgctggttatctaaatgagaagcagagaaataaagtcaagaaaatttacctggatgaaaagaggcttttggctggggaccatcccattgaccttctcttaagggactttaagaaaaactaccacatgtatgtgtatcctgtgcactggcagtttagtgaacttgaccaacaccctatggatagagtcttgacacattctgaacttgctcctctgcgagcatctctggtgcccatggaacactgcataacccgtttctttgaggagtgtgaccccaacaaggataagcacatcaccctgaaggagtggggccactgctttggaattaaagaagaggacatagatgaaaatctcttgttttgaacgaagattttaaagaactcaactttccagcatcctcctctgttctaaccacttcagaaatatatgcagctgtgatacttgtagatttatatttagcaaaatgttagcatgtatgacaagacaatgagagtaattgcttgacaacaacctatgcaccaggtatttaacattaactttggaaacaaaaatgtacaattaagtaaagtcaacatatgcaaaatactgtacattgtgaacagaagtttaattcatagtaatttcactctctgcattgacttatgagataattaatgattaaactattaatgataaaaataatgcatttgtattgttcataatatcatgtgcacttcaagaaaatggaatgctactcttttgtggtttacgtgtattattttcaatatcttaataccctaataaagagtccataaaaatcc

SEQ ID NO: 298019 - DNA, 2290 bp, Homo sapiens
ggctcggcccagtctgttctacatcacagcagtatccacagaagatgatccaccataaggctgaaaaatcatcagtactaaagtcaaaagaggaaagccatgaacagtcagcagaacagggcaagagttctagccaagagctgggattgaaggatcaagaggacagtgatggtcacttaagtgtgaatttggagtatgcaccaactgaaggtacattggacataaaagaagatatgagtgagcctcaggagaaaaaactctcagagaacactgattttttggctcctggtgttagttccttcacagattctaaccaacaagaaagtatcacaaagagagaggaaaaccaagaacaacctagaaattattcacatcatcagttgaacaggagcagtaaacatagccaaggcctaagggatcaaggaaaccaagagcaggatccaaatatttccaatggagaagaggaagaagaaaaagagccaggtgaagttggtacccacaatgataaccaagaaagaaagacagaattgcccagggagcatgctaacagcaagcaggaggaagacaatacccaatctgatgatattttggaagagtctgatcaaccaactcaagtaagcaagatgcaggaggatgaatttgatcagggtaaccaagaacaagaagataactccaatgcagaaatggaagaggaaaatgcatcgaacgtcaataagcacattcaagaaactgaatggcagagtcaagagggtaaaactggcctagaagctatcagcaaccacaaagagacagaagaaaagactgtttctgaggctctgctcatggaacctactgatgatggtaataccacgcccagaaatcatggagttgatgatgatggcgatgatgatggcgatgatggcggcactgatggccccaggcacagtgcaagtgatgactacttcatcccaagccaggcctttctggaggccgagagagctcaatccattgcctatcacctcaaaattgaggagcaaagagaaaaagtacatgaaaatgaaaatataggtaccactgagcctggagagcaccaagaggccaagaaagcagagaactcatcaaatgaggaggaaacgtcaagtgaaggcaacatgagggtgcatgctgtggattcttgcatgagcttccagtgtaaaagaggccacatctgtaaggcagaccaacagggaaaacctcactgtgtctgccaggatccagtgacttgtcctccaacaaaaccccttgatcaagtttgtggcactgacaatcagacctatgctagttcctgtcatctattcgctactaaatgcagactggaggggaccaaaaaggggcatcaactccagctggattattttggagcctgcaaatctattcctacttgtacggactttgaagtgattcagtttcctctacggatgagagactggctcaagaatatcctcatgcagctttatgaagccaactctgaacacgctggttatctaaatgagaagcagagaaataaagtcaagaaaatttacctggatgaaaagaggcttttggctggggaccatcccattgaccttctcttaagggactttaagaaaaactaccacatgtatgtgtatcctgtgcactggcagtttagtgaacttgaccaacaccctatggatagagtcttgacacattctgaacttgctcctctgcgagcatctctggtgcccatggaacactgcataacccgtttctttgaggagtgtgaccccaacaaggataagcacatcaccctgaaggagtggggccactgctttggaattaaagaagaggacatagatgaaaatctcttgttttgaacgaagattttaaagaactcaactttccagcatcctcctctgttctaaccacttcagaaatatatgcagctgtgatacttgtagatttatatttagcaaaatgttagcatgtatgacaagacaatgagagtaattgcttgacaacaacctatgcaccaggtatttaacattaactttggaaacaaaaatgtacaattaagtaaagtcaacatatgcaaaatactgtacattgtgaacagaagtttaattcatagtaatttcactctctgcattgacttatgagataattaatgattaaactattaatgataaaaataatgcatttgtattgttcataatatcatgtgcacttcaagaaaatggaatgctactcttttgtggtttacgtgtattattttcaatatcttaataccctaataaagagtccataaaaatcc

SEQ ID NO: 298020 - DNA, 2309 bp, Homo sapiens
ctcaaaattgaggagcaaagagaaaaagtacatgaaaatgaaaatataggtaccacagaagacgattcccaccataaggctgaaaaatcatcagtactaaagtcaaaagaggaaagccatgaacagtcagcagaacagggcaagagttctagccaagagctgggattgaaggatcaagaggacagtgatggtcacttaagtgtgaatttggagtatgcaccaactgaaggtacattggacataaaagaagatatgagtgagcctcaggagaaaaaactctcagagaacactgattttttggctcctggtgttagttccttcacagattctaaccaacaagaaagtatcacaaagagagaggaaaaccaagaacaacctagaaattattcacatcatcagttgaacaggagcagtaaacatagccaaggcctaagggatcaaggaaaccaagagcaggatccaaatatttccaatggagaagaggaagaagaaaaagagccaggtgaagttggtacccacaatgataaccaagaaagaaagacagaattgcccagggagcatgctaacagcaagcaggaggaagacaatacccaatctgatgatattttggaagagtctgatcaaccaactcaagtaagcaagatgcaggaggatgaatttgatcagggtaaccaagaacaagaagataactccaatgcagaaatggaagaggaaaatgcatcgaacgtcaataagcacattcaagaaactgaatggcagagtcaagagggtaaaactggcctagaagctatcagcaaccacaaagagacagaagaaaagactgtttctgaggctctgctcatggaacctactgatgatggtaataccacgcccagaaatcatggagttgatgatgatggcgatgatgatggcgatgatggcggcactgatggccccaggcacagtgcaagtgatgactacttcatcccaagccaggcctttctggaggccgagagagctcaatccattgcctatcacctcaaaattgaggagcaaagagaaaaagtacatgaaaatgaaaatataggtaccactgagcctggagagcaccaagaggccaagaaagcagagaactcatcaaatgaggaggaaacgtcaagtgaaggcaacatgagggtgcatgctgtggattcttgcatgagcttccagtgtaaaagaggccacatctgtaaggcagaccaacagggaaaacctcactgtgtctgccaggatccagtgacttgtcctccaacaaaaccccttgatcaagtttgtggcactgacaatcagacctatgctagttcctgtcatctattcgctactaaatgcagactggaggggaccaaaaaggggcatcaactccagctggattattttggagcctgcaaatctattcctacttgtacggactttgaagtgattcagtttcctctacggatgagagactggctcaagaatatcctcatgcagctttatgaagccaactctgaacacgctggttatctaaatgagaagcagagaaataaagtcaagaaaatttacctggatgaaaagaggcttttggctggggaccatcccattgaccttctcttaagggactttaagaaaaactaccacatgtatgtgtatcctgtgcactggcagtttagtgaacttgaccaacaccctatggatagagtcttgacacattctgaacttgctcctctgcgagcatctctggtgcccatggaacactgcataacccgtttctttgaggagtgtgaccccaacaaggataagcacatcaccctgaaggagtggggccactgctttggaattaaagaagaggacatagatgaaaatctcttgttttgaacgaagattttaaagaactcaactttccagcatcctcctctgttctaaccacttcagaaatatatgcagctgtgatacttgtagatttatatttagcaaaatgttagcatgtatgacaagacaatgagagtaattgcttgacaacaacctatgcaccaggtatttaacattaactttggaaacaaaaatgtacaattaagtaaagtcaacatatgcaaaatactgtacattgtgaacagaagtttaattcatagtaatttcactctctgcattgacttatgagataattaatgattaaactattaatgataaaaataatgcatttgtattgttcataatatcatgtgcacttcaagaaaatggaatgctactcttttgtggtttacgtgtattattttcaatatcttaataccctaataaagagtccataaaaatcc

SEQ ID NO: 298021 - DNA, 2005 bp, Homo sapiens
ggccaagttatgaggctctgagaacaagagcttgaggggaagactgttaaccccatccacgccaccagaattagctctttcccttttggtttgcaagcactgcctgtaaagccctcgcatgagaggccagcctgctagggaaatccaggaatctgcaacaaaaacgatgacagtctgaaatactctctggtgccaacctccaaattctcgtctgtcacttcagacccccactagttgacagagcagcagaatttcaactccagtagacttgaatatgcctctgggcaaagaagcagagctaacgaggaaagggatttaaagagtttttcttgggtgtttgtcaaacttttattccctgtctgtgtgcagaggggattcaacttcaatttttctgcagtggctctgggtccagccccttacttaaagatctggaaagcatgaagactgggctttttttcctatgtctcttgggaactgcagctgcaatcccgacaaatgcaagattattatctgatcattccaaaccaactgctgaaacggtagcacccgacaacactgcaatccccagtttaagggctgaagctgaagaaaatgaaaaagaaacagcagtatccacagaagacgattcccaccataaggctgaaaaatcatcagtactaaagtcaaaagaggaaagccatgaacagtcagcagaacagggcaagagttctagccaagagctgggattgaaggatcaagaggacagtgatggtcacttaagtgtgaatttggagtatgcaccaactgaaggtacattggacataaaagaagatatgagtgagcctcaggagaaaaaactctcagagaacactgattttttggctcctggtgttagttccttcacagattctaaccaacaagaaagtatcacaaagagagaggaaaaccaagaacaacctagaaattattcacatcatcagttgaacaggagcagtaaacatagcgtttgtggcactgacaatcagacctatgctagttcctgtcatctattcgctactaaatgcagactggaggggaccaaaaaggggcatcaactccagctggattattttggagcctgcaaatctattcctacttgtacggactttgaagtgattcagtttcctctacggatgagagactggctcaagaatatcctcatgcagctttatgaagccaactctgaacacgctggttatctaaatgagaagcagagaaataaagtcaagaaaatttacctggatgaaaagaggcttttggctggggaccatcccattgaccttctcttaagggactttaagaaaaactaccacatgtatgtgtatcctgtgcactggcagtttagtgaacttgaccaacaccctatggatagagtcttgacacattctgaacttgctcctctgcgagcatctctggtgcccatggaacactgcataacccgtttctttgaggagtgtgaccccaacaaggataagcacatcaccctgaaggagtggggccactgctttggaattaaagaagaggacatagatgaaaatctcttgttttgaacgaagattttaaagaactcaactttccagcatcctcctctgttctaaccacttcagaaatatatgcagctgtgatacttgtagatttatatttagcaaaatgttagcatgtatgacaagacaatgagagtaattgcttgacaacaacctatgcaccaggtatttaacattaactttggaaacaaaaatgtacaattaagtaaagtcaacatatgcaaaatactgtacattgtgaacagaagtttaattcatagtaatttcactctctgcattgacttatgagataattaatgattaaactattaatgataaaaataatgcatttgtattgttcataatatcatgtgcacttcaagaaaatggaatgctactcttttgtggtttacgtgtattattttcaatatcttaataccctaataaagagtccataaaaatcc

SEQ ID NO: 298022 - DNA, 1010 bp, Homo sapiens
ggccaagttatgaggctctgagaacaagagcttgaggggaagactgttaaccccatccacgccaccagaattagctctttcccttttggtttgcaagcactgcctgtaaagccctcgcatgagaggccagcctgctagggaaatccaggaatctgcaacaaaaacgatgacagtctgaaatactctctggtgccaacctccaaattctcgtctgtcacttcagacccccactagttgacagagcagcagaatttcaactccagtagacttgaatatgcctctgggcaaagaagcagagctaacgaggaaagggatttaaagagtttttcttgggtgtttgtcaaacttttattccctgtctgtgtgcagaggggattcaacttcaatttttctgcagtggctctgggtccagccccttacttaaagatctggaaagcatgaagactgggctttttttcctatgtctcttgggaactgcagctgcaatcccgacaaatgcaagattattatctgatcattccaaaccaactgctgaaacggtagcacccgacaacactgcaatccccagtttaagggctgaagctgaagaaaatgaaaaagaaacagcagtatccacagaagacgattcccaccataaggctgaaaaatcatcagtactaaagtcaaaagaggaaagccatgaacagtcagcagaacagggcaagagttctagccaagagctgggattgaaggatcaagaggacagtgatggtcacttaagtgtgaatttggagtatgcaccaactgaaggtacattggacataaaagaagatatgagtgagcctcaggagaaaaaactctcagagaacactgattttttggctcctggtgttagttccttcacagattctaaccaacaagaaagtatcacaaagagagaggaaaaccaagaacaacctagaaattattcacatcatcagttgaacaggagcagtaaacatagccgggatcctcagactcgaccgtcgagc

SEQ ID NO: 298023 - DNA, 1786 bp, Homo sapiens
agctcgcatgcgtgtagagggagactatagaagacccgcgagcagaacacgcgcaggaagacaatacccaatctgatgatattttggaagagtctgatcaaccaactcaagtaagcaagatgcaggaggatgaatttgatcagggtaaccaagaacaagaagataactccaatgcagaaatggaagaggaaaatgcatcgaacgtcaataagcacattcaagaaactgaatggcagagtcaagagggtaaaactggcctagaagctatcagcaaccacaaagagacagaagaaaagactgtttctgaggctctgctcatggaacctactgatgatggtaataccacgcccagaaatcatggagttgatgatgatggcgatgatgatggcgatgatggcggcactgatggccccaggcacagtgcaagtgatgactacttcatcccaagccaggcctttctggaggccgagagagctcaatccattgcctatcacctcaaaattgaggagcaaagagaaaaagtacatgaaaatgaaaatataggtaccactgagcctggagagcaccaagaggccaagaaagcagagaactcatcaaatgaggaggaaacgtcaagtgaaggcaacatgagggtgcatgctgtggattcttgcatgagcttccagtgtaaaagaggccacatctgtaaggcagaccaacagggaaaacctcactgtgtctgccaggatccagtgacttgtcctccaacaaaaccccttgatcaagtttgtggcactgacaatcagacctatgctagttcctgtcatctattcgctactaaatgcagactggaggggaccaaaaaggggcatcaactccagctggattattttggagcctgcaaatctattcctacttgtacggactttgaagtgattcagtttcctctacggatgagagactggctcaagaatatcctcatgcagctttatgaagccaactctgaacacgctggttatctaaatgagaagcagagaaataaagtcaagaaaatttacctggatgaaaagaggcttttggctggggaccatcccattgaccttctcttaagggactttaagaaaaactaccacatgtatgtgtatcctgtgcactggcagtttagtgaacttgaccaacaccctatggatagagtcttgacacattctgaacttgctcctctgcgagcatctctggtgcccatggaacactgcataacccgtttctttgaggagtgtgaccccaacaaggataagcacatcaccctgaaggagtggggccactgctttggaattaaagaagaggacatagatgaaaatctcttgttttgaacgaagattttaaagaactcaactttccagcatcctcctctgttctaaccacttcagaaatatatgcagctgtgatacttgtagatttatatttagcaaaatgttagcatgtatgacaagacaatgagagtaattgcttgacaacaacctatgcaccaggtatttaacattaactttggaaacaaaaatgtacaattaagtaaagtcaacatatgcaaaatactgtacattgtgaacagaagtttaattcatagtaatttcactctctgcattgacttatgagataattaatgattaaactattaatgataaaaataatgcatttgtattgttcataatatcatgtgcacttcaagaaaatggaatgctactcttttgtggtttacgtgtattattttcaatatcttaataccctaataaagagtccataaaaatcc

SEQ ID NO: 298024 - DNA, 1808 bp, Homo sapiens
ctgcggtgatgatggtgatggtgatggtgatgatgatgatggtgatggtgattatggtgatgatggtgatgacaaaaggaagacaatacccaatctgatgatattttggaagagtctgatcaaccaactcaagtaagcaagatgcaggaggatgaatttgatcagggtaaccaagaacaagaagataactccaatgcagaaatggaagaggaaaatgcatcgaacgtcaataagcacattcaagaaactgaatggcagagtcaagagggtaaaactggcctagaagctatcagcaaccacaaagagacagaagaaaagactgtttctgaggctctgctcatggaacctactgatgatggtaataccacgcccagaaatcatggagttgatgatgatggcgatgatgatggcgatgatggcggcactgatggccccaggcacagtgcaagtgatgactacttcatcccaagccaggcctttctggaggccgagagagctcaatccattgcctatcacctcaaaattgaggagcaaagagaaaaagtacatgaaaatgaaaatataggtaccactgagcctggagagcaccaagaggccaagaaagcagagaactcatcaaatgaggaggaaacgtcaagtgaaggcaacatgagggtgcatgctgtggattcttgcatgagcttccagtgtaaaagaggccacatctgtaaggcagaccaacagggaaaacctcactgtgtctgccaggatccagtgacttgtcctccaacaaaaccccttgatcaagtttgtggcactgacaatcagacctatgctagttcctgtcatctattcgctactaaatgcagactggaggggaccaaaaaggggcatcaactccagctggattattttggagcctgcaaatctattcctacttgtacggactttgaagtgattcagtttcctctacggatgagagactggctcaagaatatcctcatgcagctttatgaagccaactctgaacacgctggttatctaaatgagaagcagagaaataaagtcaagaaaatttacctggatgaaaagaggcttttggctggggaccatcccattgaccttctcttaagggactttaagaaaaactaccacatgtatgtgtatcctgtgcactggcagtttagtgaacttgaccaacaccctatggatagagtcttgacacattctgaacttgctcctctgcgagcatctctggtgcccatggaacactgcataacccgtttctttgaggagtgtgaccccaacaaggataagcacatcaccctgaaggagtggggccactgctttggaattaaagaagaggacatagatgaaaatctcttgttttgaacgaagattttaaagaactcaactttccagcatcctcctctgttctaaccacttcagaaatatatgcagctgtgatacttgtagatttatatttagcaaaatgttagcatgtatgacaagacaatgagagtaattgcttgacaacaacctatgcaccaggtatttaacattaactttggaaacaaaaatgtacaattaagtaaagtcaacatatgcaaaatactgtacattgtgaacagaagtttaattcatagtaatttcactctctgcattgacttatgagataattaatgattaaactattaatgataaaaataatgcatttgtattgttcataatatcatgtgcacttcaagaaaatggaatgctactcttttgtggtttacgtgtattattttcaatatcttaataccctaataaagagtccataaaaatcc

SEQ ID NO: 298025 - DNA, 1926 bp, Homo sapiens
tgggtcgacttgaggatccccgtgaaagcacaccgctgaaaaatcatcagtactaaagtcaaaagaggaaagccatgaacagtcagcagaacagggcaagagttctagccaagagctgggattgaaggatcaagaggacagtgatggtcacttaagtgtgaatttggagtatgcaccaactgaaggtacattggacataaaagaagatatgagtgagcctcaggagaaaaaactctcagagaacactgattttttggctcctggtgttagttccttcacagattctaaccaagaacaagaagataactccaatgcagaaatggaagaggaaaatgcatcgaacgtcaataagcacattcaagaaactgaatggcagagtcaagagggtaaaactggcctagaagctatcagcaaccacaaagagacagaagaaaagactgtttctgaggctctgctcatggaacctactgatgatggtaataccacgcccagaaatcatggagttgatgatgatggcgatgatgatggcgatgatggcggcactgatggccccaggcacagtgcaagtgatgactacttcatcccaagccaggcctttctggaggccgagagagctcaatccattgcctatcacctcaaaattgaggagcaaagagaaaaagtacatgaaaatgaaaatataggtaccactgagcctggagagcaccaagaggccaagaaagcagagaactcatcaaatgaggaggaaacgtcaagtgaaggcaacatgagggtgcatgctgtggattcttgcatgagcttccagtgtaaaagaggccacatctgtaaggcagaccaacagggaaaacctcactgtgtctgccaggatccagtgacttgtcctccaacaaaaccccttgatcaagtttgtggcactgacaatcagacctatgctagttcctgtcatctattcgctactaaatgcagactggaggggaccaaaaaggggcatcaactccagctggattattttggagcctgcaaatctattcctacttgtacggactttgaagtgattcagtttcctctacggatgagagactggctcaagaatatcctcatgcagctttatgaagccaactctgaacacgctggttatctaaatgagaagcagagaaataaagtcaagaaaatttacctggatgaaaagaggcttttggctggggaccatcccattgaccttctcttaagggactttaagaaaaactaccacatgtatgtgtatcctgtgcactggcagtttagtgaacttgaccaacaccctatggatagagtcttgacacattctgaacttgctcctctgcgagcatctctggtgcccatggaacactgcataacccgtttctttgaggagtgtgaccccaacaaggataagcacatcaccctgaaggagtggggccactgctttggaattaaagaagaggacatagatgaaaatctcttgttttgaacgaagattttaaagaactcaactttccagcatcctcctctgttctaaccacttcagaaatatatgcagctgtgatacttgtagatttatatttagcaaaatgttagcatgtatgacaagacaatgagagtaattgcttgacaacaacctatgcaccaggtatttaacattaactttggaaacaaaaatgtacaattaagtaaagtcaacatatgcaaaatactgtacattgtgaacagaagtttaattcatagtaatttcactctctgcattgacttatgagataattaatgattaaactattaatgataaaaataatgcatttgtattgttcataatatcatgtgcacttcaagaaaatggaatgctactcttttgtggtttacgtgtattattttcaatatcttaataccctaataaagagtccataaaaatcc

SEQ ID NO: 298026 - DNA, 1551 bp, Homo sapiens
ctctagaggatctgactgcatctgtgcctctatcagcaaccacaaagagacagaagaaaagactgtttctgaggctctgctcatggaacctactgatgatggtaataccacgcccagaaatcatggagttgatgatgatggcgatgatgatggcgatgatggcggcactgatggccccaggcacagtgcaagtgatgactacttcatcccaagccaggcctttctggaggccgagagagctcaatccattgcctatcacctcaaaattgaggagcaaagagaaaaagtacatgaaaatgaaaatataggtaccactgagcctggagagcaccaagaggccaagaaagcagagaactcatcaaatgaggaggaaacgtcaagtgaaggcaacatgagggtgcatgctgtggattcttgcatgagcttccagtgtaaaagaggccacatctgtaaggcagaccaacagggaaaacctcactgtgtctgccaggatccagtgacttgtcctccaacaaaaccccttgatcaagtttgtggcactgacaatcagacctatgctagttcctgtcatctattcgctactaaatgcagactggaggggaccaaaaaggggcatcaactccagctggattattttggagcctgcaaatctattcctacttgtacggactttgaagtgattcagtttcctctacggatgagagactggctcaagaatatcctcatgcagctttatgaagccaactctgaacacgctggttatctaaatgagaagcagagaaataaagtcaagaaaatttacctggatgaaaagaggcttttggctggggaccatcccattgaccttctcttaagggactttaagaaaaactaccacatgtatgtgtatcctgtgcactggcagtttagtgaacttgaccaacaccctatggatagagtcttgacacattctgaacttgctcctctgcgagcatctctggtgcccatggaacactgcataacccgtttctttgaggagtgtgaccccaacaaggataagcacatcaccctgaaggagtggggccactgctttggaattaaagaagaggacatagatgaaaatctcttgttttgaacgaagattttaaagaactcaactttccagcatcctcctctgttctaaccacttcagaaatatatgcagctgtgatacttgtagatttatatttagcaaaatgttagcatgtatgacaagacaatgagagtaattgcttgacaacaacctatgcaccaggtatttaacattaactttggaaacaaaaatgtacaattaagtaaagtcaacatatgcaaaatactgtacattgtgaacagaagtttaattcatagtaatttcactctctgcattgacttatgagataattaatgattaaactattaatgataaaaataatgcatttgtattgttcataatatcatgtgcacttcaagaaaatggaatgctactcttttgtggtttacgtgtattattttcaatatcttaataccctaataaagagtccataaaaatcc

SEQ ID NO: 298027 - DNA, 562 bp, Homo sapiens
  misc_feature (466)..(466): n is a, c, g, or t
  misc_feature (489)..(489): n is a, c, g, or t
  misc_feature (498)..(498): n is a, c, g, or t
  misc_feature (546)..(546): n is a, c, g, or t
  misc_feature (559)..(559): n is a, c, g, or t
ggccaagttatgaggctctgagaacaagagcttgaggggaagactgttaaccccatccacgccaccagaattagctctttcccttttggtttgcaagcactgcctgtaaagccctcgcatgagaggccagcctgctagggaaatccaggaatctgcaacaaaaacgatgacagtctgaaatactctctggtgccaacctccaaattctcgtctgtcacttcagacccccactagttgacagagcagcagaatttcaactccagtagacttgaatatgcctctgggcaaagaagcagagctaacgaggaaagggatttaaagagtttttcttgggtgtttgtcaaacttttattccctgtctgtgtgcagaggggattcaacttcaatttttctgcagtggctctgggtccagccccttacttaaagatctggaaagcatgctccctggggcaattctgtctttctntcttgggttatcattgtgggtancaacttcanctgggctctttttcttcttcctcttctccattggaaatatttgtcgangcggccggaaatntta

SEQ ID NO: 298028 - DNA, 451 bp, Homo sapiens
ggtaaccaagaacaagaagataactccaatgcagaaatggaagaggaaaatgcatcgaacgtcaataagcacattcaagaaactgaatggcagagtcaagagggtaaaactggcctagaagctatcagcaaccacaaagagacagaagaaaagactgtttctgaggctctgctcatggaacctactgatgatggtaataccacgcccagaaatcatggagttgatgatgatggcgatgatgatggcgatgatggcggcactgatggccccaggcacagtgcaagtgatgactacttcatcccaagccaggcctttctggaggccgagagagctcaatccattgcctatcacctcaaaattgaggagcaaagagaaaaagtacatgaaaatgaaaatataggtaccactgagcctggagagcaccaagaggtaaaattattttaaatggtcc

SEQ ID NO: 298029 - DNA, 2869 bp, Homo sapiens
ggccaagttatgaggctctgagaacaagagcttgaggggaagactgttaaccccatccacgccaccagaattagctctttcccttttggtttgcaagcactgcctgtaaagccctcgcatgagaggccagcctgctagggaaatccaggaatctgcaacaaaaacgatgacagtctgaaatactctctggtgccaacctccaaattctcgtctgtcacttcagacccccactagttgacagagcagcagaatttcaactccagtagacttgaatatgcctctgggcaaagaagcagagctaacgaggaaagggatttaaagagtttttcttgggtgtttgtcaaacttttattccctgtctgtgtgcagaggggattcaacttcaatttttctgcagtggctctgggtccagccccttacttaaagatctggaaagcatgaagactgggctttttttcctatgtctcttgggaactgcagctgcaatcccgacaaatgcaagattattatctgatcattccaaaccaactgctgaaacggtagcacccgacaacactgcaatccccagtttaagggctgaagctgaagaaaatgaaaaagaaacagcagtatccacagaagacgattcccaccataaggctgaaaaatcatcagtactaaagtcaaaagaggaaagccatgaacagtcagcagaacagggcaagagttctagccaagagctgggattgaaggatcaagaggacagtgatggtcacttaagtgtgaatttggagtatgcaccaactgaaggtacattggacataaaagaagatatgagtgagcctcaggagaaaaaactctcagagaacactgattttttggctcctggtgttagttccttcacagattctaaccaacaagaaagtatcacaaagagagaggaaaaccaagaacaacctagaaattattcacatcatcagttgaacaggagcagtaaacatagccaaggcctaagggatcaaggaaaccaagagcaggatccaaatatttccaatggagaagaggaagaagaaaaagagccaggtgaagttggtacccacaatgataaccaagaaagaaagacagaattgcccagggagcatgctaacagcaagcaggaggaagacaatacccaatctgatgatattttggaagagtctgatcaaccaactcaagtaagcaagatgcaggaggatgaatttgatcagggtaaccaagaacaagaagataactccaatgcagaaatggaagaggaaaatgcatcgaacgtcaataagcacattcaagaaactgaatggcagagtcaagagggtaaaactggcctagaagctatcagcaaccacaaagagacagaagaaaagactgtttctgaggctctgctcatggaacctactgatgatggtaataccacgcccagaaatcatggagttgatgatgatggcgatgatgatggcgatgatggcggcactgatggccccaggcacagtgcaagtgatgactacttcatcccaagccaggcctttctggaggccgagagagctcaatccattgcctatcacctcaaaattgaggagcaaagagaaaaagtacatgaaaatgaaaatataggtaccactgagcctggagagcaccaagaggccaagaaagcagagaactcatcaaatgaggaggaaacgtcaagtgaaggcaacatgagggtgcatgctgtggattcttgcatgagcttccagtgtaaaagaggccacatctgtaaggcagaccaacagggaaaacctcactgtgtctgccaggatccagtgacttgtcctccaacaaaaccccttgatcaagtttgtggcactgacaatcagacctatgctagttcctgtcatctattcgctactaaatgcagactggaggggaccaaaaaggggcatcaactccagctggattattttggagcctgcaaatctattcctacttgtacggactttgaagtgattcagtttcctctacggatgagagactggctcaagaatatcctcatgcagctttatgaagccaactctgaacacgctggttatctaaatgagaagcagagaaataaagtcaagaaaatttacctggatgaaaagaggcttttggctggggaccatcccattgaccttctcttaagggactttaagaaaaactaccacatgtatgtgtatcctgtgcactggcagtttagtgaacttgaccaacaccctatggatagagtcttgacacattctgaacttgctcctctgcgagcatctctggtgcccatggaacactgcataacccgtttctttgaggagtgtgaccccaacaaggataagcacatcaccctgaaggagtggggccactgctttggaattaaagaagaggacatagatgaaaatctcttgttttgaacgaagattttaaagaactcaactttccagcatcctcctctgttctaaccacttcagaaatatatgcagctgtgatacttgtagatttatatttagcaaaatgttagcatgtatgacaagacaatgagagtaattgcttgacaacaacctatgcaccaggtatttaacattaactttggaaacaaaaatgtacaattaagtaaagtcaacatatgcaaaatactgtacattgtgaacagaagtttaattcatagtaatttcactctctgcattgacttatgagataattaatgattaaactattaatgataaaaataatgcatttgtattgttcataatatcatgtgcacttcaagaaaatggaatgctactcttttgtggtttacgtgtattattttcaatatcttaataccctaataaagagtccataaaaatcc

SEQ ID NO: 298030 - DNA, 3897 bp, Homo sapiens
ggaaacctaacgtcaaagtctacgtaggaagtcgtagggaaggcagcgaggaagacgctggctctcgggtcacgtgatgcgccgggagcgtcatcgcctcctccctccccaagatggcgtccttgctgcagtcggaccgggttctctatctagtccagggagaaaagaaggttcgggccccgctctcgcaactctacttctgccgctattgtagcgaactgcggtcgctggaatgtgtgtctcacgaggtggactcccattattgtcccagttgtttagaaaatatgccatcggctgaagccaaactaaaaaagaatagatgtgccaattgttttgactgtcctggctgcatgcacaccctctctactcgggccacgagcatctccacacagcttccagatgacccagccaagaccaccatgaagaaagcctattacctggcatgtggattttgtcgctggacgtctagagatgtgggcatggcagacaaatctgtagctagtggcggttggcaggaacctgaaaatcctcacacacaacggatgaacaaattgattgaatattaccagcagcttgctcagaaagagaaggttgagcgagatcgcaagaaactggcacgacgtagaaactatatgcctctggctttttcggacaaatatggtcttggaaccaggcttcagcgaccacgagctggtgcatccatcagtacccttgccggactttcccttaaagaaggagaggatcagaaagagataaagattgagccagctcaggctgtggatgaagtggaacctctacctgaagactattatacaagaccagtaaatttaacagaggtaacaacccttcagcagcgtctgttacagcctgacttccagccagtctgtgcttcacagctctatcctcgccacaaacatcttctgatcaaacggtccctgcgctgccgtaaatgtgaacataatttgagcaagccagaatttaacccaacgtcaatcaaattcaaaatccagctggtcgctgtcaattatattccagaagtgagaatcatgtcaattcccaaccttcgctacatgaaggagagccaggtcctcctgactcttacaaatccagttgagaacctcacccatgtgactctcttcgagtgtgaggagggggaccctgatgatatcaacagcactgctaaggtggtggtgcctcccaaagagctcgttttagctggcaaggatgcagcagcagagtacgatgagttggcagaacctcaagactttcaggacgatcctgacattatagccttcagaaaggccaacaaagtgggtattttcatcaaagttacaccacagcgtgaggagggtgaagtgaccgtgtgcttcaagatgaagcatgattttaaaaacctggcagcccccattcgccccattgaagaaagtgaccagggaacagaagtcatctggctcacccagcatgtggaacttagcttgggcccacttcttccttaaaaggttccactggagggcagatcccaaaggacagtatcaccgtaaacctgcgttaaaatgtggaagctgctgcttcattaggccttgtttataacgatgtacccatgcactacggaattctattgctaagaaagtgggagcataggcaaggcattgggaacacagggtagctgctgttgctcttgctctcacccctgttgacaccagtaagtctgtgtctccctcactgaaccctgcacgttgagtaacagcagcataattccatcctaggaaaggggatgggtgttccttggaatggcattgtatttaccacctgagaaactctgtactgtctcttgatctgatctcactaaggatcacaatgtcacagatgaaacttaaatgataacccaaaggtagacctgctgttaatgatccagcattggtcacaatgtaccaactgctttctgcattccgttaaatatcatctaacagtctaaaacatatcccttcattgccataatggctgccattttgccatagatttccatataactgaaaaactgaattgtcactttatctttagtatcatgatgattggaaaaacctgtgaagttgttaaggcactctcatttgccctctttttctaagtgaatacaggacacgtattagttgttcttaatttttttcccagtaaaatatggatcttttaagaagaatttgagaagcaaacaattacatgtcatgtcaagggggtagcagattccattcgttttcaatattgccacaatacccagggattaatgctgccacaggggggcaatctttatttgtcttacttcctaccccttccctgttctgcctctttaactcagttaagttgttctgtttgggacctggaaaagaacccaaagaaaacctgagtggacaggttcatttctggaatgcagaaaacattttaaaggctagatttttagaatattctcaactagcattctttccattgatttgaaggggaaattaactattataatctcttgaatccaaaactggatattaagaactttcccccttactaagtttaagacttttgtcatgtggtgagtcaaataagaccattttgattgtaaaccataaaatagttcagcaagtagcccacagttctggcctaacagcagacttgctgttttcacttggtatcctggagttgggttgctaaccttaatttctatgatgttttctaaaatgaaacttgataaagtagaccaccagctgcaccgtgttttctgtaaaagtattgttagtaagtggccaagagacttgaggaaaatacagattttttgtttaccttggtcttgttttaagtcttaaaaaattaaagataacattataatgtagaatacagatgggacatagtccttgtaagcttcccttgaaaatgttttaaatatttaggaagcttttaaaagacactaaattgtactctaaaagacactaaattgtactaattgtacaaaggtcaagccaattttatgaaacagtcctacagagtaatatatgtgatgcagtgtaagaaggaaaatactcatctctaacattatggtaataacatttagcctcttaggagttggagcagggggatgggtaattacagatttgcagactatagaaagagtttcatttttttgtgaccccacagagtctcaaatttttatttcactacctgctagagcctactgtgaaatcactgctccatatttgccagtggaggaaatgggcatagagtagagaatagcttcatatgtttacacgtttgcatagactacacacatgtcatgcgtttatggcaggtagctggtatttattccccaaagtaataatgttgaagtatgggtctcatcattcccatacacagaaacacaaaacactttgatcataaacttttttcttcagaagccaaactaacttgcagaataatagagccactggtttaatgtttcctcaagataggttttagtgtaagctagtattctgtgtgttcgtagaaatgattcaatacctgcagctggtgaattaggaattgtatttgttgccttttttatattagatgaggtgcaaaaattttaatgctagtcagtatgcaccaccacaggaaagttagatcccattagcacttgaaactacagctttggaaacttaggctaagttaatttggatttgttacttgattcacctactgaccttttcttttgtttgaagtgcttatcagcataatgagctaagtgtcatgcatatttgtgaagaaacaccctttttggtcccttttgggacagagaggtactccttgatctttatgaatgacaggttactgttttgccttattgcttaacttaatgtagtgaaataaagcagacaaagcttg

SEQ ID NO: 298031 - DNA, 2218 bp, Homo sapiens
ccacgcgtccggtgcagggttcagtgagggagacacagacttactggtgtcaacaggggtgagagcagcagcataattccatcctaggaaaggggatgggtgttccttggaatggcattgtatttaccacctgagaaactctgtactgtctcttgatctgatctcactaaggatcacaatgtcacagatgaaacttaaatgataacccaaaggtagacctgctgttaatgatccagcattggtcacaatgtaccaactgctttctgcattccgttaaatatcatctaacagtctaaaacatatcccttcattgccataatggctgccattttgccatagatttccatataactgaaaaactgaattgtcactttatctttagtatcatgatgattggaaaaacctgtgaagttgttaaggcactctcatttgccctctttttctaagtgaatacaggacacgtattagttgttcttaatttttttcccagtaaaatatggatcttttaagaagaatttgagaagcaaacaattacatgtcatgtcaagggggtagcagattccattcgttttcaatattgccacaatacccagggattaatgctgccacaggggggcaatctttatttgtcttacttcctaccccttccctgttctgcctctttaactcagttaagttgttctgtttgggacctggaaaagaacccaaagaaaacctgagtggacaggttcatttctggaatgcagaaaacattttaaaggctagatttttagaatattctcaactagcattctttccattgatttgaaggggaaattaactattataatctcttgaatccaaaactggatattaagaactttcccccttactaagtttaagacttttgtcatgtggtgagtcaaataagaccattttgattgtaaaccataaaatagttcagcaagtagcccacagttctggcctaacagcagacttgctgttttcacttggtatcctggagttgggttgctaaccttaatttctatgatgttttctaaaatgaaacttgataaagtagaccaccagctgcaccgtgttttctgtaaaagtattgttagtaagtggccaagagacttgaggaaaatacagattttttgtttaccttggtcttgttttaagtcttaaaaaattaaagataacattataatgtagaatacagatgggacatagtccttgtaagcttcccttgaaaatgttttaaatatttaggaagcttttaaaagacactaaattgtactctaaaagacactaaattgtactaattgtacaaaggtcaagccaattttatgaaacagtcctacagagtaatatatgtgatgcagtgtaagaaggaaaatactcatctctaacattatggtaataacatttagcctcttaggagttggagcagggggatgggtaattacagatttgcagactatagaaagagtttcatttttttgtgaccccacagagtctcaaatttttatttcactacctgctagagcctactgtgaaatcactgctccatatttgccagtggaggaaatgggcatagagtagagaatagcttcatatgtttacacgtttgcatagactacacacatgtcatgcgtttatggcaggtagctggtatttattccccaaagtaataatgttgaagtatgggtctcatcattcccatacacagaaacacaaaacactttgatcataaacttttttcttcagaagccaaactaacttgcagaataatagagccactggtttaatgtttcctcaagataggttttagtgtaagctagtattctgtgtgttcgtagaaatgattcaatacctgcagctggtgaattaggaattgtatttgttgccttttttatattagatgaggtgcaaaaattttaatgctagtcagtatgcaccaccacaggaaagttagatcccattagcacttgaaactacagctttggaaacttaggctaagttaatttggatttgttacttgattcacctactgaccttttcttttgtttgaagtgcttatcagcataatgagctaagtgtcatgcatatttgtgaagaaacaccctttttggtcccttttgggacagagaggtactccttgatctttatgaatgacaggttactgttttgccttattgcttaacttaatgtagtgaaataaagcagacaaagcttg

SEQ ID NO: 298032 - DNA, 2821 bp, Homo sapiens
ggaaacctaacgtcaaagtctacgtaggaagtcgtagggaaggcagcgaggaagacgctggctctcgggtcacgtgatgcgccgggagcgtcatcgcctcctccctccccaagatggcgtccttgctgcagtcggaccgggttctctatctagtccagggagaaaagaaggttcgggccccgctctcgcaactctacttctgccgctattgtagcgaactgcggtcgctggaatgtgtgtctcacgaggtggactcccattattgtcccagttgtttagaaaatatgccatcggctgaagccaaactaaaaaagaatagatgtgccaattgttttgactgtcctggctgcatgcacaccctctctactcgggccacgagcatctccacacagcttccagatgacccagccaagaccaccatgaagaaagcctattacctggcatgtggattttgtcgctggacgtctagagatgtgggcatggcagacaaatctgtagctagtggcggttggcaggaacctgaaaatcctcacacacaacggatgaacaaattgattgaatattaccagcagcttgctcagaaagagaaggttgagcgagatcgcaagaaactggcacgacgtagaaactatatgcctctggctttttcggacaaatatggtcttggaaccaggcttcagcgaccacgagctggtgcatccatcagtacccttgccggactttcccttaaagaaggagaggatcagaaagagataaagattgagccagctcaggctgtggatgaagtggaacctctacctgaagactattatacaagaccagtaaatttaacagaggtaacaacccttcagcagcgtctgttacagcctgacttccagccagtctgtgcttcacagctctatcctcgccacaaacatcttctgatcaaacggtccctgcgctgccgtaaatgtgaacataatttgagcaagccagaatttaacccaacgtcaatcaaattcaaaatccagctggtcgctgtcaattatattccagaagtgagaatcatgtcaattcccaaccttcgctacatgaaggagagccaggtcctcctgactcttacaaatccagttgagaacctcacccatgtgactctcttcgagtgtgaggagggggaccctgatgatatcaacagcactgctaaggtggtggtgcctcccaaagagctcgttttagctggcaaggatgcagcagcagagtacgatgagttggcagaacctcaagactttcaggacgatcctgacattatagccttcagaaaggccaacaaagtgggtattttcatcaaagttacaccacagcgtgaggagggtgaagtgaccgtgtgcttcaagatgaagcatgattttaaaaacctggcagcccccattcgccccattgaagaaagtgaccagggaacagaagtcatctggctcacccagcatgtggaacttagcttgggcccacttcttccttaaaaggttccactggagggcagatcccaaaggacagtatcaccgtaaacctgcgttaaaatgtggaagctgctgcttcattaggccttgtttataacgatgtacccatgcactacggaattctattgctaagaaagtgggagcataggcaaggcattgggaacacagggtagctgctgttgctcttgctctcacccctgttgacaccagtaagtctgtgtctccctcactgaaccctgcacgttgagtaacagcagcataattccatcctaggaaaggggatgggtgttccttggaatggcattgtatttaccacctgagaaactctgtactgtctcttgatctgatctcactaaggatcacaatgtcacagatgaaacttaaatgataacccaaaggtagacctgctgttaatgatccagcattggtcacaatgtaccaactgctttctgcattccgttaaatatcatctaacagtctaaaacatatcccttcattgccataatggctgccattttgccatagatttccatataactgaaaaactgaattgtcactttatctttagtatcatgatgattggaaaaacctgtgaagttgttaaggcactctcatttgccctctttttctaagtgaatacaggacacgtattagttgttcttaatttttttcccagtaaaatatggatcttttaagaagaatttgagaagcaaacaattacatgtcatgtcaagggggtagcagattccattcgttttcaatattgccacaatacccagggattaatgctgccacaggggggcaatctttatttgtcttacttcctaccccttccctgttctgcctctttaactcagttaagttgttctgtttgggacctggaaaagaacccaaagaaaacctgagtggacaggttcatttctggaatgcagaaaacattttaaaggctagatttttagaatattctcaactagcattctttccattgatttgaaggggaaattaactattataatctcttgaatccaaaactggatattaagaactttcccccttactaagtttaagacttttgtcatgtggtgagtcaaataagaccattttgattgtaaaccataaaatagttcagcaagtagcccacagttctggcctaacagcagacttgctgttttcacttggtatcctggagttgggttgctaaccttaatttctatgatgttttctaaaatgaaacttgataaagtagaccaccagctgcaccgtgttttctgtaaaagtattgttagtaagtggccaagagacttgaggaaaatacagattttttgttt

SEQ ID NO: 298033 - DNA, 3280 bp, Homo sapiens
ggaaacctaacgtcaaagtctacgtaggaagtcgtagggaaggcagcgaggaagacgctggctctcgggtcacgtgatgcgccgggagcgtcatcgcctcctccctccccaagatggcgtccttgctgcagtcggaccgggttctctatctagtccagggagaaaagaaggttcgggccccgctctcgcaactctacttctgccgctattgtagcgaactgcggtcgctggaatgtgtgtctcacgaggtggactcccattattgtcccagttgtttagaaaatatgccatcggctgaagccaaactaaaaaagaatagatgtgccaattgttttgactgtcctggctgcatgcacaccctctctactcgggccacgagcatctccacacagcttccagatgacccagccaagaccaccatgaagaaagcctattacctggcatgtggattttgtcgctggacgtctagagatgtgggcatggcagacaaatctgtagctagtggcggttggcaggaacctgaaaatcctcacacacaacggatgaacaaattgattgaatattaccagcagcttgctcagaaagagaaggttgagcgagatcgcaagaaactggcacgacgtagaaactatatgcctctggctttttcggacaaatatggtcttggaaccaggcttcagcgaccacgagctggtgcatccatcagtacccttgccggactttcccttaaagaaggagaggatcagaaagagataaagattgagccagctcaggctgtggatgaagtggaacctctacctgaagactattatacaagaccagtaaatttaacagaggtaacaacccttcagcagcgtctgttacagcctgacttccagccagtctgtgcttcacagctctatcctcgccacaaacatcttctgatcaaacggtccctgcgctgccgtaaatgtgaacataatttgagcaagccagaatttaacccaacgtcaatcaaattcaaaatccagctggtcgctgtcaattatattccagaagtgagaatcatgtcaattcccaaccttcgctacatgaaggagagccaggtcctcctgactcttacaaatccagttgagaacctcacccatgtgactctcttcgagtgtgaggagggggaccctgatgatatcaacagcactgctaaggtggtggtgcctcccaaagagctcgttttagctggcaaggatgcagcagcagagtacgatgagttggcagaacctcaagactttcaggacgatcctgacattatagccttcagaaaggccaacaaagtgggtattttcatcaaagttacaccacagcgtgaggagggtgaagtgaccgtgtgcttcaagatgaagcatgattttaaaaacctggcagcccccattcgccccattgaagaaagtgaccagggaacagaagtcatctggctcacccagcatgtggaacttagcttgggcccacttcttccttaaaaggttccactggagggcagatcccaaaggacagtatcaccgtaaacctgcgttaaaatgtggaagctgctgcttcattaggccttgtttataacgatgtacccatgcactacggaattctattgctaagaaagtgggagcataggcaaggcattgggaacacagggtagctgctgttgctcttgctctcacccctgttgacaccagtaagtctgtgtctccctcactgaaccctgcacgttgagtaacagcagcataattccatcctaggaaaggggatgggtgttccttggaatggcattgtatttaccacctgagaaactctgtactgtctcttgatctgatctcactaaggatcacaatgtcacagatgaaacttaaatgataacccaaaggtagacctgctgttaatgatccagcattggtcacaatgtaccaactgctttctgcattccgttaaatatcatctaacagtctaaaacatatcccttcattgccataatggctgccattttgccatagatttccatataactgaaaaactgaattgtcactttatctttagtatcatgatgattggaaaaacctgtgaagttgttaaggcactctcatttgccctctttttctaagtgaatacaggacacgtattagttgttcttaatttttttcccagtaaaatatggatcttttaagaagaatttgagaagcaaacaattacatgtcatgtcaagggggtagcagattccattcgttttcaatattgccacaatacccagggattaatgctgccacaggggggcaatctttatttgtcttacttcctaccccttccctgttctgcctctttaactcagttaagttgttctgtttgggacctggaaaagaacccaaagaaaacctgagtggacaggttcatttctggaatgcagaaaacattttaaaggctagatttttagaatattctcaactagcattctttccattgatttgaaggggaaattaactattataatctcttgaatccaaaactggatattaagaactttcccccttactaagtttaagacttttgtcatgtggtgagtcaaataagaccattttgattgtaaaccataaaatagttcagcaagtagcccacagttctggcctaacagcagacttgctgttttcacttggtatcctggagttgggttgctaaccttaatttctatgatgttttctaaaatgaaacttgataaagtagaccaccagctgcaccgtgttttctgtaaaagtttttttgttttgttttggttttttttttttttttggcttgactcaggatttaaaaactggaacggtgaaggtgacagcagtcggttggagcgagcatcccccaaagttcacaatgtggccgaggactttgattgcacattgttgtttttttaatagtcattccaaatatgagatgcattgttacaggaagtcccttgccatcctaaaagccaccccacttctctctaaggagaatggcccagtcctctcccaagtccacacaggggaggtgatagcattgctttcgtgtaaattatgtaatgcaaaatttttttaatcttcgccttaatacttttttattttgttttattttgaatgatgagccttcgtgcccccccttcccccttttttgtcccccaacttgagatgtatgaaggcttttggtctccctgggagtgggtggaggcagccagggcttacctgtacactgacttgagaccagttgaataaaagtgcacaccttaaaaatg

SEQ ID NO: 298034 - DNA, 396 bp, Homo sapiens
cggacgcgtgggtcgacccacgcgtcgcccacgcgtccgctggtgaattaggaattgtatttgttgccttttttatattagatgaggtgcaaaaattttaatgctagtcagtatgcaccaccacaggaaagttagatcccattagcacttgaaactacagctttggaaacttaggctaagttaatttggatttgttacttgattcacctactgaccttttcttttgtttgaagtgcttatcagcataatgagctaagtgtcatgcatatttgtgaagaaacaccctttttggtcccttttgggacagagaggtactccttgatctttatgaatgacaggttactgttttgccttattgcttaacttaatgtagtgaaataaagcagacaaagcttg

SEQ ID NO: 298035 - DNA, 1293 bp, Homo sapiens
ggaaacctaacgtcaaagtctacgtaggaagtcgtagggaaggcagcgaggaagacgctggctctcgggtcacgtgatgcgccgggagcgtcatcgcctcctccctccccaagatggcgtccttgctgcagtcggaccgggttctctatctagtccagggagaaaagaaggttcgggccccgctctcgcaactctacttctgccgctattgtagcgaactgcggtcgctggaatgtgtgtctcacgaggtaacagagtcgccctatagcgagtatgtggggtggggggggcgcggcgttcatgctagtcactgccaccggaaggctggagctattttccttccttactgatggcttagagcttacggaattcgggttcaccagtgacgaaggtcgctactcatcagcacctttggaagccacaggcttctccgtactgaccggactattgtctcggcttctctgactacttggatcggccgccaattagtaaggcactctactgtgcatgcctcctttcgcttaaacgggctcacctctcccgcagctctggggatggctctgctctctaggacgccccaaggttcgttacgcatcactggtagctgctagagcgtcacgcctcaacgcattaacccccctccctagcctggcccttgcgcctctcactccgccgctctacacccaccgcctatctggctcctgctcggctctacccggaaccgccccaccagtccgggtccaccccggaccacgttccctcccatctcctcctatactgtcctctccgcagcacgcctgtcccactaccaccctgcgctggcgtccagcctctgtccactccttcctctccccccctcccacctcctggctccaccccttgttattgccatgaatctctcgccccctattctcgctgcaccgactctctcccaacagggcctctacctcataccctctctctaacgcactccgctaactcaggcgcttccgcccatcactcccttctggctccctcctctatcccctccgcgctctctgtccccgtctctcctcgcgttccctaccgtctccgcacctctccagacgtctcctccccttcgattccgccactcatctctccctcgatctcgtcctcatctgtcaccgcttgtgcctccacatactccccaccggttttccccgctatctcctctcttctcacatcgacccgccgctcatctctctcactcctccgcacactgcctcagtctctcatcacactacgtccatctcacccttctccttctctccg

SEQ ID NO: 298036 - DNA, 3785 bp, Homo sapiens
cccagtgtgaacgattgtgggtgtgggtgagtctgctctgcgatgtgatggcgtcctgtccagggctggttactgcctcgagccctgagctgccgggacaggctctggccactgaactctaaactggaataagcaggtggactcccattattgtcccagttgtttagaaaatatgccatcggctgaagccaaactaaaaaagaatagatgtgccaattgttttgactgtcctggctgcatgcacaccctctctactcgggccacgagcatctccacacagcttccagatgacccagccaagaccaccatgaagaaagcctattacctggcatgtggattttgtcgctggacgtctagagatgtgggcatggcagacaaatctgtagctagtggcggttggcaggaacctgaaaatcctcacacacaacggatgaacaaattgattgaatattaccagcagcttgctcagaaagagaaggttgagcgagatcgcaagaaactggcacgacgtagaaactatatgcctctggctttttcggacaaatatggtcttggaaccaggcttcagcgaccacgagctggtgcatccatcagtacccttgccggactttcccttaaagaaggagaggatcagaaagagataaagattgagccagctcaggctgtggatgaagtggaacctctacctgaagactattatacaagaccagtaaatttaacagaggtaacaacccttcagcagcgtctgttacagcctgacttccagccagtctgtgcttcacagctctatcctcgccacaaacatcttctgatcaaacggtccctgcgctgccgtaaatgtgaacataatttgagcaagccagaatttaacccaacgtcaatcaaattcaaaatccagctggtcgctgtcaattatattccagaagtgagaatcatgtcaattcccaaccttcgctacatgaaggagagccaggtcctcctgactcttacaaatccagttgagaacctcacccatgtgactctcttcgagtgtgaggagggggaccctgatgatatcaacagcactgctaaggtggtggtgcctcccaaagagctcgttttagctggcaaggatgcagcagcagagtacgatgagttggcagaacctcaagactttcaggacgatcctgacattatagccttcagaaaggccaacaaagtgggtattttcatcaaagttacaccacagcgtgaggagggtgaagtgaccgtgtgcttcaagatgaagcatgattttaaaaacctggcagcccccattcgccccattgaagaaagtgaccagggaacagaagtcatctggctcacccagcatgtggaacttagcttgggcccacttcttccttaaaaggttccactggagggcagatcccaaaggacagtatcaccgtaaacctgcgttaaaatgtggaagctgctgcttcattaggccttgtttataacgatgtacccatgcactacggaattctattgctaagaaagtgggagcataggcaaggcattgggaacacagggtagctgctgttgctcttgctctcacccctgttgacaccagtaagtctgtgtctccctcactgaaccctgcacgttgagtaacagcagcataattccatcctaggaaaggggatgggtgttccttggaatggcattgtatttaccacctgagaaactctgtactgtctcttgatctgatctcactaaggatcacaatgtcacagatgaaacttaaatgataacccaaaggtagacctgctgttaatgatccagcattggtcacaatgtaccaactgctttctgcattccgttaaatatcatctaacagtctaaaacatatcccttcattgccataatggctgccattttgccatagatttccatataactgaaaaactgaattgtcactttatctttagtatcatgatgattggaaaaacctgtgaagttgttaaggcactctcatttgccctctttttctaagtgaatacaggacacgtattagttgttcttaatttttttcccagtaaaatatggatcttttaagaagaatttgagaagcaaacaattacatgtcatgtcaagggggtagcagattccattcgttttcaatattgccacaatacccagggattaatgctgccacaggggggcaatctttatttgtcttacttcctaccccttccctgttctgcctctttaactcagttaagttgttctgtttgggacctggaaaagaacccaaagaaaacctgagtggacaggttcatttctggaatgcagaaaacattttaaaggctagatttttagaatattctcaactagcattctttccattgatttgaaggggaaattaactattataatctcttgaatccaaaactggatattaagaactttcccccttactaagtttaagacttttgtcatgtggtgagtcaaataagaccattttgattgtaaaccataaaatagttcagcaagtagcccacagttctggcctaacagcagacttgctgttttcacttggtatcctggagttgggttgctaaccttaatttctatgatgttttctaaaatgaaacttgataaagtagaccaccagctgcaccgtgttttctgtaaaagtattgttagtaagtggccaagagacttgaggaaaatacagattttttgtttaccttggtcttgttttaagtcttaaaaaattaaagataacattataatgtagaatacagatgggacatagtccttgtaagcttcccttgaaaatgttttaaatatttaggaagcttttaaaagacactaaattgtactctaaaagacactaaattgtactaattgtacaaaggtcaagccaattttatgaaacagtcctacagagtaatatatgtgatgcagtgtaagaaggaaaatactcatctctaacattatggtaataacatttagcctcttaggagttggagcagggggatgggtaattacagatttgcagactatagaaagagtttcatttttttgtgaccccacagagtctcaaatttttatttcactacctgctagagcctactgtgaaatcactgctccatatttgccagtggaggaaatgggcatagagtagagaatagcttcatatgtttacacgtttgcatagactacacacatgtcatgcgtttatggcaggtagctggtatttattccccaaagtaataatgttgaagtatgggtctcatcattcccatacacagaaacacaaaacactttgatcataaacttttttcttcagaagccaaactaacttgcagaataatagagccactggtttaatgtttcctcaagataggttttagtgtaagctagtattctgtgtgttcgtagaaatgattcaatacctgcagctggtgaattaggaattgtatttgttgccttttttatattagatgaggtgcaaaaattttaatgctagtcagtatgcaccaccacaggaaagttagatcccattagcacttgaaactacagctttggaaacttaggctaagttaatttggatttgttacttgattcacctactgaccttttcttttgtttgaagtgcttatcagcataatgagctaagtgtcatgcatatttgtgaagaaacaccctttttggtcccttttgggacagagaggtactccttgatctttatgaatgacaggttactgttttgccttattgcttaacttaatgtagtgaaataaagcagacaaagcttg

SEQ ID NO: 298037 - DNA, 3853 bp, Homo sapiens
ggaaacctaacgtcaaagtctacgtaggaagtcgtagggaaggcagcgaggaagacgctggctctcgggtcacgtgatgcgccgggagcgtcatcgcctcctccctccccaagatggcgtccttgctgcagtcggaccgggttctctatctagtccagggagaaaagaaggttcgggccccgctctcgcaactctacttctgccgctattgtagcgaactgcggtcgctggaatgtgtgtctcacgaggtggactcccattattgtcccagttgtttagaaaatatgccatcggctgaagccaaactaaaaaagaatagatgtgccaattgttttgactgtcctggctgcatgcacaccctctctactcgggccacgagcatctccacacagcttccagatgacccagccaagaccaccatgaagaaagcctattacctggcatgtggattttgtcgctggacgtctagagatgtgggcatggcagacaaatctgtagatgaacaaattgattgaatattaccagcagcttgctcagaaagagaaggttgagcgagatcgcaagaaactggcacgacgtagaaactatatgcctctggctttttcggacaaatatggtcttggaaccaggcttcagcgaccacgagctggtgcatccatcagtacccttgccggactttcccttaaagaaggagaggatcagaaagagataaagattgagccagctcaggctgtggatgaagtggaacctctacctgaagactattatacaagaccagtaaatttaacagaggtaacaacccttcagcagcgtctgttacagcctgacttccagccagtctgtgcttcacagctctatcctcgccacaaacatcttctgatcaaacggtccctgcgctgccgtaaatgtgaacataatttgagcaagccagaatttaacccaacgtcaatcaaattcaaaatccagctggtcgctgtcaattatattccagaagtgagaatcatgtcaattcccaaccttcgctacatgaaggagagccaggtcctcctgactcttacaaatccagttgagaacctcacccatgtgactctcttcgagtgtgaggagggggaccctgatgatatcaacagcactgctaaggtggtggtgcctcccaaagagctcgttttagctggcaaggatgcagcagcagagtacgatgagttggcagaacctcaagactttcaggacgatcctgacattatagccttcagaaaggccaacaaagtgggtattttcatcaaagttacaccacagcgtgaggagggtgaagtgaccgtgtgcttcaagatgaagcatgattttaaaaacctggcagcccccattcgccccattgaagaaagtgaccagggaacagaagtcatctggctcacccagcatgtggaacttagcttgggcccacttcttccttaaaaggttccactggagggcagatcccaaaggacagtatcaccgtaaacctgcgttaaaatgtggaagctgctgcttcattaggccttgtttataacgatgtacccatgcactacggaattctattgctaagaaagtgggagcataggcaaggcattgggaacacagggtagctgctgttgctcttgctctcacccctgttgacaccagtaagtctgtgtctccctcactgaaccctgcacgttgagtaacagcagcataattccatcctaggaaaggggatgggtgttccttggaatggcattgtatttaccacctgagaaactctgtactgtctcttgatctgatctcactaaggatcacaatgtcacagatgaaacttaaatgataacccaaaggtagacctgctgttaatgatccagcattggtcacaatgtaccaactgctttctgcattccgttaaatatcatctaacagtctaaaacatatcccttcattgccataatggctgccattttgccatagatttccatataactgaaaaactgaattgtcactttatctttagtatcatgatgattggaaaaacctgtgaagttgttaaggcactctcatttgccctctttttctaagtgaatacaggacacgtattagttgttcttaatttttttcccagtaaaatatggatcttttaagaagaatttgagaagcaaacaattacatgtcatgtcaagggggtagcagattccattcgttttcaatattgccacaatacccagggattaatgctgccacaggggggcaatctttatttgtcttacttcctaccccttccctgttctgcctctttaactcagttaagttgttctgtttgggacctggaaaagaacccaaagaaaacctgagtggacaggttcatttctggaatgcagaaaacattttaaaggctagatttttagaatattctcaactagcattctttccattgatttgaaggggaaattaactattataatctcttgaatccaaaactggatattaagaactttcccccttactaagtttaagacttttgtcatgtggtgagtcaaataagaccattttgattgtaaaccataaaatagttcagcaagtagcccacagttctggcctaacagcagacttgctgttttcacttggtatcctggagttgggttgctaaccttaatttctatgatgttttctaaaatgaaacttgataaagtagaccaccagctgcaccgtgttttctgtaaaagtattgttagtaagtggccaagagacttgaggaaaatacagattttttgtttaccttggtcttgttttaagtcttaaaaaattaaagataacattataatgtagaatacagatgggacatagtccttgtaagcttcccttgaaaatgttttaaatatttaggaagcttttaaaagacactaaattgtactctaaaagacactaaattgtactaattgtacaaaggtcaagccaattttatgaaacagtcctacagagtaatatatgtgatgcagtgtaagaaggaaaatactcatctctaacattatggtaataacatttagcctcttaggagttggagcagggggatgggtaattacagatttgcagactatagaaagagtttcatttttttgtgaccccacagagtctcaaatttttatttcactacctgctagagcctactgtgaaatcactgctccatatttgccagtggaggaaatgggcatagagtagagaatagcttcatatgtttacacgtttgcatagactacacacatgtcatgcgtttatggcaggtagctggtatttattccccaaagtaataatgttgaagtatgggtctcatcattcccatacacagaaacacaaaacactttgatcataaacttttttcttcagaagccaaactaacttgcagaataatagagccactggtttaatgtttcctcaagataggttttagtgtaagctagtattctgtgtgttcgtagaaatgattcaatacctgcagctggtgaattaggaattgtatttgttgccttttttatattagatgaggtgcaaaaattttaatgctagtcagtatgcaccaccacaggaaagttagatcccattagcacttgaaactacagctttggaaacttaggctaagttaatttggatttgttacttgattcacctactgaccttttcttttgtttgaagtgcttatcagcataatgagctaagtgtcatgcatatttgtgaagaaacaccctttttggtcccttttgggacagagaggtactccttgatctttatgaatgacaggttactgttttgccttattgcttaacttaatgtagtgaaataaagcagacaaagcttg

SEQ ID NO: 298038 - DNA, 3843 bp, Homo sapiens
ggaaacctaacgtcaaagtctacgtaggaagtcgtagggaaggcagcgaggaagacgctggctctcgggtcacgtgatgcgccgggagcgtcatcgcctcctccctccccaagatggcgtccttgctgcagtcggaccgggttctctatctagtccagggagaaaagaaggttcgggccccgctctcgcaactctacttctgccgctattgtagcgaactgcggtcgctggaatgtgtgtctcacgaggtggactcccattattgtcccagttgtttagaaaatatgccatcggctgaagccaaactaaaaaagaatagatgtgccaattgttttgactgtcctggctgcatgcacaccctctctactcgggccacgagcatctccacacagcttccagatgacccagccaagaccaccatgaagaaagcctattacctggcatgtggattttgtcgctggacgtctagagatgtgggcatggcagacaaatctgtagctagtggcggttggcaggaacctgaaaatcctcacacacaacggatgaacaaattgattgaatattaccagcagcttgctcagaaagagaaggttgagcgagatcgcaagaaactggcacgacgtagaaactatatgcctctggctttttcggacaaatatggtcttggaaccaggcttcagcgaccacgagctggtgcatccatcagtacccttgccggactttcccttaaagaaggagaggatcagaaagagataaagattgagccagctcaggctgtggatgaagtggaacctctacctgaagactattatacaagaccagtaaatttaacagaggtaacaacccttcagcagcgtctgttacagcctgacttccagccagtctgtgcttcacagctctatcctcgccacaaacatcttctgatcaaacggtccctgcgctgccgtaaatgtgaacataatttgagcaagccagaatttaacccaacgtcaatcaaattcaaaatccagctggtcgctgtcaattatattccagaagtgagaatcatgtcaattcccaaccttcgctacatgaaggagagccaggtcctcctgactcttacaaatccagttgagaacctcacccatgtgactctcttcgagtgtgaggagggggaccctgatgatatcaacagcactgctaaggtggtggtgcctcccaaagagctcgttttagctggcaaggatgcagcagcagagtacgatgagttggcagaacctcaagactttcaggacgatcctgacattatagccttcagaaaggccaacaaagtgggtattttcatcaaagttacaccacagcgtgaggagggtgaagtgaccgtgtgcttcaagatgaagcatgattttaaaaacctggcagcccccattcgccccattgaagaaagtgaccagggaacagaagtcatctggctcacccagcatgtggaacttagcttgggcccacttcttccttaaaaggttccactggagggcagatcccaaaggacagtatcaccgtaaacctgcgttactacggaattctattgctaagaaagtgggagcataggcaaggcattgggaacacagggtagctgctgttgctcttgctctcacccctgttgacaccagtaagtctgtgtctccctcactgaaccctgcacgttgagtaacagcagcataattccatcctaggaaaggggatgggtgttccttggaatggcattgtatttaccacctgagaaactctgtactgtctcttgatctgatctcactaaggatcacaatgtcacagatgaaacttaaatgataacccaaaggtagacctgctgttaatgatccagcattggtcacaatgtaccaactgctttctgcattccgttaaatatcatctaacagtctaaaacatatcccttcattgccataatggctgccattttgccatagatttccatataactgaaaaactgaattgtcactttatctttagtatcatgatgattggaaaaacctgtgaagttgttaaggcactctcatttgccctctttttctaagtgaatacaggacacgtattagttgttcttaatttttttcccagtaaaatatggatcttttaagaagaatttgagaagcaaacaattacatgtcatgtcaagggggtagcagattccattcgttttcaatattgccacaatacccagggattaatgctgccacaggggggcaatctttatttgtcttacttcctaccccttccctgttctgcctctttaactcagttaagttgttctgtttgggacctggaaaagaacccaaagaaaacctgagtggacaggttcatttctggaatgcagaaaacattttaaaggctagatttttagaatattctcaactagcattctttccattgatttgaaggggaaattaactattataatctcttgaatccaaaactggatattaagaactttcccccttactaagtttaagacttttgtcatgtggtgagtcaaataagaccattttgattgtaaaccataaaatagttcagcaagtagcccacagttctggcctaacagcagacttgctgttttcacttggtatcctggagttgggttgctaaccttaatttctatgatgttttctaaaatgaaacttgataaagtagaccaccagctgcaccgtgttttctgtaaaagtattgttagtaagtggccaagagacttgaggaaaatacagattttttgtttaccttggtcttgttttaagtcttaaaaaattaaagataacattataatgtagaatacagatgggacatagtccttgtaagcttcccttgaaaatgttttaaatatttaggaagcttttaaaagacactaaattgtactctaaaagacactaaattgtactaattgtacaaaggtcaagccaattttatgaaacagtcctacagagtaatatatgtgatgcagtgtaagaaggaaaatactcatctctaacattatggtaataacatttagcctcttaggagttggagcagggggatgggtaattacagatttgcagactatagaaagagtttcatttttttgtgaccccacagagtctcaaatttttatttcactacctgctagagcctactgtgaaatcactgctccatatttgccagtggaggaaatgggcatagagtagagaatagcttcatatgtttacacgtttgcatagactacacacatgtcatgcgtttatggcaggtagctggtatttattccccaaagtaataatgttgaagtatgggtctcatcattcccatacacagaaacacaaaacactttgatcataaacttttttcttcagaagccaaactaacttgcagaataatagagccactggtttaatgtttcctcaagataggttttagtgtaagctagtattctgtgtgttcgtagaaatgattcaatacctgcagctggtgaattaggaattgtatttgttgccttttttatattagatgaggtgcaaaaattttaatgctagtcagtatgcaccaccacaggaaagttagatcccattagcacttgaaactacagctttggaaacttaggctaagttaatttggatttgttacttgattcacctactgaccttttcttttgtttgaagtgcttatcagcataatgagctaagtgtcatgcatatttgtgaagaaacaccctttttggtcccttttgggacagagaggtactccttgatctttatgaatgacaggttactgttttgccttattgcttaacttaatgtagtgaaataaagcagacaaagcttg

SEQ ID NO: 298039 - DNA, 4046 bp, Homo sapiens
ggaaacctaacgtcaaagtctacgtaggaagtcgtagggaaggcagcgaggaagacgctggctctcgggtcacgtgatgcgccgggagcgtcatcgcctcctccctccccaagatggcgtccttgctgcagtcggaccgggttctctatctagtccagggagaaaagaaggttcgggccccgctctcgcaactctacttctgccgctattgtagcgaactgcggtcgctggaatgtgtgtctcacgaggtggactcccattattgtcccagttgtttagaaaatatgccatcggctgaagccaaactaaaaaagaatagatgtgccaattgttttgactgtcctggctgcatgcacaccctctctactcgggccacgagcatctccacacagcttccagatgacccagccaagaccaccatgaagaaagcctattacctggcatgtggattttgtcgctggacgtctagagatgtgggcatggcagacaaatctgtagctagtggcggttggcaggaacctgaaaatcctcacacacaacggatgaacaaattgattgaatattaccagcagcttgctcagaaagagaaggttgagcgagatcgcaagaaactggcacgacgtagaaactatatgcctctggctttttcggacaaatatggtcttggaaccaggcttcagcgaccacgagctggtgcatccatcagtacccttgccggactttcccttaaagaaggagaggatcagaaagagataaagattgagccagctcaggctgtggatgaagtggaacctctacctgaagactattatacaagaccagtaaatttaacagaggtaacaacccttcagcagcgtctgttacagcctgacttccagccagtctgtgcttcacagctctatcctcgccacaaacatcttctgatcaaacggtccctgcgctgccgtaaatgtgaacataatttgagcaagccagaatttaacccaacgtcaatcaaattcaaaatccagctggtcgctgtcaattatattccagaagtgagaatcatgtcaattcccaaccttcgctacatgaaggagagccaggtcctcctgactcttacaaatccagttgagaacctcacccatgtgactctcttcgagtgtgaggagggggaccctgatgatatcaacagcactgctaaggtggtggtgcctcccaaagagctcgttttagctggcaaggatgcagcagcagagtacgatgagttggcagaacctcaagactttcaggacgatcctgacattatagccttcagaaaggccaacaaagtgggtattttcatcaaagttacaccacagcgtgaggagggtgaagtgaccgtgtgcttcaagatgaagcatgattttaaaaacctggcagcccccattcgccccattgaagaaagtgaccagggaacagaagtcatctggctcacccagcatgtggaacttagcttgggcccacttcttccttaaaaggttccactggagggcagatcccaaaggacagtatcaccgtaaacctgcgttaaaatgtggaagctgctgcttcattaggccttgtttataacgatgtacccatgcactacggaattctattgctaagaaagtgggagcataggcaaggcattgggaacacagggtagctgctgttgctcttgctctcacccctgttgacaccagtaagtctgtgtctccctcactgaaccctgcacgttgagtaacagcagcataattccatcctaggaaaggggatgggtgttccttggaatggcattgtatttaccacctgagaaactctgtactgtctcttgatctgatctcactaaggatcacaatgtcacagatgaaacttaaatgataacccaaaggtagacctgctgttaatgatccagcattggtcacaatgtaccaactgctttctgcattccgttaaatatcatctaacagtctaaaacatatcccttcattgccataatggctgccattttgccatagatttccatataactgaaaaactgaattgtcactttatctttagtatcatgatgattggaaaaacctgtgaagttgttaaggcactctcatttgccctctttttctaagtgaatacaggacacgtattagttgttcttaatttttttcccagtaaaatatggatcttttaagaagaatttgagaagcaaacaattacatgtcatgtcaagggggtagcagattccattcgttttcaatattgccacaatacccagggattaatgctgccacaggggggcaatctttatttgtcttacttcctaccccttccctgttctgcctctttaactcagttaagttgttctgtttgggacctggaaaagaacccaaagaaaacctgagtggacaggttcatttctggaatgcagaaaacattttaaaggctagatttttagaatattctcaactagcattctttccattgatttgaaggggaaattaactattataatctcttgaatccaaaactggatattaagaactttcccccttactaagtttaagacttttgtcatgtggtgagtcaaataagaccattttgattgtaaaccataaaatagttcagcaagtagcccacagttctggcctaacagcagacttgctgttttcacttggtatcctggagttgggttgctaaccttaatttctatgatgttttctaaaatgaaacttgataaagtagaccaccagctgcaccgtgttttctgtaaaagtattgttagtaagtggccaagagacttgaggaaaatacagattttttgtttaccttggtcttgttttaagtcttaaaaaattaaagataacattataatgtagaatacagatgggacatagtccttgtaagcttcccttgaaaatgttttaaatatttaggaagcttttaaaagacactaaattgtactctaaaagacactaaattgtactaattgtacaaaggtcaagccaattttatgaaacagtcctacagagtaatatatgtgatgcagtgtaagaaggaaaatactcatctctaacattatggtaataacatttagcctcttaggagttggagcagggggatgggtaattacagatttgcagactatagaaagagtttcatttttttgtgaccccacagagtctcaaatttttatttcactacctgctagagcctactgtgaaatcactgctccatatttgccagtggaggaaatgggcatagagtagagaatagcttcatatgtttacacgtttgcatagactacacacatgtcatgcgtttatggcaggtagctggtatttattccccaaagtaataatgttgaagtatgggtctcatcattcccatacacagaaacacaaaacactttgatcataaacttttttcttcagaagccaaactaacttgcagaataatagagccactggtttaatgtttcctcaagataggttttagtgtaagctagtattctgtgtgttcgtagaaatgattcaatacctgcagctggtgaattaggaattgtatttgttgccttttttatattagatgaggtgcaaaaattttaatgctagtcagtatgcaccaccacaggaaagttagatcccattagcacttgaaactacagctttggaaacttaggctaagttaatttggatttgttacttgattcacctactgaccttttcttttgtttgaagtgcttatcagcataatgagctaagtgtcatgcatatttgtgaagaaacaccctttttggtcccttttgggacagagaggtactccttgatctttatgaatgacaggttactgttttgccttattgcttaacttaatgtagtgaaataaagcagacaaagcttggaaaaaaaaaaaaaaaaaaaaaaaacagtgggggcggcctcggccccaaaaggtttccacacacatctcttgggggggccatgtatgaacgcgccaagggtcccagaacgggcccgcatggggtcccccaaaaaccgggcccgtggaac

SEQ ID NO: 298040 - DNA, 4139 bp, Homo sapiens
ggaaacctaacgtcaaagtctacgtaggaagtcgtagggaaggcagcgaggaagacgctggctctcgggtcacgtgatgcgccgggagcgtcatcgcctcctccctccccaagatggcgtccttgctgcagtcggaccgggttctctatctagtccagggagaaaagaaggttcgggccccgctctcgcaactctacttctgccgctattgtagcgaactgcggtcgctggaatgtgtgtctcacgaggtggactcccattattgtcccagttgtttagaaaatatgccatcggctgaagccaaactaaaaaagaatagatgtgccaattgttttgactgtcctggctgcatgcacaccctctctactcgggccacgagcatctccacacagcttccagatgacccagccaagaccaccatgaagaaagcctattacctggcatgtggattttgtcgctggacgtctagagatgtgggcatggcagacaaatctgtagctagtggcggttggcaggaacctgaaaatcctcacacacaacggatgaacaaattgattgaatattaccagcagcttgctcagaaagagaaggttgagcgagatcgcaagaaactggcacgacgtagaaactatatgcctctggctttttcggacaaatatggtcttggaaccaggcttcagcgaccacgagctggtgcatccatcagtacccttgccggactttcccttaaagaaggagaggatcagaaagagataaagattgagccagctcaggctgtggatgaagtggaacctctacctgaagactattatacaagaccagtaaatttaacagaggtaacaacccttcagcagcgtctgttacagcctgacttccagccagtctgtgcttcacagctctatcctcgccacaaacatcttctgatcaaacggtccctgcgctgccgtaaatgtgaacataatttgagcaagccagaatttaacccaacgtcaatcaaattcaaaatccagctggtcgctgtcaattatattccagaagtgagaatcatgtcaattcccaaccttcgctacatgaaggagagccaggtcctcctgactcttacaaatccagttgagaacctcacccatgtgactctcttcgagtgtgaggagggggaccctgatgatatcaacagcactgctaaggtggtggtgcctcccaaagagctcgttttagctggcaaggatgcagcagcagagtacgatgagttggcagaacctcaagactttcaggacgatcctgacattatagccttcagaaaggccaacaaagtgggtattttcatcaaagttacaccacagcgtgaggagggtgaagtgaccgtgtgcttcaagatgaagcatgattttaaaaacctggcagcccccattcgccccattgaagaaagtgaccagggaacagaagtcatctggctcacccagcatgtggaacttagcttgggcccacttcttccttaaaaggttccactggagggcagatcccaaaggacagtatcaccgtaaacctgcgttaaaatgtggaagctgctgcttcattaggccttgtttataacgatgtacccatgcactacggaattctattgctaagaaagtgggagcataggcaaggcattgggaacacagggtagctgctgttgctcttgctctcacccctgttgacaccagtaagtctgtgtctccctcactgaaccctgcacgttgagtaacagcagcataattccatcctaggaaaggggatgggtgttccttggaatggcattgtatttaccacctgagaaactctgtactgtctcttgatctgatctcactaaggatcacaatgtcacagatgaaacttaaatgataacccaaaggtagacctgctgttaatgatccagcattggtcacaatgtaccaactgctttctgcattccgttaaatatcatctaacagtctaaaacatatcccttcattgccataatggctgccattttgccatagatttccatataactgaaaaactgaattgtcactttatctttagtatcatgatgattggaaaaacctgtgaagttgttaaggcactctcatttgccctctttttctaagtgaatacaggacacgtattagttgttcttaatttttttcccagtaaaatatggatcttttaagaagaatttgagaagcaaacaattacatgtcatgtcaagggggtagcagattccattcgttttcaatattgccacaatacccagggattaatgctgccacaggggggcaatctttatttgtcttacttcctaccccttccctgttctgcctctttaactcagttaagttgttctgtttgggacctggaaaagaacccaaagaaaacctgagtggacaggttcatttctggaatgcagaaaacattttaaaggctagatttttagaatattctcaactagcattctttccattgatttgaaggggaaattaactattataatctcttgaatccaaaactggatattaagaactttcccccttactaagtttaagacttttgtcatgtggtgagtcaaataagaccattttgattgtaaaccataaaatagttcagcaagtagcccacagttctggcctaacagcagacttgctgttttcacttggtatcctggagttgggttgctaaccttaatttctatgatgttttctaaaatgaaacttgataaagtagaccaccagctgcaccgtgttttctgtaaaagtattgttagtaagtggccaagagacttgaggaaaatacagattttttgtttaccttggtcttgttttaagtcttaaaaaattaaagataacattataatgtagaatacagatgggacatagtccttgtaagcttcccttgaaaatgttttaaatatttaggaagcttttaaaagacactaaattgtactctaaaagacactaaattgtactaattgtacaaaggtcaagccaattttatgaaacagtcctacagagtaatatatgtgatgcagtgtaagaaggaaaatactcatctctaacattatggtaataacatttagcctcttaggagttggagcagggggatgggtaattacagatttgcagactatagaaagagtttcatttttttgtgaccccacagagtctcaaatttttatttcactacctgctagagcctactgtgaaatcactgctccatatttgccagtggaggaaatgggcatagagtagagaatagcttcatatgtttacacgtttgcatagactacacacatgtcatgcgtttatggcaggtagctggtatttattccccaaagtaataatgttgaagtatgggtctcatcattcccatacacagaaacacaaaacactttgatcataaacttttttcttcagaagccaaactaacttgcagaataatagagccactggtttaatgtttcctcaagataggttttagtgtaagctagtattctgtgtgttcgtagaaatgattcaatacctgcagctggtgaattaggaattgtatttgttgccttttttatattagatgaggtgcaaaaattttaatgctagtcagtatgcaccaccacaggaaagttagatcccattagcacttgaaactacagctttggaaacttaggctaagttaatttggatttgttacttgattcacctactgaccttttcttttgtttgaagtgcttatcagcataatgagctaagtgtcatgcatatttgtgaagaaacaccctttttggtcccttttgggacagagaggtactccttgatctttatgaatgacaggttactgttttgccttattgcttaacttaatgtagtgaaataaagcagacaaagcttgagcgtgtcttttgtttgctctcatgtagatactaagtagcatggctcagagccaaaagacaagcgtgaagttaagagagttggctaagagagttggtggggcatgctcccttccattccttaaatgaagtaatctaaaatctcttagcaggttagttcaccataatatataagtagatgttgctttgagcttcttatatacatattcacagaaccattatataaatgttgttagacctctac

SEQ ID NO: 298041 - DNA, 3848 bp, Homo sapiens
ggaaacctaacgtcaaagtctacgtaggaagtcgtagggaaggcagcgaggaagacgctggctctcgggtcacgtgatgcgccgggagcgtcatcgcctcctccctccccaagatggcgtccttgctgcagtcggaccgggttctctatctagtccagggagaaaagaaggttcgggccccgctctcgcaactctacttctgccgctattgtagcgaactgcggtcgctggaatgtgtgtctcacgaggtggactcccattattgtcccagttgtttagaaaatatgccatcggctgaagccaaactaaaaaagaatagatgtgccaattgttttgactgtcctggctgcatgcacaccctctctactcgggccacgagcatctccacacagcttccagatgacccagccaagaccaccatgaagaaagcctattacctggcatgtggattttgtcgctggacgtctagagatgtgggcatggcagacaaatctgtagctagtggcggttggcaggaacctgaaaatcctcacacacaacggatgaacaaattgattgaatattaccagcagcttgctcagaaagagaaggttgagcgagatcgcaagaaactggcacgacgtagaaactatatgcctctggctttttcggacaaatatggtcttggaaccaggcttcagcgaccacgagctggtgcatccatcagtacccttgccggactttcccttaaagaaggagaggatcagaaagagataaagattgagccagctcaggctgtggatgaagtggaacctctacctgaagactattatacaagaccagtaaatttaacagaggtaacaacccttcagcagcgtctgttacagcctgacttccagccagtctgtgcttcacagctctatcctcgccacaaacatcttctgatcaaacggtccctgcgctgccgtaaatgtgaacataatttgagcaagccagaatttaacccaacgtcaatcaaattcaaaatccagctggtcgctgtcaattatattccagaagtgagaatcatgtcaattcccaaccttcgctacatgaaggagagccaggtcctcctgactcttacaaatccagttgagaacctcacccatgtgactctcttcgagtgtgaggagggggaccctgatgatatcaacagcactgctaaggtggtggtgcctcccaaagagctcgttttagctggcaaggatgcagcagcagagtacgatgagttggcagaacctcaagactttcaggacgatcctgacattatagccttcagaaaggccaacaaagtgggtattttcatcaaagttacaccacagcgtgaggagggtgaagtgaccgtgtgcttcaagatgaagcatgattttaaaaacctggcagcccccattcgccccattgaagaaagtgaccagggaacagaagtcatctggctcacccagcatgtggaacttagcttgggcccacttcttccttaaaaggttccactggagggcagatcccaaaggacagtatcaccgtaaacctgcgttaaaatgtggaagctgctgcttcattaggccttgtttataacgatgtacccatgcactacggaattctattgctaagaaagtgggagcataggcaaggcattgggaacacagggtagctgctgttgctcttgctctcacccctgttgacaccagtaagtctgtgtctccctcactgaaccctgcacgttgagtaacagcagcataattccatcctaggaaaggggatgggtgttccttggaatggcattgtatttaccacctgagaaactctgtactgtctcttgatctgatctcactaaggatcacaatgtcacagatgaaacttaaatgataacccaaaggtagacctgctgttaatgatccagcattggtcacaatgtaccaactgctttctgcattccgttaaatatcatctaacagtctaaaacatatcccttcattgccataatggctgccattttgccatagatttccatataactgaaaaactgaattgtcactttatctttagtatcatgatgattggaaaaacctgtgaagttgttaaggcactctcatttgccctctttttctaagtgaatacaggacacgtattagttgttcttaatttttttcccagtaaaatatggatcttttaagaagaatttgagaagcaaacaattacatgtcatgtcaagggggtagcagattccattcgttttcaatattgccacaatacccagggattaatgctgccacaggggggcaatctttatttgtcttacttcctaccccttccctgttctgcctctttaactcagttaagttgttctgtttgggacctggaaaagaacccaaagaaaacctgagtggacaggttcatttctggaatgcagaaaacattttaaaggctagatttttagaatattctcaactagcattctttccattgatttgaaggggaaattaactattataatctcttgaatccaaaactggatattaagaactttcccccttactaagtttaagacttttgtcatgtggtgagtcaaataagaccattttgattgtaaaccataaaatagttcagcaagtagcccacagttctggcctaacagcagacttgctgttttcacttggtatcctggagttgggttgctaaccttaatttctatgatgttttctaaaatgaaacttgataaagtagaccaccagctgcaccgtgttttctgtaaaagtattgttagtaagtggccaagagacttgaggaaaatacagattttttgtttaccttggtcttgttttaagtcttaaaaaattaaagataacattataatgtagaatacagatgggacatagtccttgtaagcttcccttgaaaatgttttaaatatttaggaagcttttaaaagacactaaattgtactctaaaagacactaaattgtactaattgtacaaaggtcaagccaattttatgaaacagtcctacagagtaatatatgtgatgcagtgtaagaaggaaaatactcatctctaacattatggtaataacatttagcctcttaggagttggagcagggggatgggtaattacagatttgcagactatagaaagagtttcatttttttgtgaccccacagagtctcaaatttttatttcactacctgctagagcctactgtgaaatcactgctccatatttgccagtggaggaaatgggcatagagtagagaatagcttcatatgtttacacgtttgcatagactacacacatgtcatgcgtttatggcaggtagctggtatttattccccaaagtaataatgttgaagtatgggtctcatcattcccatacacagaaacacaaaacactttgatcataaacttttttcttcagaagccaaactaacttgcagaataatagagccactggtttaatgtttcctcaagataggttttagtgtaagctagtattctgtgtgttcgtagaaatgattcaatacctgcagctggtgaattaggaattgtatttgttgccttttttatattagatgaggtgcaaaaattttaatgctagtcagtatgcaccaccacaggaaagttagatcccattagcacttgaaactacagctttggaaacttaggctaagttaatttggatttgttacttgattcacctactgaccttttcttttgtttgaagtgcttatcagcataatgagctaagtgtcatgcatatttgatctttatgaatgacaggttactgttttgccttattgcttaacttaatgtagtgaaataaagcagacaaagcttg

SEQ ID NO: 298042 - DNA, 2740 bp, Homo sapiens
ggaaacctaacgtcaaagtctacgtaggaagtcgtagggaaggcagcgaggaagacgctggctctcgggtcacgtgatgcgccgggagcgtcatcgcctcctccctccccaagatggcgtccttgctgcagtcggaccgggttctctatctagtccagggagaaaagaaggttcgggccccgctctcgcaactctacttctgccgctattgtagcgaactgcggtcgctggaatgtgtgtctcacgaggtggactcccattattgtcccagttgtttagaaaatatgccatcggctgaagccaaactaaaaaagaatagatgtgccaattgttttgactgtcctggctgcatgcacaccctctctactcgggccacgagcatctccacacagcttccagatgacccagccaagaccaccatgaagaaagcctattacctggcatgtggattttgtcgctggacgtctagagatgtgggcatggcagacaaatctgtagctagtggcggttggcaggaacctgaaaatcctcacacacaacggatgaacaaattgattgaatattaccagcagcttgctcagaaagagaaggttgagcgagatcgcaagaaactggcacgacgtagaaactatatgcctctggctttttcggacaaatatggtcttggaaccaggcttcagcgaccacgagctggtgcatccatcagtacccttgccggactttcccttaaagaaggagaggatcagaaagagataaagattgagccagctcaggctgtggatgaagtggaacctctacctgaagactattatacaagaccagtaaatttaacagaggtaacaacccttcagcagcgtctgttacagcctgacttccagccagtctgtgcttcacagctctatcctcgccacaaacatcttctgatcaaacggtccctgcgctgccgtaaatgtgaacataatttgagcaagccagaatttaacccaacgtcaatcaaattcaaaatccagctggtcgctgtcaattatattccagaagtgagaatcatgtcaattcccaaccttcgctacatgaaggagagccaggtcctcctgactcttacaaatccagttgagaacctcacccatgtgactctcttcgagtgtgaggagggggaccctgatgatatcaacagcactgctaaggtggtggtgcctcccaaagagctcgttttagctggcaaggatgcagcagcagagtacgatgagttggcagaacctcaagactttcaggacgatcctgacattatagccttcagaaaggccaacaaagtgggtattttcatcaaagttacaccacagcgtgaggagggtgaagtgaccgtgtgcttcaagatgaagcatgattttaaaaacctggcagcccccattcgccccattgaagaaagtgaccagggaacagaagtcatctggctcacccagcatgtggaacttagcttgggcccacttcttccttaaaaggttccactggagggcagatcccaaaggacagtatcaccgtaaacctgcgttaaaatgtggaagctgctgcttcattaggccttgtttataacgatgtacccatgcactacggaattctattgctaagaaagtgggagcataggcaaggcattgggaacacagggtagctgctgttgctcttgctctcacccctgttgacaccagtaagtctgtgtctccctcactgaaccctgcacgttgagtaacagcagcataattccatcctaggaaaggggatgggtgttccttggaatggcattgtatttaccacctgagaaactctgtactgtctcttgatctgatctcactaaggatcacaatgtcacagatgaaacttaaatgataacccaaaggtagacctgctgttaatgatccagcattggtcacaatgtaccaactgctttctgcattccgttaaatatcatctaacagtctaaaacatatcccttcattgccataatggctgccattttgccatagatttccatataactgaaaaactgaattgtcactttatctttagtatcatgatgattggaaaaacctgtgaagttgttaaggcactctcatttgccctctttttctaagtgaatacaggacacgtattagttgttcttaatttttttcccagtaaaatatggatcttttaagaagaatttgagaagcaaacaattacatgtcatgtcaagggggtagcagattccattcgttttcaatattgccacaatacccagggattaatgctgccacaggggggcaatctttatttgtcttacttcctaccccttccctgttctgcctctttaactcagttaagttgttctgtttgggacctggaaaagaacccaaagaaaacctgagtggacaggttcatttctggaatgcagaaaacattttaaaggctagatttttagaatattctcaactagcattctttccattgatttgaaggggaaattaactattataatctcttgaatccaaaactggatattaagaactttcccccttactaagtttaagacttttgtcatgtggtgagtcaaataagaccattttgattgtaaaccataaaatagttcagcaagtagcccacagttctggcctaacagcagacttgctgttttcacttggtatcctggagttgggttgctaaccttaatttctatgatgttttctaaaatgaaacttgataaagtaga

SEQ ID NO: 298043 - DNA, 1340 bp, Homo sapiens
ggaaacctaacgtcaaagtctacgtaggaagtcgtagggaaggcagcgaggaagacgctggctctcgggtcacgtgatgcgccgggagcgtcatcgcctcctccctccccaagatggcgtccttgctgcagtcggaccgggttctctatctagtccagggagaaaagaaggttcgggccccgctctcgcaactctacttctgccgctattgtagcgaactgcggtcgctggaatgtgtgtctcacgaggtggactcccattattgtcccagttgtttagaaaatatgccatcggctgaagccaaactaaaaaagaatagatgtgccaattgttttgactgtcctggctgcatgcacaccctctctactcgggccacgagcatctccacacagcttccagatgacccagccaagaccaccatgaagaaagcctattacctggcatgtggattttgtcgctggacgtctagagatgtgggcatggcagacaaatctgtagctagtggcggttggcaggaacctgaaaatcctcacacacaacggatgaacaaattgattgaatattaccagcagcttgctcagaaagagaaggttgagcgagatcgcaagaaactggcacgacgtagaaactatatgcctctggctttttcggacaaatatggtcttggaaccaggcttcagcgaccacgagctggtgcatccatcagtacccttgccggactttcccttaaagaaggagaggatcagaaagagataaagattgagccagctcaggctgtggatgaagtggaacctctacctgaagactattatacaagaccagtaaatttaacagaggtaacaacccttcagcagcgtctgttacagcctgacttccagccagtctgtgcttcacagctctatcctcgccacaaacatcttctgatcaaacggtccctgcgctgccgtaaatgtgaacataatttgagcaagccagaatttaacccaacgtcaatcaaattcaaaatccagctggtcgctgtgtaagtattttgggattggtgttttcagttactgttttgagttattttggtttattcttcttccccagtatgaagtgtgtttactcttggcctaaaaaaaaaaaaattacatcaaaataatcttgacattctgttcctgtttaggtttttaatttagttacatgccatgaagtttaagataaatagattcaggggtattgggatcagggacacagtgtcccagtatgatctggagcaacaaggtatgttgattatttggtggaaagtcactagtcatcattacaaattataaagtatctgagtttgggaataatccttc

SEQ ID NO: 298044 - DNA, 1057 bp, Homo sapiens
ggaaacctaacgtcaaagtctacgtaggaagtcgtagggaaggcagcgaggaagacgctggctctcgggtcacgtgatgcgccgggagcgtcatcgcctcctccctccccaagatggcgtccttgctgcagtcggaccgggttctctatctagtccagggagaaaagaaggttcgggccccgctctcgcaactctacttctgccgctattgtagcgaactgcggtcgctggaatgtgtgtctcacgaggtggactcccattattgtcccagttgtttagaaaatatgccatcggctgaagccaaactaaaaaagaatagatgtgccaattgttttgactgtcctggctgcatgcacaccctctctactcgggccacgagcatctccacacagcttccagatgacccagccaagaccaccatgaagaaagcctattacctggcatgtggattttgtcgctggacgtctagagatgtgggcatggcagacaaatctgtagctagtggcggttggcaggaacctgaaaatcctcacacacaacggatgaacaaattgattgaatattaccagcagcttgctcagaaagagaaggttgagcgagatcgcaagaaactggcacgacgtagaaactatatgcctctggctttttcggacaaatatggtcttggaaccaggcttcagcgaccacgagctggtgcatccatcagtacccttgccggactttcccttaaagaaggagaggatcagaaagagataaagattgagccagctcaggctgtggatgaagtggaacctctacctgaagactattatacaagaccagtaaatttaacagaggtaacaacccttcagcagcgtctgttacagcctgacttccagccagtctgtgcttcacagctctatcctcgccacaaacatcttctgatcctctccttctttaaggctgaaaaattaaaaaaacaaaacaaaacaaaacaaaagagtaatttctcacggatccacctgatatcctcagtctatatatcaataagttgaagtgggtatcctctagataagcc

SEQ ID NO: 298045 - DNA, 522 bp, Homo sapiens
gagaaatctttaaaaaaatgtccttcaaaacctaaaagtatggtcaagttttatagtcatataaagctagcctagacaggaggatattttatcacaatgttacaaattggattattttattaatctctttattaatcatagaattctatggagttcaactggaaattgtagattgttaaataaacaacttttaacacataaaaccctgatgatggaataggaaagatcagaaaaatagaaggattttttaaatccggaagaagaagaaaaaaaaaaaacaggtgactgaagaagaataaaccctaagcagaaaacagtctactttctgctacagtataacatattttaaaattcactatttgacaagacatatacacaagttaaactgagttctcctctggttttttttttctttcttgtttcctcctaggtggactcccattattgtcccagttgtttagaaaatatgccatcggctgaagccaaactaaaaaagaataggtaagacctggactgattttt

SEQ ID NO: 298046 - DNA, 414 bp, Homo sapiens
catgaaatgactttgaggagaacagcaggtatcaaaatgaatatcaaataaatgagattaaaacacacacacacacacagttgtcaatggaaaagaagattctcatacttagaaaagacctacgctatacagatattctatgacagaggaatacttcaattattgatatcatagactgaggataatcaggtggatccgtgagaaattactcttttgttttgttttgttttgtttttttaatttttcagccttaaagaaggagaggatcagaaagagataaagattgagccagctcaggctgtggatgaagtggaacctctacctgaagactattatacaagaccagtaaatttaacagagggtaattttctgtgtttttctactttgtttctagtctacatctaattctgtttt

SEQ ID NO: 298047 - DNA, 467 bp, Homo sapiens
agttaaaccagtgagcacgttgtttagcaaatacagtatgtactcagtatgtgttattttagtagtttttaagtaccacagaggtataataatattggatagtggggttgcacatatcaggaagtgcgaacatcttttataaactttggctgctatacattattcaaaaacatatggtcttatagcagaacaaaacaaaacaaaattctcgtaaatgctgtccttctgaatttagcagctctatggatcaacaaagtgtgttgttgtcttctgatacgtgttatatttgttttctttttagaaatgtgaacataatttgagcaagccagaatttaacccaacgtcaatcaaattcaaaatccagctggtcgctgtgtaagtattttgggattggtgttttcagttactgttttgagttattttggtttattcttcttccccagtatgaagtgtgtttactcttggcc

SEQ ID NO: 298048 - DNA, 1146 bp, Homo sapiens
tattttgtaggaaaaagcgaaagtgtgaatgaggatacatcgaatcctattttaacttagacagcaagacttggctaagagtcgccaactctgttttgtcctattttgctcagttctttgcatggccttctatttctgtgccccaccatggggttacacccctaaaacacactggcccagcatgatatgtgtgctggcttgccagccaagtggcccgaagctcctcttgagtgcactgcagtacaaccacttgacttgctctttaacatagtcctgtgagatgccagctgccatgaccaagcagtattcccactcctcctctacactctggcaaggctttcctggaacatccccatgcccacatctttacccagtaactcactaaagccactcttgactcaagcaggtgccgttccttgatcacggaatctacctttgatttcatcaggccagattcacaaacagaatgggagtgctttatctatacctttgagaggatggagagtgaaataactggaaacactgggttatcacagcttaatttcatccaggcttggtgtctttaccaaagatggttggggaaaggaagggagattcatcttgttcaggcagtgatttgctcagaattttacaagacataccctatacagacctatttgaattctactgtgggtttattgaaccagtgttggaacaacttcgcaaaacagaccaggccagttaggtacagcctcatgagttggcaggtagcagcagcccgtgtcttccctaagatgacattccctgcccaaaacacttctgtgaaaagtacagaataaacagctcagagaatacagtgtaagttacccgcagaaatatagtacttctttctagaagtttacaaactgtccatgtttatcccttgccatatagcaatcactactattagtgctgtacttaattatttgtttatctgatttctaattgttaatgcttcccccaaatattgtgtgacatttgtaattaataaaaatcacttaacgatgaattagtgagcagttcatgtttgtgtttttgcttaattactgaaagttggttgtaagttctgggggcagggtgcacattttcaagggtagatgatttggggtcttttgtgagtgggaagct

SEQ ID NO: 298049 - DNA, 449 bp, Homo sapiens
tactactactaaattcgcggccgcgtcgtacagcctcatgagttggcaggtagcagcagcccgtgtcttccctaagatgacattccctgcccaaaacacttctgtgaaaagtacagaataaacagctcagagaatacagtgtaagttacccgcagaaatatagtacttctttctagaagtttacaaactgtccatgtttatcccttgccatatagcaatcactactattagtgctgtacttaattatttgtttatctgatttctaattgttaatgcttcccccaaatattgtgtgacatttgtaattaataaaaatcacttaacgatgaattagtgagcagttcatgtttgtgtttttgcttaattactgaaagttggttgtaagttctgggggcagggtgcacattttcaagggtagatgatttggggtcttttgtgagtgggaagct

SEQ ID NO: 298050 - DNA, 293 bp, Homo sapiens
tcgcaacccatccttccttctctcacgcaaactgtccatgtttatcccttgccatatagcaatcactactattagtgctgtacttaattatttgtttatctgatttctaattgttaatgcttcccccaaatattgtgtgacatttgtaattaataaaaatcacttaacgatgaattagtgagcagttcatgtttgtgtttttgcttaattactgaaagttggttgtaagttctgggggcagggtgcacattttcaagggtagatgatttggggtcttttgtgagtgggaagct

SEQ ID NO: 298051 - DNA, 1009 bp, Homo sapiens
  misc_feature (9)..(9): n is a, c, g, or t
ggactggcncgaggcagacgtccctgcgcgtcgtcctcctcgccctccaggccgcccgcgccgcgccggagtccgctgtccgccagctacccgcttcctgccgcccgccgctgccatgctgcccgccgcgctgctccgccgcccgggacttggccgcctcgtccgccacgcccgtgcctatgccgaggccgccgccgccccggctgccgcctctggccccaaccagatgtccttcaccttcgcctctcccacgcaggtgttcttcaacggtgccaacgtccggcaggtggacgtgcccacgctgaccggagccttcggcatcctggcggcccacgtgcccacgctgcaggtcctgcggccggggctggtcgtggtgcatgcagaggacggcaccacctccaaatactttgtgagcagcggttccatcgcagtgaacgccgactcttcggtgcagttgttggccgaagaggccgtgacgctggacatgttggacctgggggcagccaaggcaaacttggagaaggcccaggcggagctggtggggacagctgacgaggccacgcgggcagagatccagatccgaatcgaggccaacgaggccctggtgaaggccctggagtaggcggtgcgtacccggtgtcccgaggcccggccaggggctgggcagggatgccaggtgggcccagccagctcctggggtcccggccacctggggaagccgcgcctgccaaggaggccaccagagggcagtgcaggcttctgcctgggccccaggccctgcctgtgttgaaagctctggggactgggccagggaagctcctcctcagctttgagctgtggctgccacccatggggctctccttccgcctctcaagatccccccagcctgacgggccgcttaccatcccctctgccctgcaagccagccgccaaggttgacctcagcttcggagccacctctggatgaactgcccccagcccccgccccattaaagacccggaagcctga

SEQ ID NO: 298052 - DNA, 714 bp, Homo sapiens
  misc_feature (9)..(9): n is a, c, g, or t
ggactggcncgaggcagacgtccctgcgcgtcgtcctcctcgccctccaggccgcccgcgccgcgccggagtccgctgtccgccagctacccgcttcctgccgcccgccgctgccatgctgcccgccgcgctgctccgccgcccgggacttggccgcctcgtccgccacgcccgtgcctatgccgaggccgccgccgccccggctgccgcctctggccccaaccagatgtccttcaccttcgcctctcccacgcaggtgttcttcaacggtgccaacgtccggcaggtggacgtgcccacgctgaccggagccttcggcatcctggcggcccacgtgcccacgctgcaggtcctgcggccggggctggtcgtggtgcatgcagaggacggcaccacctccaaatactttgtgagcagcggttccatcgcagtgaacgccgactcttcggtgcagttgttggccgaagaggccgtgacgctggacatgttggacctgggggcagccaaggcaaacttggagaaggcccaggcggagctggtggggacagctgacgaggccacgcgggcagagatccagatccgaatcgaggccaacgaggccctggtgaaggccctggagtaggcgagccagccgccaaggttgacctcagcttcggagccacctctggatgaactgcccccagcccccgccccattaaagacccggaagcctga

SEQ ID NO: 298053 - DNA, 757 bp, Homo sapiens
  misc_feature (9)..(9): n is a, c, g, or t
ggactggcncgaggcagacgtccctgcgcgtcgtcctcctcgccctccaggccgcccgcgccgcgccggagtccgctgtccgccagctacccgcttcctgccgcccgccgctgccatgctgcccgccgcgctgctccgccgcccgggacttggccgcctcgtccgccacgcccgtgcctatgccgaggccgccgccgccccggctgccgcctctggccccaaccagatgtccttcaccttcgcctctcccacgcaggtgttcttcaacggtgccaacgtccggcaggtggacgtgcccacgctgaccggagccttcggcatcctggcggcccacgtgcccacgctgcaggtcctgcggccggggctggtcgtggtgcatgcagaggacggcaccacctccaaatactttgtgagcagcggttccatcgcagtgaacgccgactcttcggtgcagttgttggccgaagaggccgtgacgctggacatgttggacctgggggcagccaaggcaaacttggagaaggcccaggcggagctggtggggacagctgacgaggccacgcgggcagagatccagatccgaatcgaggccaacgaggccctggtgaaggccctggagtaggcgagccagccgccaaggttgacctcagcttcggagccacctctggatgaactgcccccagcccccgccccattaaagacccggaagcctgaaacaaaaacaaaaaacaacaacaaaaacaaaaaacaaaggggg

SEQ ID NO: 298054 - DNA, 1816 bp, Homo sapiens
agaaactgatgtttattttccatcaaccatttttccatgctgcttaagagcctatgcaagaacagcttaagaccagtcagtggttgctcctacccattcagtggcctgagcagtgggagctgcagaccagtcttccgtggcaggctgagcgctccagtcttcagtagggaattgctgaataggcacagagggcacctgtacaccttcagaccagtctgcaacctcaggctgagtagcagtgaactcaggagcgggagcagtccattcaccctgaaattcctccttggtcactgccttctcagcagcagcctgctcttctttttcaatctcttcaggatctctgtagaagtacagatcaggcatgacctcccatgggtgttcacgggaaatggtgccacgcatgcgcagaacttcccgagccagcatccaccacatcaaacccactgagtgagctcccttgttgttgcatgggatggcaatgtccacatagcgcagaggagaatctgtgttacacagcgcaatggtaggtaggttaacataagatgcctccgtgagaggctggtggtcagccctggggtcagtaaccacaagaagccgtggctcccggaaggctgcctggatctggttagtgaaggttccaggagtgaagcggccagcaattggagtggctccagtggcagcagcaaacttcagcacagccctctggccagtattcctggaggatataacactgacatcagcagggttttcaatggcaacaattgcacgagctgccagcagaagcttctcccaggtcctcttgagatttatgatatagatgccatcacttttccttttatagatgtactgttccatctggaagtcaagattggtgccacctaagtgggttcctgctgcaaggaacttaaggacatcctcctccttcatttgcaggacatcaagggctccggacattgtgaaaatttccctttaagttacgacgggaatccagaacaacgccgtatggacggctgccgcctctggccccaaccagatgtccttcaccttcgcctctcccacgcaggtgttcttcaacggtgccaacgtccggcaggtggacgtgcccacgctgaccggagccttcggcatcctggcggcccacgtgcccacgctgcaggtcctgcggccggggctggtcgtggtgcatgcagaggacggcaccacctccaaatactttgtgagcagcggttccatcgcagtgaacgccgactcttcggtgcagttgttggccgaagaggccgtgacgctggacatgttggacctgggggcagccaaggcaaacttggagaaggcccaggcggagctggtggggacagctgacgaggccacgcgggcagagatccagatccgaatcgaggccaacgaggccctggtgaaggccctggagtaggcggtgcgtacccggtgtcccgaggcccggccaggggctgggcagggatgccaggtgggcccagccagctcctggggtcccggccacctggggaagccgcgcctgccaaggaggccaccagagggcagtgcaggcttctgcctgggccccaggccctgcctgtgttgaaagctctggggactgggccagggaagctcctcctcagctttgagctgtggctgccacccatggggctctccttccgcctctcaagatccccccagcctgacgggccgcttaccatcccctctgccctgcaagccagccgccaaggttgacctcagcttcggagccacctctggatgaactgcccccagcccccgccccattaaagacccggaagcctga

SEQ ID NO: 298055 - DNA, 642 bp, Homo sapiens
  misc_feature (19)..(19): n is a, c, g, or t
  misc_feature (30)..(30): n is a, c, g, or t
ccgggttaaatgcgagggntctccttccgnctctcagatccccccacgtgcccacgctgcaggtcctgcggccggggctggtcgtggtgcatgcagaggacggcaccacctccaaatactttgtgagcagcggttccatcgcagtgaacgccgactcttcggtgcagttgttggccgaagaggccgtgacgctggacatgttggacctgggggcagccaaggcaaacttggagaaggcccaggcggagctggtggggacagctgacgaggccacgcgggcagagatccagatccgaatcgaggccaacgaggccctggtgaaggccctggagtaggcggtgcgtacccggtgtcccgaggcccggccaggggctgggcagggatgccaggtgggcccagccagctcctggggtcccggccacctggggaagccgcgcctgccaaggaggccaccagagggcagtgcaggcttctgcctgggccccaggccctgcctgtgttgaaagctctggggactgggccagggaagctcctcctcagctttgagctgtggagccagccgccaaggttgacctcagcttcggagccacctctggatgaactgcccccagcccccgccccattaaagacccggaagcctga

SEQ ID NO: 298056 - DNA, 1029 bp, Homo sapiens
ggacgcgtgggcggacgcgatgggtcgacccacgcgtcgcggacgcgtaggggtcctcctcgccctccaggccgcccgcgccgcgccggagtccgctgtccgccagctacccgcttcctgccgcccgccgctgccatgctgcccgccgcgctgctccgccgcccgggacttggccgcctcgtccgccacgcccgtgcctatgccgaggccgccgccgccccggctgccgcctctggccccaaccagatgtccttcaccttcgcctctcccacgcaggtgttcttcaacggtgccaacgtccggcaggtggacgtgcccacgctgaccggagccttcggcatcctggcggcccacgtgcccacgctgcaggtcctgcggccggggctggtcgtggtgcatgcagaggacggcaccacctccaaatactttgtgagcagcggttccatcgcagtgaacgccgactcttcggtgcagttgttggccgaagaggccgtgacgctggacatgttggacctgggggcagccaaggcaaacttggagaaggcccaggcggagctggtggggacagctgacgaggccacgcgggcagagatccagatccgaatcgaggccaacgaggccctggtgaaggccctggagtaggcggtgcgtacccggtgtcccgaggcccggccaggggctgggcagggatgccaggtgggcccagccagctcctggggtcccggccacctggggaagccgcgcctgccaaggaggccaccagagggcagtgcaggcttctgcctgggccccaggccctgcctgtgttgaaagctctggggactgggccagggaagctcctcctcagctttgagctgtggctgccacccatggggctctccttccgcctctcaagatccccccagcctgacgggccgcttaccatcccctctgccctgcaagccagccgccaaggttgacctcagcttcggagccacctctggatgaactgcccccagcccccgccccattaaagacccggaagcctga

SEQ ID NO: 298057 - DNA, 1516 bp, Homo sapiens
  misc_feature (9)..(9): n is a, c, g, or t
ggactggcncgaggcagacgtccctgcgcgtcgtcctcctcgccctccaggccgcccgcgccgcgccggagtccgctgtccgccagctacccgcttcctgccgcccgccgctgccatgctgcccgccgcgctgctccgccgcccgggacttggccgcctcgtccgccacgcccgtgcctatgccgaggccgccgccgccccggctgccgcctctggccccaaccagatgtccttcaccttcgcctctcccacgcaggtgttcttcaacggtgccaacgtccggcaggtggacgtgcccacgctgaccggagccttcggcatcctggcggcccacgtgcccacgctgcaggtcctgcggccggggctggtcgtggtgcatgcagaggacggcaccacctccaaatactttgtgagcagcggttccatcgcagtgaacgccgactcttcggtgcagttgttggccgaagaggccgtgacgctggacatgttggacctgggggcagccaaggcaaacttggagaaggcccaggcggagctggtggggacagctgacgaggccacgcgggcagagatccagatccgaatcgaggccaacgaggccctggtgaaggccctggagtaggcggtgcgtacccggtgtcccgaggcccggccaggggctgggcagggatgccaggtgggcccagccagctcctggggtcccggccacctggggaagccgcgcctgccaaggaggccaccagagggcagtgcaggcttctgcctgggccccaggccctgcctgtgttgaaagctctggggactgggccagggaagctcctcctcagctttgagctgtggctgccacccatggggctctccttccgcctctcaagatccccccagcctgacgggccgcttaccatcccctctgccctgcaagccagccgccaaggttgacctcagcttcggagccacctctggatgaactgcccccagcccccgccccattaaagacccggaagcctgaaaaaaaaaaaaaaaaaaaaaaacaaccacacacaaacaaacaccacaatacagccacacctcaaaaagaaacatacaagaaatacaacatcaacacaacaaacaatataagccggaaacagatacagacatctgttccacagccgcgcgcgctcagagggaaagacgaggacacggagaggagaggacacgagcggggcggggaggaacagctgtgcagcgcggcagcacacgctaagaaaagacagggccagcgcgcgccaaacaagagcgacgagaagacgcggagggagcagcggaagcaacgcggaaggtgaggaacggacaccgagacgaggcggagcaggagaagggcgagaagaagggggcgtagcgacgaggcggagacacaaccgggagcgaggagtgacgaggagggagcgagagggcgcggtcaggaggcgcggggacgcggaggcaaggacccgcagagacgacctcgccccactcccgaggaggagagcgggga

SEQ ID NO: 298058 - DNA, 779 bp, Homo sapiens
  misc_feature (9)..(9): n is a, c, g, or t
ggactggcncgaggcagacgtccctgcgcgtcgtcctcctcgccctccaggccgcccgcgccgcgccggagtccgctgtccgccagctacccgcttcctgccgcccgccgctgccatgctgcccgccgcgctgctccgccgcccgggacttggccgcctcgtccgccacgcccgtgcctatgccgaggccgccgccgccccggctgccgcctctggccccaaccagatgtccttcaccttcgcctctcccacgcaggtgttcttcaacggtgccaacgtccggcaggtggacgtgcccacgctgaccggagccttcggcatcctggcggcccacgtgcccacgctgcaggtcctgcggccggggctggtcgtggtgcatgcagaggacggcaccacctccaaatactttgtgagcagcggttccatcgcagtgaacgccgactcttcggtgcagttgttggccgaagaggccgtgacgctggacatgttggacctgggggcagccaaggcaaacttggagaaggcccaggcggagctggtggggacagctgacgaggccacgcgggcagagatccagatccgaatcgaggccaacgaggccctggtgaaggccctggagtaggcgagccagccgccaaggttgacctcagcttcggagccacctctggatgaactgcccccagcccccgccccattaaagacccggaagcctgaaaaaaaaaaaaaaaaaaaaaaaaacaaaaacaaaaaacaacaacaaaaacaaaaaacaaaggggg

SEQ ID NO: 298059 - DNA, 933 bp, Homo sapiens
  misc_feature (9)..(9): n is a, c, g, or t
ggactggcncgaggcagacgtccctgcgcgtcgtcctcctcgccctccaggccgcccgcgccgcgccggagtccgctgtccgccagctacccgcttcctgccgcccgccgctgccatgctgcccgccgcgctgctccgccgcccgggacttggccgcctcgtccgccacgcccgtgcctatgccgaggccgccgccgccccggctgccgcctctggccccaaccagatgtccttcaccttcgcctctcccacgcaggtgttcttcaacggtgccaacgtccggcaggtggacgtgcccacgctgaccggagccttcggcatcctggcggcccacgtgcccacgctgcaggtcctgcggccggggctggtcgtggtgcatgcagaggacggcaccacctccaaatactttgtgagcagcggttccatcgcagtgaacgccgactcttcggtgcagttgttggccgaagaggccgtgacgctggacatgttggacctgggggcagccaaggcaaacttggagaaggcccaggcggagctggtggggacagctgacgaggccacgcgggcagagatccagatccgaatcgaggccaacgaggccctggtgaaggccctggagtaggcgagccagccgccaaggttgacctcagcttcggagccacctctggatgaactgcccccagcccccgccccattaaagacccggaagcctgagtgataacaatacgaacaaaaaaggaaaaaaaggaaatatcaaacgtcaatatcacgggggggaccgggaaccaaatctccctatagtgagtcgcaataccattacagtacccctggtgagaccgttctcagtgtgcccactttggattcgcaaccattcaggtgcctggatttagccttgggcgtggtactgggatatcgcgtaccgcgcgagccgct

SEQ ID NO: 298060 - DNA, 953 bp, Homo sapiens
  misc_feature (9)..(9): n is a, c, g, or t
ggactggcncgaggcagacgtccctgcgcgtcgtcctcctcgccctccaggccgcccgcgccgcgccggagtccgctgtccgccagctacccgcttcctgccgcccgccgctgccatgctgcccgccgcgctgctccgccgcccgggacttggccgcctcgtccgccacgcccgtgcctatgccgaggccgccgccgccccggctgccgcctctggccccaaccagatgtccttcaccttcgcctctcccacgcaggtgttcttcaacggtgccaacgtccggcaggtggacgtgcccacgctgaccggagccttcggcatcctggcggcccacgtgcccacgctgcaggtcctgcggccggggctggtcgtggtgcatgcagaggacggcaccacctccaaatactttgtgagcagcggttccatcgcagtgaacgccgactcttcggtgcagttgttggccgaagaggccgtgacgctggacatgttggacctgggggcagccaaggcaaacttggagaaggcccaggcggagctggtggggacagctgacgaggccacgcgggcagagatccagatccgaatcgaggccaacgaggccctggtgaaggccctggagtaggcggtgcgtacccggtgtcccgaggcccggccaggggctgggcagggatgccaggaggccaccagagggcagtgcaggcttctgcctgggccccaggccctgcctgtgttgaaagctctggggactgggccagggaagctcctcctcagctttgagctgtggctgccacccatggggctctccttccgcctctcaagatccccccagcctgacgggccgcttaccatcccctctgccctgcaagccagccgccaaggttgacctcagcttcggagccacctctggatgaactgcccccagcccccgccccattaaagacccggaagcctga

SEQ ID NO: 298061 - DNA, 1146 bp, Homo sapiens
ctttggggtctcacgccttccccccgccccattcccccagtgagcagcggttccatcgcagtgaacgccgactcttcggtgcagttgttggccgaagaggccgtgacgctggacatgttggacctgggggcagccaaggcaaacttggagaaggcccaggcggagctggtggggacagctgacgaggccacgcgggcagagatccagatccgaatcgaggccaacgaggccctggtgaaggccctggagtaggcggtgcgtacccggtgtcccgaggcccggccaggggctgggcagggatgccaggtgggcccagccagctcctggggtcccggccacctggggaagccgcgcctgccaaggaggccaccagagggcagtgcaggcttctgcctgggccccaggccctgcctgtgttgaaagctctggggactgggccagggaagctcctcctcagctttgagctgtggctgccacccatggggctctccttccgcctctcaagatccccccagcctgacgggccgcttaccatcccctctgccctgcaagccagccgccaaggttgacctcagcttcggagccacctctggatgaactgcccccagcccccgccccattaaagacccggaagcctgaaaaaaaaaaaaaaaaaaaaaaacaaccacacacaaacaaacaccacaatacagccacacctcaaaaagaaacatacaagaaatacaacatcaacacaacaaacaatataagccggaaacagatacagacatctgttccacagccgcgcgcgctcagagggaaagacgaggacacggagaggagaggacacgagcggggcggggaggaacagctgtgcagcgcggcagcacacgctaagaaaagacagggccagcgcgcgccaaacaagagcgacgagaagacgcggagggagcagcggaagcaacgcggaaggtgaggaacggacaccgagacgaggcggagcaggagaagggcgagaagaagggggcgtagcgacgaggcggagacacaaccgggagcgaggagtgacgaggagggagcgagagggcgcggtcaggaggcgcggggacgcggaggcaaggacccgcagagacgacctcgccccactcccgaggaggagagcgggga

SEQ ID NO: 298062 - DNA, 1267 bp, Homo sapiens
  misc_feature (9)..(9): n is a, c, g, or t
ggactggcncgaggcagacgtccctgcgcgtcgtcctcctcgccctccaggccgcccgcgccgcgccggagtccgctgtccgccagctacccgcttcctgccgcccgccgctgccatgctgcccgccgcgctgctccgccgcccgggacttggccgcctcgtccgccacgcccgtgcctatgccgaggccgccgccgccccggctgccgcctctggccccaaccagatgtccttcaccttcgcctctcccacgcaggtgttcttcaacggtgccaacgtccggcaggtggacgtgcccacgctgaccggagccttcggcatcctggcggcccacgtgcccacgctgcaggccctggtgaaggccctggagtaggcggtgcgtacccggtgtcccgaggcccggccaggggctgggcagggatgccaggtgggcccagccagctcctggggtcccggccacctggggaagccgcgcctgccaaggaggccaccagagggcagtgcaggcttctgcctgggccccaggccctgcctgtgttgaaagctctggggactgggccagggaagctcctcctcagctttgagctgtggctgccacccatggggctctccttccgcctctcaagatccccccagcctgacgggccgcttaccatcccctctgccctgcaagccagccgccaaggttgacctcagcttcggagccacctctggatgaactgcccccagcccccgccccattaaagacccggaagcctgaaaaaaaaaaaaaaaaaaaaaaacaaccacacacaaacaaacaccacaatacagccacacctcaaaaagaaacatacaagaaatacaacatcaacacaacaaacaatataagccggaaacagatacagacatctgttccacagccgcgcgcgctcagagggaaagacgaggacacggagaggagaggacacgagcggggcggggaggaacagctgtgcagcgcggcagcacacgctaagaaaagacagggccagcgcgcgccaaacaagagcgacgagaagacgcggagggagcagcggaagcaacgcggaaggtgaggaacggacaccgagacgaggcggagcaggagaagggcgagaagaagggggcgtagcgacgaggcggagacacaaccgggagcgaggagtgacgaggagggagcgagagggcgcggtcaggaggcgcggggacgcggaggcaaggacccgcagagacgacctcgccccactcccgaggaggagagcgggga

SEQ ID NO: 298063 - DNA, 465 bp, Homo sapiens
  misc_feature (9)..(9): n is a, c, g, or t
ggactggcncgaggcagacgtccctgcgcgtcgtcctcctcgccctccaggccgcccgcgccgcgccggagtccgctgtccgccagctacccgcttcctgccgcccgccgctgccatgctgcccgccgcgctgctccgccgcccgggacttggccgcctcgtccgccacgcccgtgcctatgccgaggccgccgccgccccggctgccgcctctggccccaaccagatgtccttcaccttcgcctctcccacgcaggtgttcttcaacggtgccaacgtccggcaggtggacgtgcccacgctgaccggagccttcggcatcctggcggcccacgtgcccacgctgcaggccctggtgaaggccctggagtaggcgagccagccgccaaggttgacctcagcttcggagccacctctggatgaactgcccccagcccccgccccattaaagacccggaagcctga

SEQ ID NO: 298064 - DNA, 728 bp, Homo sapiens
cctcctcgccctccaggccgcccgcgccgcgccggagtccgctgtccgccagctacccgcttcctgccgcccgccgctgccatgctgcccgccgcgctgctccgccgcccgggacttggccgcctcgtccgccacgcccgtgcctatgccgaggccgccgccgccccggctgccgcctctggccccaaccagatgtccttcaccttcgcctctcccacgcaggttcgggcgctgcgggtcgggaccctccgtggccgccgcccccggagtccagggtccccacccccagggcgcgacccccgcttccgggcccccggacccgcgcgccccggaagccgaggctactcagccctggaccctcggccctgcctctgctgcccgagccctgcgctgccctcgtcccgggcacctccccgagataagcgtctcctgggtgccctccccgatctccctggccaaagcctgggtgtcgccggatcgttgcattcccatttcgcggatcagtagaatgaggcgcaactgttgaggaccaaagctgcaacttcggatccctgcgctgggttgtctcagtgcctcacatcagcgccaggtcctgccctgacccattacttagcaggacaggccgagtgcccggtgggcgcggggccggcctgccccgccatcattccccacgctgttgtctgcaggtgttcttcaacggtgccaacgtccggcaggtggacgtgccc

SEQ ID NO: 298065 - DNA, 2124 bp, Homo sapiens
  misc_feature (1697)..(1697): n is a, c, g, or t
cgcgtcacctgacgcacttgacagcccgctgaggacgcagcgtcagctgacctggggagtcgcgattcgtgccggccggtcctggttctccggtcccgccgctcccgcagcagccatgtcgttcttcccggagctttactttaacgtggacaatggctacttggagggactggtgcgcggcctgaaggccggggtgctcagccaggccgactacctcaacctggtgcagtgcgagacgctagaggacttgaaactgcatctgcagagcactgattatggtaacttcctggccaacgaggcatcacctctgacggtgtcagtcatcgatgaccggctcaaggagaagatggtggtggagttccgccacatgaggaaccatgcctatgagccactcgccagcttcctagacttcattacttacagttacatgatcgacaacgtgatcctgctcatcacaggcacgctgcaccagcgctccatcgctgagctcgtgcccaagtgccacccactaggcagcttcgagcagatggaggccgtgaacattgctcagacacctgctgagctctacaatgccattctggtggacacgcctcttgcggcttttttccaggactgcatttcagagcaggaccttgacgagatgaacatcgagatcatccgcaacaccctctacaaggcctacctggagtccttctacaagttctgcaccctactgggcgggactacggctgatgccatgtgccccatcctggagtttgaagcagaccgccgcgccttcatcatcaccatcaattctttcggcacagagctgtccaaagaggaccgtgccaagctctttccacactgtgggcggctctaccctgagggcctggcgcagctggctcgggctgacgactatgaacaggtcaagaacgtggccgattactacccggagtacaagctgctcttcgagggtgcaggtagcaaccctggagacaagacgctggaggaccgattctttgagcacgaggtaaagctgaacaagttggccttcctgaaccagttccactttggtgtcttctatgccttcgtgaagctcaaggagcaggagtgtcgcaacatcgtgtggatcgctgaatgtatcgcccagcgccaccgcgccaaaatcgacaactacatccctatcttctagcgtcctggcccaaggctctcaattgcactctttgtgtgtgtgtgtgtgtgtgtgcgcgtgtgtgtgcgtgtgtgtgtatgtggtctgtgacaagcctgtggctcacctgcctgtccggggtgtagtacgctgtcctagcggctgcccagttctcctgaccctcttagagactgttcttaggcctgaaaaggggctgggcacccccccccaccaaggatggacgaagaccccctccagagcaaggaggccccctcagccctgtggttacagccgctgatgtatctaagaagcatgtcactttcatgttcctccctaactccctgacctgagaaccctggggcctgggggcagtttgagcctcctctcccttctgtgggtcgctcccagagccatggcccatgggaaggacagagtgtgtgtgtccttggggcctggggggatgttgctcctcagctccctccctcagccctgcccctctgagacaataaaactgccctctctaaggccaaaaaaaaaaaaaaaaaanaaaaaaaaaataaacaaaaaaaagggggggggcgcgcataaaaatatatccccgcgggggggccaccattttgagggtgtacacccggtttttttgtgtaccaaggggccccccatagggggggcggctattaaaaaaccagaggcgcgggggccgattgtttaaaaaaaggttgtctgaagggggagaaaaaagtggtagtagcgggggacattttttgtggagagggaacccctaatttttggggtggcggtgggcacatattggtggacacattaccatgaagaagaaatttaacggtcctcggggggaaacatcaaacatttcgcagggtgtttaagcgtgtgttcaaaccaccggggaaattgtcgttgggtgtgtagaaaatttggtctacggcggagtattgattcggaaaatttttagc

SEQ ID NO: 298066 - DNA, 1703 bp, Homo sapiens
  misc_feature (1648)..(1648): n is a, c, g, or t
  misc_feature (1681)..(1681): n is a, c, g, or t
cgcgtcacctgacgcacttgacagcccgctgaggacgcagcgtcagctgacctggggagtcgcgattcgtgccggccggtcctggttctccggtcccgccgctcccgcagcagccatgtcgttcttcccggagctttactttaacgtggacaatggctacttggagggactggtgcgcggcctgaaggccggggtgctcagccaggccgactacctcaacctggtgcagtgcgagacgctagaggacttgaaactgcatctgcagagcactgattatggtaacttcctggccaacgaggcatcacctctgacggtgtcagtcatcgatgaccggctcaaggagaagatggtggtggagttccgccacatgaggaaccatgcctatgagccactcgccagcttcctagacttcattacttacagttacatgatcgacaacgtgatcctgctcatcacaggcacgctgcaccagcgctccatcgctgagctcgtgcccaagtgccacccactaggcagcttcgagcagatggaggccgtgaacattgctcagacacctgctgagctctacaatgccattctggtggacacgcctcttgcggcttttttccaggactgcatttcagagcaggaccttgacgagatgaacatcgagatcatccgcaacaccctctacaaggcctacctggagtccttctacaagttctgcaccctactgggcgggactacggctgatgccatgtgccccatcctggagtttgaagcagaccgccgcgccttcatcatcaccatcaattctttcggcacagagctgtccaaagaggaccgtgccaagctctttccacactgtgggcggctctaccctgagggcctggcgcagctggctcgggctgacgactatgaacaggtcaagaacgtggccgattactacccggagtacaagctgctcttcgagggtgcaggtagcaaccctggagacaagacgctggaggaccgattctttgagcacgaggtaaagctgaacaagttggccttcctgaaccagttccactttggtgtcttctatgccttcgtgaagctcaaggagcaggagtgtcgcaacatcgtgtggatcgctgaatgtatcgcccagcgccaccgcgccaaaatcgacaactacatccctatcttctagcgtcctggcccaaggctctcaattgcactctttgtgtgtgtgtgtgtgtgtgtgcgcgtgtgtgtgcgtgtgtgtgtatgtggtctgtgacaagcctgtggctcacctgcctgtccggggtgtagtacgctgtcctagcggctgcccagttctcctgaccctcttagagactgttcttaggcctgaaaaggggctgggcacccccccccaccaaggatggacgaagaccccctccagagcaaggaggccccctcagccctgtggttacagccgctgatgtatctaagaagcatgtcactttcatgttcctccctaactccctgacctgagaaccctggggcctgggggcagtttgagcctcctctcccttctgtgggtcgctcccagagccatggcccatgggaaggacagagtgtgtgtgtccttgggtgtgtgtgtgtatgttcgtgtacacttggctgtcaggctttctgtgcntgtactaaaaaaggagaaattataataaattancgtctttggcgccctaggccta

SEQ ID NO: 298067 - DNA, 1380 bp, Homo sapiens
  misc_feature (1367)..(1367): n is a, c, g, or t
cgcgtcacctgacgcacttgacagcccgctgaggacgcagcgtcagctgacctggggagtcgcgattcgtgccggccggtcctggttctccggtcccgccgctcccgcagcagccatgtcgttcttcccggagctttactttaacgtggacaatggctacttggagggactggtgcgcggcctgaaggccggggtgctcagccaggccgactacctcaacctggtgcagtgcgagacgctagaggacttgaaactgcatctgcagagcactgattatggtaacttcctggccaacgaggcatcacctctgacggtgtcagtcatcgatgaccggctcaaggagaagatggtggtggagttccgccacatgaggaaccatgcctatgagccactcgccagcttcctagacttcattacttacagttacatgatcgacaacgtgatcctgctcatcacaggcacgctgcaccagcgctccatcgctgagctcgtgcccaagtgccacccactaggcagcttcgagcagatggaggccgtgaacattgctcagacacctgctgagctctacaatgccattctggtggacacgcctcttgcggcttttttccaggactgcatttcagagcaggaccttgacgagatgaacatcgagatcatccgcaacaccctctacaaggcctacctggagtccttctacaagttctgcaccctactgggcgggactacggctgatgccatgtgccccatcctggagtttgaagcagaccgccgcgccttcatcatcaccatcaattctttcggcacagagctgtccaaagaggaccgtgccaagctctttccacactgtgggcggctctaccctgagggcctggcgcagctggctcgggctgacgactatgaacaggtcaagaacgtggccgattactacccggagtacaagctgctcttcgagggtgcaggtagcaaccctggagacaagacgctggaggaccgattctttgagcacgaggtaaagctgaacaagttggccttcctgaaccagttccactttggtgtcttctatgccttcgtgaagctcaaggagcaggagtgtcgcaacatcgtgtggatcgctgaatgtatcgcccagcgccaccgcgccaaaatcgacaactacatccctatcttctagcgtcctggcccaaggctctcaattgcactctttgtgtgtgtgtgtgtgtgtgtgcgcgtgtgtgtgcgtgtgtgtgtatgtggtctgtgacaagcctgtggctcacctgcctgtccggggtgtagtacgctgtcctagcggctgcccagttctcctgaccctcttagctcagtcgaacggactgggagatcactcnagagcactacaca

SEQ ID NO: 298068 - DNA, 2089 bp, Homo sapiens
  misc_feature (1662)..(1662): n is a, c, g, or t
cgcgtcacctgacgcacttgacagcccgctgaggacgcagcgtcagctgacctggggagtcgcgattcgtgccggccggtcctggttctccggtcccgccgctcccgcagcagccatgtcgttcttcccggagctttactttaacgtggacaatggctacttggagggactggtgcgcggcctgaaggccggggtgctcagccaggccgactacctcaacctggtgcagtgcgagacgctagaggacttgaaactgcatctgcagagcactgattatggtaacttcctggccaacgaggcatcacctctgacggtgtcagtcatcgatgaccggctcaaggagaagatggtggtggagttccgccacatgaggaaccatgcctatgagccactcgccagcttcctagacttcattacttacagttacatgatcgacaacgtgatcctgctcatcacaggcacgctgcaccagcgctccatcgctgagctcgtgcccaagtgccacccactaggcagcttcgagcagatggaggccgtgaacattgctcagacacctgctgagctctacaatgccattctggtggacacgcctcttgcggcttttttccaggactgcatttcagagcaggaccttgacgagatgaacatcgagatcatccgcaacaccctctacaaggcctacctggagtccttctacaagttctgcaccctactgggcgggactacggctgatgccatgtgccccatcctggagtttgaagcagaccgccgcgccttcatcatcaccatcaattctttcggcacagagctgtccaaagaggaccgtgccaagctctttccacactgtgggcggctctaccctgagggcctggcgcagctggctcgggctgacgactatgaacaggtcaagaacgtggccgattactacccggagtacaagctgctcttcgagggtgcaggtagcaaccctggagacaagacgctggaggaccgattctttgagcacgaggtaaagctgaacaagttggccttcctgaaccagttccactttggtgtcttctatgccttcgtgaagctcaaggagcaggagtgtcgcaacatcgtgtggatcgctgaatgtatcgcccagcgccaccgcgccaaaatcgacaactacatccctatcttctagcgtcctggcccaaggctctcaagtgtgtgtgcgtgtgtgtgtatgtggtctgtgacaagcctgtggctcacctgcctgtccggggtgtagtacgctgtcctagcggctgcccagttctcctgaccctcttagagactgttcttaggcctgaaaaggggctgggcacccccccccaccaaggatggacgaagaccccctccagagcaaggaggccccctcagccctgtggttacagccgctgatgtatctaagaagcatgtcactttcatgttcctccctaactccctgacctgagaaccctggggcctgggggcagtttgagcctcctctcccttctgtgggtcgctcccagagccatggcccatgggaaggacagagtgtgtgtgtccttggggcctggggggatgttgctcctcagctccctccctcagccctgcccctctgagacaataaaactgccctctctaaggccaaaaaaaaaaaaaaaaaanaaaaaaaaaataaacaaaaaaaagggggggggcgcgcataaaaatatatccccgcgggggggccaccattttgagggtgtacacccggtttttttgtgtaccaaggggccccccatagggggggcggctattaaaaaaccagaggcgcgggggccgattgtttaaaaaaaggttgtctgaagggggagaaaaaagtggtagtagcgggggacattttttgtggagagggaacccctaatttttggggtggcggtgggcacatattggtggacacattaccatgaagaagaaatttaacggtcctcggggggaaacatcaaacatttcgcagggtgtttaagcgtgtgttcaaaccaccggggaaattgtcgttgggtgtgtagaaaatttggtctacggcggagtattgattcggaaaatttttagc

SEQ ID NO: 298069 - DNA, 1977 bp, Homo sapiens
cgcgtcacctgacgcacttgacagcccgctgaggacgcagcgtcagctgacctggggagtcgcgattcgtgccggccggtcctggttctccggtcccgccgctcccgcagcagccatgtcgttcttcccggagctttactttaacgtggacaatggctacttggagggactggtgcgcggcctgaaggccggggtgctcagccaggccgactacctcaacctggtgcagtgcgagacgctagaggacttgaaactgcatctgcagagcactgattatggtaacttcctggccaacgaggcatcacctctgacggtgtcagtcatcgatgaccggctcaaggagaagatggtggtggagttccgccacatgaggaaccatgcctatgagccactcgccagcttcctagacttcattacttacagttacatgatcgacaacgtgatcctgctcatcacaggcacgctgcaccagcgctccatcgctgagctcgtgcccaagtgccacccactaggcagcttcgagcagatggaggccgtgaacattgctcagacacctgctgagctctacaatgccattctggtggacacgcctcttgcggcttttttccaggactgcatttcagagcaggaccttgacgagatgaacatcgagatcatccgcaacaccctctacaaggcctacctggagtccttctacaagttctgcaccctactgggcgggactacggctgatgccatgtgccccatcctggagtttgaagcagaccgccgcgccttcatcatcaccatcaattctttcggcacagagctgtccaaagaggaccgtgccaagctctttccacactgtgggcggctctaccctgagggcctggcgcagctggctcgggctgacgactatgaacaggtcaagaacgtggccgattactacccggagtacaagctgctcttcgagggtgcaggtagcaaccctggagacaagacgctggaggaccgattctttgagcacgaggtgagtctgcagggtctgcttgtcagagggaggccaacctggtggtttagacctgactctgtggccatggccacctggacaccacatctgcccgtgtccacaggtaaagctgaacaagttggccttcctgaaccagttccactttggtgtcttctatgccttcgtgaagctcaaggagcaggagtgtcgcaacatcgtgtggatcgctgaatgtatcgcccagcgccaccgcgccaaaatcgacaactacatccctatcttctagcgtcctggcccaaggctctcaattgcactctttgtgtgtgtgtgtgtgtgtgtgcgcgtgtgtgtgcgtgtgtgtgtatgtggtctgtgacaagcctgtggctcacctgcctgtccggggtgtagtacgctgtcctagcggctgcccagttctcctgaccctcttagagactgttcttaggcctgaaaaggggctgggcacccccccccaccaaggatggacgaagaccccctccagagcaaggaggccccctcagccctgtggttacagccgctgatgtatctaagaagcatgtcactttcatgttcctccctaactccctgacctgagaaccctggggcctgggggcagtttgagcctcctctcccttctgtgggtcgctcccagagccatggcccatgggaaggacagagtgtgtgtgtccttggggcctggggggatgttgctcctcagctccctccctcagccctgcccctctgagacaataaaactgccctctctaaggccaaaaagggcccaaaaaacagacaaaaacaaaaccccgagggagcccctacacagacacgaggttgcggaccaacgagaggaaaaagacaggggccccaggtgccccagggggaacacgggacccgaccaccgctggtcacggggtggaaagattggagactcccaaagagaggggaaaatgaaaacgccgggaacg

SEQ ID NO: 298070 - DNA, 2077 bp, Homo sapiens
cgcgtcacctgacgcacttgacagcccgctgaggacgcagcgtcagctgacctggggagtcgcgattcgtgccggccggtcctggttctccggtcccgccgctcccgcagcagccatgtcgttcttcccggagctttactttaacgtggacaatggctacttggagggactggtgcgcggcctgaaggccggggtgctcagccaggccgactacctcaacctggtgcagtgcgagacgctagaggacttgaaactgcatctgcagagcactgattatggtaacttcctggccaacgaggcatcacctctgacggtgtcagtcatcgatgaccggctcaaggagaagatggtggtggagttccgccacatgaggaaccatgcctatgagccactcgccagcttcctagacttcattacttacagttacatgatcgacaacgtgatcctgctcatcacaggcacgctgcaccagcgctccatcgctgagctcgtgcccaagtgccacccactaggcagcttcgagcagatggaggccgtgaacattgctcagacacctgctgagctctacaatgccattctggtggacacgcctcttgcggcttttttccaggactgcatttcagagcaggaccttgacgagatgaacatcgagatcatccgcaacaccctctacaaggcctacctggagtccttctacaagttctgcaccctactgggcgggactacggctgatgccatgtgccccatcctggagtttgaagcagaccgccgcgccttcatcatcaccatcaattctttcggcacagagctgtccaaagaggaccgtgccaagctctttccacactgtgggcggctctaccctgagggcctggcgcagctggctcgggctgacgactatgaacaggtcaagaacgtggccgattactacccggtgagtgccccggctggcaggacagcggttggatgtgttgtcaccaagcacccccacccagaaccctcatgcttgtgcttccccccacccccctggccaggagtacaagctgctcttcgagggtgcaggtagcaaccctggagacaagacgctggaggaccgattctttgagcacgaggtgagtctgcagggtctgcttgtcagagggaggccaacctggtggtttagacctgactctgtggccatggccacctggacaccacatctgcccgtgtccacaggtaaagctgaacaagttggccttcctgaaccagttccactttggtgtcttctatgccttcgtgaagctcaaggagcaggagtgtcgcaacatcgtgtggatcgctgaatgtatcgcccagcgccaccgcgccaaaatcgacaactacatccctatcttctagcgtcctggcccaaggctctcaattgcactctttgtgtgtgtgtgtgtgtgtgtgcgcgtgtgtgtgcgtgtgtgtgtatgtggtctgtgacaagcctgtggctcacctgcctgtccggggtgtagtacgctgtcctagcggctgcccagttctcctgaccctcttagagactgttcttaggcctgaaaaggggctgggcacccccccccaccaaggatggacgaagaccccctccagagcaaggaggccccctcagccctgtggttacagccgctgatgtatctaagaagcatgtcactttcatgttcctccctaactccctgacctgagaaccctggggcctgggggcagtttgagcctcctctcccttctgtgggtcgctcccagagccatggcccatgggaaggacagagtgtgtgtgtccttggggcctggggggatgttgctcctcagctccctccctcagccctgcccctctgagacaataaaactgccctctctaaggccaaaaagggcccaaaaaacagacaaaaacaaaaccccgagggagcccctacacagacacgaggttgcggaccaacgagaggaaaaagacaggggccccaggtgccccagggggaacacgggacccgaccaccgctggtcacggggtggaaagattggagactcccaaagagaggggaaaatgaaaacgccgggaacg

SEQ ID NO: 298071 - DNA, 1846 bp, Homo sapiens
ccctggagcacttgctggagcagagatcacaggaaggtcactctggccagcaagtagcactgttagaccagtcaagggctgaggtaatgctagggctgagggcacggggcctcacaggctgtgggggagaggcagaactccagcttcagggctacatggactgctgggtgaaggtgacagcgaaccattcaatttggaggacttcattctggtgatgacttgaaactgcatctgcagagcactgattatggtaacttcctggccaacgaggcatcacctctgacggtgtcagtcatcgatgaccggctcaaggagaagatggtggtggagttccgccacatgaggaaccatgcctatgagccactcgccagcttcctagacttcattacttacagttacatgatcgacaacgtgatcctgctcatcacaggcacgctgcaccagcgctccatcgctgagctcgtgcccaagtgccacccactaggcagcttcgagcagatggaggccgtgaacattgctcagacacctgctgagctctacaatgccattctggtggacacgcctcttgcggcttttttccaggactgcatttcagagcaggaccttgacgagatgaacatcgagatcatccgcaacaccctctacaaggcctacctggagtccttctacaagttctgcaccctactgggcgggactacggctgatgccatgtgccccatcctggagtttgaagcagaccgccgcgccttcatcatcaccatcaattctttcggcacagagctgtccaaagaggaccgtgccaagctctttccacactgtgggcggctctaccctgagggcctggcgcagctggctcgggctgacgactatgaacaggtcaagaacgtggccgattactacccggagtacaagctgctcttcgagggtgcaggtagcaaccctggagacaagacgctggaggaccgattctttgagcacgaggtaaagctgaacaagttggccttcctgaaccagttccactttggtgtcttctatgccttcgtgaagctcaaggagcaggagtgtcgcaacatcgtgtggatcgctgaatgtatcgcccagcgccaccgcgccaaaatcgacaactacatccctatcttctagcgtcctggcccaaggctctcaattgcactctttgtgtgtgtgtgtgtgtgtgtgcgcgtgtgtgtgcgtgtgtgtgtatgtggtctgtgacaagcctgtggctcacctgcctgtccggggtgtagtacgctgtcctagcggctgcccagttctcctgaccctcttagagactgttcttaggcctgaaaaggggctgggcacccccccccaccaaggatggacgaagaccccctccagagcaaggaggccccctcagccctgtggttacagccgctgatgtatctaagaagcatgtcactttcatgttcctccctaactccctgacctgagaaccctggggcctgggggcagtttgagcctcctctcccttctgtgggtcgctcccagagccatggcccatgggaaggacagagtgtgtgtgtccttggggcctggggggatgttgctcctcagctccctccctcagccctgcccctctgagacaataaaactgccctctctaaggccaaaaagggcccaaaaaacagacaaaaacaaaaccccgagggagcccctacacagacacgaggttgcggaccaacgagaggaaaaagacaggggccccaggtgccccagggggaacacgggacccgaccaccgctggtcacggggtggaaagattggagactcccaaagagaggggaaaatgaaaacgccgggaacg

SEQ ID NO: 298072 - DNA, 1689 bp, Homo sapiens
  misc_feature (26)..(26): n is a, c, g, or t
ggacgcgtgggtcgacccacgcgtcngcgtcagctgacctggggagtcgcgattcgtgccggccggtcctggttctccggtcccgccgctcccgcagcagccatgtcgttcttcccggagctttactttaacgtggacaatggctacttggagggactggtgcgcggcctgaaggccggggtgctcagccaggccgactacctcaacctggtgcagtgcgagacgctagaggttacagttacatgatcgacaacgtgatcctgctcatcacaggcacgctgcaccagcgctccatcgctgagctcgtgcccaagtgccacccactaggcagcttcgagcagatggaggccgtgaacattgctcagacacctgctgagctctacaatgccattctggtggacacgcctcttgcggcttttttccaggactgcatttcagagcaggaccttgacgagatgaacatcgagatcatccgcaacaccctctacaaggcctacctggagtccttctacaagttctgcaccctactgggcgggactacggctgatgccatgtgccccatcctggagtttgaagcagaccgccgcgccttcatcatcaccatcaattctttcggcacagagctgtccaaagaggaccgtgccaagctctttccacactgtgggcggctctaccctgagggcctggcgcagctggctcgggctgacgactatgaacaggtcaagaacgtggccgattactacccggagtacaagctgctcttcgagggtgcaggtagcaaccctggagacaagacgctggaggaccgattctttgagcacgaggtaaagctgaacaagttggccttcctgaaccagttccactttggtgtcttctatgccttcgtgaagctcaaggagcaggagtgtcgcaacatcgtgtggatcgctgaatgtatcgcccagcgccaccgcgccaaaatcgacaactacatccctatcttctagcgtcctggcccaaggctctcaattgcactctttgtgtgtgtgtgtgtgtgtgtgcgcgtgtgtgtgcgtgtgtgtgtatgtggtctgtgacaagcctgtggctcacctgcctgtccggggtgtagtacgctgtcctagcggctgcccagttctcctgaccctcttagagactgttcttaggcctgaaaaggggctgggcacccccccccaccaaggatggacgaagaccccctccagagcaaggaggccccctcagccctgtggttacagccgctgatgtatctaagaagcatgtcactttcatgttcctccctaactccctgacctgagaaccctggggcctgggggcagtttgagcctcctctcccttctgtgggtcgctcccagagccatggcccatgggaaggacagagtgtgtgtgtccttggggcctggggggatgttgctcctcagctccctccctcagccctgcccctctgagacaataaaactgccctctctaaggccaaaaagggcccaaaaaacagacaaaaacaaaaccccgagggagcccctacacagacacgaggttgcggaccaacgagaggaaaaagacaggggccccaggtgccccagggggaacacgggacccgaccaccgctggtcacggggtggaaagattggagactcccaaagagaggggaaaatgaaaacgccgggaacg

SEQ ID NO: 298073 - DNA, 1822 bp, Homo sapiens
cgcgtcacctgacgcacttgacagcccgctgaggacgcagcgtcagctgacctggggagtcgcgattcgtgccggccggtcctggttctccggtcccgccgctcccgcagcagccatgtcgttcttcccggagctttactttaacgtggacaatggctacttggagggactggtgcgcggcctgaaggccggggtgctcagccaggccgactacctcaacctggtgcagtgcgagacgctagaggacttgaaactgcatctgcagagcactgattatggtaacttcctggccaacgaggcatcacctctgacggtgtcagtcatcgatgaccggctcaaggagaagatggtggtggagttccgccacatgaggaaccatgcctatgagccactcgccagcttcctagacttcattacttacagttacatgatcgacaacgtgatcctgctcatcacaggcacgctgcaccagcgctccatcgctgagctcgtgcccaagtgccacccactaggcagcttcgagcagatggaggccgtgaacattgctcagacacctgctgagctctacaatgccattctggtggacacgcctcttgcggcttttttccaggactgcatttcagagcaggaccttgacgagatgaacatcgagatcatccgcaacaccctctacaaggcctacctggagtccttctacaagttctgcaccctactgggcgggactacggctgatgccatgtgccccatcctggagagctgtccaaagaggaccgtgccaagctctttccacactgtgggcggctctaccctgagggcctggcgcagctggctcgggctgacgactatgaacaggtcaagaacgtggccgattactacccggagtacaagctgctcttcgagggtgcaggtagcaaccctggagacaagacgctggaggaccgattctttgagcacgaggtaaagctgaacaagttggccttcctgaaccagttccactttggtgtcttctatgccttcgtgaagctcaaggagcaggagtgtcgcaacatcgtgtggatcgctgaatgtatcgcccagcgccaccgcgccaaaatcgacaactacatccctatcttctagcgtcctggcccaaggctctcaattgcactctttgtgtgtgtgtgtgtgtgtgtgcgcgtgtgtgtgcgtgtgtgtgtatgtggtctgtgacaagcctgtggctcacctgcctgtccggggtgtagtacgctgtcctagcggctgcccagttctcctgaccctcttagagactgttcttaggcctgaaaaggggctgggcacccccccccaccaaggatggacgaagaccccctccagagcaaggaggccccctcagccctgtggttacagccgctgatgtatctaagaagcatgtcactttcatgttcctccctaactccctgacctgagaaccctggggcctgggggcagtttgagcctcctctcccttctgtgggtcgctcccagagccatggcccatgggaaggacagagtgtgtgtgtccttggggcctggggggatgttgctcctcagctccctccctcagccctgcccctctgagacaataaaactgccctctctaaggccaaaaagggcccaaaaaacagacaaaaacaaaaccccgagggagcccctacacagacacgaggttgcggaccaacgagaggaaaaagacaggggccccaggtgccccagggggaacacgggacccgaccaccgctggtcacggggtggaaagattggagactcccaaagagaggggaaaatgaaaacgccgggaacg

SEQ ID NO: 298074 - DNA, 1510 bp, Homo sapiens
  misc_feature (26)..(26): n is a, c, g, or t
ggacgcgtgggtcgacccacgcgtcngcgtcagctgacctggggagtcgcgattcgtgccggccggtcctggttctccggtcccgccgctcccgcagcagccatgtcgttcttcccggagctttactttaacgtggacaatggctacttggagggactggtgcgcggcctgaaggccggggtgctcagccaggccgactacctcaacctggtgcagtgcgagacgctagaggcggcttttttccaggactgcatttcagagcaggaccttgacgagatgaacatcgagatcatccgcaacaccctctacaaggcctacctggagtccttctacaagttctgcaccctactgggcgggactacggctgatgccatgtgccccatcctggagtttgaagcagaccgccgcgccttcatcatcaccatcaattctttcggcacagagctgtccaaagaggaccgtgccaagctctttccacactgtgggcggctctaccctgagggcctggcgcagctggctcgggctgacgactatgaacaggtcaagaacgtggccgattactacccggagtacaagctgctcttcgagggtgcaggtagcaaccctggagacaagacgctggaggaccgattctttgagcacgaggtaaagctgaacaagttggccttcctgaaccagttccactttggtgtcttctatgccttcgtgaagctcaaggagcaggagtgtcgcaacatcgtgtggatcgctgaatgtatcgcccagcgccaccgcgccaaaatcgacaactacatccctatcttctagcgtcctggcccaaggctctcaattgcactctttgtgtgtgtgtgtgtgtgtgtgcgcgtgtgtgtgcgtgtgtgtgtatgtggtctgtgacaagcctgtggctcacctgcctgtccggggtgtagtacgctgtcctagcggctgcccagttctcctgaccctcttagagactgttcttaggcctgaaaaggggctgggcacccccccccaccaaggatggacgaagaccccctccagagcaaggaggccccctcagccctgtggttacagccgctgatgtatctaagaagcatgtcactttcatgttcctccctaactccctgacctgagaaccctggggcctgggggcagtttgagcctcctctcccttctgtgggtcgctcccagagccatggcccatgggaaggacagagtgtgtgtgtccttggggcctggggggatgttgctcctcagctccctccctcagccctgcccctctgagacaataaaactgccctctctaaggccaaaaagggcccaaaaaacagacaaaaacaaaaccccgagggagcccctacacagacacgaggttgcggaccaacgagaggaaaaagacaggggccccaggtgccccagggggaacacgggacccgaccaccgctggtcacggggtggaaagattggagactcccaaagagaggggaaaatgaaaacgccgggaacg

SEQ ID NO: 298075 - DNA, 1225 bp, Homo sapiens
  misc_feature (26)..(26): n is a, c, g, or t
ggacgcgtgggtcgacccacgcgtcnggcctacctggagtccttctacaagttctgcaccctactgggcgggactacggctgatgccatgtgccccatcctggagtttgaagcagaccgccgcgccttcatcatcaccatcaattctttcggcacagagctgtccaaagaggaccgtgccaagctctttccacactgtgggcggctctaccctgagggcctggcgcagctggctcgggctgacgactatgaacaggtcaagaacgtggccgattactacccggagtacaagctgctcttcgagggtgcaggtagcaaccctggagacaagacgctggaggaccgattctttgagcacgaggtaaagctgaacaagttggccttcctgaaccagttccactttggtgtcttctatgccttcgtgaagctcaaggagcaggagtgtcgcaacatcgtgtggatcgctgaatgtatcgcccagcgccaccgcgccaaaatcgacaactacatccctatcttctagcgtcctggcccaaggctctcaattgcactctttgtgtgtgtgtgtgtgtgtgtgcgcgtgtgtgtgcgtgtgtgtgtatgtggtctgtgacaagcctgtggctcacctgcctgtccggggtgtagtacgctgtcctagcggctgcccagttctcctgaccctcttagagactgttcttaggcctgaaaaggggctgggcacccccccccaccaaggatggacgaagaccccctccagagcaaggaggccccctcagccctgtggttacagccgctgatgtatctaagaagcatgtcactttcatgttcctccctaactccctgacctgagaaccctggggcctgggggcagtttgagcctcctctcccttctgtgggtcgctcccagagccatggcccatgggaaggacagagtgtgtgtgtccttggggcctggggggatgttgctcctcagctccctccctcagccctgcccctctgagacaataaaactgccctctctaaggccaaaaagggcccaaaaaacagacaaaaacaaaaccccgagggagcccctacacagacacgaggttgcggaccaacgagaggaaaaagacaggggccccaggtgccccagggggaacacgggacccgaccaccgctggtcacggggtggaaagattggagactcccaaagagaggggaaaatgaaaacgccgggaacg

SEQ ID NO: 298076 - DNA, 1148 bp, Homo sapiens
cttgcatgtaccggggtgctcgcttcggcagcacatatactaaaattggaacgatacagagaagattagcatagcccctgcgcaaggatgacacgcaaattcgtgaagcgttccatattgtgggcggctctaccctgagggcctggcgcagctggctcgggctgacgactatgaacaggtcaagaacgtggccgattactacccggagtacaagctgctcttcgagggtgcaggtagcaaccctggagacaagacgctggaggaccgattctttgagcacgaggtaaagctgaacaagttggccttcctgaaccagttccactttggtgtcttctatgccttcgtgaagctcaaggagcaggagtgtcgcaacatcgtgtggatcgctgaatgtatcgcccagcgccaccgcgccaaaatcgacaactacatccctatcttctagcgtcctggcccaaggctctcaattgcactctttgtgtgtgtgtgtgtgtgtgtgcgcgtgtgtgtgcgtgtgtgtgtatgtggtctgtgacaagcctgtggctcacctgcctgtccggggtgtagtacgctgtcctagcggctgcccagttctcctgaccctcttagagactgttcttaggcctgaaaaggggctgggcacccccccccaccaaggatggacgaagaccccctccagagcaaggaggccccctcagccctgtggttacagccgctgatgtatctaagaagcatgtcactttcatgttcctccctaactccctgacctgagaaccctggggcctgggggcagtttgagcctcctctcccttctgtgggtcgctcccagagccatggcccatgggaaggacagagtgtgtgtgtccttggggcctggggggatgttgctcctcagctccctccctcagccctgcccctctgagacaataaaactgccctctctaaggccaaaaagggcccaaaaaacagacaaaaacaaaaccccgagggagcccctacacagacacgaggttgcggaccaacgagaggaaaaagacaggggccccaggtgccccagggggaacacgggacccgaccaccgctggtcacggggtggaaagattggagactcccaaagagaggggaaaatgaaaacgccgggaacg

SEQ ID NO: 298077 - DNA, 991 bp, Homo sapiens
cgcgtcacctgacgcacttgacagcccgctgaggacgcagcgtcagctgacctggggagtcgcgattcgtgccggccggtcctggttctccggtcccgccgctcccgcagcagccatgtcgttcttcccggagctttactttaacgtggacaatggctacttggagggactggtgcgcggcctgaaggccggggtgctcagccaggccgactacctcaacctggtgcagtgcgagacgctagaggacttgaaactgcatctgcagagcactgattatggtaacttcctggccaacgaggcatcacctctgacggtgtcagtcatcgatgaccggctcaaggagaagatggtggtggagttccgccacatgaggaaccatgcctatgagccactcgccagcttcctagacttcattacttacagttacatgatcgacaacgtgatcctgctcatcacaggcacgctgcaccagcgctccatcgctgagctcgtgcccaagtgccacccactaggcagcttcgagcagatggaggccgtgaacattgctcagacacctgctgagctctacaatgccattctggtggacacgcctcttgcggcttttttccaggactgcatttcagagcaggaccttgacgagatgaacatcgagatcatccgcaacaccctctacaaggcctacctggagtccttctacaagttctgcaccctactgggcgggactacggctgatgccatgtgccccatcctggagtttgaagcagaccgccgcgccttcatcatcaccatcaattctttcggcacagagctgtccaaagaggaccgtgccaagctctttccacactgtgggcggctctaccctgagggcctggcgctgtactccgggtagtaatcggccacgttcttgacctgttcatagtcgtcagcccgagccagctgcgccaggccctcagggtagagccgcccacagtttggtccctcggcgtgtgca

SEQ ID NO: 298078 - DNA, 1756 bp, Homo sapiens
gacctcgtgatccacctgccttggcctcccaaagtgctgggattacaggcgtgagccactgcgtccagccacacctggttttcagaggctgaggaaggggaggtttggaaagatttggggaaaaggaaggcagagcagcaggggaaagtcagaggacccctgcgagcccagccttctgtgaggtgagggggtgaaggagactgtagcctgaagcagacagtcgggtgggccctgccctggcactcctgggtgggaggctgtgggcagctgccacttggctgattcacagaagtgtttcattggctttgctgtaagggctgccccggcccatccatgggtgtgcttgtacccaccttgaaaggggctagggaggggaggagggagctgtgagggcttgtgcctagcaagccctccagagcttccttgcctgtgctgagcaagctccatactctctacaggcctacctggagtccttctacaagttctgcaccctactgggcgggactacggctgatgccatgtgccccatcctggagtttgaagcagaccgccgcgccttcatcatcaccatcaattctttcggcacagagctgtccaaagaggaccgtgccaagctctttccacactgtgggcggctctaccctgagggcctggcgcagctggctcgggctgacgactatgaacaggtcaagaacgtggccgattactacccggtgagtgccccggctggcaggacagcggttggatgtgttgtcaccaagcacccccacccagaaccctcatgcttgtgcttccccccacccccctggccaggagtacaagctgctcttcgagggtgcaggtagcaaccctggagacaagacgctggaggaccgattctttgagcacgaggtaaagctgaacaagttggccttcctgaaccagttccactttggtgtcttctatgccttcgtgaagctcaaggagcaggagtgtcgcaacatcgtgtggatcgctgaatgtatcgcccagcgccaccgcgccaaaatcgacaactacatccctatcttctagcgtcctggcccaaggctctcaattgcactctttgtgtgtgtgtgtgtgtgtgtgcgcgtgtgtgtgcgtgtgtgtgtatgtggtctgtgacaagcctgtggctcacctgcctgtccggggtgtagtacgctgtcctagcggctgcccagttctcctgaccctcttagagactgttcttaggcctgaaaaggggctgggcacccccccccaccaaggatggacgaagaccccctccagagcaaggaggccccctcagccctgtggttacagccgctgatgtatctaagaagcatgtcactttcatgttcctccctaactccctgacctgagaaccctggggcctgggggcagtttgagcctcctctcccttctgtgggtcgctcccagagccatggcccatgggaaggacagagtgtgtgtgtccttggggcctggggggatgttgctcctcagctccctccctcagccctgcccctctgagacaataaaactgccctctctaaggccaaaaagggcccaaaaaacagacaaaaacaaaaccccgagggagcccctacacagacacgaggttgcggaccaacgagaggaaaaagacaggggccccaggtgccccagggggaacacgggacccgaccaccgctggtcacggggtggaaagattggagactcccaaagagaggggaaaatgaaaacgccgggaacg

SEQ ID NO: 298079 - DNA, 1035 bp, Homo sapiens
cagcatacctgagggtgctgagagtctcctcgttattgatgtcagcagggctcagggccgcaatcatggctgtgcgtgagttcccccccaaatgttccttgagcagccaggtgagcacagagtccctgtgctcagtcgaacggactgcactccgttcgactgagcacgaggtaaagctgaacaagttggccttcctgaaccagttccactttggtgtcttctatgccttcgtgaagctcaaggagcaggagtgtcgcaacatcgtgtggatcgctgaatgtatcgcccagcgccaccgcgccaaaatcgacaactacatccctatcttctagcgtcctggcccaaggctctcaattgcactctttgtgtgtgtgtgtgtgtgtgtgcgcgtgtgtgtgcgtgtgtgtgtatgtggtctgtgacaagcctgtggctcacctgcctgtccggggtgtagtacgctgtcctagcggctgcccagttctcctgaccctcttagagactgttcttaggcctgaaaaggggctgggcacccccccccaccaaggatggacgaagaccccctccagagcaaggaggccccctcagccctgtggttacagccgctgatgtatctaagaagcatgtcactttcatgttcctccctaactccctgacctgagaaccctggggcctgggggcagtttgagcctcctctcccttctgtgggtcgctcccagagccatggcccatgggaaggacagagtgtgtgtgtccttggggcctggggggatgttgctcctcagctccctccctcagccctgcccctctgagacaataaaactgccctctctaaggccaaaaagggcccaaaaaacagacaaaaacaaaaccccgagggagcccctacacagacacgaggttgcggaccaacgagaggaaaaagacaggggccccaggtgccccagggggaacacgggacccgaccaccgctggtcacggggtggaaagattggagactcccaaagagaggggaaaatgaaaacgccgggaacg

SEQ ID NO: 298080 - DNA, 438 bp, Homo sapiens
cgcgtcacctgacgcacttgacagcccgctgaggacgcagcgtcagctgacctggggagtcgcgattcgtgccggccggtcctggttctccggtcccgccgctcccgcagcagccatgtcgttcttcccggagctttactttaacgtggacaatggctacttggagggactggtgcgcggcctgaaggccggggtgctcagccaggccgactacctcaacctggtgcagtgcgagacgctagaggacttgaaactgcatctgcagagcactgattatggtaacttcctggccaacgaggcatcacctctgacggtgtcagtcatcgatgaccggctcaaggagaagatggtggtggagttccgccacatgaggaaccatgcctatgagccactcgccagcttcctagacttcattacgtgagtgtgctttgtagcgcc

SEQ ID NO: 298081 - DNA, 1874 bp, Homo sapiens
cgcgtcacctgacgcacttgacagcccgctgaggacgcagcgtcagctgacctggggagtcgcgattcgtgccggccggtcctggttctccggtcccgccgctcccgcagcagccatgtcgttcttcccggagctttactttaacgtggacaatggctacttggagggactggtgcgcggcctgaaggccggggtgctcagccaggccgactacctcaacctggtgcagtgcgagacgctagaggacttgaaactgcatctgcagagcactgattatggtaacttcctggccaacgaggcatcacctctgacggtgtcagtcatcgatgaccggctcaaggagaagatggtggtggagttccgccacatgaggaaccatgcctatgagccactcgccagcttcctagacttcattacttacagttacatgatcgacaacgtgatcctgctcatcacaggcacgctgcaccagcgctccatcgctgagctcgtgcccaagtgccacccactaggcagcttcgagcagatggaggccgtgaacattgctcagacacctgctgagctctacaatgccattctggtggacacgcctcttgcggcttttttccaggactgcatttcagagcaggaccttgacgagatgaacatcgagatcatccgcaacaccctctacaaggcctacctggagtccttctacaagttctgcaccctactgggcgggactacggctgatgccatgtgccccatcctggagtttgaagcagaccgccgcgccttcatcatcaccatcaattctttcggcacagagctgtccaaagaggaccgtgccaagctctttccacactgtgggcggctctaccctgagggcctggcgcagctggctcgggctgacgactatgaacaggtcaagaacgtggccgattactacccggagtacaagctgctcttcgagggtgcaggtagcaaccctggagacaagacgctggaggaccgattctttgagcacgaggtaaagctgaacaagttggccttcctgaaccagttccactttggtgtcttctatgccttcgtgaagctcaaggagcaggagtgtcgcaacatcgtgtggatcgctgaatgtatcgcccagcgccaccgcgccaaaatcgacaactacatccctatcttctagcgtcctggcccaaggctctcaattgcactctttgtgtgtgtgtgtgtgtgtgtgcgcgtgtgtgtgcgtgtgtgtgtatgtggtctgtgacaagcctgtggctcacctgcctgtccggggtgtagtacgctgtcctagcggctgcccagttctcctgaccctcttagagactgttcttaggcctgaaaaggggctgggcacccccccccaccaaggatggacgaagaccccctccagagcaaggaggccccctcagccctgtggttacagccgctgatgtatctaagaagcatgtcactttcatgttcctccctaactccctgacctgagaaccctggggcctgggggcagtttgagcctcctctcccttctgtgggtcgctcccagagccatggcccatgggaaggacagagtgtgtgtgtccttggggcctggggggatgttgctcctcagctccctccctcagccctgcccctctgagacaataaaactgccctctctaaggccaaaaagggcccaaaaaacagacaaaaacaaaaccccgagggagcccctacacagacacgaggttgcggaccaacgagaggaaaaagacaggggccccaggtgccccagggggaacacgggacccgaccaccgctggtcacggggtggaaagattggagactcccaaagagaggggaaaatgaaaacgccgggaacg

SEQ ID NO: 298082 - DNA, 1861 bp, Homo sapiens
  misc_feature (26)..(26): n is a, c, g, or t
ggacgcgtgggtcgacccacgcgtcngcgtcagctgacctggggagtcgcgattcgtgccggccggtcctggttctccggtcccgccgctcccgcagcagccatgtcgttcttcccggagctttactttaacgtggacaatggctacttggagggactggtgcgcggcctgaaggccggggtgctcagccaggccgactacctcaacctggtgcagtgcgagacgctagaggacttgaaactgcatctgcagagcactgattatggtaacttcctggccaacgaggcatcacctctgacggtgtcagtcatcgatgaccggctcaaggagaagatggtggtggagttccgccacatgaggaaccatgcctatgagccactcgccagcttcctagacttcattacttacagttacatgatcgacaacgtgatcctgctcatcacaggcacgctgcaccagcgctccatcgctgagctcgtgcccaagtgccacccactaggcagcttcgagcagatggaggccgtgaacattgctcagacacctgctgagctctacaatgccattctggtggacacgcctcttgcggcttttttccaggactgcatttcagagcaggaccttgacgagatgaacatcgagatcatccgcaacaccctctacaaggcctacctggagtccttctacaagttctgcaccctactgggcgggactacggctgatgccatgtgccccatcctggagtttgaagcagaccgccgcgccttcatcatcaccatcaattctttcggcacagagctgtccaaagaggaccgtgccaagctctttccacactgtgggcggctctaccctgagggcctggcgcagctggctcgggctgacgactatgaacaggtcaagaacgtggccgattactacccggagtacaagctgctcttcgagggtgcaggtagcaaccctggagacaagacgctggaggaccgattctttgagcacgaggtaaagctgaacaagttggccttcctgaaccagttccactttggtgtcttctatgccttcgtgaagctcaaggagcaggagtgtcgcaacatcgtgtggatcgctgaatgtatcgcccagcgccaccgcgccaaaatcgacaactacatccctatcttctagcgtcctggcccaaggctctcaattgcactctttgtgtgtgtgtgtgtgtgtgtgcgcgtgtgtgtgcgtgtgtgtgtatgtggtctgtgacaagcctgtggctcacctgcctgtccggggtgtagtacgctgtcctagcggctgcccagttctcctgaccctcttagagactgttcttaggcctgaaaaggggctgggcacccccccccaccaaggatggacgaagaccccctccagagcaaggaggccccctcagccctgtggttacagccgctgatgtatctaagaagcatgtcactttcatgttcctccctaactccctgacctgagaaccctggggcctgggggcagtttgagcctcctctcccttctgtgggtcgctcccagagccatggcccatgggaaggacagagtgtgtgtgtccttggggcctggggggatgttgctcctcagctccctccctcagccctgcccctctgagacaataaaactgccctctctaaggccaaaaagggcccaaaaaacagacaaaaacaaaaccccgagggagcccctacacagacacgaggttgcggaccaacgagaggaaaaagacaggggccccaggtgccccagggggaacacgggacccgaccaccgctggtcacggggtggaaagattggagactcccaaagagaggggaaaatgaaaacgccgggaacg

SEQ ID NO: 298083 - DNA, 1499 bp, Homo sapiens
gcccggcaaacattccggagcctcggcccgagccgctaacgcaggagcttgggggtacagggacttcagaggcggccaaaaaaaggggtggtggaccactccccagctggtcgccaccatgccagtctctccggcaggcagtcacaagcagcagaacttcgggttgaacaatgccacacaaccaaagaagtctattagcttttttgctacaatgaaagcaacttcagtgaaaggatatactggtgcaaatcaaagcagaatggctgtgtccaaaaccgtgcttattccacctgaactgaaaactgtagaaaaaccaaatcccaatataaagacaacacaggtatttgacataaatggaactgatgttactccccgacctctttaccatccagatccacttactggtacagcaaaaccaagtaaactcttgacatcacaagaaggatcacttggatcagaatttatatcttcctatagcctttatcagaatacaataaatcctagtacgttagggcagtttacaaggtcagttttaggaagcagtacagtttctaagtcaagtgtatcagcaagtgaatcaatagcagaagacctggaagaaccatcctataaacgggaaagattgactagtttcacagatttgcaagttataagggcagcacctgaaaaaattgtaacaaaagaagacctggagaagaatatagagataatactcacagagacagaaacactgagattttttgacttgcccacagtcatggtctctgtagaatctgaagaagctgagaaagtaactcagagaaacaagaattatgaagtcctttgtagaaacagattaggcaatgacctatatgttgaaaggatgatgcagactttcaatggagcaccaaagaataaagatgttcaatgtgataaaatcataatggaagataaaggtaatttctatcattctgcttgataaactataatgttctaatatacattttttgagtctgtcaatcgacaagtgaatattgaaatgtataaagcaaaaataaaaataatttggccaaccacaacagtagttggacactgtgttctatagctttcagaatttgacatgttaagtaataaatatatagatttgaataacataattattcatcttggtttttatgcatactatatcatagaactttatactctttaaacgtttatataaactgattatttactatgtcacaaagaatatcagccataactattaacattttaaatgtgtcagacactatgtccttcacatgtattaactggtttaatttttacagcaaccctatgaggtagatactattatgcttccccattttatagatgaggaaacaggcaaagagaagtttgctaactgttctggttctagagcttgtgcacttaactactatacttaccacctctcactgtgtacaaattaacaaccctgagcacattgcatagccaaaatctgtagggtgtagccaaagaag

SEQ ID NO: 298084 - DNA, 619 bp, Homo sapiens
agggaaaagagaaaaaaataagataggagacctggaattatggatggagaagagtccctgagacaccagtgacaagtttcagagttcacataaaaggaacaatgccacacaaccaaagaagtctattagcttttttgctacaatgaaagcaacttcagtgaaaggatatactggtgcaaatcaaagcagaatggctgtgtccaaaaccgtgcttattccacctgaactgaaaactgtagaaaaaccaaatcccaatataaagacaacacaggtaatattcttagaattctgagtttatttgaaaatggcactgtgaaaaactcaattgaaatgttaaagatagaaaatatgctgctttcagataatcactcataattttgaaatactgattttgttaatttttaccacatattattccatacaacataatattgacacttggctcctataactagttattgataagaagaatattagagtggaatgagaaaagtctattcatgaccttaagaactatttgcttatggtattaattatatacattacaactatctttcactgttgtcagcaatatagtcttgaaaatacaataaaattatttgtcataaagtcagttatt

SEQ ID NO: 298085 - DNA, 3692 bp, Homo sapiens
gcccggcaaacattccggagcctcggcccgagccgctaacgcaggagcttgggggtacagggacttcagaggcggccaaaaaaaggggtggtggaccactccccagctggtcgccaccatgccagtctctccggcaggcagtcacaagcagcagaacttcgggttgaacaatgccacacaaccaaagaagtctattagcttttttgctacaatgaaagcaacttcagtgaaaggatatactggtgcaaatcaaagcagaatggctgtgtccaaaaccgtgcttattccacctgaactgaaaactgtagaaaaaccaaatcccaatataaagacaacacaggtatttgacataaatggaactgatgttactccccgacctctttaccatccagatccacttactggtacagcaaaaccaagtaaactcttgacatcacaagaaggatcacttggatcagaatttatatcttcctatagcctttatcagaatacaataaatcctagtacgttagggcagtttacaaggtcagttttaggaagcagtacagtttctaagtcaagtgtatcagcaagtgaatcaatagcagaagacctggaagaaccatcctataaacgggaaagattgactagtttcacagatttgcaagttataagggcagcacctgaaaaaattgtaacaaaagaagacctggagaagaatatagagataatactcacagagacagaaacactgagattttttgacttgcccacagtcatggtctctgtagaatctgaagaagctgagaaagtaactcagagaaacaagaattatgaagtcctttgtagaaacagattaggcaatgacctatatgttgaaaggatgatgcagactttcaatggagcaccaaagaataaagatgttcaatgtgataaaatcataatggaagataaaggcataatgtccactgcctgggatttgtatgattcttacaatgctatggaacttgtatctttatcagtaaaacaatctgtggttgagtcaagtagtaaagcaaatgtacttcctaaagatcaggaccaaagattgccagggagcactacagaaaaaaatagtgaaactagttctctaatggacatagaaaatgtaattctggcaaaaatccatgaagatgaggaagaccactcagatgcaatattaaaatctgacaaatttcatcaggacttattttttatggaacgggttctgatggaaaatatatttcagcccaaacttgcagcttatcgtcagcttcctgttttaaaagaacctgaacctgaagagcctgaagatgttttagaaagtgcaaaacatgaagaggtagaggaagaatctaagaaggaggaggaagaagaaatacatgcagaagaatcaacaatacccgccaacttggaacgactttggtctttttcctgtgacttaaccaaaggcctcaatgtgagcagccttgcctggaataaaacaaatccagatcttttggctgttggctatgggcactttggatttaaagagcaaaaaagaggactggcttgctgctggtcaataaagaatcccatgtggccagaacgtatttatcagagtccatatggagttactgctgtggatttttcaattggagcacctaaccttttagccgttggctatcacaatggcacaattgcaatttacaatgtacggagcaacagtaatgttccagttctggatagtagtgaatcacctcaaaaacatttgggacctgtatggcaactacagtggatagaacaagatcgaggaacaacaggagatggcaaaagagaaatactagtttctatatcagcagatggaagaatctccaaatgggttatacgaaaaggactagactgttatgatttgatgcgattaaagagaactacagctgccagtaacaaaaaaggaggggaaaaggaaaagaaagatgaagctttgatatctcgacaggctcctggaatgtgttttgcttttcatcccaagggtccagtgtataaagtgacatggaatccattttgtcatgatgtatttttaagctgttctgcagattggggtgttattatatggcaacaggagaatgtcaagccatctttgagtttttatccagctacttctgttgtttacgacgttgcctggtctccaaaatcatcctatatatttgcagctgcaaatgagaacagggtggagatttgggaccttcatatcagcactttggaccctctgattgtgaatactgctaaccctggaatcaagttcacaaccattctctttgccaaacaaacagattgccttctggtaggagacagtgatggacaggtttctgtgtatgaactgagaaatatgcctactgttttggaaactggccggggagatataatggatactttgcttggatccaagtcaaaccaatcagcataattcatcattcctaatatttttcttgtagttgttttaaaaaaggaattaacatccaatattctgtattacatactgtacaccagattttgatttcagaaaacaatatttgatgtataacttccacttaatttaaatttaataaacttttatttcagagatatttgattagtttacaatctaagagttattcttaagagtttcagtggaattttcttaatttttctaaagatattcctactctcttgatcatattctaagtacatatgagtacatgtacattcttatacaatgtctaaatgggttagaaaattattatacctatagaagcgaaacttggaaattaatagaatcacttaaaccaaaatctttataagacacaattctattgattttaaagcttctgctttccaggctctgttttccagagtttataattacgtagtttttagtagatgaaaataatggattcttgtacctaacattttatcctcttagatctaagagccgaagctatagaactttgttagactatttggcaagcaaaatatatgacagtaaatatcagaattttatggtttgaccagcgcttatcacattcccaattcagtgagaaaaattcatctgggacacaacagggtactcttctctgtttgcccagaatcagctctggattttaagcccagacttcagtggacccagatagaaaatataaagtctctgatctataggccacatcaggatgttattttatgaagagttctagagcaaggttgcggaaatcggggtggagatggggagcagtgactcctccaaatattcattgctaacaggccattctatgcagtttgttttaacaaatcctgggttaaactgaggccacaggacatgatgggctgttctataaagcattctaagtggagaggagacgatagggcatatgaaattcactaaactctctggaaaaaaaatatgtatatattaaaaaccaagactggaatcagtgcaacagtgggaactaccttttacaagtatccattgcttcataaactccatttgtttggaccaatcccttaaacaaaagcaaggcaaattttacatggatttagagcctaggtcaggttattaggattataaattttccactggtatgtcattgtgattatctttgtttttgtctttctgaaagattggattttctataacaccttgtgtaagaaaataaaaaacttgatctaactgaaaaatgtgt

SEQ ID NO: 298086 - DNA, 3588 bp, Homo sapiens
gcccggcaaacattccggagcctcggcccgagccgctaacgcaggagcttgggggtacagggacttcagaggcggccaaaaaaaggggtggtggaccactccccagctggtcgccaccatgccagtctctccggcaggcagtcacaagcagcagaacttcgggttgaacaatgccacacaaccaaagaagtctattagcttttttgctacaatgaaagcaacttcagtgaaaggatatactggtgcaaatcaaagcagaatggctgtgtccaaaaccgtgcttattccacctgaactgaaaactgtagaaaaaccaaatcccaatataaagacaacacaggtatttgacataaatggaactgatgttactccccgacctctttaccatccagatccacttactggtacagcaaaaccaagtaaactcttgacatcacaagaaggatcacttggatcagaatttatatcttcctatagcctttatcagaatacaataaatcctagtacgttagggcagtttacaaggtcagttttaggaagcagtacagtttctaagtcaagtgtatcagcaagtgaatcaatagcagaagacctggaagaaccatcctataaacgggaaagattgactagtttcacagatttgcaagttataagggcagcacctgaaaaaattgtaacaaaagaagacctggagaagaatatagagataatactcacagagacagaaacactgagattttttgacttgcccacagtcatggtctctgtagaatctgaagaagctgagaaagtaactcagagaaacaagaattatgaagtcctttgtagaaacagattaggcaatgacctatatgttgaaaggatgatgcagactttcaatggagcaccaaagaataaagatgttcaatgtgataaaatcataatggaagataaaggcataatgtccactgcctgggatttgtatgattcttacaatgctatggaacttgtatctttatcagtaaaacaatctgtggttgagtcaagtagtaaagcaaatgtacttcctaaagatcaggaccaaagattgccagggagcactacagaaaaaaaacctgaacctgaagagcctgaagatgttttagaaagtgcaaaacatgaagaggtagaggaagaatctaagaaggaggaggaagaagaaatacatgcagaagaatcaacaatacccgccaacttggaacgactttggtctttttcctgtgacttaaccaaaggcctcaatgtgagcagccttgcctggaataaaacaaatccagatcttttggctgttggctatgggcactttggatttaaagagcaaaaaagaggactggcttgctgctggtcaataaagaatcccatgtggccagaacgtatttatcagagtccatatggagttactgctgtggatttttcaattggagcacctaaccttttagccgttggctatcacaatggcacaattgcaatttacaatgtacggagcaacagtaatgttccagttctggatagtagtgaatcacctcaaaaacatttgggacctgtatggcaactacagtggatagaacaagatcgaggaacaacaggagatggcaaaagagaaatactagtttctatatcagcagatggaagaatctccaaatgggttatacgaaaaggactagactgttatgatttgatgcgattaaagagaactacagctgccagtaacaaaaaaggaggggaaaaggaaaagaaagatgaagctttgatatctcgacaggctcctggaatgtgttttgcttttcatcccaaggacacaaatatctatttggctggcactgaagaaggtcatattcacaaatgttcttgttcatataatgaacaatacttagatacctacagagggtccagtgtataaagtgacatggaatccattttgtcatgatgtatttttaagctgttctgcagattggggtgttattatatggcaacaggagaatgtcaagccatctttgagtttttatccagctacttctgttgtttacgacgttgcctggtctccaaaatcatcctatatatttgcagctgcaaatgagaacagggtggagatttgggaccttcatatcagcactttggaccctctgattgtgaatactgctaaccctggaatcaagttcacaaccattctctttgccaaacaaacagattgccttctggtaggagacagtgatggacaggtttctgtgtatgaactgagaaatatgcctactgttttggaaactggccggggagatataatggatactttgcttggatccaagtcaaaccaatcagcataattcatcattcctaatatttttcttgtagttgttttaaaaaaggaattaacatccaatattctgtattacatactgtacaccagattttgatttcagaaaacaatatttgatgtataacttccacttaatttaaatttaataaacttttatttcagagatatttgattagtttacaatctaagagttattcttaagagtttcagtggaattttcttaatttttctaaagatattcctactctcttgatcatattctaagtacatatgagtacatgtacattcttatacaatgtctaaatgggttagaaaattattatacctatagaagcgaaacttggaaattaatagaatcacttaaaccaaaatctttataagacacaattctattgattttaaagcttctgctttccaggctctgttttccagagtttataattacgtagtttttagtagatgaaaataatggattcttgtacctaacattttatcctcttagatctaagagccgaagctatagaactttgttagactatttggcaagcaaaatatatgacagtaaatatcagaattttatggtttgaccagcgcttatcacattcccaattcagtgagaaaaattcatctgggacacaacagggtactcttctctgtttgcccagaatcagctctggattttaagcccagacttcagtggacccagatagaaaatataaagtctctgatctataggccacatcaggatgttattttatgaagagttctagagcaaggttgcggaaatcggggtggagatggggagcagtgactcctccaaatattcattgctaacaggccattctatgcagtttgttttaacaaatcctgggttaaactgaggccacaggacatgatgggctgttctataaagcattctaagtggagaggagacgatagggcatatgaaattcactaaactctctggaaaaaaaatatgtatatattaaaaaccaagactggaatcagtgcaacagtgggaactaccttttacaagtatccattgcttcataaactccatttgtttggaccaatcccttaaacaaaagcaaggcaaattttacatggatttagagcctaggtcaggttattaggattataaattttccactggtatgtcattgtgattatctttgtttttgtctttctgaaagattggattttctataacaccttgtgtaagaaaataaaaaacttgatctaactgaaaaatgtgt

SEQ ID NO: 298087 - DNA, 2901 bp, Homo sapiens
gttgtaatctcctacctcttttgtggtccgcgaacgcgccaacatcattttcagcataatgtccactgcctgggatttgtatgattcttacaatgctatggaacttgtatctttatcagtaaaacaatctgtggttgagtcaagtagtaaagcaaatgtacttcctaaagatcaggaccaaagattgccagggagcactacagaaaaaaatagtgaaactagttctctaatggacatagaaaatgtaattctggcaaaaatccatgaagatgaggaagaccactcagatgcaatattaaaatctgacaaatttcatcaggacttattttttatggaacgggttctgatggaaaatatatttcagcccaaacttgcagcttatcgtcagcttcctgttttaaaagaacctgaacctgaagagcctgaagatgttttagaaagtgcaaaacatgaagaggtagaggaagaatctaagaaggaggaggaagaagaaatacatgcagaagaatcaacaatacccgccaacttggaacgactttggtctttttcctgtgacttaaccaaaggcctcaatgtgagcagccttgcctggaataaaacaaatccagatcttttggctgttggctatgggcactttggatttaaagagcaaaaaagaggactggcttgctgctggtcaataaagaatcccatgtggccagaacgtatttatcagagtccatatggagttactgctgtggatttttcaattggagcacctaaccttttagccgttggctatcacaatggcacaattgcaatttacaatgtacggagcaacagtaatgttccagttctggatagtagtgaatcacctcaaaaacatttgggacctgtatggcaactacagtggatagaacaagatcgaggaacaacaggagatggcaaaagagaaatactagtttctatatcagcagatggaagaatctccaaatgggttatacgaaaaggactagactgttatgatttgatgcgattaaagagaactacagctgccagtaacaaaaaaggaggggaaaaggaaaagaaagatgaagctttgatatctcgacaggctcctggaatgtgttttgcttttcatcccaaggacacaaatatctatttggctggcactgaagaaggtcatattcacaaatgttcttgttcatataatgaacaatacttagatacctacagagggtccagtgtataaagtgacatggaatccattttgtcatgatgtatttttaagctgttctgcagattggggtgttattatatggcaacaggagaatgtcaagccatctttgagtttttatccagctacttctgttgtttacgacgttgcctggtctccaaaatcatcctatatatttgcagctgcaaatgagaacagggtggagatttgggaccttcatatcagcactttggaccctctgattgtgaatactgctaaccctggaatcaagttcacaaccattctctttgccaaacaaacagattgccttctggtaggagacagtgatggacaggtttctgtgtatgaactgagaaatatgcctactgttttggaaactggccggggagatataatggatactttgcttggatccaagtcaaaccaatcagcataattcatcattcctaatatttttcttgtagttgttttaaaaaaggaattaacatccaatattctgtattacatactgtacaccagattttgatttcagaaaacaatatttgatgtataacttccacttaatttaaatttaataaacttttatttcagagatatttgattagtttacaatctaagagttattcttaagagtttcagtggaattttcttaatttttctaaagatattcctactctcttgatcatattctaagtacatatgagtacatgtacattcttatacaatgtctaaatgggttagaaaattattatacctatagaagcgaaacttggaaattaatagaatcacttaaaccaaaatctttataagacacaattctattgattttaaagcttctgctttccaggctctgttttccagagtttataattacgtagtttttagtagatgaaaataatggattcttgtacctaacattttatcctcttagatctaagagccgaagctatagaactttgttagactatttggcaagcaaaatatatgacagtaaatatcagaattttatggtttgaccagcgcttatcacattcccaattcagtgagaaaaattcatctgggacacaacagggtactcttctctgtttgcccagaatcagctctggattttaagcccagacttcagtggacccagatagaaaatataaagtctctgatctataggccacatcaggatgttattttatgaagagttctagagcaaggttgcggaaatcggggtggagatggggagcagtgactcctccaaatattcattgctaacaggccattctatgcagtttgttttaacaaatcctgggttaaactgaggccacaggacatgatgggctgttctataaagcattctaagtggagaggagacgatagggcatatgaaattcactaaactctctggaaaaaaaatatgtatatattaaaaaccaagactggaatcagtgcaacagtgggaactaccttttacaagtatccattgcttcataaactccatttgtttggaccaatcccttaaacaaaagcaaggcaaattttacatggatttagagcctaggtcaggttattaggattataaattttccactggtatgtcattgtgattatctttgtttttgtctttctgaaagattggattttctataacaccttgtgtaagaaaataaaaaacttgatctaactgaaaaatgtgt

SEQ ID NO: 298088 - DNA, 1737 bp, Homo sapiens
cgtacgtcgatggggagacgtgtatcgcaatacaaaaaagccacgactttaagggtccagtgtataaagtgacatggaatccattttgtcatgatgtatttttaagctgttctgcagattggggtgttattatatggcaacaggagaatgtcaagccatctttgagtttttatccagctacttctgttgtttacgacgttgcctggtctccaaaatcatcctatatatttgcagctgcaaatgagaacagggtggagatttgggaccttcatatcagcactttggaccctctgattgtgaatactgctaaccctggaatcaagttcacaaccattctctttgccaaacaaacagattgccttctggtaggagacagtgatggacaggtttctgtgtatgaactgagaaatatgcctactgttttggaaactggccggggagatataatggatactttgcttggatccaagtcaaaccaatcagcataattcatcattcctaatatttttcttgtagttgttttaaaaaaggaattaacatccaatattctgtattacatactgtacaccagattttgatttcagaaaacaatatttgatgtataacttccacttaatttaaatttaataaacttttatttcagagatatttgattagtttacaatctaagagttattcttaagagtttcagtggaattttcttaatttttctaaagatattcctactctcttgatcatattctaagtacatatgagtacatgtacattcttatacaatgtctaaatgggttagaaaattattatacctatagaagcgaaacttggaaattaatagaatcacttaaaccaaaatctttataagacacaattctattgattttaaagcttctgctttccaggctctgttttccagagtttataattacgtagtttttagtagatgaaaataatggattcttgtacctaacattttatcctcttagatctaagagccgaagctatagaactttgttagactatttggcaagcaaaatatatgacagtaaatatcagaattttatggtttgaccagcgcttatcacattcccaattcagtgagaaaaattcatctgggacacaacagggtactcttctctgtttgcccagaatcagctctggattttaagcccagacttcagtggacccagatagaaaatataaagtctctgatctataggccacatcaggatgttattttatgaagagttctagagcaaggttgcggaaatcggggtggagatggggagcagtgactcctccaaatattcattgctaacaggccattctatgcagtttgttttaacaaatcctgggttaaactgaggccacaggacatgatgggctgttctataaagcattctaagtggagaggagacgatagggcatatgaaattcactaaactctctggaaaaaaaatatgtatatattaaaaaccaagactggaatcagtgcaacagtgggaactaccttttacaagtatccattgcttcataaactccatttgtttggaccaatcccttaaacaaaagcaaggcaaattttacatggatttagagcctaggtcaggttattaggattataaattttccactggtatgtcattgtgattatctttgtttttgtctttctgaaagattggattttctataacaccttgtgtaagaaaataaaaaacttgatctaactgaaaaatgtgt

SEQ ID NO: 298089 - DNA, 1935 bp, Homo sapiens
attggtatattcaagatagtgtttttattttgggttcttgaattgattttaatagatccagaaatatctaatcttctatttatcacacttactaatgtatcacaagccaatgcatttcgatgttttgtgttgtaggacacaaatatctatttggctggcactgaagaaggtcatattcacaaatgttcttgttcatataatgaacaatacttagatacctacagagctatgtattttttttttatttctagggtccagtgtataaagtgacatggaatccattttgtcatgatgtatttttaagctgttctgcagattggggtgttattatatggcaacaggagaatgtcaagccatctttgagtttttatccagctacttctgttgtttacgacgttgcctggtctccaaaatcatcctatatatttgcagctgcaaatgagaacagggtggagatttgggaccttcatatcagcactttggaccctctgattgtgaatactgctaaccctggaatcaagttcacaaccattctctttgccaaacaaacagattgccttctggtaggagacagtgatggacaggtttctgtgtatgaactgagaaatatgcctactgttttggaaactggccggggagatataatggatactttgcttggatccaagtcaaaccaatcagcataattcatcattcctaatatttttcttgtagttgttttaaaaaaggaattaacatccaatattctgtattacatactgtacaccagattttgatttcagaaaacaatatttgatgtataacttccacttaatttaaatttaataaacttttatttcagagatatttgattagtttacaatctaagagttattcttaagagtttcagtggaattttcttaatttttctaaagatattcctactctcttgatcatattctaagtacatatgagtacatgtacattcttatacaatgtctaaatgggttagaaaattattatacctatagaagcgaaacttggaaattaatagaatcacttaaaccaaaatctttataagacacaattctattgattttaaagcttctgctttccaggctctgttttccagagtttataattacgtagtttttagtagatgaaaataatggattcttgtacctaacattttatcctcttagatctaagagccgaagctatagaactttgttagactatttggcaagcaaaatatatgacagtaaatatcagaattttatggtttgaccagcgcttatcacattcccaattcagtgagaaaaattcatctgggacacaacagggtactcttctctgtttgcccagaatcagctctggattttaagcccagacttcagtggacccagatagaaaatataaagtctctgatctataggccacatcaggatgttattttatgaagagttctagagcaaggttgcggaaatcggggtggagatggggagcagtgactcctccaaatattcattgctaacaggccattctatgcagtttgttttaacaaatcctgggttaaactgaggccacaggacatgatgggctgttctataaagcattctaagtggagaggagacgatagggcatatgaaattcactaaactctctggaaaaaaaatatgtatatattaaaaaccaagactggaatcagtgcaacagtgggaactaccttttacaagtatccattgcttcataaactccatttgtttggaccaatcccttaaacaaaagcaaggcaaattttacatggatttagagcctaggtcaggttattaggattataaattttccactggtatgtcattgtgattatctttgtttttgtctttctgaaagattggattttctataacaccttgtgtaagaaaataaaaaacttgatctaactgaaaaatgtgt

SEQ ID NO: 298090 - DNA, 2498 bp, Homo sapiens
gcccggcaaacattccggagcctcggcccgagccgctaacgcaggagcttgggggtacagggacttcagaggcggccaaaaaaaggggtggtggaccactccccagctggtcgccaccatgccagtctctccggcaggcagtcacaagcagcagaacttcgggttgaacaatgccacacaaccaaagaagtctattagcttttttgctacaatgaaagcaacttcagtgaaaggatatactggtgcaaatcaaagcagaatggctgtgtccaaaaccgtgcttattccacctgaactgaaaactgtagaaaaaccaaatcccaatataaagacaacacaggtatttgacataaatggaactgatgttactccccgacctctttaccatccagatccacttactggtacagcaaaaccaagtaaactcttgacatcacaagaaggatcacttggatcagaatttatatcttcctatagcctttatcagaatacaataaatcctagtacgttagggcagtttacaaggtcagttttaggaagcagtacagtttctaagtcaagtgtatcagcaagtgaatcaatagcagaagacctggaagaaccatcctataaacgggaaagattgactagtttcacagatttgcaagttataagggcagcacctgaaaaaattgtaacaaaagaagacctggagaagaatatagagataatactcacagagacagaaacactgagattttttgacttgcccacagtcatggtctctgtagaatctgaagaagctgagaaagtaactcagagaaacaagaattatgaagtcctttgtagaaacagattaggcaatgacctatatgttgaaaggatgatgcagactttcaatggagcaccaaagaataaagatgttcaatgtgataaaatcataatggaagataaaggcataatgtccactgcctgggatttgtatgattcttacaatgctatggaacttgtatctttatcagtaaaacaatctgtggttgagtcaagtagtaaagcaaatgtacttcctaaagatcaggaccaaagattgccagggagcactacagaaaaaaaacctgaacctgaagagcctgaagatgttttagaaagtgcaaaacatgaagaggtagaggaagaatctaagaaggaggaggaagaagaaatacatgcagaagaatcaacaatacccgccaacttggaacgactttggtctttttcctgtgacttaaccaaaggcctcaatgtgagcagccttgcctggaataaaacaaatccagatcttttggctgttggctatgggcactttggatttaaagagcaaaaaagaggactggcttgctgctggtcaataaagaatcccatgtggccagaacgtatttatcagagtccatatggagttactgctgtggatttttcaattggagcacctaaccttttagccgttggctatcacaatggcacaattgcaatttacaatgtacggagcaacagtaatgttccagttctggatagtagtgaatcacctcaaaaacatttgggacctgtatggcaactacagtggatagaacaagatcgaggaacaacaggagatggcaaaagagaaatactagtttctatatcagcagatggaagaatctccaaatgggttatacgaaaaggactagactgttatgatttgatgcgattaaagagaactacagctgccagtaacaaaaaaggaggggaaaaggaaaagaaagatgaagctttgatatctcgacaggctcctggaatgtgttttgcttttcatcccaaggacacaaatatctatttggctggcactgaagaaggtcatattcacaaatgttcttgttcatataatgaacaatacttagatacctacagagggtccagtgtataaagtgacatggaatccattttgtcatgatgtatttttaagctgttctgcagattggggtgttattatatggcaacaggagaatgtcaagccatctttgagtttttatccagctacttctgttgtttacgacgttgcctggtctccaaaatcatcctatatatttgcagctgcaaatgagaacagggtggagatttgggaccttcatatcagcactttggaccctctgattgtgaatactgctaaccctggaatcaagttcacaaccattctctttgccaaacaaacagattgccttctggtaggagacagtgatggacaggtttctgtgtatgaactgagaaatatgcctactgttttggaaactggccggggagatataatggatactttgcttggatccaagtcaaaccaatcagcataattcatcattcctaatatttttcttgtagttgttttaaaaaaggaattaacatccaatattctgtattacatactgtacaccagattttgatttcagaaaacaatatttgatgtataacttccacttaatttaaatttaataaacttttatttcagagat

SEQ ID NO: 298091 - DNA, 1684 bp, Homo sapiens
gcccggcaaacattccggagcctcggcccgagccgctaacgcaggagcttgggggtacagggacttcagaggcggccaaaaaaaggggtggtggaccactccccagctggtcgccaccatgccagtctctccggcaggcagtcacaagcagcagaacttcgggttgaacaatgccacacaaccaaagaagtctattagcttttttgctacaatgaaagcaacttcagtgaaaggatatactggtgcaaatcaaagcagaatggctgtgtccaaaaccgtgcttattccacctgaactgaaaactgtagaaaaaccaaatcccaatataaagacaacacaggtatttgacataaatggaactgatgttactccccgacctctttaccatccagatccacttactggtacagcaaaaccaagtaaactcttgacatcacaagaaggatcacttggatcagaatttatatcttcctatagcctttatcagaatacaataaatcctagtacgttagggcagtttacaaggtcagttttaggaagcagtacagtttctaagtcaagtgtatcagcaagtgaatcaatagcagaagacctggaagaaccatcctataaacgggaaagattgactagtttcacagatttgcaagttataagggcagcacctgaaaaaattgtaacaaaagaagacctggagaagaatatagagataatactcacagagacagaaacactgagattttttgacttgcccacagtcatggtctctgtagaatctgaagaagctgagaaagtaactcagagaaacaagaattatgaagtcctttgtagaaacagattaggcaatgacctatatgttgaaaggatgatgcagactttcaatggagcaccaaagaataaagatgttcaatgtgataaaatcataatggaagataaaggcataatgtccactgcctgggatttgtatgattcttacaatgctatggaacttgtatctttatcagtaaaacaatctgtggttgagtcaagtagtaaagcaaatgtacttcctaaagatcaggaccaaagattgccagggagcactacagaaaaaaatagtgaaactagttctctaatggacatagaaaatgtaattctggcaaaaatccatgaagatgaggaagaccactcagatgcaatattaaaatctgacaaatttcatcaggacttattttttatggaacgggttctgatggaaaatatatttcagcccaaacttgcagcttatcgtcagcttcctgttttaaaagaacctgaacctgaagagcctgaagatgttttagaaagtgcaaaacatgaagaggtagaggaagaatctaagaaggaggaggaagaagaaatacatgcagaagaatcaacaatacccgccaacttggaacgactttggtctttttcctgtgacttaaccaaaggcctcaatgtgagcagccttgcctggaataaaacaaatccagatcttttggctgttggctatgggcactttggatttaaagagcaaaaaagaggactggcttgctgctggtcaataaagaatcccatggtaacccaaacaagaataagaagcatttttatctggctgttgacaaaattctcataaaatatataattacatgtaataattaaataaagtctagaaaattttatcaat

SEQ ID NO: 298092 - DNA, 1489 bp, Homo sapiens
gcccggcaaacattccggagcctcggcccgagccgctaacgcaggagcttgggggtacagggacttcagaggcggccaaaaaaaggggtggtggaccactccccagctggtcgccaccatgccagtctctccggcaggcagtcacaagcagcagaacttcgggttgaacaatgccacacaaccaaagaagtctattagcttttttgctacaatgaaagcaacttcagtgaaaggatatactggtgcaaatcaaagcagaatggctgtgtccaaaaccgtgcttattccacctgaactgaaaactgtagaaaaaccaaatcccaatataaagacaacacaggtatttgacataaatggaactgatgttactccccgacctctttaccatccagatccacttactggtacagcaaaaccaagtaaactcttgacatcacaagaaggatcacttggatcagaatttatatcttcctatagcctttatcagaatacaataaatcctagtacgttagggcagtttacaaggtcagttttaggaagcagtacagtttctaagtcaagtgtatcagcaagtgaatcaatagcagaagacctggaagaaccatcctataaacgggaaagattgactagtttcacagatttgcaagttataagggcagcacctgaaaaaattgtaacaaaagaagacctggagaagaatatagagataatactcacagagacagaaacactgagattttttgacttgcccacagtcatggtctctgtagaatctgaagaagctgagaaagtaactcagagaaacaagaattatgaagtcctttgtagaaacagattaggcaatgacctatatgttgaaaggatgatgcagactttcaatggagcaccaaagaataaagatgttcaatgtgataaaatcataatggaagataaaggcataatgtccactgcctgggatttgtatgattcttacaatgctatggaacttgtatctttatcagtaaaacaatctgtggttgagtcaagtagtaaagcaaatgtacttcctaaagatcaggaccaaagattgccagggagcactacagaaaaaaaacctgaacctgaagagcctgaagatgttttagaaagtgcaaaacatgaagaggtagaggaagaatctaagaaggaggaggaagaagaaatacatgcagaagaatcaacaatacccgccaacttggaacgactttggtctttttcctgtgacttaaccaaaggcctcaatgtgagcagccttgcctggaataaaacaaatccagatcttttggctgttggctatgggcactttggatttaaagagcaaaaaagaggactggcttgctgctggtcaataaagaatcccatggtaacccaaacaagaataagaagcatttttatctggctgttgacaaaattctcataaaatatataattacatgtaataattaaataaagtctagaaaattttatcaat

SEQ ID NO: 298093 - DNA, 1218 bp, Homo sapiens
gcccggcaaacattccggagcctcggcccgagccgctaacgcaggagcttgggggtacagggacttcagaggcggccaaaaaaaggggtggtggaccactccccagctggtcgccaccatgccagtctctccggcaggcagtcacaagcagcagaacttcgggttgaacaatgccacacaaccaaagaagtctattagcttttttgctacaatgaaagcaacttcagtgaaaggatatactggtgcaaatcaaagcagaatggctgtgtccaaaaccgtgcttattccacctgaactgaaaactgtagaaaaaccaaatcccaatataaagacaacacaggtatttgacataaatggaactgatgttactccccgacctctttaccatccagatccacttactggtacagcaaaaccaagtaaactcttgacatcacaagaaggatcacttggatcagaatttatatcttcctatagcctttatcagaatacaataaatcctagtacgttagggcagtttacaaggtcagttttaggaagcagtacagtttctaagtcaagtgtatcagcaagtgaatcaatagcagaagacctggaagaaccatcctataaacgggaaagattgactagtttcacagatttgcaagttataagggcagcacctgaaaaaattgtaacaaaagaagacctggagaagaatatagagataatactcacagagacagaaacactgagattttttgacttgcccacagtcatggtctctgtagaatctgaagaagctgagaaagtaactcagagaaacaagaattatgaagtcctttgtagaaacagattaggcaatgacctatatgttgaaaggatgatgcagactttcaatggagcaccaaagaataaagatgttcaatgtgataaaatcataatggaagataaaggcataatgtccactgcctgggatttgtatgattcttacaatgctatggaacttgtatctttatcagtaaaacaatctgtggttgagtcaagtagtaaagcaaatgtacttcctaaagatcaggaccaaagattgccagggagcactacagaaaaaagtttgcttgtagaagctatcaaaaactgctcagaacaatccaatcttagactggaaattacactgggactttatattagatcgatcttttccacaccattaaggccattgacctacaaaaatgtgcg

SEQ ID NO: 298094 - DNA, 2965 bp, Homo sapiens
  misc_feature (697)..(697): n is a, c, g, or t
aggtctggacctgaaccgagacaaggaggtaccacactattcactgctgcgtcgcagagcgggctgggcggctgtctggacctcgagaggcctgaggcaaggatcgcgtcagaccccgaaagctggtttgttgattagtgatctaagaccgccggaagcgcttcttctcaatcaagctatgcaacaggaagtcattacgatcccgttgtaacctctaaatatgtccccgttctgcacagcatcccgataaccgttttgtttttctcatattatgaccttctcatgttagcaccacttcgcaacgctccaggtcgtgaaggagcaacttcaccatcgccgcctacagacgccactgggagcttgggagagtgggacgtggacaggaacgtaaagaccgaagggtgggtttcgaaggagcggatttcgaagttgcaccggttgaggatggctgacattctctctcagtcagagaccctggcgtcgcaagacctcagtggggacttcaagaagccagctctgccggtgtccccagcggcgcggagtaaggccccggccagcagttcttcaaaccctgaggaggtacagaaggaagggcccactgcgttgcaggactccaattctggggagcccgacatccctcctcctcagccggactgcggtgattttaggagtctacaggaggagcagtcgcgccccncgacagcggtttcttcccctggcggtccagcccgggctcccccctaccaagagcctccatggggtggccctgccacagccccctacagcttagagaccctgaagggcggcactatccttggcacccgtagcttgaaagggacgagttactgccttttcgggaggctgtctggctgcgacgtgtgcctggagcacccttcggtgtctcggtaccacgcagtgctgcagcacagggcgtccggccctgacggagaatgcgacagcaacgggccgggcttctacctctacgatctgggaagcacccatggcacttttctcaacaaaactcgcatcccacctcgcacctactgtcgagtccacgttgggcatgttgttcgctttggaggcagcacccggctctttatcctgcagggaccagaggaagaccgagaggcagaatccgagttaacagtaacacagttgaaggaattgcgcaagcagcagcaaatattgttggagaagaagatgctaggagaagactcagatgaagaagaggaaatggatacctctgaaaggaagataaatgctggtagccaagatgatgagatgggttgcacctggggaatgggagaagatgcagtagaggatgatgctgaagagaaccctattgtcttagagtttcagcaggaaagggaggccttttatataaaggatcccaaaaaggctctccaaggcttttttgaccgagaaggagaagaattagaatatgaatttgatgaacagggacatagcacttggctctgcagggtgagattacctgtggacgattcaactggaaaacaactggtggctgaggccattcactcaggaaagaaaaaagaagcaatgatccagtgctcattggaagcttgtcggattcttgacactttgggattgcttcggcaggaagcagtatctcggaaaaggaaagccaagaactgggaagatgaagacttttatgatagtgatgatgacacatttcttgataggactggcctgattgagaagaagcgtctgaacagaatgaagaaggctggcaagattgatgagaagccagagacctttgaatcattggttgcaaaattaaatgatgctgaaagggaactttctgaaatttctgagagattgaaagcctcaagccaagttctatcagagtctccatctcaggattctttagatgcgttcatgtcagaaatgaaatcaggcagtacattagatggtgtgtcccggaagaaacttcacctgagaacttttgaactgaggaaagaacaacagagacttaaagggttaataaaaattgtaaagccagcagagattccagaactaaaaaagactgaaactcagactacaggtgcagaaaacaaagctaaaaagcttacattgcctctatttggtgccatgaaaggaggaagcaaattcaaattaaaaactggaacagtagggaagttaccccccaagcgtccagaactccctccaactctaatgagaatgaaagatgagcctgaagtagaagaggaggaggaagaggaagaggaagaagagaaagaaaaggaggagcatgaaaagaaaaaactggaggatggaagcctcagtaggccacagccagagatagagccagaagcagcagtgcaggaaatgaggcctcccacagatctcacacattttaaagaaacccaaacccatgaaaacatgtctcaacttagcgaggaagaacagaataaagattatcaagactgtagcaaaaccacttcattgtgcgcaggaccctcagcatcaaagaatgaatatgagaaaagcagaggtgaattgaagaaaaagaaaacacctggtccaggcaaacttccaccaacactttcttccaaatatcctgaagatgacccagactactgtgtgtgggtcccacctgaaggtcaaagtggagatggcagaacccatcttaatgacaagtatggctattgattgcttcagaatcccaaaagaaaaccttgtggaccatgtgacatggaatatttgggataatgtatcaaattgaatggccagagaagtttagatgattatttgtaagatctggtgactggcttttcgttctgtgttcttggcttcctaaatttatctgcccatatgattctcatgcatttgatatttatgtttaaaagtgtttatatatgtatgtaaaaagggaaccatatgttttgagaatttgtaaagtgagagacatgatcctattaaaataagaaggcaaaaatgtcct

SEQ ID NO: 298095 - DNA, 463 bp, Homo sapiens
gtgaaaatgtaaaaaggaatatgcacaaagcaaaaaaaaagaggcaactttcttccaccaacactttcttccaaatatcctgaagatgacccagactactgtgtgtgggtcccacctgaaggtcaaagtggagatggcagaacccatcttaatgacaagtatggctattgattgcttcagaatcccaaaagaaaaccttgtggaccatgtgacatggaatatttgggataatgtatcaaattgaatggccagagaagtttagatgattatttgtaagatctggtgactggcttttcgttctgtgttcttggcttcctaaatttatctgcccatatgattctcatgcatttgatatttatgtttaaaagtgtttatatatgtatgtaaaaagggaaccatatgttttgagaatttgtaaagtgagagacatgatcctattaaaataagaaggcaaaaatgtcct

SEQ ID NO: 298096 - DNA, 456 bp, Homo sapiens
  misc_feature (27)..(28): n is a, c, g, or t
  misc_feature (36)..(36): n is a, c, g, or t
  misc_feature (40)..(42): n is a, c, g, or t
aaaaaaataaaaatctccaaaattaannaaaaaaanaaannnttcttccaccaacactttcttccaaatatcctgaagatgacccagactactgtgtgtgggtcccacctgaaggtcaaagtggagatggcagaacccatcttaatgacaagtatggctattgattgcttcagaatcccaaaagaaaaccttgtggaccatgtgacatggaatatttgggataatgtatcaaattgaatggccagagaagtttagatgattatttgtaagatctggtgactggcttttcgttctgtgttcttggcttcctaaatttatctgcccatatgattctcatgcatttgatatttatgtttaaaagtgtttatatatgtatgtaaaaagggaaccatatgttttgagaatttgtaaagtgagagacatgatcctattaaaataagaaggcaaaaatgtcct

SEQ ID NO: 298097 - DNA, 466 bp, Homo sapiens
taacgttacctcaaataaagaaaattaataagaggaaaaaaggggaagaactcacttccaccaacactttcttccaaatatcctgaagatgacccagactactgtgtgtgggtcccacctgaaggtcaaagtggagatggcagaacccatcttaatgacaagtatggctattgattgcttcagaatcccaaaagaaaaccttgtggaccatgtgacatggaatatttgggataatgtatcaaattgaatggccagagaagtttagatgattatttgtaagatctggtgactggcttttcgttctgtgttcttggcttcctaaatttatctgcccatatgattctcatgcatttgatatttatgtttaaaagtgtttatatatgtatgtaaaaagggaaccatatgttttgagaatttgtaaagtgagagacatgatcctattaaaataagaaggcaaaaatgtcct

SEQ ID NO: 298098 - DNA, 469 bp, Homo sapiens
tatatttcattccctactcaccatcaactgtaatgcaaaacgaggagaaggccgttacttccaccaacactttcttccaaatatcctgaagatgacccagactactgtgtgtgggtcccacctgaaggtcaaagtggagatggcagaacccatcttaatgacaagtatggctattgattgcttcagaatcccaaaagaaaaccttgtggaccatgtgacatggaatatttgggataatgtatcaaattgaatggccagagaagtttagatgattatttgtaagatctggtgactggcttttcgttctgtgttcttggcttcctaaatttatctgcccatatgattctcatgcatttgatatttatgtttaaaagtgtttatatatgtatgtaaaaagggaaccatatgttttgagaatttgtaaagtgagagacatgatcctattaaaataagaaggcaaaaatgtcct

SEQ ID NO: 298099 - DNA, 456 bp, Homo sapiens
ttgcatagtccattcagacacccatcctatacgtaacaaaccctcttccaccaacactttcttccaaatatcctgaagatgacccagactactgtgtgtgggtcccacctgaaggtcaaagtggagatggcagaacccatcttaatgacaagtatggctattgattgcttcagaatcccaaaagaaaaccttgtggaccatgtgacatggaatatttgggataatgtatcaaattgaatggccagagaagtttagatgattatttgtaagatctggtgactggcttttcgttctgtgttcttggcttcctaaatttatctgcccatatgattctcatgcatttgatatttatgtttaaaagtgtttatatatgtatgtaaaaagggaaccatatgttttgagaatttgtaaagtgagagacatgatcctattaaaataagaaggcaaaaatgtcct

SEQ ID NO: 298100 - DNA, 465 bp, Homo sapiens
tttataactacttacatatttttcgatttctatcatcaaaagagaaatttctacttccaccaacactttcttccaaatatcctgaagatgacccagactactgtgtgtgggtcccacctgaaggtcaaagtggagatggcagaacccatcttaatgacaagtatggctattgattgcttcagaatcccaaaagaaaaccttgtggaccatgtgacatggaatatttgggataatgtatcaaattgaatggccagagaagtttagatgattatttgtaagatctggtgactggcttttcgttctgtgttcttggcttcctaaatttatctgcccatatgattctcatgcatttgatatttatgtttaaaagtgtttatatatgtatgtaaaaagggaaccatatgttttgagaatttgtaaagtgagagacatgatcctattaaaataagaaggcaaaaatgtcct

SEQ ID NO: 298101 - DNA, 459 bp, Homo sapiens
cgcccaccaccatcatccaattcagatgggaaaagggcgccggttcacttccaccaacactttcttccaaatatcctgaagatgacccagactactgtgtgtgggtcccacctgaaggtcaaagtggagatggcagaacccatcttaatgacaagtatggctattgattgcttcagaatcccaaaagaaaaccttgtggaccatgtgacatggaatatttgggataatgtatcaaattgaatggccagagaagtttagatgattatttgtaagatctggtgactggcttttcgttctgtgttcttggcttcctaaatttatctgcccatatgattctcatgcatttgatatttatgtttaaaagtgtttatatatgtatgtaaaaagggaaccatatgttttgagaatttgtaaagtgagagacatgatcctattaaaataagaaggcaaaaatgtcct

SEQ ID NO: 298102 - DNA, 463 bp, Homo sapiens
aagcaaaaaaatagattaacaagtaaataacaacaacccaaaaaaaatttacttccaccaacactttcttccaaatatcctgaagatgacccagactactgtgtgtgggtcccacctgaaggtcaaagtggagatggcagaacccatcttaatgacaagtatggctattgattgcttcagaatcccaaaagaaaaccttgtggaccatgtgacatggaatatttgggataatgtatcaaattgaatggccagagaagtttagatgattatttgtaagatctggtgactggcttttcgttctgtgttcttggcttcctaaatttatctgcccatatgattctcatgcatttgatatttatgtttaaaagtgtttatatatgtatgtaaaaagggaaccatatgttttgagaatttgtaaagtgagagacatgatcctattaaaataagaaggcaaaaatgtcct

SEQ ID NO: 298103 - DNA, 1462 bp, Homo sapiens
gctgatctagaggaccccggtcacctgcaacaccactcaggaaagaaaaaagaagcaatgatccagtgctcattggaagcttgtcggattcttgacactttgggattgcttcggcaggaagcagtatctcggaaaaggaaagccaagaactgggaagatgaagacttttatgatagtgatgatgacacatttcttgataggactggcctgattgagaagaagcgtctgaacagaatgaagaaggctggcaagattgatgagaagccagagacctttgaatcattggttgcaaaattaaatgatgctgaaagggaactttctgaaatttctgagagattgaaagcctcaagccaagttctatcagagtctccatctcaggattctttagatgcgttcatgtcagaaatgaaatcaggcagtacattagatggtgtgtcccggaagaaacttcacctgagaacttttgaactgaggaaagaacaacagagacttaaagggttaataaaaattgtaaagccagcagagattccagaactaaaaaagactgaaactcagactacaggtgcagaaaacaaagctaaaaagcttacattgcctctatttggtgccatgaaaggaggaagcaaattcaaattaaaaactggaacagtagggaagttaccccccaagcgtccagaactccctccaactctaatgagaatgaaagatgagcctgaagtagaagaggaggaggaagaggaagaggaagaagagaaagaaaaggaggagcatgaaaagaaaaaactggaggatggaagcctcagtaggccacagccagagatagagccagaagcagcagtgcaggaaatgaggcctcccacagatctcacacattttaaagaaacccaaacccatgaaaacatgtctcaacttagcgaggaagaacagaataaagattatcaagactgtagcaaaaccacttcattgtgcgcaggaccctcagcatcaaagaatgaatatgagaaaagcagaggtgaattgaagaaaaagaaaacacctggtccaggcaaacttccaccaacactttcttccaaatatcctgaagatgacccagactactgtgtgtgggtcccacctgaaggtcaaagtggagatggcagaacccatcttaatgacaagtatggctattgattgcttcagaatcccaaaagaaaaccttgtggaccatgtgacatggaatatttgggataatgtatcaaattgaatggccagagaagtttagatgattatttgtaagatctggtgactggcttttcgttctgtgttcttggcttcctaaatttatctgcccatatgattctcatgcatttgatatttatgtttaaaagtgtttatatatgtatgtaaaaagggaaccatatgttttgagaatttgtaaagtgagagacatgatcctattaaaataagaaggcaaaaatgtcct

SEQ ID NO: 298104 - DNA, 477 bp, Homo sapiens
ttgttcgctcattggaccgcatggtcgcccccacggtgtttgtaaaggtggaggagaaattttaacttccaccaacactttcttccaaatatcctgaagatgacccagactactgtgtgtgggtcccacctgaaggtcaaagtggagatggcagaacccatcttaatgacaagtatggctattgattgcttcagaatcccaaaagaaaaccttgtggaccatgtgacatggaatatttgggataatgtatcaaattgaatggccagagaagtttagatgattatttgtaagatctggtgactggcttttcgttctgtgttcttggcttcctaaatttatctgcccatatgattctcatgcatttgatatttatgtttaaaagtgtttatatatgtatgtaaaaagggaaccatatgttttgagaatttgtaaagtgagagacatgatcctattaaaataagaaggcaaaaatgtcct

SEQ ID NO: 298105 - DNA, 452 bp, Homo sapiens
ttattatatgagtttgagtttataaccaagagaagtcctacttccaccaacactttcttccaaatatcctgaagatgacccagactactgtgtgtgggtcccacctgaaggtcaaagtggagatggcagaacccatcttaatgacaagtatggctattgattgcttcagaatcccaaaagaaaaccttgtggaccatgtgacatggaatatttgggataatgtatcaaattgaatggccagagaagtttagatgattatttgtaagatctggtgactggcttttcgttctgtgttcttggcttcctaaatttatctgcccatatgattctcatgcatttgatatttatgtttaaaagtgtttatatatgtatgtaaaaagggaaccatatgttttgagaatttgtaaagtgagagacatgatcctattaaaataagaaggcaaaaatgtcct

SEQ ID NO: 298106 - DNA, 3402 bp, Homo sapiens
  misc_feature (697)..(697): n is a, c, g, or t
aggtctggacctgaaccgagacaaggaggtaccacactattcactgctgcgtcgcagagcgggctgggcggctgtctggacctcgagaggcctgaggcaaggatcgcgtcagaccccgaaagctggtttgttgattagtgatctaagaccgccggaagcgcttcttctcaatcaagctatgcaacaggaagtcattacgatcccgttgtaacctctaaatatgtccccgttctgcacagcatcccgataaccgttttgtttttctcatattatgaccttctcatgttagcaccacttcgcaacgctccaggtcgtgaaggagcaacttcaccatcgccgcctacagacgccactgggagcttgggagagtgggacgtggacaggaacgtaaagaccgaagggtgggtttcgaaggagcggatttcgaagttgcaccggttgaggatggctgacattctctctcagtcagagaccctggcgtcgcaagacctcagtggggacttcaagaagccagctctgccggtgtccccagcggcgcggagtaaggccccggccagcagttcttcaaaccctgaggaggtacagaaggaagggcccactgcgttgcaggactccaattctggggagcccgacatccctcctcctcagccggactgcggtgattttaggagtctacaggaggagcagtcgcgccccncgacagcggtttcttcccctggcggtccagcccgggctcccccctaccaagagcctccatggggtggccctgccacagccccctacagcttagagaccctgaagggcggcactatccttggcacccgtagcttgaaagggacgagttactgccttttcgggaggctgtctggctgcgacgtgtgcctggagcacccttcggtgtctcggtaccacgcagtgctgcagcacagggcgtccggccctgacggagaatgcgacagcaacgggccgggcttctacctctacgatctgggaagcacccatggcacttttctcaacaaaactcgcatcccacctcgcacctactgtcgagtccacgttgggcatgttgttcgctttggaggcagcacccggctctttatcctgcagggaccagaggaagaccgagaggcagaatccgagttaacagtaacacagttgaaggaattgcgcaagcagcagcaaatattgttggagaagaagatgctaggagaagactcagatgaagaagaggaaatggatacctctgaaaggaagataaatgctggtagccaagatgatgagatgggttgcacctggggaatgggagaagatgcagtagaggatgatgctgaagagaaccctattgtcttagagtttcagcaggaaagggaggccttttatataaaggatcccaaaaaggctctccaaggcttttttgaccgagaaggagaagaattagaatatgaatttgatgaacagggacatagcacttggctctgcagggtgagattacctgtggacgattcaactggaaaacaactggtggctgaggccattcactcaggaaagaaaaaagaagcaatgatccagtgctcattggaagcttgtcggattcttgacactttgggattgcttcggcaggaagcagtatctcggaaaaggaaagccaagaactgggaagatgaagacttttatgatagtgatgatgacacatttcttgataggactggcctgattgagaagaagcgtctgaacagaatgaagaaggctggcaagattgatgagaagccagagacctttgaatcattggttgcaaaattaaatgatgctgaaagggaactttctgaaatttctgagagattgaaagcctcaagccaagttctatcagagtctccatctcaggattctttagatgcgttcatgtcagaaatgaaatcaggcagtacattagatggtgtgtcccggaagaaacttcacctgagaacttttgaactgaggaaagaacaacagagacttaaagggttaataaaaattgtaaagccagcagagattccagaactaaaaaagactgaaactcagactacaggtgcagaaaacaaagctaaaaagcttacattgcctctatttggtgccatgaaaggaggaagcaaattcaaattaaaaactggaacagtagggaagttaccccccaagcgtccagaactccctccaactctaatgagaatgaaagatgagcctgaagtagaagaggaggaggaagaggaagaggaagaagagaaagaaaaggaggagcatgaaaagaaaaaactggaggatggaagcctcagtaggccacagccagagatagagccagaagcagcagtgcaggaaatgaggcctcccacagatctcacacattttaaagaaacccaaacccatgaaaacatgtctcaacttagcgaggaagaacagaataaagattatcaagactgtagcaaaaccacttcattgtgcgcaggaccctcagcatcaaagaatgaatatgagaaaagcagaggtgaattgaagaaaaagaaaacacctggtccaggcaaacttccaccaacactttcttccaaatatcctgaagatgacccagactactgtgtgtgggtcccacctgaaggtcaaagtggagatggcagaacccatcttaatgacaagtatggctattgattgcttcagaatcccaaaagaaaaccttgtggaccatgtgacatggaatatttgggataatgtatcaaattgaatggccagagaagtttagatgattatttgtaagatctggtgactggcttttcgttctgtgttcttggcttcctaaatttatctgcccatatgattctcatgcatttgatatttatgtttaaaagtgtttatatatgtatgtaaaaagggaaccatatgttttgagaatttgtaaagtgagagacatgatcctattaaaataagaaggcaaaaatgtcctaaacaaagaaaatggcctcggtgggctacaatggcggcatttctgggtacgctagcctttagggaggattcctttatgattccattattgctgagtcatctgcccttagacgtatagaatagctgaactaggcaaaaagtgcctactatgccgtgctctgtgcaaaccacgcataacactgctcccgttaggcgacacacatgtcgcttctcagtgcattgaccggccacaacctgtaattatgtatattatccacgccactcttgatcgttgttcttttgctactcaatatccccatcctgaccgcttatcccacaataccgcatcccccacggctattcaaagcttccccgccattatgagatatagaatcgagcgagtacagattcccctctcgacacttgtcctgcccgatcagcctacatatatcgaattta

SEQ ID NO: 298107 - DNA, 3337 bp, Homo sapiens
  misc_feature (697)..(697): n is a, c, g, or t
aggtctggacctgaaccgagacaaggaggtaccacactattcactgctgcgtcgcagagcgggctgggcggctgtctggacctcgagaggcctgaggcaaggatcgcgtcagaccccgaaagctggtttgttgattagtgatctaagaccgccggaagcgcttcttctcaatcaagctatgcaacaggaagtcattacgatcccgttgtaacctctaaatatgtccccgttctgcacagcatcccgataaccgttttgtttttctcatattatgaccttctcatgttagcaccacttcgcaacgctccaggtcgtgaaggagcaacttcaccatcgccgcctacagacgccactgggagcttgggagagtgggacgtggacaggaacgtaaagaccgaagggtgggtttcgaaggagcggatttcgaagttgcaccggttgaggatggctgacattctctctcagtcagagaccctggcgtcgcaagacctcagtggggacttcaagaagccagctctgccggtgtccccagcggcgcggagtaaggccccggccagcagttcttcaaaccctgaggaggtacagaaggaagggcccactgcgttgcaggactccaattctggggagcccgacatccctcctcctcagccggactgcggtgattttaggagtctacaggaggagcagtcgcgccccncgacagcggtttcttcccctggcggtccagcccgggctcccccctaccaagagcctccatggggtggccctgccacagccccctacagcttagagaccctgaagggcggcactatccttggcacccgtagcttgaaagggacgagttactgccttttcgggaggctgtctggctgcgacgtgtgcctggagcacccttcggtgtctcggtaccacgcagtgctgcagcacagggcgtccggccctgacggagaatgcgacagcaacgggccgggcttctacctctacgatctgggaagcacccatggcacttttctcaacaaaactcgcatcccacctcgcacctactgtcgagtccacgttgggcatgttgttcgctttggaggcagcacccggctctttatcctgcagggaccagaggaagaccgagaggcagaatccgagttaacagtaacacagttgaaggaattgcgcaagcagcagcaaatattgttggagaagaagatgctaggagaagactcagatgaagaagaggaaatggatacctctgaaaggaagataaatgctggtagccaagatgatgagatgggttgcacctggggaatgggagaagatgcagtagaggatgatgctgaagagaaccctattgtcttagagtttcagcaggaaagggaggccttttatataaaggatcccaaaaaggctctccaaggcttttttgaccgagaaggagaagaattagaatatgaatttgatgaacagggacatagcacttggctctgcagggtgagattacctgtggacgattcaactggaaaacaactggtggctgaggccattcactcaggaaagaaaaaagaagcaatgatccagtgctcattggaagcttgtcggattcttgacactttgggattgcttcggcaggaagcagtatctcggaaaaggaaagccaagaactgggaagatgaagacttttatgatagtgatgatgacacatttcttgataggactggcctgattgagaagaagcgtctgaacagaatgaagaaggctggcaagattgatgagaagccagagacctttgaatcattggttgcaaaattaaatgatgctgaaagggaactttctgaaatttctgagagattgaaagcctcaagccaagttctatcagagtctccatctcaggattctttagatgcgttcatgtcagaaatgaaatcaggcagtacattagatggtgtgtcccggaagaaacttcacctgagaacttttgaactgaggaaagaacaacagagacttaaagggttaataaaaattgtaaagccagcagagattccagaactaaaaaagactgaaactcagactacaggtgcagaaaacaaagctaaaaagcttacattgcctctatttggtgccatgaaaggaggaagcaaattcaaattaaaaactggaacagtagggaagttaccccccaagcgtccagaactccctccaactctaatgagaatgaaagatgagcctgaagtagaagaggaggaggaagaggaagaggaagaagagaaagaaaaggaggagcatgaaaagaaaaaactggaggatggaagcctcagtaggccacagccagagatagagccagaagcagcagtgcaggaaatgaggcctcccacagatctcacacattttaaagaaacccaaacccatgaaaacatgtctcaacttagcgaggaagaacagaataaagattatcaagactgtagcaaaaccacttcattgtgcgcaggaccctcagcatcaaagaatgaatatgagaaaagcagaggtgaattgaagaaaaagaaaacacctggtccaggcaaacttccaccaacactttcttccaaatatcctgaagatgacccagactactgtgtgtgggtcccacctgaaggtcaaagtggagatggcagaacccatcttaatgacaagtatggctattgattgcttcagaatcccaaaagaaaaccttgtggaccatgtgacatggaatatttgggataatgtatcaaattgaatggccagagaagtttagatgattatttgtaagatctggtgactggcttttcgttctgtgttcttggcttcctaaatttatctgcccatatgattctcatgcatttgatatttatgtttaaaagtgtttatatatgtatgtaaaaagggaaccatatgttttgagaatttgtaaagtgagagacatgatcctattaaaataagaaggcaaaaatgtcctcacaaaaaaaagcacaaaaaaaaaatccaatctttaatataactcctctaataaacctcactctctccctcttgcgtttctttaaatgccccactcgtcttctttcatctatacgatttggctccttttcgcgatctcatgagaggctttcctttccccttcctttcttttaggggggatatatttctaaactctcctacaaaactacctcacatgtggcccgtccgttgccgttatcccttttccctcttctggggggtgttatagcgattacgtcacctcgggtcgtatgtctgtaactctcctttcacaacgctctttatttgctcctatcctattaacatgtctgcgctgctgattttatcccgtcct

SEQ ID NO: 298108 - DNA, 3403 bp, Homo sapiens
  misc_feature (697)..(697): n is a, c, g, or t
aggtctggacctgaaccgagacaaggaggtaccacactattcactgctgcgtcgcagagcgggctgggcggctgtctggacctcgagaggcctgaggcaaggatcgcgtcagaccccgaaagctggtttgttgattagtgatctaagaccgccggaagcgcttcttctcaatcaagctatgcaacaggaagtcattacgatcccgttgtaacctctaaatatgtccccgttctgcacagcatcccgataaccgttttgtttttctcatattatgaccttctcatgttagcaccacttcgcaacgctccaggtcgtgaaggagcaacttcaccatcgccgcctacagacgccactgggagcttgggagagtgggacgtggacaggaacgtaaagaccgaagggtgggtttcgaaggagcggatttcgaagttgcaccggttgaggatggctgacattctctctcagtcagagaccctggcgtcgcaagacctcagtggggacttcaagaagccagctctgccggtgtccccagcggcgcggagtaaggccccggccagcagttcttcaaaccctgaggaggtacagaaggaagggcccactgcgttgcaggactccaattctggggagcccgacatccctcctcctcagccggactgcggtgattttaggagtctacaggaggagcagtcgcgccccncgacagcggtttcttcccctggcggtccagcccgggctcccccctaccaagagcctccatggggtggccctgccacagccccctacagcttagagaccctgaagggcggcactatccttggcacccgtagcttgaaagggacgagttactgccttttcgggaggctgtctggctgcgacgtgtgcctggagcacccttcggtgtctcggtaccacgcagtgctgcagcacagggcgtccggccctgacggagaatgcgacagcaacgggccgggcttctacctctacgatctgggaagcacccatggcacttttctcaacaaaactcgcatcccacctcgcacctactgtcgagtccacgttgggcatgttgttcgctttggaggcagcacccggctctttatcctgcagggaccagaggaagaccgagaggcagaatccgagttaacagtaacacagttgaaggaattgcgcaagcagcagcaaatattgttggagaagaagatgctaggagaagactcagatgaagaagaggaaatggatacctctgaaaggaagataaatgctggtagccaagatgatgagatgggttgcacctggggaatgggagaagatgcagtagaggatgatgctgaagagaaccctattgtcttagagtttcagcaggaaagggaggccttttatataaaggatcccaaaaaggctctccaaggcttttttgaccgagaaggagaagaattagaatatgaatttgatgaacagggacatagcacttggctctgcagggtgagattacctgtggacgattcaactggaaaacaactggtggctgaggccattcactcaggaaagaaaaaagaagcaatgatccagtgctcattggaagcttgtcggattcttgacactttgggattgcttcggcaggaagcagtatctcggaaaaggaaagccaagaactgggaagatgaagacttttatgatagtgatgatgacacatttcttgataggactggcctgattgagaagaagcgtctgaacagaatgaagaaggctggcaagattgatgagaagccagagacctttgaatcattggttgcaaaattaaatgatgctgaaagggaactttctgaaatttctgagagattgaaagcctcaagccaagttctatcagagtctccatctcaggattctttagatgcgttcatgtcagaaatgaaatcaggcagtacattagatggtgtgtcccggaagaaacttcacctgagaacttttgaactgaggaaagaacaacagagacttaaagggttaataaaaattgtaaagccagcagagattccagaactaaaaaagactgaaactcagactacaggtgcagaaaacaaagctaaaaagcttacattgcctctatttggtgccatgaaaggaggaagcaaattcaaattaaaaactggaacagtagggaagttaccccccaagcgtccagaactccctccaactctaatgagaatgaaagatgagcctgaagtagaagaggaggaggaagaggaagaggaagaagagaaagaaaaggaggagcatgaaaagaaaaaactggaggatggaagcctcagtaggccacagccagagatagagccagaagcagcagtgcaggaaatgaggcctcccacagatctcacacattttaaagaaacccaaacccatgaaaacatgtctcaacttagcgaggaagaacagaataaagattatcaagactgtagcaaaaccacttcattgtgcgcaggaccctcagcatcaaagaatgaatatgagaaaagcagaggtgaattgaagaaaaagaaaacacctggtccaggcaaacttccaccaacactttcttccaaatatcctgaagatgacccagactactgtgtgtgggtcccacctgaaggtcaaagtggagatggcagaacccatcttaatgacaagtatggctattgattgcttcagaatcccaaaagaaaaccttgtggaccatgtgacatggaatatttgggataatgtatcaaattgaatggccagagaagtttagatgattatttgtaagatctggtgactggcttttcgttctgtgttcttggcttcctaaatttatctgcccatatgattctcatgcatttgatatttatgtttaaaagtgtttatatatgtatgtaaaaagggaaccatatgttttgagaatttgtaaagtgagagacatgatcctattaaaataagaaggcaaaaatgtcctaaatgttcctaatattttattttattttattttttttaagagacagggtcttactctgtcacctaggctggggtacagtggtgcaatcctagctcactgtagccttgaactcctgggctcaagcaatcctcccacctcagcctcccaagtacctgggactataggcatgtaccaccaccacacctggctaattattttatttaaattttttggagagatgaagtcttgccatgttgcccaggcttgtcttgaactcctggcctcaagtgatcctcctgcctcagcctcccaaagcactggaacctcatttttttttctttttttctgagacagggtctcactctgttgcccagagtgagtgcagtggcatgatcacagcttactgcagtggcatgatcacagcttactgcagtctcaacttcccaggctcaagtgatt

SEQ ID NO: 298109 - DNA, 3019 bp, Homo sapiens
  misc_feature (697)..(697): n is a, c, g, or t
  misc_feature (2984)..(2984): n is a, c, g, or t
aggtctggacctgaaccgagacaaggaggtaccacactattcactgctgcgtcgcagagcgggctgggcggctgtctggacctcgagaggcctgaggcaaggatcgcgtcagaccccgaaagctggtttgttgattagtgatctaagaccgccggaagcgcttcttctcaatcaagctatgcaacaggaagtcattacgatcccgttgtaacctctaaatatgtccccgttctgcacagcatcccgataaccgttttgtttttctcatattatgaccttctcatgttagcaccacttcgcaacgctccaggtcgtgaaggagcaacttcaccatcgccgcctacagacgccactgggagcttgggagagtgggacgtggacaggaacgtaaagaccgaagggtgggtttcgaaggagcggatttcgaagttgcaccggttgaggatggctgacattctctctcagtcagagaccctggcgtcgcaagacctcagtggggacttcaagaagccagctctgccggtgtccccagcggcgcggagtaaggccccggccagcagttcttcaaaccctgaggaggtacagaaggaagggcccactgcgttgcaggactccaattctggggagcccgacatccctcctcctcagccggactgcggtgattttaggagtctacaggaggagcagtcgcgccccncgacagcggtttcttcccctggcggtccagcccgggctcccccctaccaagagcctccatggggtggccctgccacagccccctacagcttagagaccctgaagggcggcactatccttggcacccgtagcttgaaagggacgagttactgccttttcgggaggctgtctggctgcgacgtgtgcctggagcacccttcggtgtctcggtaccacgcagtgctgcagcacagggcgtccggccctgacggagaatgcgacagcaacgggccgggcttctacctctacgatctgggaagcacccatggcacttttctcaacaaaactcgcatcccacctcgcacctactgtcgagtccacgttgggcatgttgttcgctttggaggcagcacccggctctttatcctgcagggaccagaggaagaccgagaggcagaatccgagttaacagtaacacagttgaaggaattgcgcaagcagcagcaaatattgttggagaagaagatgctaggagaagactcagatgaagaagaggaaatggatacctctgaaaggaagataaatgctggtagccaagatgatgagatgggttgcacctggggaatgggagaagatgcagtagaggatgatgctgaagagaaccctattgtcttagagtttcagcaggaaagggaggccttttatataaaggatcccaaaaaggctctccaaggcttttttgaccgagaaggagaagaattagaatatgaatttgatgaacagggacatagcacttggctctgcagggtgagattacctgtggacgattcaactggaaaacaactggtggctgaggccattcactcaggaaagaaaaaagaagcaatgatccagtgctcattggaagcttgtcggattcttgacactttgggattgcttcggcaggaagcagtatctcggaaaaggaaagccaagaactgggaagatgaagacttttatgatagtgatgatgacacatttcttgataggactggcctgattgagaagaagcgtctgaacagaatgaagaaggctggcaagattgatgagaagccagagacctttgaatcattggttgcaaaattaaatgatgctgaaagggaactttctgaaatttctgagagattgaaagcctcaagccaagttctatcagagtctccatctcaggattctttagatgcgttcatgtcagaaatgaaatcaggcagtacattagatggtgtgtcccggaagaaacttcacctgagaacttttgaactgaggaaagaacaacagagacttaaagggttaataaaaattgtaaagccagcagagattccagaactaaaaaagactgaaactcagactacaggtgcagaaaacaaagctaaaaagcttacattgcctctatttggtgccatgaaaggaggaagcaaattcaaattaaaaactggaacagtagggaagttaccccccaagcgtccagaactccctccaactctaatgagaatgaaagatgagcctgaagtagaagaggaggaggaagaggaagaggaagaagagaaagaaaaggaggagcatgaaaagaaaaaactggaggatggaagcctcagtaggccacagccagagatagagccagaagcagcagtgcaggaaatgaggcctcccacagatctcacacattttaaagaaacccaaacccatgaaaacatgtctcaacttagcgaggaagaacagaataaagattatcaagactgtagcaaaaccacttcattgtgcgcaggaccctcagcatcaaagaatgaatatgagaaaagcagaggtgaattgaagaaaaagaaaacacctggtccaggcaaacttccaccaacactttcttccaaatatcctgaagatgacccagactactgtgtgtgggtcccacctgaaggtcaaagtggagatggcagaacccatcttaatgacaagtatggctattgattgcttcagaatcccaaaagaaaaccttgtggaccatgtgacatggaatatttgggataatgtatcaaattgaatggccagagaagtttagatgattatttgtaagatctggtgactggcttttcgttctgtgttcttggcttcctaaatttatctgcccatatgattctcatgcatttgatatttatgtttaaaagtgtttatatatgtatgtaaaaagggaaccatatgttttgagaatttgtaaagtgagagacatgatcctattaaaataagaaggcaaaaatgtccttaaaacagtagcggcagcncccccccccctctttcatacgcaaaaaataattca

SEQ ID NO: 298110 - DNA, 604 bp, Homo sapiens
aactctatctctacaaaaaattaaaaaaaaaaaatattggccaggcatggtggtacatgcctgtagtcctagctactctgcaggctgaggcaggaggatctctgtagcccaggaattcaaggcagcagtgagctatgattgccccactgcactccagcttgggcaacagagaaaaaccctgtttctaaaataataataaattttggtggtcatctctgatttttaaaaaaatatgttctgggagtagaatttctaggccaaggagtatgtacatttttgaggcttttagtaagtattgctaaaaagttttacctcaatgttggctagtgttttaagtggaaaattggcagttttctgtaatacatttgaaacatatttatttaaaaccttaagattagttgaagctgatgataataaaactggatgattatgtacttagcttctctttctcttgtttttgtttttgtttgtttggctttccaccatgaattaaatcatgacaatatgatttgatattgctttttatagaaaacatgtctcaacttagcgaggaagaacagaataaagattatcaagactgtagcaaaaccacttcattgtgcgc

SEQ ID NO: 298111 - DNA, 765 bp, Homo sapiens
taagaagaaaggggaagcaggtggaaaagcaattaaaaaaaaatcagattctctttcggtgattcagagctgaaggtgcctcactgccctgtggaacaggtgaataaagccttcccagcatctctctctagcctattatctcctgttagacacagcccagaaaatgaatagagacaagtcctggctgggtctgggttcagaaacataatagaaggattcatctaaactgtcggccactgtggaggaagtgaaccttctagatcctgctgactcatacaatgagttttgtgtggaccatcagacaaaagggctggctggtgaaggtggctgttgtctggaaattcctcccagctctcctctaattatgtcataaggactggaggccccttagcctgcttgtgataacacgcaaggaaatatgggccaactcttcacatgaacacaagatatttccatgctagccttttgcaagtaacaacagagagagctctgtgcagttttcactggaatgcctgtggattgcttgtgtcataactgtaatctaaagagttgtccatttgttgattcctttgtatttgtattggtagaattgccactatcaaaccaagatctttagctgcctttgtatcaacttctttggagcttatgtgattttccagaaaatttccaaggcatagttttgtccctaagtcccatgaatatgtaatattttgtgtctctctattaaaatagcactttttgtgcattccattaacaaaaaaaaat

SEQ ID NO: 298112 - DNA, 694 bp, Homo sapiens
taagaagaaaggggaagcaggtggaaaagcaattaaaaaaaaatcagcatctctctctagcctattatctcctgttagacacagcccagaaaatgaatagagacaagtcctggctgggtctgggttcagaaacataatagaaggattcatctaaactgtcggccactgtggaggaagtgaaccttctagatcctgctgactcatacaatgagttttgtgtggaccatcagacaaaagggctggctggtgaaggtggctgttgtctggaaattcctcccagctctcctctaattatgtcataaggactggaggccccttagcctgcttgtgataacacgcaaggaaatatgggccaactcttcacatgaacacaagatatttccatgctagccttttgcaagtaacaacagagagagctctgtgcagttttcactggaatgcctgtggattgcttgtgtcataactgtaatctaaagagttgtccatttgttgattcctttgtatttgtattggtagaattgccactatcaaaccaagatctttagctgcctttgtatcaacttctttggagcttatgtgattttccagaaaatttccaaggcatagttttgtccctaagtcccatgaatatgtaatattttgtgtctctctattaaaatagcactttttgtgcattccattaacaaaaaaaaat

SEQ ID NO: 298113 - DNA, 458 bp, Homo sapiens
tactcaaccataagatgaatcatccataaaatgacccccacaaagctgtggtttacatgttcatcactcttttctgtcatttgttgctttcaggataacacgcaaggaaatatgggccaactcttcacatgaacacaagatatttccatgctagccttttgcaagtaacaacagagagagctctgtgcagttttcactggaatgcctgtggattgcttgtgtcataactgtaatctaaagagttgtccatttgttgattcctttgtatttgtattggtagaattgccactatcaaaccaagatctttagctgcctttgtatcaacttctttggagcttatgtgattttccagaaaatttccaaggcatagttttgtccctaagtcccatgaatatgtaatattttgtgtctctctattaaaatagcactttttgtgcattccattaacaaaaaaaaat

SEQ ID NO: 298114 - DNA, 856 bp, Homo sapiens
taagaagaaaggggaagcaggtggaaaagcaattaaaaaaaaatcagattctctttcggtgattcagagctgaaggtgcctcactgccctgtggaacaggtgaataaagccttcccagcatctctctctagcctattatctcctgttagacacagcccagaaaatgaatagagacaagtcctggctgggtctgggttcagaaacataatagaaggattcatctaaaggaagggaattctttccacagttgctagttcctcacacctctgcctctatgggattctcctggtccccacatgctctgctgtgtcttctagctgtcggccactgtggaggaagtgaaccttctagatcctgctgactcatacaatgagttttgtgtggaccatcagacaaaagggctggctggtgaaggtggctgttgtctggaaattcctcccagctctcctctaattatgtcataaggactggaggccccttagcctgcttgtgataacacgcaaggaaatatgggccaactcttcacatgaacacaagatatttccatgctagccttttgcaagtaacaacagagagagctctgtgcagttttcactggaatgcctgtggattgcttgtgtcataactgtaatctaaagagttgtccatttgttgattcctttgtatttgtattggtagaattgccactatcaaaccaagatctttagctgcctttgtatcaacttctttggagcttatgtgattttccagaaaatttccaaggcatagttttgtccctaagtcccatgaatatgtaatattttgtgtctctctattaaaatagcactttttgtgcattccattaacaaaaaaaaat

SEQ ID NO: 298115 - DNA, 5083 bp, Homo sapiens
agaagagcgatgggagggggtgacgtggcagtgacaggcgcataaactgaaatgaatggcggaaacagcagccaatcggcgatcagattggccgggcattccgcattctcccgtcctccctgagcgctggaaacttcaggaaagcaccaatgagcttccccaaaagtctgattggcctttatctgaaccaatcaaaggtgggtctggcggacgcgtcccaccccaggctctcactgggcgctgtagaatgacaggcccgagagaaatgccaatatccgcggggtcttcctcaagtgacactcagcggcaccaatcgacgtccttcttcccggcggccgagccctcctccccgcggctggccgggcggggcggggacgctgcgcggcggtggctgatgcggtagccgtgtggggcgctccgggcggcgacggcggctctcgtaggcggttccggtcttgtatctccaggcggcggcggctcatggcggcgacggagctgagaggagtggtggggccaggcccggcagccattgcagcacttggcggcggcggcgccggtcccccagtggtgggaggaggcggcggccgcggagatgcggggccaggctccggggccgcgtcagggacggtggtcgcggcggcggcgggaggcccgggcccgggggccgggggagtggcggcggctggcccggcccctgcgccgccgactgggggctcgggcggctcgggcgctgggggttcgggctcggctcgagagggctggctcttcaaatggaccaattatatcaaaggctaccagcggcgatggttcgtgctgagcaacgggctcctgagctactacagatcaaaggcagaaatgagacatacctgccgtggtaccatcaacctcgccacagccaacatcaccgtggaggactcctgcaacttcatcatttccaatgggggtgctcagacctaccatctgaaagctagttcagaagttgagcggcagcgctgggtgacggccctggaactggccaaggccaaagctgtgaagatgctggcagagtcagatgaatcaggagatgaagagtctgtctcacaaactgacaagactgagctgcagaatacccttcggaccctctctagcaaagtagaggacttgagcacgtgcaatgacttgatagctaagcatggcacagctctgcagcgttctctcagtgagctggagtccctgaagttgcctgctgagagcaatgaaaagatcaaacaggtcaacgaacgagccacactctttaggataacatccaatgccatgatcaacgcctgcagagatttcctcatgttagcccagacccatagtaaaaaatggcaaaagtcactacagtatgaaagagaccagcgtatccgactggaagaaaccctcgagcagctggcgaagcagcataatcacctggagagggccttccgaggagccacggtgctgccggcaaacactcctggcaatgtgggttctggtaaagatcagtgctgctctggcaaaggggacatgagcgatgaagatgatgagaatgaattttttgatgcacctgagatcatcaccatgcctgaaaatttgggccacaaacgtactggcagcaatatcagtggagccagcagtgacatcagccttgatgaacagtacaagcatcagctggaggagaccaaaaaggaaaagagaaccagaataccatacaagccaaactatagcctcaatttatggagcatcatgaagaactgcattggaaaagaactctctaagatccccatgccggtaaactttaatgagcccttgtccatgcttcagcgccttactgaagatctggaataccatgagctgttagaccgagctgcaaaatgtgagaattctctagaacagctctgttatgttgcagctttcaccgtgtcctcctactccactactgtcttccgcaccagtaagccattcaacccactgcttggggagacctttgagctggaccgattagaggagaatgggtaccgatccctctgtgaacaggtgagtcatcatccccctgctgctgcgcaccatgctgagtccaaaaatggctggacattgcgtcaggaaatcaaaatcaccagcaagtttcgaggcaaatacctctccattatgcccctcggtaccattcattgtattttccatgcaactgggcaccactacacttggaagaaagttaccacaactgtacacaacattattgtgggcaagttgtggatagatcagtctggcgaaattgatattgtgaatcacaagacaggagacaagtgtaatcttaaatttgttccttatagctacttctctcgggatgtagcaagaaaggtgacgggggaagtgacagatccatcaggaaaagtccactttgctcttctggggacgtgggatgagaaaatggaatgtttcaaagtacagccagtcattggggaaaatgggggtgatgctcgacagagaggccatgaagcagaggaaagcagggtcatgctgtggaaaaggaatcctttaccgaagaatgcagaaaacatgtactacttctcagagcttgctctgactctcaatgcttgggaaagtggcactgcccccacagacagccggttacgacctgaccagagactgatggaaaatggacgctgggatgaagcaaatgcggagaagcagcgcctggaggaaaaacaaagactttccagaaagaagagagaagcggaagctatgaaagccacagaggatggcacaccatatgatccctataaggcactgtggtttgagcggaagaaggaccctgttaccaaggagttaacccatatttataggggagaatactgggagtgtaaagaaaaacaggactggagctcatgcccggacattttctgaaacggcagtaacaaaaaagaggagcatataatggagaagaggacagaggatgtgtgggaaagctggaagttgtgactctcttaccaagtgctttcctcaagtttgtctctcttgaccaatcattttttccaaatcaatcaccagaaggagacaccagtggtggtgattggctggttgccttagctgattgaaactgaaatcgacataggagatactatgtctgtaagggagaggtttagtggccgaaggttagtgttattccacatccacgaagtcaagtattcttggctcttctttctccctctgcccccatttaagacaatgtcactcaccctccccttgtagtatcctgctcagccaagatctgcctaagattatgattcaggggcattttggtgctgttaaaagcaagagccgaatttagaagttcccttaaaaagaaacacataagacttaccaatggaggcattgtgaatggttgcagtggagcttaggtataacatcatcaagtgtgttcacacgcggggtcggtttaatggagtgtccacgcggagataactgcgatattggaacacctgtgagagagattgttctatagggctggaatattcagagttacattcttggaagtttctgtttttacttgcatcaaacacccctctgttgttctccatcatctttaatagcaactggagaccactttggtcattggtaagggggtgcattctcctcacaaaggggttttatggacttcctcaggcggagagcttctgagaacacaggcaggatggaaaaagactactagccacttttgctttcccaaccccccttaatgccatccttcattgtctttctggcttctcttcttctggcacagtaccattttgggtctgtgccccagtgtggagcaaaacattgcctgtcccattctgatatacttcagaatttgagagcagaagttaatgtggaacaaaagttttcaccatctctcaagccccaaggactggagccacctctggaataatgtgttaaatatctgtatattatatatatgtagagaaaaatctaattttttggtttgatttccttcccattaagaatcttgttttttgatacccttgtctccctgagactctttcttggacacgtgttgatgtggatggcactcctgctctccatcttttatgggcagagagatttcaaaacctgagcaggatcatgtctggcagttactaaacagggactttgtccatggtttgtatcatggggtgcctactgctgtctaaactctgctctcctaattagctgactcttgaaaatgaaatcctaacctctttcctgcctcttttctttctcttttcaggaagagtgtgggtagaaagtccggagggcaacttccaatttaattctgctctgtccggcgcataggctgaattccaaaagaactttcttcctaggatgtggggcttaaagcaccgtcatgtggggtggatcagataattgctcctgtggggccctggcttccttctctgtttgtgcagtatttgtttttgttgtcttgttgagaaatatcccctgtgcaacccacccttggttgaggatcacaaattgaggtgccttccttgtatgctttttgttagtattttttgtttttgttccttaactgctgagcctcagccagcgtgggtcctgggggaaataccattccaaaggaagccatccctatggggaaattggttttactgggtaaattaatacttttatttcttcccctatcccttccttcctagttgtgataaacatgggagaggagtgactttgactgctggggaatttcctcctaagaaccttattcccaaaataagccagggattatgtcaaggcttctttcaaggaggctcataaaagcagtgacctcatccggggctttggatagagtgagaattccccaactaaattggacttctctgctttatccccttctcttccttcaccatctgcactacatttctggctgatcccaatcagattcccgctaatggaagaagtttagaatctttcaggtggaataaagtcacatgaaaacaaaacacaactatatatattttcagtttttttgccttattgatttttttccaaaaaaaaaaaactactaaattaaataattttttaaaagtca

SEQ ID NO: 298116 - DNA, 5447 bp, Homo sapiens
agaagagcgatgggagggggtgacgtggcagtgacaggcgcataaactgaaatgaatggcggaaacagcagccaatcggcgatcagattggccgggcattccgcattctcccgtcctccctgagcgctggaaacttcaggaaagcaccaatgagcttccccaaaagtctgattggcctttatctgaaccaatcaaaggtgggtctggcggacgcgtcccaccccaggctctcactgggcgctgtagaatgacaggcccgagagaaatgccaatatccgcggggtcttcctcaagtgacactcagcggcaccaatcgacgtccttcttcccggcggccgagccctcctccccgcggctggccgggcggggcggggacgctgcgcggcggtggctgatgcggtagccgtgtggggcgctccgggcggcgacggcggctctcgtaggcggttccggtcttgtatctccaggcggcggcggctcatggcggcgacggagctgagaggagtggtggggccaggcccggcagccattgcagcacttggcggcggcggcgccggtcccccagtggtgggaggaggcggcggccgcggagatgcggggccaggctccggggccgcgtcagggacggtggtcgcggcggcggcgggaggcccgggcccgggggccgggggagtggcggcggctggcccggcccctgcgccgccgactgggggctcgggcggctcgggcgctgggggttcgggctcggctcgagagggctggctcttcaaatggaccaattatatcaaaggctaccagcggcgatggttcgtgctgagcaacgggctcctgagctactacagatcaaaggcagaaatgagacatacctgccgtggtaccatcaacctcgccacagccaacatcaccgtggaggactcctgcaacttcatcatttccaatgggggtgctcagacctaccatctgaaagctagttcagaagttgagcggcagcgctgggtgacggccctggaactggccaaggccaaagctgtgaagatgctggcagagtcagatgaatcaggagatgaagagtctgtctcacaaactgacaagactgagctgcagaatacccttcggaccctctctagcaaagtagaggacttgagcacgtgcaatgacttgatagctaagcatggcacagctctgcagcgttctctcagtgagctggagtccctgaagttgcctgctgagagcaatgaaaagatcaaacaggtcaacgaacgagccacactctttaggataacatccaatgccatgatcaacgcctgcagagatttcctcatgttagcccagacccatagtaaaaaatggcaaaagtcactacagtatgaaagagaccagcgtatccgactggaagaaaccctcgagcagctggcgaagcagcataatcacctggagagggccttccgaggagccacggtgctgccggcaaacactcctggcaatgtgggttctggtaaagatcagtgctgctctggcaaaggggacatgagcgatgaagatgatgagaatgaattttttgatgcacctgagatcatcaccatgcctgaaaatttgggccacaaacgtactggcagcaatatcagtggagccagcagtgacatcagccttgatgaacagtacaagcatcagctggaggagaccaaaaaggaaaagagaaccagaataccatacaagccaaactatagcctcaatttatggagcatcatgaagaactgcattggaaaagaactctctaagatccccatgccggtaaactttaatgagcccttgtccatgcttcagcgccttactgaagatctggaataccatgagctgttagaccgagctgcaaaatgtgagaattctctagaacagctctgttatgttgcagctttcaccgtgtcctcctactccactactgtcttccgcaccagtaagccattcaacccactgcttggggagacctttgagctggaccgattagaggagaatgggtaccgatccctctgtgaacaggtgagtcatcatccccctgctgctgcgcaccatgctgagtccaaaaatggctggacattgcgtcaggaaatcaaaatcaccagcaagtttcgaggcaaatacctctccattatgcccctcggtaccattcattgtattttccatgcaactgggcaccactacacttggaagaaagttaccacaactgtacacaacattattgtgggcaagttgtggatagatcagtctggcgaaattgatattgtgaatcacaagacaggagacaagtgtaatcttaaatttgttccttatagctacttctctcgggatgtagcaagaaaggtgacgggggaagtgacagatccatcaggaaaagtccactttgctcttctggggacgtgggatgagaaaatggaatgtttcaaagtacagccagtcattggggaaaatgggggtgatgctcgacagagaggccatgaagcagaggaaagcagggtcatgctgtggaaaaggaatcctttaccgaagaatgcagaaaacatgtactacttctcagagcttgctctgactctcaatgcttgggaaagtggcactgcccccacagacagccggttacgacctgaccagagactgatggaaaatggacgctgggatgaagcaaatgcggagaagcagcgcctggaggaaaaacaaagactttccagaaagaagagagaagcggaagctatgaaagccacagaggatggcacaccatatgatccctataaggcactgtggtttgagcggaagaaggaccctgttaccaaggagttaacccatatttataggggagaatactgggagtgtaaagaaaaacaggactggagctcatgcccggacattttctgaaacggcagtaacaaaaaagaggagcatataatggagaagaggacagaggatgtgtgggaaagctggaagttgtgactctcttaccaagtgctttcctcaagtttgtctctcttgaccaatcattttttccaaatcaatcaccagaaggagacaccagtggtggtgattggctggttgccttagctgattgaaactgaaatcgacataggagatactatgtctgtaagggagaggtttagtggccgaaggttagtgttattccacatccacgaagtcaagtattcttggctcttctttctccctctgcccccatttaagacaatgtcactcaccctccccttgtagtatcctgctcagccaagatctgcctaagattatgattcaggggcattttggtgctgttaaaagcaagagccgaatttagaagttcccttaaaaagaaacacataagacttaccaatggaggcattgtgaatggttgcagtggagcttaggtataacatcatcaagtgtgttcacacgcggggtcggtttaatggagtgtccacgcggagataactgcgatattggaacacctgtgagagagattgttctatagggctggaatattcagagttacattcttggaagtttctgtttttacttgcatcaaacacccctctgttgttctccatcatctttaatagcaactggagaccactttggtcattggtaagggggtgcattctcctcacaaaggggttttatggacttcctcaggcggagagcttctgagaacacaggcaggatggaaaaagactactagccacttttgctttcccaaccccccttaatgccatccttcattgtctttctggcttctcttcttctggcacagtaccattttgggtctgtgccccagtgtggagcaaaacattgcctgtcccattctgatatacttcagaatttgagagcagaagttaatgtggaacaaaagttttcaccatctctcaagccccaaggactggagccacctctggaataatgtgttaaatatctgtatattatatatatgtagagaaaaatctaattttttggtttgatttccttcccattaagaatcttgttttttgatacccttgtctccctgagactctttcttggacacgtgttgatgtggatggcactcctgctctccatcttttatgggcagagagatttcaaaacctgagcaggatcatgtctggcagttactaaacagggactttgtccatggtttgtatcatggggtgcctactgctgtctaaactctgctctcctaattagctgactcttgaaaatgaaatcctaacctctttcctgcctcttttctttctcttttcaggaagagtgtgggtagaaagtccggagggcaacttccaatttaattctgctctgtccggcgcataggctgaattccaaaagaactttcttcctaggatgtggggcttaaagcaccgtcatgtggggtggatcagataattgctcctgtggggccctggcttccttctctgtttgtgcagtatttgtttttgttgtcttgttgagaaatatcccctgtgcaacccacccttggttgaggatcacaaattgaggtgccttccttgtatgctttttgttagtattttttgtttttgttccttaactgctgagcctcagccagcgtgggtcctgggggaaataccattccaaaggaagccatccctatggggaaattggttttactgggtaaattaatacttttatttcttcccctatcccttccttcctagttgtgataaacatgggagaggagtgactttgactgctggggaatttcctcctaagaaccttattcccaaaataagccagggattatgtcaaggcttctttcaaggaggctcataaaagcagtgacctcatccggggctttggatagagtgagaattccccaactaaattggacttctctgctttatccccttctcttccttcaccatctgcactacatttctggctgatcccaatcagattcccgctaatggaagaagtttagaatctttcaggtggaataaagtcacatgaaaacaaaacacaactatatatattttcagtttttttgccttattgatttttttccaaaaaaaaaaaactactaaattaaataattttttaaaagtcaaaaaaaaaaaaacaaaaaaaaaaaacaaaaacaatgtgtggtggggcgacgcctcgggagccctagaaaaaaggctttctaaacaccaacagtctccggtggggcgccccggggcccacgatcgatgtccacgagaacaacggggcaacagtgggtgttctccctgaagaaaatcccggcggcccatgagaacagcggtgtgcggcgattctccccacagataaaaacaagcccccggggcgtaaccccaagccgggtgtaggaacaacactaccagaaagggggcgctgagagggccacctaacgcgagcctcatccgacgggagacccaagacacgccctgaattaaatatacgcagccagg

SEQ ID NO: 298117 - DNA, 5169 bp, Homo sapiens
  misc_feature (5087)..(5087): n is a, c, g, or t
agaagagcgatgggagggggtgacgtggcagtgacaggcgcataaactgaaatgaatggcggaaacagcagccaatcggcgatcagattggccgggcattccgcattctcccgtcctccctgagcgctggaaacttcaggaaagcaccaatgagcttccccaaaagtctgattggcctttatctgaaccaatcaaaggtgggtctggcggacgcgtcccaccccaggctctcactgggcgctgtagaatgacaggcccgagagaaatgccaatatccgcggggtcttcctcaagtgacactcagcggcaccaatcgacgtccttcttcccggcggccgagccctcctccccgcggctggccgggcggggcggggacgctgcgcggcggtggctgatgcggtagccgtgtggggcgctccgggcggcgacggcggctctcgtaggcggttccggtcttgtatctccaggcggcggcggctcatggcggcgacggagctgagaggagtggtggggccaggcccggcagccattgcagcacttggcggcggcggcgccggtcccccagtggtgggaggaggcggcggccgcggagatgcggggccaggctccggggccgcgtcagggacggtggtcgcggcggcggcgggaggcccgggcccgggggccgggggagtggcggcggctggcccggcccctgcgccgccgactgggggctcgggcggctcgggcgctgggggttcgggctcggctcgagagggctggctcttcaaatggaccaattatatcaaaggctaccagcggcgatggttcgtgctgagcaacgggctcctgagctactacagatcaaaggcagaaatgagacatacctgccgtggtaccatcaacctcgccacagccaacatcaccgtggaggactcctgcaacttcatcatttccaatgggggtgctcagacctaccatctgaaagctagttcagaagttgagcggcagcgctgggtgacggccctggaactggccaaggccaaagctgtgaagatgctggcagagtcagatgaatcaggagatgaagagtctgtctcacaaactgacaagactgagctgcagaatacccttcggaccctctctagcaaagtagaggacttgagcacgtgcaatgacttgatagctaagcatggcacagctctgcagcgttctctcagtgagctggagtccctgaagttgcctgctgagagcaatgaaaagatcaaacaggtcaacgaacgagccacactctttaggataacatccaatgccatgatcaacgcctgcagagatttcctcatgttagcccagacccatagtaaaaaatggcaaaagtcactacagtatgaaagagaccagcgtatccgactggaagaaaccctcgagcagctggcgaagcagcataatcacctggagagggccttccgaggagccacggtgctgccggcaaacactcctggcaatgtgggttctggtaaagatcagtgctgctctggcaaaggggacatgagcgatgaagatgatgagaatgaattttttgatgcacctgagatcatcaccatgcctgaaaatttgggccacaaacgtactggcagcaatatcagtggagccagcagtgacatcagccttgatgaacagtacaagcatcagctggaggagaccaaaaaggaaaagagaaccagaataccatacaagccaaactatagcctcaatttatggagcatcatgaagaactgcattggaaaagaactctctaagatccccatgccggtaaactttaatgagcccttgtccatgcttcagcgccttactgaagatctggaataccatgagctgttagaccgagctgcaaaatgtgagaattctctagaacagctctgttatgttgcagctttcaccgtgtcctcctactccactactgtcttccgcaccagtaagccattcaacccactgcttggggagacctttgagctggaccgattagaggagaatgggtaccgatccctctgtgaacaggtgagtcatcatccccctgctgctgcgcaccatgctgagtccaaaaatggctggacattgcgtcaggaaatcaaaatcaccagcaagtttcgaggcaaatacctctccattatgcccctcggtaccattcattgtattttccatgcaactgggcaccactacacttggaagaaagttaccacaactgtacacaacattattgtgggcaagttgtggatagatcagtctggcgaaattgatattgtgaatcacaagacaggagacaagtgtaatcttaaatttgttccttatagctacttctctcgggatgtagcaagaaaggtgacgggggaagtgacagatccatcaggaaaagtccactttgctcttctggggacgtgggatgagaaaatggaatgtttcaaagtacagccagtcattggggaaaatgggggtgatgctcgacagagaggccatgaagcagaggaaagcagggtcatgctgtggaaaaggaatcctttaccgaagaatgcagaaaacatgtactacttctcagagcttgctctgactctcaatgcttgggaaagtggcactgcccccacagacagccggttacgacctgaccagagactgatggaaaatggacgctgggatgaagcaaatgcggagaagcagcgcctggaggaaaaacaaagactttccagaaagaagagagaagcggaagctatgaaagccacagaggatggcacaccatatgatccctataaggcactgtggtttgagcggaagaaggaccctgttaccaaggagttaacccatatttataggggagaatactgggagtgtaaagaaaaacaggactggagctcatgcccggacattttctgaaacggcagtaacaaaaaagaggagcatataatggagaagaggacagaggatgtgtgggaaagctggaagttgtgactctcttaccaagtgctttcctcaagtttgtctctcttgaccaatcattttttccaaatcaatcaccagaaggagacaccagtggtggtgattggctggttgccttagctgattgaaactgaaatcgacataggagatactatgtctgtaagggagaggtttagtggccgaaggttagtgttattccacatccacgaagtcaagtattcttggctcttctttctccctctgcccccatttaagacaatgtcactcaccctccccttgtagtatcctgctcagccaagatctgcctaagattatgattcaggggcattttggtgctgttaaaagcaagagccgaatttagaagttcccttaaaaagaaacacataagacttaccaatggaggcattgtgaatggttgcagtggagcttaggtataacatcatcaagtgtgttcacacgcggggtcggtttaatggagtgtccacgcggagataactgcgatattggaacacctgtgagagagattgttctatagggctggaatattcagagttacattcttggaagtttctgtttttacttgcatcaaacacccctctgttgttctccatcatctttaatagcaactggagaccactttggtcattggtaagggggtgcattctcctcacaaaggggttttatggacttcctcaggcggagagcttctgagaacacaggcaggatggaaaaagactactagccacttttgctttcccaaccccccttaatgccatccttcattgtctttctggcttctcttcttctggcacagtaccattttgggtctgtgccccagtgtggagcaaaacattgcctgtcccattctgatatacttcagaatttgagagcagaagttaatgtggaacaaaagttttcaccatctctcaagccccaaggactggagccacctctggaataatgtgttaaatatctgtatattatatatatgtagagaaaaatctaattttttggtttgatttccttcccattaagaatcttgttttttgatacccttgtctccctgagactctttcttggacacgtgttgatgtggatggcactcctgctctccatcttttatgggcagagagatttcaaaacctgagcaggatcatgtctggcagttactaaacagggactttgtccatggtttgtatcatggggtgcctactgctgtctaaactctgctctcctaattagctgactcttgaaaatgaaatcctaacctctttcctgcctcttttctttctcttttcaggaagagtgtgggtagaaagtccggagggcaacttccaatttaattctgctctgtccggcgcataggctgaattccaaaagaactttcttcctaggatgtggggcttaaagcaccgtcatgtggggtggatcagataattgctcctgtggggccctggcttccttctctgtttgtgcagtatttgtttttgttgtcttgttgagaaatatcccctgtgcaacccacccttggttgaggatcacaaattgaggtgccttccttgtatgctttttgttagtattttttgtttttgttccttaactgctgagcctcagccagcgtgggtcctgggggaaataccattccaaaggaagccatccctatggggaaattggttttactgggtaaattaatacttttatttcttcccctatcccttccttcctagttgtgataaacatgggagaggagtgactttgactgctggggaatttcctcctaagaaccttattcccaaaataagccagggattatgtcaaggcttctttcaaggaggctcataaaagcagtgacctcatccggggctttggatagagtgagaattccccaactaaattggacttctctgctttatccccttctcttccttcaccatctgcactacatttctggctgatcccaatcagattcccgctaatggaagaagtttagaatctttcaggtggaataaagtcacatgaaaacaaaacacaactatatatattttcagtttttttgccttattgatttttttccaaaaaaaaaaaactactaaattaaataattttttaaaagtcaaaanaaaaatttcccccgtggaatttctatccttttaatcaaatattcctgtaattctttttccaatttaagggttttaaaaaaaa

SEQ ID NO: 298118 - DNA, 4988 bp, Homo sapiens
agaagagcgatgggagggggtgacgtggcagtgacaggcgcataaactgaaatgaatggcggaaacagcagccaatcggcgatcagattggccgggcattccgcattctcccgtcctccctgagcgctggaaacttcaggaaagcaccaatgagcttccccaaaagtctgattggcctttatctgaaccaatcaaaggtgggtctggcggacgcgtcccaccccaggctctcactgggcgctgtagaatgacaggcccgagagaaatgccaatatccgcggggtcttcctcaagtgacactcagcggcaccaatcgacgtccttcttcccggcggccgagccctcctccccgcggctggccgggcggggcggggacgctgcgcggcggtggctgatgcggtagccgtgtggggcgctccgggcggcgacggcggctctcgtaggcggttccggtcttgtatctccaggcggcggcggctcatggcggcgacggagctgagaggagtggtggggccaggcccggcagccattgcagcacttggcggcggcggcgccggtcccccagtggtgggaggaggcggcggccgcggagatgcggggccaggctccggggccgcgtcagggacggtggtcgcggcggcggcgggaggcccgggcccgggggccgggggagtggcggcggctggcccggcccctgcgccgccgactgggggctcgggcggctcgggcgctgggggttcgggctcggctcgagagggctggctcttcaaatggaccaattatatcaaaggctaccagcggcgatggttcgtgctgagcaacgggctcctgagctactacagatcaaaggcagaaatgagacatacctgccgtggtaccatcaacctcgccacagccaacatcaccgtggaggactcctgcaacttcatcatttccaatgggggtgctcagacctaccatctgaaagctagttcagaagttgagcggcagcgctgggtgacggccctggaactggccaaggccaaagctgtgaagatgctggcagagtcagatgaatcaggagatgaagagtctgtctcacaaactgacaagactgagctgcagaatacccttcggaccctctctagcaaagtagaggacttgagcacgtgcaatgacttgatagctaagcatggcacagctctgcagcgttctctcagtgagctggagtccctgaagttgcctgctgagagcaatgaaaagatcaaacaggtcaacgaacgagccacactctttaggataacatccaatgccatgatcaacgcctgcagagatttcctcatgttagcccagacccatagtaaaaaatggcaaaagtcactacagtatgaaagagaccagcgtatccgactggaagaaaccctcgagcagctggcgaagcagcataatcacctggagagggccttccgaggagccacggtgctgccggcaaacactcctggcaatgtgggttctggtaaagatcagtgctgctctggcaaaggggacatgagcgatgaagatgatgagaatgaattttttgatgcacctgagatcatcaccatgcctgaaaatttgggccacaaacgtactggcagcaatatcagtggagccagcagtgacatcagccttgatgaacagtacaagcatcagctggaggagaccaaaaaggaaaagagaaccagaataccatacaagccaaactatagcctcaatttatggagcatcatgaagaactgcattggaaaagaactctctaagatccccatgccggtaaactttaatgagcccttgtccatgcttcagcgccttactgaagatctggaataccatgagctgttagaccgagctgcaaaatgtgagaattctctagaacagctctgttatgttgcagctttcaccgtgtcctcctactccactactgtcttccgcaccagtaagccattcaacccactgcttggggagacctttgagctggaccgattagaggagaatgggtaccgatccctctgtgaacaggtgagtcatcatccccctgctgctgcgcaccatgctgagtccaaaaatggctggacattgcgtcaggaaatcaaaatcaccagcaagtttcgaggcaaatacctctccattatgcccctcggtaccattcattgtattttccatgcaactgggcaccactacacttggaagaaagttaccacaactgtacacaacattattgtgggcaagttgtggatagatcagtctggcgaaattgatattgtgaatcacaagacaggagacaagtgtaatcttaaatttgttccttatagctacttctctcgggatgtagcaagaaaggtgacgggggaagtgacagatccatcaggaaaagtccactttgctcttctggggacgtgggatgagaaaatggaatgtttcaaagtacagccagtcattggggaaaatgggggtgatgctcgacagagaggccatgaagcagaggaaagcagggtcatgctgtggaaaaggaatcctttaccgaagaatgcagaaaacatgtactacttctcagagcttgctctgactctcaatgcttgggaaagtggcactgcccccacagacagccggttacgacctgaccagagactgatggaaaatggacgctgggatgaagcaaatgcggagaagcagcgcctggaggaaaaacaaagactttccagaaagaagagagaagcggaagctatgaaagccacagaggatggcacaccatatgatccctataaggcactgtggtttgagcggaagaaggaccctgttaccaaggagttaacccatatttataggggagaatactgggagtgtaaagaaaaacaggactggagctcatgcccggacattttctgaaacggcagtaacaaaaaagaggagcatataatggagaagaggacagaggatgtgtgggaaagctggaagttgtgactctcttaccaagtgctttcctcaagtttgtctctcttgaccaatcattttttccaaatcaatcaccagaaggagacaccagtggtggtgattggctggttgccttagctgattgaaactgaaatcgacataggagatactatgtctgtaagggagaggtttagtggccgaaggttagtgttattccacatccacgaagtcaagtattcttggctcttctttctccctctgcccccatttaagacaatgtcactcaccctccccttgtagtatcctgctcagccaagatctgcctaagattatgattcaggggcattttggtgctgttaaaagcaagagccgaatttagaagttcccttaaaaagaaacacataagacttaccaatggaggcattgtgaatggttgcagtggagcttaggtataacatcatcaagtgtgttcacacgcggggtcggtttaatggagtgtccacgcggagataactgcgatattggaacacctgtgagagagattgttctatagggctggaatattcagagttacattcttggaagtttctgtttttacttgcatcaaacacccctctgttgttctccatcatctttaatagcaactggagaccactttggtcattggtaagggggtgcattctcctcacaaaggggttttatggacttcctcaggcggagagcttctgagaacacaggcaggatggaaaaagactactagccacttttgctttcccaaccccccttaatgccatccttcattgtctttctggcttctcttcttctggcacagtaccattttgggtctgtgccccagtgtggagcaaaacattgcctgtcccattctgatatacttcagaatttgagagcagaagttaatgtggaacaaaagttttcaccatctctcaagccccaaggactggagccacctctggaataatgtgttaaatatctgtatattatatatatgtagagaaaaatctaattttttggtttgatttccttcccattaagaatcttgttttttgatacccttgtctccctgagactctttcttggacacgtgttgatgtggatggcactcctgctctccatcttttatgggcagagagatttcaaaacctgagcaggatcatgtctggcagttactaaacagggactttgtccatggtttgtatcatggggtgcctactgctgtctaaactctgctctcctaattagctgactcttgaaaatgaaatcctaacctctttcctgcctcttttctttctcttttcaggaagagtgtgggtagaaagtccggagggcaacttccaatttaattctgctctgtccggcgcataggctgaattccaaaagaactttcttcctaggatgtggggcttaaagcaccgtcatgtggggtggatcagataattgctcctgtggggccctggcttccttctctgtttgtgcagtatttgtttttgttgtcttgttgagaaatatcccctgtgcaacccacccttggttgaggatcacaaattgaggtgccttccttgtatgctttttgttagtattttttgtttttgttccttaactgctgagcctcagccagcgtgggtcctgggggaaataccattccaaaggaagccatccctatggggaaattggttttactgggtaaattaatacttttatttcttcccctatcccttccttcctagttgtgataaacatgggagaggagtgactttgactgctggggaatttcctcctaagaaccttattcccaaaataagccagggattatgtcaaggcttctttcaaggaggctcataaaagcagtgacctcatccggggctttggatagagtgagaattccccaactaaattggacttctctgctttatccccttctcttccttcaccatctgcactacatttctggctgatcccaatcagattcccgctaatggaagaagtttagaatctttcaggtggaataaagtcacatgaaa

SEQ ID NO: 298119 - DNA, 5368 bp, Homo sapiens
agaagagcgatgggagggggtgacgtggcagtgacaggcgcataaactgaaatgaatggcggaaacagcagccaatcggcgatcagattggccgggcattccgcattctcccgtcctccctgagcgctggaaacttcaggaaagcaccaatgagcttccccaaaagtctgattggcctttatctgaaccaatcaaaggtgggtctggcggacgcgtcccaccccaggctctcactgggcgctgtagaatgacaggcccgagagaaatgccaatatccgcggggtcttcctcaagtgacactcagcggcaccaatcgacgtccttcttcccggcggccgagccctcctccccgcggctggccgggcggggcggggacgctgcgcggcggtggctgatgcggtagccgtgtggggcgctccgggcggcgacggcggctctcgtaggcggttccggtcttgtatctccaggcggcggcggctcatggcggcgacggagctgagaggagtggtggggccaggcccggcagccattgcagcacttggcggcggcggcgccggtcccccagtggtgggaggaggcggcggccgcggagatgcggggccaggctccggggccgcgtcagggacggtggtcgcggcggcggcgggaggcccgggcccgggggccgggggagtggcggcggctggcccggcccctgcgccgccgactgggggctcgggcggctcgggcgctgggggttcgggctcggctcgagagggctggctcttcaaatggaccaattatatcaaaggctaccagcggcgatggttcgtgctgagcaacgggctcctgagctactacagatcaaaggcagaaatgagacatacctgccgtggtaccatcaacctcgccacagccaacatcaccgtggaggactcctgcaacttcatcatttccaatgggggtgctcagacctaccatctgaaagctagttcagaagttgagcggcagcgctgggtgacggccctggaactggccaaggccaaagctgtgaagatgctggcagagtcagatgaatcaggagatgaagagtctgtctcacaaactgacaagactgagctgcagaatacccttcggaccctctctagcaaagtagaggacttgagcacgtgcaatgacttgatagctaagcatggcacagctctgcagcgttctctcagtgagctggagtccctgaagttgcctgctgagagcaatgaaaagatcaaacaggtcaacgaacgagccacactctttaggataacatccaatgccatgatcaacgcctgcagagatttcctcatgttagcccagacccatagtaaaaaatggcaaaagtcactacagtatgaaagagaccagcgtatccgactggaagaaaccctcgagcagctggcgaagcagcataatcacctggagagggccttccgaggagccacggtgctgccggcaaacactcctggcaatgtgggttctggtaaagatcagtgctgctctggcaaaggggacatgagcgatgaagatgatgagaatgaattttttgatgcacctgagatcatcaccatgcctgaaaatttgggccacaaacgtactggcagcaatatcagtggagccagcagtgacatcagccttgatgaacagtacaagcatcagctggaggagaccaaaaaggaaaagagaaccagaataccatacaagccaaactatagcctcaatttatggagcatcatgaagaactgcattggaaaagaactctctaagatccccatgccggtaaactttaatgagcccttgtccatgcttcagcgccttactgaagatctggaataccatgagctgttagaccgagctgcaaaatgtgagaattctctagaacagctctgttatgttgcagctttcaccgtgtcctcctactccactactgtcttccgcaccagtaagccattcaacccactgcttggggagacctttgagctggaccgattagaggagaatgggtaccgatccctctgtgaacaggtaaaggaacctcagaaccataacgcatttcctttctgaagaaagagatgattttttggttaatcccctgggtcttatgtttgcagaaattctagtccctgtcatcccagcttttattctttttcttcagaacgtcagcgttggagaccctggaggttctgggattcacctactgttgtgggtgtaaaaacgtcaagtgtgaattttggtgtttctcaccaatttataggcagtatctttttcttctcctttctgccgtcttaatttgaacctgatttcttcaaggtgagtcatcatccccctgctgctgcgcaccatgctgagtccaaaaatggctggacattgcgtcaggaaatcaaaatcaccagcaagtttcgaggcaaatacctctccattatgcccctcggtaccattcattgtattttccatgcaactgggcaccactacacttggaagaaagttaccacaactgtacacaacattattgtgggcaagttgtggatagatcagtctggcgaaattgatattgtgaatcacaagacaggagacaagtgtaatcttaaatttgttccttatagctacttctctcgggatgtagcaagaaaggtgacgggggaagtgacagatccatcaggaaaagtccactttgctcttctggggacgtgggatgagaaaatggaatgtttcaaagtacagccagtcattggggaaaatgggggtgatgctcgacagagaggccatgaagcagaggaaagcagggtcatgctgtggaaaaggaatcctttaccgaagaatgcagaaaacatgtactacttctcagagcttgctctgactctcaatgcttgggaaagtggcactgcccccacagacagccggttacgacctgaccagagactgatggaaaatggacgctgggatgaagcaaatgcggagaagcagcgcctggaggaaaaacaaagactttccagaaagaagagagaagcggaagctatgaaagccacagaggatggcacaccatatgatccctataaggcactgtggtttgagcggaagaaggaccctgttaccaaggagttaacccatatttataggggagaatactgggagtgtaaagaaaaacaggactggagctcatgcccggacattttctgaaacggcagtaacaaaaaagaggagcatataatggagaagaggacagaggatgtgtgggaaagctggaagttgtgactctcttaccaagtgctttcctcaagtttgtctctcttgaccaatcattttttccaaatcaatcaccagaaggagacaccagtggtggtgattggctggttgccttagctgattgaaactgaaatcgacataggagatactatgtctgtaagggagaggtttagtggccgaaggttagtgttattccacatccacgaagtcaagtattcttggctcttctttctccctctgcccccatttaagacaatgtcactcaccctccccttgtagtatcctgctcagccaagatctgcctaagattatgattcaggggcattttggtgctgttaaaagcaagagccgaatttagaagttcccttaaaaagaaacacataagacttaccaatggaggcattgtgaatggttgcagtggagcttaggtataacatcatcaagtgtgttcacacgcggggtcggtttaatggagtgtccacgcggagataactgcgatattggaacacctgtgagagagattgttctatagggctggaatattcagagttacattcttggaagtttctgtttttacttgcatcaaacacccctctgttgttctccatcatctttaatagcaactggagaccactttggtcattggtaagggggtgcattctcctcacaaaggggttttatggacttcctcaggcggagagcttctgagaacacaggcaggatggaaaaagactactagccacttttgctttcccaaccccccttaatgccatccttcattgtctttctggcttctcttcttctggcacagtaccattttgggtctgtgccccagtgtggagcaaaacattgcctgtcccattctgatatacttcagaatttgagagcagaagttaatgtggaacaaaagttttcaccatctctcaagccccaaggactggagccacctctggaataatgtgttaaatatctgtatattatatatatgtagagaaaaatctaattttttggtttgatttccttcccattaagaatcttgttttttgatacccttgtctccctgagactctttcttggacacgtgttgatgtggatggcactcctgctctccatcttttatgggcagagagatttcaaaacctgagcaggatcatgtctggcagttactaaacagggactttgtccatggtttgtatcatggggtgcctactgctgtctaaactctgctctcctaattagctgactcttgaaaatgaaatcctaacctctttcctgcctcttttctttctcttttcaggaagagtgtgggtagaaagtccggagggcaacttccaatttaattctgctctgtccggcgcataggctgaattccaaaagaactttcttcctaggatgtggggcttaaagcaccgtcatgtggggtggatcagataattgctcctgtggggccctggcttccttctctgtttgtgcagtatttgtttttgttgtcttgttgagaaatatcccctgtgcaacccacccttggttgaggatcacaaattgaggtgccttccttgtatgctttttgttagtattttttgtttttgttccttaactgctgagcctcagccagcgtgggtcctgggggaaataccattccaaaggaagccatccctatggggaaattggttttactgggtaaattaatacttttatttcttcccctatcccttccttcctagttgtgataaacatgggagaggagtgactttgactgctggggaatttcctcctaagaaccttattcccaaaataagccagggattatgtcaaggcttctttcaaggaggctcataaaagcagtgacctcatccggggctttggatagagtgagaattccccaactaaattggacttctctgctttatccccttctcttccttcaccatctgcactacatttctggctgatcccaatcagattcccgctaatggaagaagtttagaatctttcaggtggaataaagtcacatgaaaacaaaacacaactatatatattttcagtttttttgccttattgatttttttccaaaaaaaaaaaactactaaattaaataattttttaaaagtca

SEQ ID NO: 298120 - DNA, 3761 bp, Homo sapiens
ctagtcagcccccgcgttaatcggcaccgaggaaagcctacagtatgaaagagaccagcgtatccgactggaagaaaccctcgagcagctggcgaagcagcataatcacctggagagggccttccgaggagccacggtgctgccggcaaacactcctggcaatgtgggttctggtaaagatcagtgctgctctggcaaaggggacatgagcgatgaagatgatgagaatgaattttttgatgcacctgagatcatcaccatgcctgaaaatttgggccacaaacgtactggcagcaatatcagtggagccagcagtgacatcagccttgatgaacagtacaagcatcagctggaggagaccaaaaaggaaaagagaaccagaataccatacaagccaaactatagcctcaatttatggagcatcatgaagaactgcattggaaaagaactctctaagatccccatgccggtaaactttaatgagcccttgtccatgcttcagcgccttactgaagatctggaataccatgagctgttagaccgagctgcaaaatgtgagaattctctagaacagctctgttatgttgcagctttcaccgtgtcctcctactccactactgtcttccgcaccagtaagccattcaacccactgcttggggagacctttgagctggaccgattagaggagaatgggtaccgatccctctgtgaacaggtgagtcatcatccccctgctgctgcgcaccatgctgagtccaaaaatggctggacattgcgtcaggaaatcaaaatcaccagcaagtttcgaggcaaatacctctccattatgcccctcggtaccattcattgtattttccatgcaactgggcaccactacacttggaagaaagttaccacaactgtacacaacattattgtgggcaagttgtggatagatcagtctggcgaaattgatattgtgaatcacaagacaggagacaagtgtaatcttaaatttgttccttatagctacttctctcgggatgtagcaagaaaggtgacgggggaagtgacagatccatcaggaaaagtccactttgctcttctggggacgtgggatgagaaaatggaatgtttcaaagtacagccagtcattggggaaaatgggggtgatgctcgacagagaggccatgaagcagaggaaagcagggtcatgctgtggaaaaggaatcctttaccgaagaatgcagaaaacatgtactacttctcagagcttgctctgactctcaatgcttgggaaagtggcactgcccccacagacagccggttacgacctgaccagagactgatggaaaatggacgctgggatgaagcaaatgcggagaagcagcgcctggaggaaaaacaaagactttccagaaagaagagagaagcggaagctatgaaagccacagaggatggcacaccatatgatccctataaggcactgtggtttgagcggaagaaggaccctgttaccaaggagttaacccatatttataggggagaatactgggagtgtaaagaaaaacaggactggagctcatgcccggacattttctgaaacggcagtaacaaaaaagaggagcatataatggagaagaggacagaggatgtgtgggaaagctggaagttgtgactctcttaccaagtgctttcctcaagtttgtctctcttgaccaatcattttttccaaatcaatcaccagaaggagacaccagtggtggtgattggctggttgccttagctgattgaaactgaaatcgacataggagatactatgtctgtaagggagaggtttagtggccgaaggttagtgttattccacatccacgaagtcaagtattcttggctcttctttctccctctgcccccatttaagacaatgtcactcaccctccccttgtagtatcctgctcagccaagatctgcctaagattatgattcaggggcattttggtgctgttaaaagcaagagccgaatttagaagttcccttaaaaagaaacacataagacttaccaatggaggcattgtgaatggttgcagtggagcttaggtataacatcatcaagtgtgttcacacgcggggtcggtttaatggagtgtccacgcggagataactgcgatattggaacacctgtgagagagattgttctatagggctggaatattcagagttacattcttggaagtttctgtttttacttgcatcaaacacccctctgttgttctccatcatctttaatagcaactggagaccactttggtcattggtaagggggtgcattctcctcacaaaggggttttatggacttcctcaggcggagagcttctgagaacacaggcaggatggaaaaagactactagccacttttgctttcccaaccccccttaatgccatccttcattgtctttctggcttctcttcttctggcacagtaccattttgggtctgtgccccagtgtggagcaaaacattgcctgtcccattctgatatacttcagaatttgagagcagaagttaatgtggaacaaaagttttcaccatctctcaagccccaaggactggagccacctctggaataatgtgttaaatatctgtatattatatatatgtagagaaaaatctaattttttggtttgatttccttcccattaagaatcttgttttttgatacccttgtctccctgagactctttcttggacacgtgttgatgtggatggcactcctgctctccatcttttatgggcagagagatttcaaaacctgagcaggatcatgtctggcagttactaaacagggactttgtccatggtttgtatcatggggtgcctactgctgtctaaactctgctctcctaattagctgactcttgaaaatgaaatcctaacctctttcctgcctcttttctttctcttttcaggaagagtgtgggtagaaagtccggagggcaacttccaatttaattctgctctgtccggcgcataggctgaattccaaaagaactttcttcctaggatgtggggcttaaagcaccgtcatgtggggtggatcagataattgctcctgtggggccctggcttccttctctgtttgtgcagtatttgtttttgttgtcttgttgagaaatatcccctgtgcaacccacccttggttgaggatcacaaattgaggtgccttccttgtatgctttttgttagtattttttgtttttgttccttaactgctgagcctcagccagcgtgggtcctgggggaaataccattccaaaggaagccatccctatggggaaattggttttactgggtaaattaatacttttatttcttcccctatcccttccttcctagttgtgataaacatgggagaggagtgactttgactgctggggaatttcctcctaagaaccttattcccaaaataagccagggattatgtcaaggcttctttcaaggaggctcataaaagcagtgacctcatccggggctttggatagagtgagaattccccaactaaattggacttctctgctttatccccttctcttccttcaccatctgcactacatttctggctgatcccaatcagattcccgctaatggaagaagtttagaatctttcaggtggaataaagtcacatgaaaacaaaacacaactatatatattttcagtttttttgccttattgatttttttccaaaaaaaaaaaactactaaattaaataattttttaaaagtca

SEQ ID NO: 298121 - DNA, 3952 bp, Homo sapiens
tgtggttagtatttaaaagaacttgctatatcagacatttggtaaagataaccaaagtcaacaaatggggcttttcttcttgtagatcagtgctgctctggcaaaggggacatgagcgatgaagatgatgagaatgaattttttgatgcacctgagatcatcaccatgcctgaaaatttgggccacaaacgtactggcagcaatatcagtggagccagcagtgacatcagccttgatgaacagtacaagcatcagctggaggagaccaaaaaggaaaagagaaccagaataccatacaagccaaactatagcctcaatttatggagcatcatgaagaactgcattggaaaagaactctctaagatccccatgccggtaaactttaatgagcccttgtccatgcttcagcgccttactgaagatctggaataccatgagctgttagaccgagctgcaaaatgtgagaattctctagaacagctctgttatgttgcagctttcaccgtgtcctcctactccactactgtcttccgcaccagtaagccattcaacccactgcttggggagacctttgagctggaccgattagaggagaatgggtaccgatccctctgtgaacaggtaaaggaacctcagaaccataacgcatttcctttctgaagaaagagatgattttttggttaatcccctgggtcttatgtttgcagaaattctagtccctgtcatcccagcttttattctttttcttcagaacgtcagcgttggagaccctggaggttctgggattcacctactgttgtgggtgtaaaaacgtcaagtgtgaattttggtgtttctcaccaatttataggcagtatctttttcttctcctttctgccgtcttaatttgaacctgatttcttcaaggtgagtcatcatccccctgctgctgcgcaccatgctgagtccaaaaatggctggacattgcgtcaggaaatcaaaatcaccagcaagtttcgaggcaaatacctctccattatgcccctcggtaccattcattgtattttccatgcaactgggcaccactacacttggaagaaagttaccacaactgtacacaacattattgtgggcaagttgtggatagatcagtctggcgaaattgatattgtgaatcacaagacaggagacaagtgtaatcttaaatttgttccttatagctacttctctcgggatgtagcaagaaaggtgacgggggaagtgacagatccatcaggaaaagtccactttgctcttctggggacgtgggatgagaaaatggaatgtttcaaagtacagccagtcattggggaaaatgggggtgatgctcgacagagaggccatgaagcagaggaaagcagggtcatgctgtggaaaaggaatcctttaccgaagaatgcagaaaacatgtactacttctcagagcttgctctgactctcaatgcttgggaaagtggcactgcccccacagacagccggttacgacctgaccagagactgatggaaaatggacgctgggatgaagcaaatgcggagaagcagcgcctggaggaaaaacaaagactttccagaaagaagagagaagcggaagctatgaaagccacagaggatggcacaccatatgatccctataaggcactgtggtttgagcggaagaaggaccctgttaccaaggagttaacccatatttataggggagaatactgggagtgtaaagaaaaacaggactggagctcatgcccggacattttctgaaacggcagtaacaaaaaagaggagcatataatggagaagaggacagaggatgtgtgggaaagctggaagttgtgactctcttaccaagtgctttcctcaagtttgtctctcttgaccaatcattttttccaaatcaatcaccagaaggagacaccagtggtggtgattggctggttgccttagctgattgaaactgaaatcgacataggagatactatgtctgtaagggagaggtttagtggccgaaggttagtgttattccacatccacgaagtcaagtattcttggctcttctttctccctctgcccccatttaagacaatgtcactcaccctccccttgtagtatcctgctcagccaagatctgcctaagattatgattcaggggcattttggtgctgttaaaagcaagagccgaatttagaagttcccttaaaaagaaacacataagacttaccaatggaggcattgtgaatggttgcagtggagcttaggtataacatcatcaagtgtgttcacacgcggggtcggtttaatggagtgtccacgcggagataactgcgatattggaacacctgtgagagagattgttctatagggctggaatattcagagttacattcttggaagtttctgtttttacttgcatcaaacacccctctgttgttctccatcatctttaatagcaactggagaccactttggtcattggtaagggggtgcattctcctcacaaaggggttttatggacttcctcaggcggagagcttctgagaacacaggcaggatggaaaaagactactagccacttttgctttcccaaccccccttaatgccatccttcattgtctttctggcttctcttcttctggcacagtaccattttgggtctgtgccccagtgtggagcaaaacattgcctgtcccattctgatatacttcagaatttgagagcagaagttaatgtggaacaaaagttttcaccatctctcaagccccaaggactggagccacctctggaataatgtgttaaatatctgtatattatatatatgtagagaaaaatctaattttttggtttgatttccttcccattaagaatcttgttttttgatacccttgtctccctgagactctttcttggacacgtgttgatgtggatggcactcctgctctccatcttttatgggcagagagatttcaaaacctgagcaggatcatgtctggcagttactaaacagggactttgtccatggtttgtatcatggggtgcctactgctgtctaaactctgctctcctaattagctgactcttgaaaatgaaatcctaacctctttcctgcctcttttctttctcttttcaggaagagtgtgggtagaaagtccggagggcaacttccaatttaattctgctctgtccggcgcataggctgaattccaaaagaactttcttcctaggatgtggggcttaaagcaccgtcatgtggggtggatcagataattgctcctgtggggccctggcttccttctctgtttgtgcagtatttgtttttgttgtcttgttgagaaatatcccctgtgcaacccacccttggttgaggatcacaaattgaggtgccttccttgtatgctttttgttagtattttttgtttttgttccttaactgctgagcctcagccagcgtgggtcctgggggaaataccattccaaaggaagccatccctatggggaaattggttttactgggtaaattaatacttttatttcttcccctatcccttccttcctagttgtgataaacatgggagaggagtgactttgactgctggggaatttcctcctaagaaccttattcccaaaataagccagggattatgtcaaggcttctttcaaggaggctcataaaagcagtgacctcatccggggctttggatagagtgagaattccccaactaaattggacttctctgctttatccccttctcttccttcaccatctgcactacatttctggctgatcccaatcagattcccgctaatggaagaagtttagaatctttcaggtggaataaagtcacatgaaaacaaaacacaactatatatattttcagtttttttgccttattgatttttttccaaaaaaaaaaaactactaaattaaataattttttaaaagtca

SEQ ID NO: 298122 - DNA, 3883 bp, Homo sapiens
agaagagcgatgggagggggtgacgtggcagtgacaggcgcataaactgaaatgaatggcggaaacagcagccaatcggcgatcagattggccgggcattccgcattctcccgtcctccctgagcgctggaaacttcaggaaagcaccaatgagcttccccaaaagtctgattggcctttatctgaaccaatcaaaggtgggtctggcggacgcgtcccaccccaggctctcactgggcgctgtagaatgacaggcccgagagaaatgccaatatccgcggggtcttcctcaagtgacactcagcggcaccaatcgacgtccttcttcccggcggccgagccctcctccccgcggctggccgggcggggcggggacgctgcgcggcggtggctgatgcggtagccgtgtggggcgctccgggcggcgacggcggctctcgtaggcggttccggtcttgtatctccaggcggcggcggctcatggcggcgacggagctgagaggagtggtggggccaggcccggcagccattgcagcacttggcggcggcggcgccggtcccccagtggtgggaggaggcggcggccgcggagatgcggggccaggctccggggccatgcttcagcgccttactgaagatctggaataccatgagctgttagaccgagctgcaaaatgtgagaattctctagaacagctctgttatgttgcagctttcaccgtgtcctcctactccactactgtcttccgcaccagtaagccattcaacccactgcttggggagacctttgagctggaccgattagaggagaatgggtaccgatccctctgtgaacaggtgagtcatcatccccctgctgctgcgcaccatgctgagtccaaaaatggctggacattgcgtcaggaaatcaaaatcaccagcaagtttcgaggcaaatacctctccattatgcccctcggtaccattcattgtattttccatgcaactgggcaccactacacttggaagaaagttaccacaactgtacacaacattattgtgggcaagttgtggatagatcagtctggcgaaattgatattgtgaatcacaagacaggagacaagtgtaatcttaaatttgttccttatagctacttctctcgggatgtagcaagaaaggtgacgggggaagtgacagatccatcaggaaaagtccactttgctcttctggggacgtgggatgagaaaatggaatgtttcaaagtacagccagtcattggggaaaatgggggtgatgctcgacagagaggccatgaagcagaggaaagcagggtcatgctgtggaaaaggaatcctttaccgaagaatgcagaaaacatgtactacttctcagagcttgctctgactctcaatgcttgggaaagtggcactgcccccacagacagccggttacgacctgaccagagactgatggaaaatggacgctgggatgaagcaaatgcggagaagcagcgcctggaggaaaaacaaagactttccagaaagaagagagaagcggaagctatgaaagccacagaggatggcacaccatatgatccctataaggcactgtggtttgagcggaagaaggaccctgttaccaaggagttaacccatatttataggggagaatactgggagtgtaaagaaaaacaggactggagctcatgcccggacattttctgaaacggcagtaacaaaaaagaggagcatataatggagaagaggacagaggatgtgtgggaaagctggaagttgtgactctcttaccaagtgctttcctcaagtttgtctctcttgaccaatcattttttccaaatcaatcaccagaaggagacaccagtggtggtgattggctggttgccttagctgattgaaactgaaatcgacataggagatactatgtctgtaagggagaggtttagtggccgaaggttagtgttattccacatccacgaagtcaagtattcttggctcttctttctccctctgcccccatttaagacaatgtcactcaccctccccttgtagtatcctgctcagccaagatctgcctaagattatgattcaggggcattttggtgctgttaaaagcaagagccgaatttagaagttcccttaaaaagaaacacataagacttaccaatggaggcattgtgaatggttgcagtggagcttaggtataacatcatcaagtgtgttcacacgcggggtcggtttaatggagtgtccacgcggagataactgcgatattggaacacctgtgagagagattgttctatagggctggaatattcagagttacattcttggaagtttctgtttttacttgcatcaaacacccctctgttgttctccatcatctttaatagcaactggagaccactttggtcattggtaagggggtgcattctcctcacaaaggggttttatggacttcctcaggcggagagcttctgagaacacaggcaggatggaaaaagactactagccacttttgctttcccaaccccccttaatgccatccttcattgtctttctggcttctcttcttctggcacagtaccattttgggtctgtgccccagtgtggagcaaaacattgcctgtcccattctgatatacttcagaatttgagagcagaagttaatgtggaacaaaagttttcaccatctctcaagccccaaggactggagccacctctggaataatgtgttaaatatctgtatattatatatatgtagagaaaaatctaattttttggtttgatttccttcccattaagaatcttgttttttgatacccttgtctccctgagactctttcttggacacgtgttgatgtggatggcactcctgctctccatcttttatgggcagagagatttcaaaacctgagcaggatcatgtctggcagttactaaacagggactttgtccatggtttgtatcatggggtgcctactgctgtctaaactctgctctcctaattagctgactcttgaaaatgaaatcctaacctctttcctgcctcttttctttctcttttcaggaagagtgtgggtagaaagtccggagggcaacttccaatttaattctgctctgtccggcgcataggctgaattccaaaagaactttcttcctaggatgtggggcttaaagcaccgtcatgtggggtggatcagataattgctcctgtggggccctggcttccttctctgtttgtgcagtatttgtttttgttgtcttgttgagaaatatcccctgtgcaacccacccttggttgaggatcacaaattgaggtgccttccttgtatgctttttgttagtattttttgtttttgttccttaactgctgagcctcagccagcgtgggtcctgggggaaataccattccaaaggaagccatccctatggggaaattggttttactgggtaaattaatacttttatttcttcccctatcccttccttcctagttgtgataaacatgggagaggagtgactttgactgctggggaatttcctcctaagaaccttattcccaaaataagccagggattatgtcaaggcttctttcaaggaggctcataaaagcagtgacctcatccggggctttggatagagtgagaattccccaactaaattggacttctctgctttatccccttctcttccttcaccatctgcactacatttctggctgatcccaatcagattcccgctaatggaagaagtttagaatctttcaggtggaataaagtcacatgaaaacaaaacacaactatatatattttcagtttttttgccttattgatttttttccaaaaaaaaaaaactactaaattaaataattttttaaaagtca

SEQ ID NO: 298123 - DNA, 3441 bp, Homo sapiens
aatgggttgtttgcgggttaaatattagagccgctctactgagcaaagccctcttttcccagtgatttatttcctaaactgcaaaaaaaattaaactgtctcttatagatgagtgagcatagtttttatatctgttcttctccttacaggtaaactttaatgagcccttgtccatgcttcagcgccttactgaagatctggaataccatgagctgttagaccgagctgcaaaatgtgagaattctctagaacagctctgttatgttgcagctttcaccgtgtcctcctactccactactgtcttccgcaccagtaagccattcaacccactgcttggggagacctttgagctggaccgattagaggagaatgggtaccgatccctctgtgaacaggtgagtcatcatccccctgctgctgcgcaccatgctgagtccaaaaatggctggacattgcgtcaggaaatcaaaatcaccagcaagtttcgaggcaaatacctctccattatgcccctcggtaccattcattgtattttccatgcaactgggcaccactacacttggaagaaagttaccacaactgtacacaacattattgtgggcaagttgtggatagatcagtctggcgaaattgatattgtgaatcacaagacaggagacaagtgtaatcttaaatttgttccttatagctacttctctcgggatgtagcaagaaaggtgacgggggaagtgacagatccatcaggaaaagtccactttgctcttctggggacgtgggatgagaaaatggaatgtttcaaagtacagccagtcattggggaaaatgggggtgatgctcgacagagaggccatgaagcagaggaaagcagggtcatgctgtggaaaaggaatcctttaccgaagaatgcagaaaacatgtactacttctcagagcttgctctgactctcaatgcttgggaaagtggcactgcccccacagacagccggttacgacctgaccagagactgatggaaaatggacgctgggatgaagcaaatgcggagaagcagcgcctggaggaaaaacaaagactttccagaaagaagagagaagcggaagctatgaaagccacagaggatggcacaccatatgatccctataaggcactgtggtttgagcggaagaaggaccctgttaccaaggagttaacccatatttataggggagaatactgggagtgtaaagaaaaacaggactggagctcatgcccggacattttctgaaacggcagtaacaaaaaagaggagcatataatggagaagaggacagaggatgtgtgggaaagctggaagttgtgactctcttaccaagtgctttcctcaagtttgtctctcttgaccaatcattttttccaaatcaatcaccagaaggagacaccagtggtggtgattggctggttgccttagctgattgaaactgaaatcgacataggagatactatgtctgtaagggagaggtttagtggccgaaggttagtgttattccacatccacgaagtcaagtattcttggctcttctttctccctctgcccccatttaagacaatgtcactcaccctccccttgtagtatcctgctcagccaagatctgcctaagattatgattcaggggcattttggtgctgttaaaagcaagagccgaatttagaagttcccttaaaaagaaacacataagacttaccaatggaggcattgtgaatggttgcagtggagcttaggtataacatcatcaagtgtgttcacacgcggggtcggtttaatggagtgtccacgcggagataactgcgatattggaacacctgtgagagagattgttctatagggctggaatattcagagttacattcttggaagtttctgtttttacttgcatcaaacacccctctgttgttctccatcatctttaatagcaactggagaccactttggtcattggtaagggggtgcattctcctcacaaaggggttttatggacttcctcaggcggagagcttctgagaacacaggcaggatggaaaaagactactagccacttttgctttcccaaccccccttaatgccatccttcattgtctttctggcttctcttcttctggcacagtaccattttgggtctgtgccccagtgtggagcaaaacattgcctgtcccattctgatatacttcagaatttgagagcagaagttaatgtggaacaaaagttttcaccatctctcaagccccaaggactggagccacctctggaataatgtgttaaatatctgtatattatatatatgtagagaaaaatctaattttttggtttgatttccttcccattaagaatcttgttttttgatacccttgtctccctgagactctttcttggacacgtgttgatgtggatggcactcctgctctccatcttttatgggcagagagatttcaaaacctgagcaggatcatgtctggcagttactaaacagggactttgtccatggtttgtatcatggggtgcctactgctgtctaaactctgctctcctaattagctgactcttgaaaatgaaatcctaacctctttcctgcctcttttctttctcttttcaggaagagtgtgggtagaaagtccggagggcaacttccaatttaattctgctctgtccggcgcataggctgaattccaaaagaactttcttcctaggatgtggggcttaaagcaccgtcatgtggggtggatcagataattgctcctgtggggccctggcttccttctctgtttgtgcagtatttgtttttgttgtcttgttgagaaatatcccctgtgcaacccacccttggttgaggatcacaaattgaggtgccttccttgtatgctttttgttagtattttttgtttttgttccttaactgctgagcctcagccagcgtgggtcctgggggaaataccattccaaaggaagccatccctatggggaaattggttttactgggtaaattaatacttttatttcttcccctatcccttccttcctagttgtgataaacatgggagaggagtgactttgactgctggggaatttcctcctaagaaccttattcccaaaataagccagggattatgtcaaggcttctttcaaggaggctcataaaagcagtgacctcatccggggctttggatagagtgagaattccccaactaaattggacttctctgctttatccccttctcttccttcaccatctgcactacatttctggctgatcccaatcagattcccgctaatggaagaagtttagaatctttcaggtggaataaagtcacatgaaaacaaaacacaactatatatattttcagtttttttgccttattgatttttttccaaaaaaaaaaaactactaaattaaataattttttaaaagtca

SEQ ID NO: 298124 - DNA, 1916 bp, Homo sapiens
tcgagctcggtaccgactgcatccaacgccgtgactgcatccaacgccgcataagacaatgtcactcaccctccccttgtagtatcctgctcagccaagatctgcctaagattatgattcaggggcattttggtgctgttaaaagcaagagccgaatttagaagttcccttaaaaagaaacacataagacttaccaatggaggcattgtgaatggttgcagtggagcttaggtataacatcatcaagtgtgttcacacgcggggtcggtttaatggagtgtccacgcggagataactgcgatattggaacacctgtgagagagattgttctatagggctggaatattcagagttacattcttggaagtttctgtttttacttgcatcaaacacccctctgttgttctccatcatctttaatagcaactggagaccactttggtcattggtaagggggtgcattctcctcacaaaggggttttatggacttcctcaggcggagagcttctgagaacacaggcaggatggaaaaagactactagccacttttgctttcccaaccccccttaatgccatccttcattgtctttctggcttctcttcttctggcacagtaccattttgggtctgtgccccagtgtggagcaaaacattgcctgtcccattctgatatacttcagaatttgagagcagaagttaatgtggaacaaaagttttcaccatctctcaagccccaaggactggagccacctctggaataatgtgttaaatatctgtatattatatatatgtagagaaaaatctaattttttggtttgatttccttcccattaagaatcttgttttttgatacccttgtctccctgagactctttcttggacacgtgttgatgtggatggcactcctgctctccatcttttatgggcagagagatttcaaaacctgagcaggatcatgtctggcagttactaaacagggactttgtccatggtttgtatcatggggtgcctactgctgtctaaactctgctctcctaattagctgactcttgaaaatgaaatcctaacctctttcctgcctcttttctttctcttttcaggaagagtgtgggtagaaagtccggagggcaacttccaatttaattctgctctgtccggcgcataggctgaattccaaaagaactttcttcctaggatgtggggcttaaagcaccgtcatgtggggtggatcagataattgctcctgtggggccctggcttccttctctgtttgtgcagtatttgtttttgttgtcttgttgagaaatatcccctgtgcaacccacccttggttgaggatcacaaattgaggtgccttccttgtatgctttttgttagtattttttgtttttgttccttaactgctgagcctcagccagcgtgggtcctgggggaaataccattccaaaggaagccatccctatggggaaattggttttactgggtaaattaatacttttatttcttcccctatcccttccttcctagttgtgataaacatgggagaggagtgactttgactgctggggaatttcctcctaagaaccttattcccaaaataagccagggattatgtcaaggcttctttcaaggaggctcataaaagcagtgacctcatccggggctttggatagagtgagaattccccaactaaattggacttctctgctttatccccttctcttccttcaccatctgcactacatttctggctgatcccaatcagattcccgctaatggaagaagtttagaatctttcaggtggaataaagtcacatgaaaacaaaacacaactatatatattttcagtttttttgccttattgatttttttccaaaaaaaaaaaactactaaattaaataattttttaaaagtca

SEQ ID NO: 298125 - DNA, 3206 bp, Homo sapiens
agaagagcgatgggagggggtgacgtggcagtgacaggcgcataaactgaaatgaatggcggaaacagcagccaatcggcgatcagattggccgggcattccgcattctcccgtcctccctgagcgctggaaacttcaggaaagcaccaatgagcttccccaaaagtctgattggcctttatctgaaccaatcaaaggtgggtctggcggacgcgtcccaccccaggctctcactgggcgctgtagaatgacaggcccgagagaaatgccaatatccgcggggtcttcctcaagtgacactcagcggcaccaatcgacgtccttcttcccggcggccgagccctcctccccgcggctggccgggcggggcggggacgctgcgcggcggtggctgatgcggtagccgtgtggggcgctccgggcggcgacggcggctctcgtaggcggttccggtcttgtatctccaggcggcggcggctcatggcggcgacggagctgagaggagtggtggggccaggcccggcagccattgcagcacttggcggcggcggcgccggtcccccagtggtgggaggaggcggcggccgcggagatgcggggccaggctccggggccgcgtcagggacggtggtcgcggcggcggcgggaggcccgggcccgggggccgggggagtggcggcggctggcccggcccctgcgccgccgactgggggctcgggcggctcgggcgctgggggttcgggctcggctcgagagggctggctcttcaaatggaccaattatatcaaaggctaccagcggcgatggttcgtgctgagcaacgggctcctgagctactacagatcaaaggcagaaatgagacatacctgccgtggtaccatcaacctcgccacagccaacatcaccgtggaggactcctgcaacttcatcatttccaatgggggtgctcagacctaccatctgaaagctagttcagaagttgagcggcagcgctgggtgacggccctggaactggccaaggccaaagctgtgaagatgctggcagagtcagatgaatcaggagatgaagagtctgtctcacaaactgacaagactgagctgcagaatacccttcggaccctctctagcaaagtagaggacttgagcacgtgcaatgacttgatagctaagcatggcacagctctgcagcgttctctcagtgagctggagtccctgaagttgcctgctgagagcaatgaaaagatcaaacaggtcaacgaacgagccacactctttaggataacatccaatgccatgatcaacgcctgcagagatttcctcatgttagcccagacccatagtaaaaaatggcaaaagtcactacagtatgaaagagaccagcgtatccgactggaagaaaccctcgagcagctggcgaagcagcataatcacctggagagggccttccgaggagccacggtgctgccggcaaacactcctggcaatgtgggttctggtaaagatcagtgctgctctggcaaaggggacatgagcgatgaagatgatgagaatgaattttttgatgcacctgagatcatcaccatgcctgaaaatttgggccacaaacgtactggcagcaatatcagtggagccagcagtgacatcagccttgatgaacagtacaagcatcagctggaggagaccaaaaaggaaaagagaaccagaataccatacaagccaaactatagcctcaatttatggagcatcatgaagaactgcattggaaaagaactctctaagatccccatgccggtaaactttaatgagcccttgtccatgcttcagcgccttactgaagatctggaataccatgagctgttagaccgagctgcaaaatgtgagaattctctagaacagctctgttatgttgcagctttcaccgtgtcctcctactccactactgtcttccgcaccagtaagccattcaacccactgcttggggagacctttgagctggaccgattagaggagaatgggtaccgatccctctgtgaacaggtaaaggaacctcagaaccataacgcatttcctttctgaagaaagagatgattttttggttaatcccctgggtcttatgtttgcagaaattctagtccctgtcatcccagcttttattctttttcttcagaacgtcagcgttggagaccctggaggttctgggattcacctactgttgtgggtgtaaaaacgtcaagtgtgaattttggtgtttctcaccaatttataggcagtatctttttcttctcctttctgccgtcttaatttgaacctgatttcttcaaggtgagtcatcatccccctgctgctgcgcaccatgctgagtccaaaaatggctggacattgcgtcaggaaatcaaaatcaccagcaagtttcgaggcaaatacctctccattatgcccctcggtaaggttaccatctttgtcagaattaatgctcctggaatgaaaggttttctggcacgatggaggaggtcactggctaaagagtcaggagacaggaggtctgattcgagcactgaccctcactaactggctttgggcaggtatttaacttttcagctatcaaatgagtgtggaggctagaaactctttaaggacccatctagtcctaaattctttatcctcttagctatatttaacgcatctctaagcactatttagaacacaagttctagcatgcattaaaaaaaaaaattcgtctcttaactggtggtgttttcttccttactttggcagtcaggttctctctgtaaatcagaactcatgattgcaaggttaggtttcttagctaatccttccgctttctcctctccttcctcccttttcctccacctgatgggttaggtatcatttatgtaatggctgaattctaggtcactgaaactttattttaaaaagatcttacttggggctgggcacagtgcctcacccctgtaatcctagcactttgggaggccagggcaggcagattgtctgagctctggagttcaagaccagcctgggcaacatggtgaaaccctgtctttactaagaatacaaaaaaattagctgggtgtggtggtgcacacctgtagtctcagctactcgggaggctgaggcacaagaattgcttgaacccgggaggcggaggtttcagtgagctgagattgcactattgcactccagcc

SEQ ID NO: 298126 - DNA, 453 bp, Homo sapiens
ccgcgtcagggacggtggtcgcggcggcggcgggaggcccgggcccgggggccgggggagtggcggcggctggcccggcccctgcgccgccgactgggggctcgggcggctcgggcgctgggggttcgggctcggctcgagagggctggctcttcaaatggaccaattatatcaaaggctaccagcggcgatggttcgtgctgagcaacgggctcctgagctactacaggtaactgcttccggggcgctgtcgctcaccttgcctcccccatatctgccaacagtcccagctccggcattaccgccagccggcaccgcagccagggttgccccaggccccttttcgtcatctgtgcggattgacagcccaggggtcggagcccactgtcacgaaagtgaaaagcccctggacgtacacctcccctcccctcgggttacccactcttggtgcct

SEQ ID NO: 298127 - DNA, 240 bp, Homo sapiens
gagcaagatcccatctctaataataatttggatgactctctggtgtttgttataacaggacctaaccattatttatcctaggacttccagtatagtcaggtaagctaattcacagtgaattctatatagccaagccctgttctccacccttgcaggtgacgggggaagtgacagatccatcaggaaaagtccactttgctcttctggggacgtgggatgagaaaatggaatgtttcaaag

SEQ ID NO: 298128 - DNA, 249 bp, Homo sapiens
cagccggttacgacctgaccagagactgatggaaaatggacgctgggatgaagcaaatgcggagaagcagcgcctggaggaaaaacaaagactttccagaaagaagagagaagcggaagctatgaaagccacagaggatggtaatgaacttcccttctactcttctttcttgatgcatggagaatgccagcactaatttttttctttcctctcttttccttttaggcacaccatatgatccctataagg

SEQ ID NO: 298129 - DNA, 859 bp, Homo sapiens
tggaaagaatcacattttaatattttttaatgatttgtacaagcatgtacttgtatacatacaacagtatgtctggacatttgtctgctgaaaaagtacttgtttcctctgcggaaggaggggcaggcagtgaagagggaacttctactttgaattcggcacatgtctggttttatgaacaagcatgtactccttttgtgacttttaagaatcagtacaaattttttcaaaggagatagaatgtgacgaaaagcacacccagcaggctacccagaggtgcatgtgttccctaggagctcaacaggacctgtcgggccatgcagcagcgcatcgtggagctcatctcccgcgtgtccaatgaggaggtcaccgaggagctgctgcatgtgaacgatgacctcaacaacgtcttccttcgatacgagaggtgggagccggatttcttttttttttttttttccccttgaaaagattgttgccataacagagggatttcttgcataaacaaaggaaagagagggagagggagagagattagagttggaaaatactcatcagagatgctaatttgttcccggctgacaggaaaaatgcttcttgtcctcctgggaactgagcagcagaagcagcaggaagttgacgtgcagaattaggctctgccctttgtaagcctcaggctgctctgcctttccccactgccccgccacccccagccccagggaggggtagcacttgggggcctctgggccccagagcttctgcacctgctcctttgatgatcctttgaatttgaaaaggattaaagggaaaaaaaatctctagtaagaaaaaggatttcctctttcccatcttaaaaaaa

SEQ ID NO: 298130 - DNA, 783 bp, Homo sapiens
agcgggggggcaagtgtcagtcaggacgggagtccggcgggttacagcggaggcctaggtggcagacagggggcccgggccgctgcgtgttgtccacccaagatggagttcctcctggggaacccgttcagcacaccagtggggcagtgcctcgaaaaggcaacagatggctccctgcaaagtgaggattggacgttgaatatggagatctgtgacatcatcaatgagacggaggaagggccaaaggatgccattcgagccctgaagaagcggctcaacgggaaccggaactacagagaggtgatgctggcattaacagtgctggagacatgtgtgaagaactgtggccaccgcttccacatccttgtggccaaccgagatttcatcgacagtgttctggtcaaaattatatctcccaagaacaaccctcccaccattgtacaggacaaagtgcttgctctgatccaggcatgggctgatgcctttcgaagcagtcctgatctcaccggcgttgtgcacatatatgaggagctgaagaggaaaggggttgaatttcccatggcagacttggacgctctgtctcccatacacacaccacagcggagtgtccctgaagtggatccagctgcgaccatgcccaggtcccaatcacagcagaggacaagtgctggttcctattcctcgccgcctcctgctccctactccgcaccgcaggccccagctctgagtgtgactggccccatcacagccaattcagaacaggtacttgcatacttcggggcc

SEQ ID NO: 298131 - DNA, 502 bp, Homo sapiens
  misc_feature (474)..(474): n is a, c, g, or t
  misc_feature (502)..(502): n is a, c, g, or t
tggaaagaatcacattttaatattttttaatgatttgtacaagcatgtacttgtatacatacaacagtatgtctggacatttgtctgctgaaaaagtacttgtttcctctgcggaaggaggggcaggcagtgaagagggaacttctactttgaattcggcacatgtctggttttatgaacaagcatgtactccttttgtgacttttaagaatcagtacaaattttttcaaaggagatagaatgtgacgaaaagcacacccagcaggctacccagaggtgcatgtgttccctaggagctcaacaggacctgtcgggccatgcagcagcgcatcgtggagctcatctcccgcgtgtccaatgaggaggtcaccgaggagctgctgcatgtgaacgatgacctcaacaacgtcttccttcgatacgagaggtgggagccggatttctttttttttttttttttggttttgaccaagntagggccgatggcagatgacttaccgan

SEQ ID NO: 298132 - DNA, 3249 bp, Homo sapiens
cacagatgtgcacatgggccacactcagtgctgtggcctggcctgccgtagcctcacacatctgcctcaagagccagcagcaaacagctttgtggcatccttggaggttcccagtgactgagaggcctgggcagcactaaggcccctgctctgctccctggcataggccttggcctccttgcacagactctcctgacagtctggcctcctcccacctcagaggtcctctggccaccaatttatactctctccccaagctgatcctgaaggcaggcagagcagctaggggctggtaacatgtattcccatcccgtgtcctcactggtgtgtctcctggccatgggcaagggactcgggtcatcccaggccctggtccagccagacacctggccccacacctcccaccaggctgctgttgctcagaaggagaatactgcagctgtatgcatccccgtgtgtcttgggcccagctcgctgggtcagtctgctcctgtcccctccagcatgcactgcctaggtcagcacaggttcctgatccatggtgtagttagcccttcccacctggcaggacggcccagaccaccagccaagcagggaaagggggctgggcttgacgggagaagagaccagcgacatggtcgttggggagcattcaggatggcgacttcagctgggggtcatgctgagcaccaacaggaactattccagtgaagagcaagtgctgcccgacccaggaccctgtgccaggctagcagccctccagctccctccagagaggaaacctctgtctggctgagggtgggactagctgggatgtctcactccagttgctcaggttcacccaggaagctcctccgtggagtggccagcctgattctagccctgtcctctctggcagcacatgccacacctgcctgggccttctgctccctgatgcttgatgagcccctgcctcctcaatgtttctcaaagacagacccccctgaggccagcttgaatgtgaagactgctgaagtcagctggcttcacttgagctgcagaaaaggtggctgggatggcccaggtgcacccagaggccccagccctttggctgcctttgggttgtgacttgggttgtctctgaggccctgccagagctgggcctgcgggtggtgggcggtccgacctcgggcagtcagtgctccgcagcctcagcactgcatcccagacccagtgtcctcagagggaagagccagcctccctgcctcatggaaccaggagtcccaaaaagtcaggagcctggaggctctgaaaggagcagggattccatagtgcgtgaagctgaaataggcgccctcctggggagcccccagcaaaactgtttttcatacccactcccagaactgccccgctccagctccagcgccagcgccagctggttgccaggcgtcattggagaggcctggctgccccaggggcagcagggagtggtggacctgtatgggctggcaggaggccattggccatgctgacaagtgtcacctgccttcctagcctggagccacccctcaggtggcctgcttgcacctcctatccggaggtagcctgccccacctgtaggcagagggggctcttgcttgaggcctgcacaggaagcaagtatagccccggtgccccagagtgggttccacttagccctggcgagatggcctgtcctgagatctctgctcccagaccccaccatctggggagcacagtccttaggctgcctggtccaggaagggggtgcggctctgtcaggaaacctggactctcaaggcccaccagcctctccgtgagtgttagaaatcacagatacagtatatacttaattacactaaattattgctgggattccttataagcactaattatacctgattataggttaaaatatttattttgtcaaaatattttcttgggaatgtgtttaaccctttctgcgttcattgttgctgagatgtgaaaactaaccattccctcctgcctacctttttggccactgggcggcagagaatggcgctatgtgcagttgggcccccggcaccatgggcctttggcctgcctgctgcagagtagccctgcctgggcagtctccaggcactgagcaggccatctgtggccaggctgagagaatgactggctcgcttaccagcgtgcatgggacaaggagctttggagcctcaaggggttgttgctggcctgggctagagggaaaggtgaccatccgtctgtcctcctgtctttctattagcgcctccatgtgagtgatggtgccttggttcactagccttcccccaccaccccaccatgccacctggtggtcttggggcctgtgctgtcactccagcccctggggaggagaggacccagcccggagagttggggcaagggctccacatggcccaagggcaacagatgctcgcagggcagctgctgccgatgctcacgctcctgcccccctccttcccgctgccacaccccaccctgggcccccgcagacacgcatctctaactcagttgggcccagccttctggatggcttggggtaggccatgggcccacctggggccaggccagcccctggggcagctctggaagagcagtgtggaggagcacttgcttgcagcctggcttcagcctctggcactgctggagtggtccctgggagcttctgcactgtcggctttggggacgtctcacccacttgggttacagtaggccttccccacccagagagaagtgtttccaccccagagacattgcctgtcagcccctgaagtgctcgcctcccccagtgcccgtcaccagcccttcctatctgtggggtccaagtcaggcttcccctgcggccaccagccatagggagcagccatcagcccccgagtcagaactgcttctgtctgtccatacctccaggctctcccggagagggggacggatatttatttcctaaagtttgcacttaattgtgaggattctcaggattgttgggggctactgaaaagaggaatgtgttgaatgtcgcgtttgctgtccactcgtcctagaagtttagtgtttttgtcactgtcatgtgtttctgtgggcagagctggttctggagggtgggtcagtgcacccgaggctcagagcatccatccaccccactggccctccttccagataccctctctctaattgggttcttgcatgtaaaatactccacaataaataaataattgaacaaat

SEQ ID NO: 298133 - DNA, 3236 bp, Homo sapiens
cacagatgtgcacatgggccacactcagtgctgtggcctggcctgccgtagcctcacacatctgcctcaagagccagcagcaaacagctttgtggcatccttggaggttcccagtgactgagaggcctgggcagcactaaggcccctgctctgctccctggcataggccttggcctccttgcacagactctcctgacagtctggcctcctcccacctcagaggtcctctggccaccaatttatactctctccccaagctgatcctgaaggcaggcagagcagctaggggctggtaacatgtattcccatcccgtgtcctcactggtgtgtctcctggccatgggcaagggactcgggtcatcccaggccctggtccagccagacacctggccccacacctcccaccaggctgctgttgctcagaaggagaatactgcagctgtatgcatccccgtgtgtcttgggcccagctcgctgggtcagtctgctcctgtcccctccagcatgcactgcctaggtcagcacaggttcctgatccatggtgtagttagcccttcccacctggcaggacggcccagaccaccagccaagcagggaaagggggctgggcttgacgggagaagagaccagcgacatggtcgttggggagcattcaggatggcgacttcagctgggggtcatgctgagcaccaacaggaactattccagtgaagagcaagtgctgcccgacccaggaccctgtgccaggctagcagccctccagctccctccagagaggaaacctctgtctggctgagggtgggactagctgggatgtctcactccagttgctcaggttcacccaggaagctcctccgtggagtggccagcctgattctagccctgtcctctctggcagcacatgccacacctgcctgggccttctgctccctgatgcttgatgagcccctgcctcctcaatgtttctcaaagacagacccccctgaggccagcttgaatgtgaagactgctgaagtcagctggcttcacttgagctgcagaaaaggtggctgggatggcccaggtgcacccagaggccccagccctttggctgcctttgggttgtgacttgggttgtctctgaggccctgccagagctgggcctgcgggtggtgggcggtccgacctcgggcagtcagtgctccgcagcctcagcactgcatcccagacccagtgtcctcagagggaagagccagcctccctgcctcatggaaccaggagtcccaaaaagtcaggagcctggaggctctgaaaggagcagggattccatagtgcgtgaagctgaaataggcgccctcctggggagcccccagcaaaactgtttttcatacccactcccagaactgccccgctccagctccagcgccagcgccagctggttgccaggcgtcattggagaggcctggctgccccaggggcagcagggagtggtggacctgtatgggctggcaggaggccattggccatgctgacaagtgtcacctgccttcctagcctggagccacccctcaggtggcctgcttgcacctcctatccggaggtagcctgccccacctgtaggcagagggggctcttgcttgaggcctgcacaggaagcaagtatagccccggtgccccagagtgggttccacttagccctggcgagatggcctgtcctgagatctctgctcccagaccccaccatctggggagcacagtccttaggctgcctggtccaggaagggggtgcggctctgtcaggaaacctggactctcaaggcccaccagcctctccgtgagtgttagaaatcacagatacagtatatacttaattacactaaattattgctgggattccttataagcactaattatacctgattataggttaaaatatttattttgtcaaaatattttcttgggaatgtgtttaaccctttctgcgttcattgttgctgagatgtgaaaactaaccattccctcctgcctacctttttggccactgggcggcagagaatggcgctatgtgcagttgggcccccggcaccatgggcctttggcctgcctgctgcagagtagccctgcctgggcagtctccaggcactgagcaggccatctgtggccaggctgagagaatgactggctcgcttaccagcgtgcatgggacaaggagctttggagcctcaaggggttgttgctggcctgggctagagggaaaggtgaccatccgtctgtcctcctgtctttctattagcgcctccatgtgagtgatggtgccttggttcactagccttcccccaccaccccaccatgccacctggtggtcttggggcctgtgctgtcactccagcccctggggaggagaggacccagcccggagagttggggcaagggctccacatggcccaagggcaacagatgctcgcagggcagctgctgccgatgctcacgctcctgcccccctccttcccgctgccacaccccaccctgggcccccgcagacacgcatctctaactcagttgggcccagccttctggatggcttggggtaggccatgggcccacctggggccaggccagcccctggggcagctctggaagagcagtgtggaggagcacttgcttgcagcctggcttcagcctctggcactgctggagtggtccctgggagcttctgcactgtcggctttggggacgtctcacccacttgggttacagtaggccttccccacccagagagaagtgtttccaccccagagacattgcctgtcagcccctgaagtgctcgcctcccccagtgcccgtcaccagcccttcctatctgtggggtccaagtcaggcttcccctgcggccaccagccatagggagcagccatcagcccccgagtcagaactgcttctgtctgtccatacctccaggctctcccggagagggggacggatatttatttcctaaagtttgcacttaattgtgaggattctcaggattgttgggggctactgaaaagaggaatgtgttgaatgtcgcgtttgctgtccactcgtcctagaagtttagtgtttttgtcactgtcatgtgtttctgtgggcagagctggttctggagggtgggtcagtgcacccgaggctcagagcatccatccaccccactggccctccttccagataccctctctctaattgggtggaaacacttctctgtcgacgcggccgcgaat

SEQ ID NO: 298134 - DNA, 3414 bp, Homo sapiens
cacagatgtgcacatgggccacactcagtgctgtggcctggcctgccgtagcctcacacatctgcctcaagagccagcagcaaacagctttgtggcatccttggaggttcccagtgactgagaggcctgggcagcactaaggcccctgctctgctccctggcataggccttggcctccttgcacagactctcctgacagtctggcctcctcccacctcagaggtcctctggccaccaatttatactctctccccaagctgatcctgaaggcaggcagagcagctaggggctggtaacatgtattcccatcccgtgtcctcactggtgtgtctcctggccatgggcaagggactcgggtcatcccaggccctggtccagccagacacctggccccacacctcccaccaggctgctgttgctcagaaggagaatactgcagctgtatgcatccccgtgtgtcttgggcccagctcgctgggtcagtctgctcctgtcccctccagcatgcactgcctaggtcagcacaggttcctgatccatggtgtagttagcccttcccacctggcaggacggcccagaccaccagccaagcagggaaagggggctgggcttgacgggagaagagaccagcgacatggtcgttggggagcattcaggatggcgacttcagctgggggtcatgctgagcaccaacaggaactattccagtgaagagcaagtgctgcccgacccaggaccctgtgccaggctagcagccctccagctccctccagagaggaaacctctgtctggctgagggtgggactagctgggatgtctcactccagttgctcaggttcacccaggaagctcctccgtggagtggccagcctgattctagccctgtcctctctggcagcacatgccacacctgcctgggccttctgctccctgatgcttgatgagcccctgcctcctcaatgtttctcaaagacagacccccctgaggccagcttgaatgtgaagactgctgaagtcagctggcttcacttgagctgcagaaaaggtggctgggatggcccaggtgcacccagaggccccagccctttggctgcctttgggttgtgacttgggttgtctctgaggccctgccagagctgggcctgcgggtggtgggcggtccgacctcgggcagtcagtgctccgcagcctcagcactgcatcccagacccagtgtcctcagagggaagagccagcctccctgcctcatggaaccaggagtcccaaaaagtcaggagcctggaggctctgaaaggagcagggattccatagtgcgtgaagctgaaataggcgccctcctggggagcccccagcaaaactgtttttcatacccactcccagaactgccccgctccagctccagcgccagcgccagctggttgccaggcgtcattggagaggcctggctgccccaggggcagcagggagtggtggacctgtatgggctggcaggaggccattggccatgctgacaagtgtcacctgccttcctagcctggagccacccctcaggtggcctgcttgcacctcctatccggaggtagcctgccccacctgtaggcagagggggctcttgcttgaggcctgcacaggaagcaagtatagccccggtgccccagagtgggttccacttagccctggcgagatggcctgtcctgagatctctgctcccagaccccaccatctggggagcacagtccttaggctgcctggtccaggaagggggtgcggctctgtcaggaaacctggactctcaaggcccaccagcctctccgtgagtgttagaaatcacagatacagtatatacttaattacactaaattattgctgggattccttataagcactaattatacctgattataggttaaaatatttattttgtcaaaatattttcttgggaatgtgtttaaccctttctgcgttcattgttgctgagatgtgaaaactaaccattccctcctgcctacctttttggccactgggcggcagagaatggcgctatgtgcagttgggcccccggcaccatgggcctttggcctgcctgctgcagagtagccctgcctgggcagtctccaggcactgagcaggccatctgtggccaggctgagagaatgactggctcgcttaccagcgtgcatgggacaaggagctttggagcctcaaggggttgttgctggcctgggctagagggaaaggtgaccatccgtctgtcctcctgtctttctattagcgcctccatgtgagtgatggtgccttggttcactagccttcccccaccaccccaccatgccacctggtggtcttggggcctgtgctgtcactccagcccctggggaggagaggacccagcccggagagttggggcaagggctccacatggcccaagggcaacagatgctcgcagggcagctgctgccgatgctcacgctcctgcccccctccttcccgctgccacaccccaccctgggcccccgcagacacgcatctctaactcagttgggcccagccttctggatggcttggggtaggccatgggcccacctggggccaggccagcccctggggcagctctggaagagcagtgtggaggagcacttgcttgcagcctggcttcagcctctggcactgctggagtggtccctgggagcttctgcactgtcggctttggggacgtctcacccacttgggttacagtaggccttccccacccagagagaagtgtttccaccccagagacattgcctgtcagcccctgaagtgctcgcctcccccagtgcccgtcaccagcccttcctatctgtggggtccaagtcaggcttcccctgcggccaccagccatagggagcagccatcagcccccgagtcagaactgcttctgtctgtccatacctccaggctctcccggagagggggacggatatttatttcctaaagtttgcacttaattgtgaggattctcaggattgttgggggctactgaaaagaggaatgtgttgaatgtcgcgtttgctgtccactcgtcctagaagtttagtgtttttgtcactgtcatgtgtttctgtgggcagagctggttctggagggtgggtcagtgcacccgaggctcagagcatccatccaccccactggccctccttccagataccctctctctaattgggttcttgcatgtaaaatactccacaataaataaataattgaacaaatcagccaaccgacagagcccgagggggggccgggaccaatgcgcctaaaagagtgtatccagaccagggcggcgaaaaaggccgaccgggaaccgtggtgcaaacaaagcgggggaaccccctgcacggggaacgccccgagcgccgggacgcagggggggagcac

SEQ ID NO: 298135 - DNA, 889 bp, Homo sapiens
agcgggggggcaagtgtcagtcaggacgggagtccggcgggttacagcggaggcctaggtggcagacagggggcccgggccgctgcgtgttgtccacccaagatggagttcctcctggggaacccgttcagcacaccagtggggcagtgcctcgaaaaggcaacagatggctccctgcaaagtgaggattggacgttgaatatggagatctgtgacatcatcaatgagacggaggaagggccaaaggatgccattcgagccctgaagaagcggctcaacgggaaccggaactacagagaggtgatgctggcattaacagtgctggagacatgtgtgaagaactgtggccaccgcttccacatccttgtggccaaccgagatttcatcgacagtgttctggtcaaaattatatctcccaagaacaaccctcccaccattgtacaggacaaagtgcttgctctgatccaggcatgggctgatgcctttcgaagcagtcctgatctcaccggcgttgtgcacatatatgaggaccatcagcccccgagtcagaactgcttctgtctgtccatacctccaggctctcccggagagggggacggatatttatttcctaaagtttgcacttaattgtgaggattctcaggattgttgggggctactgaaaagaggaatgtgttgaatgtcgcgtttgctgtccactcgtcctagaagtttagtgtttttgtcactgtcatgtgtttctgtgggcagagctggttctggagggtgggtcagtgcacccgaggctcagagcatccatccaccccactggccctccttccagataccctctctctaattgggttcttgcatgtaaaatactccacaataaataaataattgaacaaat

SEQ ID NO: 298136 - DNA, 1445 bp, Homo sapiens
agcgggggggcaagtgtcagtcaggacgggagtccggcgggttacagcggaggcctaggtggcagacagggggcccgggccgctgcgtgttgtccacccaagatggagttcctcctggggaacccgttcagcacaccagtggggcagtgcctcgaaaaggcaacagatggctccctgcaaagtgaggattggacgttgaatatggagatctgtgacatcatcaatgagacggaggaagggccaaaggatgccattcgagccctgaagaagcggctcaacgggaaccggaactacagagaggtgatgctggcattaacagtgctggagacatgtgtgaagaactgtggccaccgcttccacatccttgtggccaaccgagatttcatcgacagtgttctggtcaaaattatatctcccaagaacaaccctcccaccattgtacaggacaaagtgcttgctctgatccaggcatgggctgatgcctttcgaagcagtcctgatctcaccggcgttgtgcacatatatgaggagctgaagaggaaaggggttgaatttcccatggcagacttggacgctctgtctcccatacacacaccacagcggagtgtccctgaagtggatccagctgcgaccatgcccaggtcccaatcacagcagaggacaagtgctggttcctattcctcgccgcctcctgctccctactccgcaccgcaggccccagctctgagtgtgactggccccatcacagccaattcagaacagattgccaggctgcggagtgaactggacgtcgttcgaggaaacacaaaagtcatgtctgagatgttaacagaaatggtccctggacaggaggattcatctgatctggagttgctgcaggagctcaacaggacctgtcgggccatgcagcagcgcatcgtggagctcatctcccgcgtgtccaatgaggaggtcaccgaggagctgctgcatgtgaacgatgacctcaacaacgtcttccttcgatacgagaggtgggagccggatttcttttttttttttttttccccttgaaaagattgttgccataacagagggatttcttgcataaacaaaggaaagagagggagagggagagagattagagttggaaaatactcatcagagatgctaatttgttcccggctgacaggaaaaatgcttcttgtcctcctgggaactgagcagcagaagcagcaggaagttgacgtgcagaattaggctctgccctttgtaagcctcaggctgctctgcctttccccactgccccgccacccccagccccagggaggggtagcacttgggggcctctgggccccagagcttctgcacctgctcctttgatgatcctttgaatttgaaaaggattaaagggaaaaaaaatctctagtaagaaaaaggatttcctctttcccatcttaaaaaaa

SEQ ID NO: 298137 - DNA, 1295 bp, Homo sapiens
agcgggggggcaagtgtcagtcaggacgggagtccggcgggttacagcggaggcctaggtggcagacagggggcccgggccgctgcgtgttgtccacccaagatggagttcctcctggggaacccgttcagcacaccagtggggcagtgcctcgaaaaggcaacagatggctccctgcaaagtgaggattggacgttgaatatggagatctgtgacatcatcaatgagacggaggaagggccaaaggatgccattcgagccctgaagaagcggctcaacgggaaccggaactacagagaggtgatgctggcattaacagcatgggctgatgcctttcgaagcagtcctgatctcaccggcgttgtgcacatatatgaggagctgaagaggaaaggggttgaatttcccatggcagacttggacgctctgtctcccatacacacaccacagcggagtgtccctgaagtggatccagctgcgaccatgcccaggtcccaatcacagcagaggacaagtgctggttcctattcctcgccgcctcctgctccctactccgcaccgcaggccccagctctgagtgtgactggccccatcacagccaattcagaacagattgccaggctgcggagtgaactggacgtcgttcgaggaaacacaaaagtcatgtctgagatgttaacagaaatggtccctggacaggaggattcatctgatctggagttgctgcaggagctcaacaggacctgtcgggccatgcagcagcgcatcgtggagctcatctcccgcgtgtccaatgaggaggtcaccgaggagctgctgcatgtgaacgatgacctcaacaacgtcttccttcgatacgagaggtgggagccggatttcttttttttttttttttccccttgaaaagattgttgccataacagagggatttcttgcataaacaaaggaaagagagggagagggagagagattagagttggaaaatactcatcagagatgctaatttgttcccggctgacaggaaaaatgcttcttgtcctcctgggaactgagcagcagaagcagcaggaagttgacgtgcagaattaggctctgccctttgtaagcctcaggctgctctgcctttccccactgccccgccacccccagccccagggaggggtagcacttgggggcctctgggccccagagcttctgcacctgctcctttgatgatcctttgaatttgaaaaggattaaagggaaaaaaaatctctagtaagaaaaaggatttcctctttcccatcttaaaaaaa

SEQ ID NO: 298138 - DNA, 1310 bp, Homo sapiens
agcgggggggcaagtgtcagtcaggacgggagtccggcgggttacagcggaggcctaggtggcagacagggggcccgggccgctgcgtgttgtccacccaagatggagttcctcctggggaacccgttcagcacaccagtggggcagtgcctcgaaaaggcaacagatggctccctgcaaagtgaggattggacgttgaatatggagatctgtgacatcatcaatgagacggaggaagggccaaaggatgccattcgagccctgaagaagcggctcaacgggaaccggaactacagagaggtgatgctggcattaacagtgctggagacatgtgtgaagaactgtggccaccgcttccacatccttgtggccaaccgagatttcatcgacagtgttctggtcaaaattatatctcccaagaacaaccctcccaccattgtacaggacaaagtgcttgctctgatccagagtgtccctgaagtggatccagctgcgaccatgcccaggtcccaatcacagcagaggacaagtgctggttcctattcctcgccgcctcctgctccctactccgcaccgcaggccccagctctgagtgtgactggccccatcacagccaattcagaacagattgccaggctgcggagtgaactggacgtcgttcgaggaaacacaaaagtcatgtctgagatgttaacagaaatggtccctggacaggaggattcatctgatctggagttgctgcaggagctcaacaggacctgtcgggccatgcagcagcgcatcgtggagctcatctcccgcgtgtccaatgaggaggtcaccgaggagctgctgcatgtgaacgatgacctcaacaacgtcttccttcgatacgagaggtgggagccggatttcttttttttttttttttccccttgaaaagattgttgccataacagagggatttcttgcataaacaaaggaaagagagggagagggagagagattagagttggaaaatactcatcagagatgctaatttgttcccggctgacaggaaaaatgcttcttgtcctcctgggaactgagcagcagaagcagcaggaagttgacgtgcagaattaggctctgccctttgtaagcctcaggctgctctgcctttccccactgccccgccacccccagccccagggaggggtagcacttgggggcctctgggccccagagcttctgcacctgctcctttgatgatcctttgaatttgaaaaggattaaagggaaaaaaaatctctagtaagaaaaaggatttcctctttcccatcttaaaaaaa

SEQ ID NO: 298139 - DNA, 286 bp, Homo sapiens
tccagctcccactggggtgacccttttccttccctccccacatcaggtgctggagacatgtgtgaagaactgtggccaccgcttccacatccttgtggccaaccgagatttcatcgacagtgttctggtcaaaattatatctcccaagaacaaccctcccaccattgtacaggacaaagtgcttgctctgatccaggtaggttggaccccttgcccaatttgttggaacagagtaagatgaagtctcttattgatgagtcctcatgctctcccaccatttggagga

SEQ ID NO: 298140 - DNA, 353 bp, Homo sapiens
tctttttctgggtgccggttaggttcatctatttaccagtaaaattttagtgaggaaaccagatcgccttctacatgcacttagtagccttgttcactgaagattaaaacaaggcttttaaacctatgctttgaaaacttaaaaagaaaaaatttttgaattcatcactgagtactactaagagggggacaaggtttttggctacagggagaaacttgtgtacactttctgtgacatagctgataatttgaaagatgaaagtgaacctgacaaaactgttcaagttgaacaacctgaagcaatttaaggtccattcatcagtccatagattttttttaccaagtagttttaga

SEQ ID NO: 298141 - DNA, 11966 bp, Homo sapiens
cgcgcgcgtcggcctctcggagagagggctgtggtaaaagccgtccggaaaatggccgccgccgccgccgccgcgccgagcggaggaggaggaggaggcgaggaggagagactgctccataaaaatacagactcaccagttcctgctttgatgtgacatgtgactccccagaatacaccttgcttctgtagaccagctccaacaggattccatggtagctgggatgttagggctcagggaagaaaagtcagaagaccaggacctccagggcctcaaggacaaacccctcaagtttaaaaaggtgaagaaagataagaaagaagagaaagagggcaagcatgagcccgtgcagccatcagcccaccactctgctgagcccgcagaggcaggcaaagcagagacatcagaagggtcaggctccgccccggctgtgccggaagcttctgcctcccccaaacagcggcgctccatcatccgtgaccggggacccatgtatgatgaccccaccctgcctgaaggctggacacggaagcttaagcaaaggaaatctggccgctctgctgggaagtatgatgtgtatttgatcaatccccagggaaaagcctttcgctctaaagtggagttgattgcgtacttcgaaaaggtaggcgacacatccctggaccctaatgattttgacttcacggtaactgggagagggagcccctcccggcgagagcagaaaccacctaagaagcccaaatctcccaaagctccaggaactggcagaggccggggacgccccaaagggagcggcaccacgagacccaaggcggccacgtcagagggtgtgcaggtgaaaagggtcctggagaaaagtcctgggaagctccttgtcaagatgccttttcaaacttcgccagggggcaaggctgaggggggtggggccaccacatccacccaggtcatggtgatcaaacgccccggcaggaagcgaaaagctgaggccgaccctcaggccattcccaagaaacggggccgaaagccggggagtgtggtggcagccgctgccgccgaggccaaaaagaaagccgtgaaggagtcttctatccgatctgtgcaggagaccgtactccccatcaagaagcgcaagacccgggagacggtcagcatcgaggtcaaggaagtggtgaagcccctgctggtgtccaccctcggtgagaagagcgggaaaggactgaagacctgtaagagccctgggcggaaaagcaaggagagcagccccaaggggcgcagcagcagcgcctcctcaccccccaagaaggagcaccaccaccatcaccaccactcagagtccccaaaggcccccgtgccactgctcccacccctgcccccacctccacctgagcccgagagctccgaggaccccaccagcccccctgagccccaggacttgagcagcagcgtctgcaaagaggagaagatgcccagaggaggctcactggagagcgacggctgccccaaggagccagctaagactcagcccgcggttgccaccgccgccacggccgcagaaaagtacaaacaccgaggggagggagagcgcaaagacattgtttcatcctccatgccaaggccaaacagagaggagcctgtggacagccggacgcccgtgaccgagagagttagctgactttacacggagcggattgcaaagcaaaccaacaagaataaaggcagctgttgtctcttctccttatgggtagggctctgacaaagcttcccgattaactgaaataaaaaatatttttttttctttcagtaaacttagagtttcgtggcttcagggtgggagtagttggagcattggggatgtttttcttaccgacaagcacagtcaggttgaagacctaaccagggccagaagtagctttgcacttttctaaactaggctccttcaacaaggcttgctgcagatactactgaccagacaagctgttgaccaggcacctcccctcccgcccaaacctttcccccatgtggtcgttagagacagagcgacagagcagttgagaggacactcccgttttcggtgccatcagtgccccgtctacagctcccccagctccccccacctcccccactcccaaccacgttgggacagggaggtgtgaggcaggagagacagttggattctttagagaagatggatatgaccagtggctatggcctgtgcgatcccacccgtggtggctcaagtctggccccacaccagccccaatccaaaactggcaaggacgcttcacaggacaggaaagtggcacctgtctgctccagctctggcatggctaggaggggggagtcccttgaactactgggtgtagactggcctgaaccacaggagaggatggcccagggtgaggtggcatggtccattctcaagggacgtcctccaacgggtggcgctagaggccatggaggcagtaggacaaggtgcaggcaggctggcctggggtcaggccgggcagagcacagcggggtgagagggattcctaatcactcagagcagtctgtgacttagtggacaggggagggggcaaagggggaggagaagaaaatgttcttccagttactttccaattctcctttagggacagcttagaattatttgcactattgagtcttcatgttcccacttcaaaacaaacagatgctctgagagcaaactggcttgaattggtgacatttagtccctcaagccaccagatgtgacagtgttgagaactacctggatttgtatatatacctgcgcttgttttaaagtgggctcagcacatagggttcccacgaagctccgaaactctaagtgtttgctgcaattttataaggacttcctgattggtttctcttctccccttccatttctgccttttgttcatttcatcctttcacttctttcccttcctccgtcctcctccttcctagttcatcccttctcttccaggcagccgcggtgcccaaccacacttgtcggctccagtccccagaactctgcctgccctttgtcctcctgctgccagtaccagccccaccctgttttgagccctgaggaggccttgggctctgctgagtccgacctggcctgtctgtgaagagcaagagagcagcaaggtcttgctctcctaggtagccccctcttccctggtaagaaaaagcaaaaggcatttcccaccctgaacaacgagccttttcacccttctactctagagaagtggactggaggagctgggcccgatttggtagttgaggaaagcacagaggcctcctgtggcctgccagtcatcgagtggcccaacaggggctccatgccagccgaccttgacctcactcagaagtccagagtctagcgtagtgcagcagggcagtagcggtaccaatgcagaactcccaagacccgagctgggaccagtacctgggtccccagcccttcctctgctcccccttttccctcggagttcttcttgaatggcaatgttttgcttttgctcgatgcagacagggggccagaacaccacacatttcactgtctgtctggtccatagctgtggtgtaggggcttagaggcatgggcttgctgtgggtttttaattgatcagttttcatgtgggatcccatctttttaacctctgttcaggaagtccttatctagctgcatatcttcatcatattggtatatccttttctgtgtttacagagatgtctcttatatctaaatctgtccaactgagaagtaccttatcaaagtagcaaatgagacagcagtcttatgcttccagaaacacccacaggcatgtcccatgtgagctgctgccatgaactgtcaagtgtgtgttgtcttgtgtatttcagttattgtccctggcttccttactatggtgtaatcatgaaggagtgaaacatcatagaaactgtctagcacttccttgccagtctttagtgatcaggaaccatagttgacagttccaatcagtagcttaagaaaaaaccgtgtttgtctcttctggaatggttagaagtgagggagtttgccccgttctgtttgtagagtctcatagttggactttctagcatatatgtgtccatttccttatgctgtaaaagcaagtcctgcaaccaaactcccatcagcccaatccctgatccctgatcccttccacctgctctgctgatgacccccccagcttcacttctgactcttccccaggaagggaaggggggtcagaagagagggtgagtcctccagaactcttcctccaaggacagaaggctcctgcccccatagtggcctcgaactcctggcactaccaaaggacacttatccacgagagcgcagcatccgaccaggttgtcactgagaagatgtttattttggtcagttgggtttttatgtattatacttagtcaaatgtaatgtggcttctggaatcattgtccagagctgcttccccgtcacctgggcgtcatctggtcctggtaagaggagtgcgtggcccaccaggcccccctgtcacccatgacagttcattcagggccgatggggcagtcgtggttgggaacacagcatttcaagcgtcactttatttcattcgggccccacctgcagctccctcaaagaggcagttgcccagcctctttcccttccagtttattccagagctgccagtggggcctgaggctccttagggttttctctctatttccccctttcttcctcattccctcgtctttcccaaaggcatcacgagtcagtcgcctttcagcaggcagccttggcggtttatcgccctggcaggcaggggccctgcagctctcatgctgcccctgccttggggtcaggttgacaggaggttggagggaaagccttaagctgcaggattctcaccagctgtgtccggcccagttttggggtgtgacctcaatttcaattttgtctgtacttgaacattatgaagatgggggcctctttcagtgaatttgtgaacagcagaattgaccgacagctttccagtacccatggggctaggtcattaaggccacatccacagtctcccccacccttgttccagttgttagttactacctcctctcctgacaatactgtatgtcgtcgagctccccccaggtctacccctcccggccctgcctgctggtgggcttgtcatagccagtgggattgccggtcttgacagctcagtgagctggagatacttggtcacagccaggcgctagcacagctcccttctgttgatgctgtattcccatatcaaaagacacaggggacacccagaaacgccacatcccccaatccatcagtgccaaactagccaacggccccagcttctcagctcgctggatggcggaagctgctactcgtgagcgccagtgcgggtgcagacaatcttctgttgggtggcatcattccaggcccgaagcatgaacagtgcacctgggacagggagcagccccaaattgtcacctgcttctctgcccagcttttcattgctgtgacagtgatggcgaaagagggtaataaccagacacaaactgccaagttgggtggagaaaggagtttctttagctgacagaatctctgaattttaaatcacttagtaagcggctcaagcccaggagggagcagagggatacgagcggagtcccctgcgcgggaccatctggaattggtttagcccaagtggagcctgacagccagaactctgtgtcccccgtctaaccacagctccttttccagagcattccagtcaggctctctgggctgactgggccaggggaggttacaggtaccagttctttaagaagatctttgggcatatacatttttagcctgtgtcattgccccaaatggattcctgtttcaagttcacacctgcagattctaggacctgtgtcctagacttcagggagtcagctgtttctagagttcctaccatggagtgggtctggaggacctgcccggtgggggggcagagccctgctccctccgggtcttcctactcttctctctgctctgacgggatttgttgattctctccattttggtgtctttctcttttagatattgtatcaatctttagaaaaggcatagtctacttgttataaatcgttaggatactgcctcccccagggtctaaaattacatattagaggggaaaagctgaacactgaagtcagttctcaacaatttagaaggaaaacctagaaaacatttggcagaaaattacatttcgatgtttttgaatgaatacgagcaagcttttacaacagtgctgatctaaaaatacttagcacttggcctgagatgcctggtgagcattacaggcaaggggaatctggaggtagccgacctgaggacatggcttctgaacctgtcttttgggagtggtatggaaggtggagcgttcaccagtgacctggaaggcccagcaccaccctccttcccactcttctcatcttgacagagcctgccccagcgctgacgtgtcaggaaaacacccagggaactaggaaggcacttctgcctgaggggcagcctgccttgcccactcctgctctgctcgcctcggatcagctgagccttctgagctggcctctcactgcctccccaaggccccctgcctgccctgtcaggaggcagaaggaagcaggtgtgagggcagtgcaaggagggagcacaacccccagctcccgctccgggctccgacttgtgcacaggcagagcccagaccctggaggaaatcctacctttgaattcaagaacatttggggaatttggaaatctctttgcccccaaacccccattctgtcctacctttaatcaggtcctgctcagcagtgagagcagatgaggtgaaaaggccaagaggtttggctcctgcccactgatagcccctctccccgcagtgtttgtgtgtcaagtggcaaagctgttcttcctggtgaccctgattatatccagtaacacatagactgtgcgcataggcctgctttgtctcctctatcctgggcttttgttttgctttttagttttgcttttagtttttctgtcccttttatttaacgcaccgactagacacacaaagcagttgaatttttatatatatatctgtatattgcacaattataaactcattttgcttgtggctccacacacacaaaaaaagacctgttaaaattatacctgttgcttaattacaatatttctgataaccatagcataggacaagggaaaataaaaaaagaaaaaaaagaaaaaaaaacgacaaatctgtctgctggtcacttcttctgtccaagcagattcgtggtcttttcctcgcttctttcaagggctttcctgtgccaggtgaaggaggctccaggcagcacccaggttttgcactcttgtttctcccgtgcttgtgaaagaggtcccaaggttctgggtgcaggagcgctcccttgacctgctgaagtccggaacgtagtcggcacagcctggtcgccttccacctctgggagctggagtccactggggtggcctgactcccccagtccccttcccgtgacctggtcagggtgagcccatgtggagtcagcctcgcaggcctccctgccagtagggtccgagtgtgtttcatccttcccactctgtcgagcctgggggctggagcggagacgggaggcctggcctgtctcggaacctgtgagctgcaccaggtagaacgccagggaccccagaatcatgtgcgtcagtccaaggggtcccctccaggagtagtgaagactccagaaatgtccctttcttctcccccatcctacgagtaattgcatttgcttttgtaattcttaatgagcaatatctgctagagagtttagctgtaacagttctttttgatcatctttttttaataattagaaacaccaaaaaaatccagaaacttgttcttccaaagcagagagcattataatcaccagggccaaaagcttccctccctgctgtcattgcttcttctgaggcctgaatccaaaagaaaaacagccataggccctttcagtggccgggctacccgtgagcccttcggaggaccagggctggggcagcctctgggcccacatccggggccagctccggcgtgtgttcagtgttagcagtgggtcatgatgctctttcccacccagcctgggataggggcagaggaggcgaggaggccgttgccgctgatgtttggccgtgaacaggtgggtgtctgcgtgcgtccacgtgcgtgttttctgactgacatgaaatcgacgcccgagttagcctcacccggtgacctctagccctgcccggatggagcggggcccacccggttcagtgtttctggggagctggacagtggagtgcaaaaggcttgcagaacttgaagcctgctccttcccttgctaccacggcctcctttccgtttgatttgtcactgcttcaatcaataacagccgctccagagtcagtagtcaatgaatatatgaccaaatatcaccaggactgttactcaatgtgtgccgagcccttgcccatgctgggctcccgtgtatctggacactgtaacgtgtgctgtgtttgctccccttccccttccttctttgccctttacttgtctttctggggtttttctgtttgggtttggtttggtttttatttctccttttgtgttccaaacatgaggttctctctactggtcctcttaactgtggtgttgaggcttatatttgtgtaatttttggtgggtgaaaggaattttgctaagtaaatctcttctgtgtttgaactgaagtctgtattgtaactatgtttaaagtaattgttccagagacaaatatttctagacactttttctttacaaacaaaagcattcggagggagggggatggtgactgagatgagaggggagagctgaacagatgacccctgcccagatcagccagaagccacccaaagcagtggagcccaggagtcccactccaagccagcaagccgaatagctgatgtgttgccactttccaagtcactgcaaaaccaggttttgttccgcccagtggattcttgttttgcttcccctccccccgagattattaccaccatcccgtgcttttaaggaaaggcaagattgatgtttccttgaggggagccaggaggggatgtgtgtgtgcagagctgaagagctggggagaatggggctgggcccacccaagcaggaggctgggacgctctgctgtgggcacaggtcaggctaatgttggcagatgcagctcttcctggacaggccaggtggtgggcattctctctccaaggtgtgccccgtgggcattactgtttaagacacttccgtcacatcccaccccatcctccagggctcaacactgtgacatctctattccccaccctccccttcccagggcaataaaatgaccatggagggggcttgcactctcttggctgtcacccgatcgccagcaaaacttagatgtgagaaaaccccttcccattccatggcgaaaacatctccttagaaaagccattaccctcattaggcatggttttgggctcccaaaacacctgacagcccctccctcctctgagaggcggagagtgctgactgtagtgaccattgcatgccgggtgcagcatctggaagagctaggcagggtgtctgccccctcctgagttgaagtcatgctcccctgtgccagcccagaggccgagagctatggacagcattgccagtaacacaggccaccctgtgcagaagggagctggctccagcctggaaacctgtctgaggttgggagaggtgcacttggggcacagggagaggccgggacacacttagctggagatgtctctaaaagccctgtatcgtattcaccttcagtttttgtgttttgggacaattactttagaaaataagtaggtcgttttaaaaacaaaaattattgattgcttttttgtagtgttcagaaaaaaggttctttgtgtatagccaaatgactgaaagcactgatatatttaaaaacaaaaggcaatttattaaggaaatttgtaccatttcagtaaacctgtctgaatgtacctgtatacgtttcaaaaacaccccccccccactgaatccctgtaacctatttattatataaagagtttgccttataaatttacataaaaatgtccgtttgtgtcttttgttgtaaaaatcaagtgattttttcataaggttcttttactattggaaaagatgggcagcacgcagttttattttatttttgtaagttttttaatacatgtgaaagcaaagaatactcagcatgcctttctaagtgacgcgtttgcaccttttgttgggaagtactgtatcctgtgctgttagcattctcgataaatctctctgtgaaagtgactcaaggtctgggctttcattataagacagaagtccccctccagctcacatgacagcatggtgctgcgtttcctcattggatctggctgtccctggacacaggtagctgccttcaggcctgccacgagcggccaagggaagcctcctccatatgctggcctcgctggcccctcagcttcttccaagccagtgctctccaggcacactgctccagcgtgtgacgggaagggcctggcatgagtcagcctgcagcacaacctccctgctccagacccgtatggtaggggcaccccctaggtctggatgtgctgtggtgcttttggacacccccacccccgcaggctgtggctcctcctgtgtctcattctggccaggaccctcacgtgccctctgttgactgctaacgtggttctctgaccaggcaagggcaggctgaggggtttgcccaaagggggcccccttgttactggcttccttggctctcaggagcagcctcaccaggttggtaaggggctggaggagacaactgctcaaaggagtccagcttcacatgcacatgctagaaggtaccctcggaaggcctggccttcaaaggtagatcccagggttgaaaagtcaacttgtatgcattgagcatctcgtatgccagccctgttccgtgagctgatgggcctttgtgtgtaagtaggaccaagtgcccccgtggaggttagcatgggtgtgcagtcatttcagatacttgagttggtacatctcagtaaagtctgtcccgtgagaagccatgggtttcatggtatggttggcatcttccttgggagtggccacagtggtggtggcttcaggaaagagactccaacaggggccagctgtgggccttgggcacttctcgtttctaggaaaagtcctaagtctgtagggctaggggtggggaaccccttcgctgtcaggatcaagagggcaaggggaactgtcgctggaggagacatccagctggagaaacaaaagagtaagtctgcgttgctgcttgtggggtcttccccatctcagggcggggaccgggggtggcggtccagacaagtaatcaaggacgatgcccaggaggggacaggtacggggtggcaggagctctgccggcgggctcaggaagccttcaccacagctgcctgagctcacccttgccaaatgagggctggggcagcagcaacgcatacactcacggctgtggcgggcagcgttctcggcatatttcaggacacctaaggagactgaatggctcaaggctgctgccgtgtgcagggggctagacgtggggcgggcaggcagggctcctggtaacagccctgcaggccgcagtggagagcagggttccggcagggccgcccaggagctttcggaaggcccggccccggcccctttccgagcagcccgggcctccgccctgccctctgtccccaacgccgggagccgccgttcgtcctccagagccccgcccgggcgagc

SEQ ID NO: 298142 - DNA, 11589 bp, Homo sapiens
cgcgcgcgtcggcctctcggagagagggctgtggtaaaagccgtccggaaaatggccgccgccgccgccgccgcgccgagcggaggaggaggaggaggcgaggaggagagactgctccataaaaatacagactcaccagttcctgctttgatgtgacatgtgactccccagaatacaccttgcttctgtagaccagctccaacaggattccatggtagctgggatgttagggctcagggaagaaaagtcagaagaccaggacctccagggcctcaaggacaaacccctcaagtttaaaaaggtgaagaaagataagaaagaagagaaagagggcaagcatgagcccgtgcagccatcagcccaccactctgctgagcccgcagaggcaggcaaagcagagacatcagaagggtcaggctccgccccggctgtgccggaagcttctgcctcccccaaacagcggcgctccatcatccgtgaccggggacccatgtatgatgaccccaccctgcctgaaggctggacacggaagcttaagcaaaggaaatctggccgctctgctgggaagtatgatgtgtatttgatcaatccccagggaaaagcctttcgctctaaagtggagttgattgcgtacttcgaaaaggtaggcgacacatccctggaccctaatgattttgacttcacggtaactgggagagggagcccctcccggcgagagcagaaaccacctaagaagcccaaatctcccaaagctccaggaactggcagaggccggggacgccccaaagggagcggcaccacgagacccaaggcggccacgtcagagggtgtgcaggtgaaaagggtcctggagaaaagtcctgggaagctccttgtcaagatgccttttcaaacttcgccagggggcaaggctgaggggggtggggccaccacatccacccaggtcatggtgatcaaacgccccggcaggaagcgaaaagctgaggccgaccctcaggccattcccaagaaacggggccgaaagccggggagtgtggtggcagccgctgccgccgaggccaaaaagaaagccgtgaaggagtcttctatccgatctgtgcaggagaccgtactccccatcaagaagcgcaagacccgggagacggtcagcatcgaggtcaaggaagtggtgaagcccctgctggtgtccaccctcggtgagaagagcgggaaaggactgaagacctgtaagagccctgggcggaaaagcaaggagagcagccccaaggggcgcagcagcagcgcctcctcaccccccaagaaggagcaccaccaccatcaccaccactcagagtccccaaaggcccccgtgccactgctcccacccctgcccccacctccacctgagcccgagagctccgaggaccccaccagcccccctgagccccaggacttgagcagcagcgtctgcaaagaggagaagatgcccagaggaggctcactggagagcgacggctgccccaaggagccagctaagactcagcccgcggttgccaccgccgccacggccgcagaaaagtacaaacaccgaggggagggagagcgcaaagacattgtttcatcctccatgccaaggccaaacagagaggagcctgtggacagccggacgcccgtgaccgagagagttagctgactttacacggagcggattgcaaagcaaaccaacaagaataaaggcagctgttgtctcttctccttatgggtagggctctgacaaagcttcccgattaactgaaataaaaaatatttttttttctttcagtaaacttagagtttcgtggcttcagggtgggagtagttggagcattggggatgtttttcttaccgacaagcacagtcaggttgaagacctaaccagggccagaagtagctttgcacttttctaaactaggctccttcaacaaggcttgctgcagatactactgaccagacaagctgttgaccaggcacctcccctcccgcccaaacctttcccccatgtggtcgttagagacagagcgacagagcagttgagaggacactcccgttttcggtgccatcagtgccccgtctacagctcccccagctccccccacctcccccactcccaaccacgttgggacagggaggtgtgaggcaggagagacagttggattctttagagaagatggatatgaccagtggctatggcctgtgcgatcccacccgtggtggctcaagtctggccccacaccagccccaatccaaaactggcaaggacgcttcacaggacaggaaagtggcacctgtctgctccagctctggcatggctaggaggggggagtcccttgaactactgggtgtagactggcctgaaccacaggagaggatggcccagggtgaggtggcatggtccattctcaagggacgtcctccaacgggtggcgctagaggccatggaggcagtaggacaaggtgcaggcaggctggcctggggtcaggccgggcagagcacagcggggtgagagggattcctaatcactcagagcagtctgtgacttagtggacaggggagggggcaaagggggaggagaagaaaatgttcttccagttactttccaattctcctttagggacagcttagaattatttgcactattgagtcttcatgttcccacttcaaaacaaacagatgctctgagagcaaactggcttgaattggtgacatttagtccctcaagccaccagatgtgacagtgttgagaactacctggatttgtatatatacctgcgcttgttttaaagtgggctcagcacatagggttcccacgaagctccgaaactctaagtgtttgctgcaattttataaggacttcctgattggtttctcttctccccttccatttctgccttttgttcatttcatcctttcacttctttcccttcctccgtcctcctccttcctagttcatcccttctcttccaggcagccgcggtgcccaaccacacttgtcggctccagtccccagaactctgcctgccctttgtcctcctgctgccagtaccagccccaccctgttttgagccctgaggaggccttgggctctgctgagtccgacctggcctgtctgtgaagagcaagagagcagcaaggtcttgctctcctaggtagccccctcttccctggtaagaaaaagcaaaaggcatttcccaccctgaacaacgagccttttcacccttctactctagagaagtggactggaggagctgggcccgatttggtagttgaggaaagcacagaggcctcctgtggcctgccagtcatcgagtggcccaacaggggctccatgccagccgaccttgacctcactcagaagtccagagtctagcgtagtgcagcagggcagtagcggtaccaatgcagaactcccaagacccgagctgggaccagtacctgggtccccagcccttcctctgctcccccttttccctcggagttcttcttgaatggcaatgttttgcttttgctcgatgcagacagggggccagaacaccacacatttcactgtctgtctggtccatagctgtggtgtaggggcttagaggcatgggcttgctgtgggtttttaattgatcagttttcatgtgggatcccatctttttaacctctgttcaggaagtccttatctagctgcatatcttcatcatattggtatatccttttctgtgtttacagagatgtctcttatatctaaatctgtccaactgagaagtaccttatcaaagtagcaaatgagacagcagtcttatgcttccagaaacacccacaggcatgtcccatgtgagctgctgccatgaactgtcaagtgtgtgttgtcttgtgtatttcagttattgtccctggcttccttactatggtgtaatcatgaaggagtgaaacatcatagaaactgtctagcacttccttgccagtctttagtgatcaggaaccatagttgacagttccaatcagtagcttaagaaaaaaccgtgtttgtctcttctggaatggttagaagtgagggagtttgccccgttctgtttgtagagtctcatagttggactttctagcatatatgtgtccatttccttatgctgtaaaagcaagtcctgcaaccaaactcccatcagcccaatccctgatccctgatcccttccacctgctctgctgatgacccccccagcttcacttctgactcttccccaggaagggaaggggggtcagaagagagggtgagtcctccagaactcttcctccaaggacagaaggctcctgcccccatagtggcctcgaactcctggcactaccaaaggacacttatccacgagagcgcagcatccgaccaggttgtcactgagaagatgtttattttggtcagttgggtttttatgtattatacttagtcaaatgtaatgtggcttctggaatcattgtccagagctgcttccccgtcacctgggcgtcatctggtcctggtaagaggagtgcgtggcccaccaggcccccctgtcacccatgacagttcattcagggccgatggggcagtcgtggttgggaacacagcatttcaagcgtcactttatttcattcgggccccacctgcagctccctcaaagaggcagttgcccagcctctttcccttccagtttattccagagctgccagtggggcctgaggctccttagggttttctctctatttccccctttcttcctcattccctcgtctttcccaaaggcatcacgagtcagtcgcctttcagcaggcagccttggcggtttatcgccctggcaggcaggggccctgcagctctcatgctgcccctgccttggggtcaggttgacaggaggttggagggaaagccttaagctgcaggattctcaccagctgtgtccggcccagttttggggtgtgacctcaatttcaattttgtctgtacttgaacattatgaagatgggggcctctttcagtgaatttgtgaacagcagaattgaccgacagctttccagtacccatggggctaggtcattaaggccacatccacagtctcccccacccttgttccagttgttagttactacctcctctcctgacaatactgtatgtcgtcgagctccccccaggtctacccctcccggccctgcctgctggtgggcttgtcatagccagtgggattgccggtcttgacagctcagtgagctggagatacttggtcacagccaggcgctagcacagctcccttctgttgatgctgtattcccatatcaaaagacacaggggacacccagaaacgccacatcccccaatccatcagtgccaaactagccaacggccccagcttctcagctcgctggatggcggaagctgctactcgtgagcgccagtgcgggtgcagacaatcttctgttgggtggcatcattccaggcccgaagcatgaacagtgcacctgggacagggagcagccccaaattgtcacctgcttctctgcccagcttttcattgctgtgacagtgatggcgaaagagggtaataaccagacacaaactgccaagttgggtggagaaaggagtttctttagctgacagaatctctgaattttaaatcacttagtaagcggctcaagcccaggagggagcagagggatacgagcggagtcccctgcgcgggaccatctggaattggtttagcccaagtggagcctgacagccagaactctgtgtcccccgtctaaccacagctccttttccagagcattccagtcaggctctctgggctgactgggccaggggaggttacaggtaccagttctttaagaagatctttgggcatatacatttttagcctgtgtcattgccccaaatggattcctgtttcaagttcacacctgcagattctaggacctgtgtcctagacttcagggagtcagctgtttctagagttcctaccatggagtgggtctggaggacctgcccggtgggggggcagagccctgctccctccgggtcttcctactcttctctctgctctgacgggatttgttgattctctccattttggtgtctttctcttttagatattgtatcaatctttagaaaaggcatagtctacttgttataaatcgttaggatactgcctcccccagggtctaaaattacatattagaggggaaaagctgaacactgaagtcagttctcaacaatttagaaggaaaacctagaaaacatttggcagaaaattacatttcgatgtttttgaatgaatacgagcaagcttttacaacagtgctgatctaaaaatacttagcacttggcctgagatgcctggtgagcattacaggcaaggggaatctggaggtagccgacctgaggacatggcttctgaacctgtcttttgggagtggtatggaaggtggagcgttcaccagtgacctggaaggcccagcaccaccctccttcccactcttctcatcttgacagagcctgccccagcgctgacgtgtcaggaaaacacccagggaactaggaaggcacttctgcctgaggggcagcctgccttgcccactcctgctctgctcgcctcggatcagctgagccttctgagctggcctctcactgcctccccaaggccccctgcctgccctgtcaggaggcagaaggaagcaggtgtgagggcagtgcaaggagggagcacaacccccagctcccgctccgggctccgacttgtgcacaggcagagcccagaccctggaggaaatcctacctttgaattcaagaacatttggggaatttggaaatctctttgcccccaaacccccattctgtcctacctttaatcaggtcctgctcagcagtgagagcagatgaggtgaaaaggccaagaggtttggctcctgcccactgatagcccctctccccgcagtgtttgtgtgtcaagtggcaaagctgttcttcctggtgaccctgattatatccagtaacacatagactgtgcgcataggcctgctttgtctcctctatcctgggcttttgttttgctttttagttttgcttttagtttttctgtcccttttatttaacgcaccgactagacacacaaagcagttgaatttttatatatatatctgtatattgcacaattataaactcattttgcttgtggctccacacacacaaaaaaagacctgttaaaattatacctgttgcttaattacaatatttctgataaccatagcataggacaagggaaaataaaaaaagaaaaaaaagaaaaaaaaacgacaaatctgtctgctggtcacttcttctgtccaagcagattcgtggtcttttcctcgcttctttcaagggctttcctgtgccaggtgaaggaggctccaggcagcacccaggttttgcactcttgtttctcccgtgcttgtgaaagaggtcccaaggttctgggtgcaggagcgctcccttgacctgctgaagtccggaacgtagtcggcacagcctggtcgccttccacctctgggagctggagtccactggggtggcctgactcccccagtccccttcccgtgacctggtcagggtgagcccatgtggagtcagcctcgcaggcctccctgccagtagggtccgagtgtgtttcatccttcccactctgtcgagcctgggggctggagcggagacgggaggcctggcctgtctcggaacctgtgagctgcaccaggtagaacgccagggaccccagaatcatgtgcgtcagtccaaggggtcccctccaggagtagtgaagactccagaaatgtccctttcttctcccccatcctacgagtaattgcatttgcttttgtaattcttaatgagcaatatctgctagagagtttagctgtaacagttctttttgatcatctttttttaataattagaaacaccaaaaaaatccagaaacttgttcttccaaagcagagagcattataatcaccagggccaaaagcttccctccctgctgtcattgcttcttctgaggcctgaatccaaaagaaaaacagccataggccctttcagtggccgggctacccgtgagcccttcggaggaccagggctggggcagcctctgggcccacatccggggccagctccggcgtgtgttcagtgttagcagtgggtcatgatgctctttcccacccagcctgggataggggcagaggaggcgaggaggccgttgccgctgatgtttggccgtgaacaggtgggtgtctgcgtgcgtccacgtgcgtgttttctgactgacatgaaatcgacgcccgagttagcctcacccggtgacctctagccctgcccggatggagcggggcccacccggttcagtgtttctggggagctggacagtggagtgcaaaaggcttgcagaacttgaagcctgctccttcccttgctaccacggcctcctttccgtttgatttgtcactgcttcaatcaataacagccgctccagagtcagtagtcaatgaatatatgaccaaatatcaccaggactgttactcaatgtgtgccgagcccttgcccatgctgggctcccgtgtatctggacactgtaacgtgtgctgtgtttgctccccttccccttccttctttgccctttacttgtctttctggggtttttctgtttgggtttggtttggtttttatttctccttttgtgttccaaacatgaggttctctctactggtcctcttaactgtggtgttgaggcttatatttgtgtaatttttggtgggtgaaaggaattttgctaagtaaatctcttctgtgtttgaactgaagtctgtattgtaactatgtttaaagtaattgttccagagacaaatatttctagacactttttctttacaaacaaaagcattcggagggagggggatggtgactgagatgagaggggagagctgaacagatgacccctgcccagatcagccagaagccacccaaagcagtggagcccaggagtcccactccaagccagcaagccgaatagactgtgacatctctattccccaccctccccttcccagggcaataaaatgaccatggagggggcttgcactctcttggctgtcacccgatcgccagcaaaacttagatgtgagaaaaccccttcccattccatggcgaaaacatctccttagaaaagccattaccctcattaggcatggttttgggctcccaaaacacctgacagcccctccctcctctgagaggcggagagtgctgactgtagtgaccattgcatgccgggtgcagcatctggaagagctaggcagggtgtctgccccctcctgagttgaagtcatgctcccctgtgccagcccagaggccgagagctatggacagcattgccagtaacacaggccaccctgtgcagaagggagctggctccagcctggaaacctgtctgaggttgggagaggtgcacttggggcacagggagaggccgggacacacttagctggagatgtctctaaaagccctgtatcgtattcaccttcagtttttgtgttttgggacaattactttagaaaataagtaggtcgttttaaaaacaaaaattattgattgcttttttgtagtgttcagaaaaaaggttctttgtgtatagccaaatgactgaaagcactgatatatttaaaaacaaaaggcaatttattaaggaaatttgtaccatttcagtaaacctgtctgaatgtacctgtatacgtttcaaaaacaccccccccccactgaatccctgtaacctatttattatataaagagtttgccttataaatttacataaaaatgtccgtttgtgtcttttgttgtaaaaatcaagtgattttttcataaggttcttttactattggaaaagatgggcagcacgcagttttattttatttttgtaagttttttaatacatgtgaaagcaaagaatactcagcatgcctttctaagtgacgcgtttgcaccttttgttgggaagtactgtatcctgtgctgttagcattctcgataaatctctctgtgaaagtgactcaaggtctgggctttcattataagacagaagtccccctccagctcacatgacagcatggtgctgcgtttcctcattggatctggctgtccctggacacaggtagctgccttcaggcctgccacgagcggccaagggaagcctcctccatatgctggcctcgctggcccctcagcttcttccaagccagtgctctccaggcacactgctccagcgtgtgacgggaagggcctggcatgagtcagcctgcagcacaacctccctgctccagacccgtatggtaggggcaccccctaggtctggatgtgctgtggtgcttttggacacccccacccccgcaggctgtggctcctcctgtgtctcattctggccaggaccctcacgtgccctctgttgactgctaacgtggttctctgaccaggcaagggcaggctgaggggtttgcccaaagggggcccccttgttactggcttccttggctctcaggagcagcctcaccaggttggtaaggggctggaggagacaactgctcaaaggagtccagcttcacatgcacatgctagaaggtaccctcggaaggcctggccttcaaaggtagatcccagggttgaaaagtcaacttgtatgcattgagcatctcgtatgccagccctgttccgtgagctgatgggcctttgtgtgtaagtaggaccaagtgcccccgtggaggttagcatgggtgtgcagtcatttcagatacttgagttggtacatctcagtaaagtctgtcccgtgagaagccatgggtttcatggtatggttggcatcttccttgggagtggccacagtggtggtggcttcaggaaagagactccaacaggggccagctgtgggccttgggcacttctcgtttctaggaaaagtcctaagtctgtagggctaggggtggggaaccccttcgctgtcaggatcaagagggcaaggggaactgtcgctggaggagacatccagctggagaaacaaaagagtaagtctgcgttgctgcttgtggggtcttccccatctcagggcggggaccgggggtggcggtccagacaagtaatcaaggacgatgcccaggaggggacaggtacggggtggcaggagctctgccggcgggctcaggaagccttcaccacagctgcctgagctcacccttgccaaatgagggctggggcagcagcaacgcatacactcacggctgtggcgggcagcgttctcggcatatttcaggacacctaaggagactgaatggctcaaggctgctgccgtgtgcagggggctagacgtggggcgggcaggcagggctcctggtaacagccctgcaggccgcagtggagagcagggttccggcagggccgcccaggagctttcggaaggcccggccccggcccctttccgagcagcccgggcctccgccctgccctctgtccccaacgccgggagccgccgttcgtcctccagagccccgcccgggcgagc

SEQ ID NO: 298143 - DNA, 11842 bp, Homo sapiens
cgcgcgcgtcggcctctcggagagagggctgtggtaaaagccgtccggaaaatggccgccgccgccgccgccgcgccgagcggaggaggaggaggaggcgaggaggagagactggaagaaaagtcagaagaccaggacctccagggcctcaaggacaaacccctcaagtttaaaaaggtgaagaaagataagaaagaagagaaagagggcaagcatgagcccgtgcagccatcagcccaccactctgctgagcccgcagaggcaggcaaagcagagacatcagaagggtcaggctccgccccggctgtgccggaagcttctgcctcccccaaacagcggcgctccatcatccgtgaccggggacccatgtatgatgaccccaccctgcctgaaggctggacacggaagcttaagcaaaggaaatctggccgctctgctgggaagtatgatgtgtatttgatcaatccccagggaaaagcctttcgctctaaagtggagttgattgcgtacttcgaaaaggtaggcgacacatccctggaccctaatgattttgacttcacggtaactgggagagggagcccctcccggcgagagcagaaaccacctaagaagcccaaatctcccaaagctccaggaactggcagaggccggggacgccccaaagggagcggcaccacgagacccaaggcggccacgtcagagggtgtgcaggtgaaaagggtcctggagaaaagtcctgggaagctccttgtcaagatgccttttcaaacttcgccagggggcaaggctgaggggggtggggccaccacatccacccaggtcatggtgatcaaacgccccggcaggaagcgaaaagctgaggccgaccctcaggccattcccaagaaacggggccgaaagccggggagtgtggtggcagccgctgccgccgaggccaaaaagaaagccgtgaaggagtcttctatccgatctgtgcaggagaccgtactccccatcaagaagcgcaagacccgggagacggtcagcatcgaggtcaaggaagtggtgaagcccctgctggtgtccaccctcggtgagaagagcgggaaaggactgaagacctgtaagagccctgggcggaaaagcaaggagagcagccccaaggggcgcagcagcagcgcctcctcaccccccaagaaggagcaccaccaccatcaccaccactcagagtccccaaaggcccccgtgccactgctcccacccctgcccccacctccacctgagcccgagagctccgaggaccccaccagcccccctgagccccaggacttgagcagcagcgtctgcaaagaggagaagatgcccagaggaggctcactggagagcgacggctgccccaaggagccagctaagactcagcccgcggttgccaccgccgccacggccgcagaaaagtacaaacaccgaggggagggagagcgcaaagacattgtttcatcctccatgccaaggccaaacagagaggagcctgtggacagccggacgcccgtgaccgagagagttagctgactttacacggagcggattgcaaagcaaaccaacaagaataaaggcagctgttgtctcttctccttatgggtagggctctgacaaagcttcccgattaactgaaataaaaaatatttttttttctttcagtaaacttagagtttcgtggcttcagggtgggagtagttggagcattggggatgtttttcttaccgacaagcacagtcaggttgaagacctaaccagggccagaagtagctttgcacttttctaaactaggctccttcaacaaggcttgctgcagatactactgaccagacaagctgttgaccaggcacctcccctcccgcccaaacctttcccccatgtggtcgttagagacagagcgacagagcagttgagaggacactcccgttttcggtgccatcagtgccccgtctacagctcccccagctccccccacctcccccactcccaaccacgttgggacagggaggtgtgaggcaggagagacagttggattctttagagaagatggatatgaccagtggctatggcctgtgcgatcccacccgtggtggctcaagtctggccccacaccagccccaatccaaaactggcaaggacgcttcacaggacaggaaagtggcacctgtctgctccagctctggcatggctaggaggggggagtcccttgaactactgggtgtagactggcctgaaccacaggagaggatggcccagggtgaggtggcatggtccattctcaagggacgtcctccaacgggtggcgctagaggccatggaggcagtaggacaaggtgcaggcaggctggcctggggtcaggccgggcagagcacagcggggtgagagggattcctaatcactcagagcagtctgtgacttagtggacaggggagggggcaaagggggaggagaagaaaatgttcttccagttactttccaattctcctttagggacagcttagaattatttgcactattgagtcttcatgttcccacttcaaaacaaacagatgctctgagagcaaactggcttgaattggtgacatttagtccctcaagccaccagatgtgacagtgttgagaactacctggatttgtatatatacctgcgcttgttttaaagtgggctcagcacatagggttcccacgaagctccgaaactctaagtgtttgctgcaattttataaggacttcctgattggtttctcttctccccttccatttctgccttttgttcatttcatcctttcacttctttcccttcctccgtcctcctccttcctagttcatcccttctcttccaggcagccgcggtgcccaaccacacttgtcggctccagtccccagaactctgcctgccctttgtcctcctgctgccagtaccagccccaccctgttttgagccctgaggaggccttgggctctgctgagtccgacctggcctgtctgtgaagagcaagagagcagcaaggtcttgctctcctaggtagccccctcttccctggtaagaaaaagcaaaaggcatttcccaccctgaacaacgagccttttcacccttctactctagagaagtggactggaggagctgggcccgatttggtagttgaggaaagcacagaggcctcctgtggcctgccagtcatcgagtggcccaacaggggctccatgccagccgaccttgacctcactcagaagtccagagtctagcgtagtgcagcagggcagtagcggtaccaatgcagaactcccaagacccgagctgggaccagtacctgggtccccagcccttcctctgctcccccttttccctcggagttcttcttgaatggcaatgttttgcttttgctcgatgcagacagggggccagaacaccacacatttcactgtctgtctggtccatagctgtggtgtaggggcttagaggcatgggcttgctgtgggtttttaattgatcagttttcatgtgggatcccatctttttaacctctgttcaggaagtccttatctagctgcatatcttcatcatattggtatatccttttctgtgtttacagagatgtctcttatatctaaatctgtccaactgagaagtaccttatcaaagtagcaaatgagacagcagtcttatgcttccagaaacacccacaggcatgtcccatgtgagctgctgccatgaactgtcaagtgtgtgttgtcttgtgtatttcagttattgtccctggcttccttactatggtgtaatcatgaaggagtgaaacatcatagaaactgtctagcacttccttgccagtctttagtgatcaggaaccatagttgacagttccaatcagtagcttaagaaaaaaccgtgtttgtctcttctggaatggttagaagtgagggagtttgccccgttctgtttgtagagtctcatagttggactttctagcatatatgtgtccatttccttatgctgtaaaagcaagtcctgcaaccaaactcccatcagcccaatccctgatccctgatcccttccacctgctctgctgatgacccccccagcttcacttctgactcttccccaggaagggaaggggggtcagaagagagggtgagtcctccagaactcttcctccaaggacagaaggctcctgcccccatagtggcctcgaactcctggcactaccaaaggacacttatccacgagagcgcagcatccgaccaggttgtcactgagaagatgtttattttggtcagttgggtttttatgtattatacttagtcaaatgtaatgtggcttctggaatcattgtccagagctgcttccccgtcacctgggcgtcatctggtcctggtaagaggagtgcgtggcccaccaggcccccctgtcacccatgacagttcattcagggccgatggggcagtcgtggttgggaacacagcatttcaagcgtcactttatttcattcgggccccacctgcagctccctcaaagaggcagttgcccagcctctttcccttccagtttattccagagctgccagtggggcctgaggctccttagggttttctctctatttccccctttcttcctcattccctcgtctttcccaaaggcatcacgagtcagtcgcctttcagcaggcagccttggcggtttatcgccctggcaggcaggggccctgcagctctcatgctgcccctgccttggggtcaggttgacaggaggttggagggaaagccttaagctgcaggattctcaccagctgtgtccggcccagttttggggtgtgacctcaatttcaattttgtctgtacttgaacattatgaagatgggggcctctttcagtgaatttgtgaacagcagaattgaccgacagctttccagtacccatggggctaggtcattaaggccacatccacagtctcccccacccttgttccagttgttagttactacctcctctcctgacaatactgtatgtcgtcgagctccccccaggtctacccctcccggccctgcctgctggtgggcttgtcatagccagtgggattgccggtcttgacagctcagtgagctggagatacttggtcacagccaggcgctagcacagctcccttctgttgatgctgtattcccatatcaaaagacacaggggacacccagaaacgccacatcccccaatccatcagtgccaaactagccaacggccccagcttctcagctcgctggatggcggaagctgctactcgtgagcgccagtgcgggtgcagacaatcttctgttgggtggcatcattccaggcccgaagcatgaacagtgcacctgggacagggagcagccccaaattgtcacctgcttctctgcccagcttttcattgctgtgacagtgatggcgaaagagggtaataaccagacacaaactgccaagttgggtggagaaaggagtttctttagctgacagaatctctgaattttaaatcacttagtaagcggctcaagcccaggagggagcagagggatacgagcggagtcccctgcgcgggaccatctggaattggtttagcccaagtggagcctgacagccagaactctgtgtcccccgtctaaccacagctccttttccagagcattccagtcaggctctctgggctgactgggccaggggaggttacaggtaccagttctttaagaagatctttgggcatatacatttttagcctgtgtcattgccccaaatggattcctgtttcaagttcacacctgcagattctaggacctgtgtcctagacttcagggagtcagctgtttctagagttcctaccatggagtgggtctggaggacctgcccggtgggggggcagagccctgctccctccgggtcttcctactcttctctctgctctgacgggatttgttgattctctccattttggtgtctttctcttttagatattgtatcaatctttagaaaaggcatagtctacttgttataaatcgttaggatactgcctcccccagggtctaaaattacatattagaggggaaaagctgaacactgaagtcagttctcaacaatttagaaggaaaacctagaaaacatttggcagaaaattacatttcgatgtttttgaatgaatacgagcaagcttttacaacagtgctgatctaaaaatacttagcacttggcctgagatgcctggtgagcattacaggcaaggggaatctggaggtagccgacctgaggacatggcttctgaacctgtcttttgggagtggtatggaaggtggagcgttcaccagtgacctggaaggcccagcaccaccctccttcccactcttctcatcttgacagagcctgccccagcgctgacgtgtcaggaaaacacccagggaactaggaaggcacttctgcctgaggggcagcctgccttgcccactcctgctctgctcgcctcggatcagctgagccttctgagctggcctctcactgcctccccaaggccccctgcctgccctgtcaggaggcagaaggaagcaggtgtgagggcagtgcaaggagggagcacaacccccagctcccgctccgggctccgacttgtgcacaggcagagcccagaccctggaggaaatcctacctttgaattcaagaacatttggggaatttggaaatctctttgcccccaaacccccattctgtcctacctttaatcaggtcctgctcagcagtgagagcagatgaggtgaaaaggccaagaggtttggctcctgcccactgatagcccctctccccgcagtgtttgtgtgtcaagtggcaaagctgttcttcctggtgaccctgattatatccagtaacacatagactgtgcgcataggcctgctttgtctcctctatcctgggcttttgttttgctttttagttttgcttttagtttttctgtcccttttatttaacgcaccgactagacacacaaagcagttgaatttttatatatatatctgtatattgcacaattataaactcattttgcttgtggctccacacacacaaaaaaagacctgttaaaattatacctgttgcttaattacaatatttctgataaccatagcataggacaagggaaaataaaaaaagaaaaaaaagaaaaaaaaacgacaaatctgtctgctggtcacttcttctgtccaagcagattcgtggtcttttcctcgcttctttcaagggctttcctgtgccaggtgaaggaggctccaggcagcacccaggttttgcactcttgtttctcccgtgcttgtgaaagaggtcccaaggttctgggtgcaggagcgctcccttgacctgctgaagtccggaacgtagtcggcacagcctggtcgccttccacctctgggagctggagtccactggggtggcctgactcccccagtccccttcccgtgacctggtcagggtgagcccatgtggagtcagcctcgcaggcctccctgccagtagggtccgagtgtgtttcatccttcccactctgtcgagcctgggggctggagcggagacgggaggcctggcctgtctcggaacctgtgagctgcaccaggtagaacgccagggaccccagaatcatgtgcgtcagtccaaggggtcccctccaggagtagtgaagactccagaaatgtccctttcttctcccccatcctacgagtaattgcatttgcttttgtaattcttaatgagcaatatctgctagagagtttagctgtaacagttctttttgatcatctttttttaataattagaaacaccaaaaaaatccagaaacttgttcttccaaagcagagagcattataatcaccagggccaaaagcttccctccctgctgtcattgcttcttctgaggcctgaatccaaaagaaaaacagccataggccctttcagtggccgggctacccgtgagcccttcggaggaccagggctggggcagcctctgggcccacatccggggccagctccggcgtgtgttcagtgttagcagtgggtcatgatgctctttcccacccagcctgggataggggcagaggaggcgaggaggccgttgccgctgatgtttggccgtgaacaggtgggtgtctgcgtgcgtccacgtgcgtgttttctgactgacatgaaatcgacgcccgagttagcctcacccggtgacctctagccctgcccggatggagcggggcccacccggttcagtgtttctggggagctggacagtggagtgcaaaaggcttgcagaacttgaagcctgctccttcccttgctaccacggcctcctttccgtttgatttgtcactgcttcaatcaataacagccgctccagagtcagtagtcaatgaatatatgaccaaatatcaccaggactgttactcaatgtgtgccgagcccttgcccatgctgggctcccgtgtatctggacactgtaacgtgtgctgtgtttgctccccttccccttccttctttgccctttacttgtctttctggggtttttctgtttgggtttggtttggtttttatttctccttttgtgttccaaacatgaggttctctctactggtcctcttaactgtggtgttgaggcttatatttgtgtaatttttggtgggtgaaaggaattttgctaagtaaatctcttctgtgtttgaactgaagtctgtattgtaactatgtttaaagtaattgttccagagacaaatatttctagacactttttctttacaaacaaaagcattcggagggagggggatggtgactgagatgagaggggagagctgaacagatgacccctgcccagatcagccagaagccacccaaagcagtggagcccaggagtcccactccaagccagcaagccgaatagctgatgtgttgccactttccaagtcactgcaaaaccaggttttgttccgcccagtggattcttgttttgcttcccctccccccgagattattaccaccatcccgtgcttttaaggaaaggcaagattgatgtttccttgaggggagccaggaggggatgtgtgtgtgcagagctgaagagctggggagaatggggctgggcccacccaagcaggaggctgggacgctctgctgtgggcacaggtcaggctaatgttggcagatgcagctcttcctggacaggccaggtggtgggcattctctctccaaggtgtgccccgtgggcattactgtttaagacacttccgtcacatcccaccccatcctccagggctcaacactgtgacatctctattccccaccctccccttcccagggcaataaaatgaccatggagggggcttgcactctcttggctgtcacccgatcgccagcaaaacttagatgtgagaaaaccccttcccattccatggcgaaaacatctccttagaaaagccattaccctcattaggcatggttttgggctcccaaaacacctgacagcccctccctcctctgagaggcggagagtgctgactgtagtgaccattgcatgccgggtgcagcatctggaagagctaggcagggtgtctgccccctcctgagttgaagtcatgctcccctgtgccagcccagaggccgagagctatggacagcattgccagtaacacaggccaccctgtgcagaagggagctggctccagcctggaaacctgtctgaggttgggagaggtgcacttggggcacagggagaggccgggacacacttagctggagatgtctctaaaagccctgtatcgtattcaccttcagtttttgtgttttgggacaattactttagaaaataagtaggtcgttttaaaaacaaaaattattgattgcttttttgtagtgttcagaaaaaaggttctttgtgtatagccaaatgactgaaagcactgatatatttaaaaacaaaaggcaatttattaaggaaatttgtaccatttcagtaaacctgtctgaatgtacctgtatacgtttcaaaaacaccccccccccactgaatccctgtaacctatttattatataaagagtttgccttataaatttacataaaaatgtccgtttgtgtcttttgttgtaaaaatcaagtgattttttcataaggttcttttactattggaaaagatgggcagcacgcagttttattttatttttgtaagttttttaatacatgtgaaagcaaagaatactcagcatgcctttctaagtgacgcgtttgcaccttttgttgggaagtactgtatcctgtgctgttagcattctcgataaatctctctgtgaaagtgactcaaggtctgggctttcattataagacagaagtccccctccagctcacatgacagcatggtgctgcgtttcctcattggatctggctgtccctggacacaggtagctgccttcaggcctgccacgagcggccaagggaagcctcctccatatgctggcctcgctggcccctcagcttcttccaagccagtgctctccaggcacactgctccagcgtgtgacgggaagggcctggcatgagtcagcctgcagcacaacctccctgctccagacccgtatggtaggggcaccccctaggtctggatgtgctgtggtgcttttggacacccccacccccgcaggctgtggctcctcctgtgtctcattctggccaggaccctcacgtgccctctgttgactgctaacgtggttctctgaccaggcaagggcaggctgaggggtttgcccaaagggggcccccttgttactggcttccttggctctcaggagcagcctcaccaggttggtaaggggctggaggagacaactgctcaaaggagtccagcttcacatgcacatgctagaaggtaccctcggaaggcctggccttcaaaggtagatcccagggttgaaaagtcaacttgtatgcattgagcatctcgtatgccagccctgttccgtgagctgatgggcctttgtgtgtaagtaggaccaagtgcccccgtggaggttagcatgggtgtgcagtcatttcagatacttgagttggtacatctcagtaaagtctgtcccgtgagaagccatgggtttcatggtatggttggcatcttccttgggagtggccacagtggtggtggcttcaggaaagagactccaacaggggccagctgtgggccttgggcacttctcgtttctaggaaaagtcctaagtctgtagggctaggggtggggaaccccttcgctgtcaggatcaagagggcaaggggaactgtcgctggaggagacatccagctggagaaacaaaagagtaagtctgcgttgctgcttgtggggtcttccccatctcagggcggggaccgggggtggcggtccagacaagtaatcaaggacgatgcccaggaggggacaggtacggggtggcaggagctctgccggcgggctcaggaagccttcaccacagctgcctgagctcacccttgccaaatgagggctggggcagcagcaacgcatacactcacggctgtggcgggcagcgttctcggcatatttcaggacacctaaggagactgaatggctcaaggctgctgccgtgtgcagggggctagacgtggggcgggcaggcagggctcctggtaacagccctgcaggccgcagtggagagcagggttccggcagggccgcccaggagctttcggaaggcccggccccggcccctttccgagcagcccgggcctccgccctgccctctgtccccaacgccgggagccgccgttcgtcctccagagccccgcccgggcgagc

SEQ ID NO: 298144 - DNA, 12134 bp, Homo sapiens
cgcgcgcgtcggcctctcggagagagggctgtggtaaaagccgtccggaaaatggccgccgccgccgccgccgcgccgagcggaggaggaggaggaggcgaggaggagagactgctccataaaaatacagactcaccagttcctgctttgatgtgacatgtgactccccagaatacaccttgcttctgtagaccagctccaacaggattccatggtagctgggatgttagggctcagctgcaagatgggattcagatctgttctcaagcctgtcgttccaggacccaggagggagaagcagctgccaggggaagtctcttcgtaggcggaggtcaggagtccaagaggagtgagcagagtcacagaagcctcttaaagcctcttcttcccccatcccatcaacacggaagaaaagtcagaagaccaggacctccagggcctcaaggacaaacccctcaagtttaaaaaggtgaagaaagataagaaagaagagaaagagggcaagcatgagcccgtgcagccatcagcccaccactctgctgagcccgcagaggcaggcaaagcagagacatcagaagggtcaggctccgccccggctgtgccggaagcttctgcctcccccaaacagcggcgctccatcatccgtgaccggggacccatgtatgatgaccccaccctgcctgaaggctggacacggaagcttaagcaaaggaaatctggccgctctgctgggaagtatgatgtgtatttgatcaatccccagggaaaagcctttcgctctaaagtggagttgattgcgtacttcgaaaaggtaggcgacacatccctggaccctaatgattttgacttcacggtaactgggagagggagcccctcccggcgagagcagaaaccacctaagaagcccaaatctcccaaagctccaggaactggcagaggccggggacgccccaaagggagcggcaccacgagacccaaggcggccacgtcagagggtgtgcaggtgaaaagggtcctggagaaaagtcctgggaagctccttgtcaagatgccttttcaaacttcgccagggggcaaggctgaggggggtggggccaccacatccacccaggtcatggtgatcaaacgccccggcaggaagcgaaaagctgaggccgaccctcaggccattcccaagaaacggggccgaaagccggggagtgtggtggcagccgctgccgccgaggccaaaaagaaagccgtgaaggagtcttctatccgatctgtgcaggagaccgtactccccatcaagaagcgcaagacccgggagacggtcagcatcgaggtcaaggaagtggtgaagcccctgctggtgtccaccctcggtgagaagagcgggaaaggactgaagacctgtaagagccctgggcggaaaagcaaggagagcagccccaaggggcgcagcagcagcgcctcctcaccccccaagaaggagcaccaccaccatcaccaccactcagagtccccaaaggcccccgtgccactgctcccacccctgcccccacctccacctgagcccgagagctccgaggaccccaccagcccccctgagccccaggacttgagcagcagcgtctgcaaagaggagaagatgcccagaggaggctcactggagagcgacggctgccccaaggagccagctaagactcagcccgcggttgccaccgccgccacggccgcagaaaagtacaaacaccgaggggagggagagcgcaaagacattgtttcatcctccatgccaaggccaaacagagaggagcctgtggacagccggacgcccgtgaccgagagagttagctgactttacacggagcggattgcaaagcaaaccaacaagaataaaggcagctgttgtctcttctccttatgggtagggctctgacaaagcttcccgattaactgaaataaaaaatatttttttttctttcagtaaacttagagtttcgtggcttcagggtgggagtagttggagcattggggatgtttttcttaccgacaagcacagtcaggttgaagacctaaccagggccagaagtagctttgcacttttctaaactaggctccttcaacaaggcttgctgcagatactactgaccagacaagctgttgaccaggcacctcccctcccgcccaaacctttcccccatgtggtcgttagagacagagcgacagagcagttgagaggacactcccgttttcggtgccatcagtgccccgtctacagctcccccagctccccccacctcccccactcccaaccacgttgggacagggaggtgtgaggcaggagagacagttggattctttagagaagatggatatgaccagtggctatggcctgtgcgatcccacccgtggtggctcaagtctggccccacaccagccccaatccaaaactggcaaggacgcttcacaggacaggaaagtggcacctgtctgctccagctctggcatggctaggaggggggagtcccttgaactactgggtgtagactggcctgaaccacaggagaggatggcccagggtgaggtggcatggtccattctcaagggacgtcctccaacgggtggcgctagaggccatggaggcagtaggacaaggtgcaggcaggctggcctggggtcaggccgggcagagcacagcggggtgagagggattcctaatcactcagagcagtctgtgacttagtggacaggggagggggcaaagggggaggagaagaaaatgttcttccagttactttccaattctcctttagggacagcttagaattatttgcactattgagtcttcatgttcccacttcaaaacaaacagatgctctgagagcaaactggcttgaattggtgacatttagtccctcaagccaccagatgtgacagtgttgagaactacctggatttgtatatatacctgcgcttgttttaaagtgggctcagcacatagggttcccacgaagctccgaaactctaagtgtttgctgcaattttataaggacttcctgattggtttctcttctccccttccatttctgccttttgttcatttcatcctttcacttctttcccttcctccgtcctcctccttcctagttcatcccttctcttccaggcagccgcggtgcccaaccacacttgtcggctccagtccccagaactctgcctgccctttgtcctcctgctgccagtaccagccccaccctgttttgagccctgaggaggccttgggctctgctgagtccgacctggcctgtctgtgaagagcaagagagcagcaaggtcttgctctcctaggtagccccctcttccctggtaagaaaaagcaaaaggcatttcccaccctgaacaacgagccttttcacccttctactctagagaagtggactggaggagctgggcccgatttggtagttgaggaaagcacagaggcctcctgtggcctgccagtcatcgagtggcccaacaggggctccatgccagccgaccttgacctcactcagaagtccagagtctagcgtagtgcagcagggcagtagcggtaccaatgcagaactcccaagacccgagctgggaccagtacctgggtccccagcccttcctctgctcccccttttccctcggagttcttcttgaatggcaatgttttgcttttgctcgatgcagacagggggccagaacaccacacatttcactgtctgtctggtccatagctgtggtgtaggggcttagaggcatgggcttgctgtgggtttttaattgatcagttttcatgtgggatcccatctttttaacctctgttcaggaagtccttatctagctgcatatcttcatcatattggtatatccttttctgtgtttacagagatgtctcttatatctaaatctgtccaactgagaagtaccttatcaaagtagcaaatgagacagcagtcttatgcttccagaaacacccacaggcatgtcccatgtgagctgctgccatgaactgtcaagtgtgtgttgtcttgtgtatttcagttattgtccctggcttccttactatggtgtaatcatgaaggagtgaaacatcatagaaactgtctagcacttccttgccagtctttagtgatcaggaaccatagttgacagttccaatcagtagcttaagaaaaaaccgtgtttgtctcttctggaatggttagaagtgagggagtttgccccgttctgtttgtagagtctcatagttggactttctagcatatatgtgtccatttccttatgctgtaaaagcaagtcctgcaaccaaactcccatcagcccaatccctgatccctgatcccttccacctgctctgctgatgacccccccagcttcacttctgactcttccccaggaagggaaggggggtcagaagagagggtgagtcctccagaactcttcctccaaggacagaaggctcctgcccccatagtggcctcgaactcctggcactaccaaaggacacttatccacgagagcgcagcatccgaccaggttgtcactgagaagatgtttattttggtcagttgggtttttatgtattatacttagtcaaatgtaatgtggcttctggaatcattgtccagagctgcttccccgtcacctgggcgtcatctggtcctggtaagaggagtgcgtggcccaccaggcccccctgtcacccatgacagttcattcagggccgatggggcagtcgtggttgggaacacagcatttcaagcgtcactttatttcattcgggccccacctgcagctccctcaaagaggcagttgcccagcctctttcccttccagtttattccagagctgccagtggggcctgaggctccttagggttttctctctatttccccctttcttcctcattccctcgtctttcccaaaggcatcacgagtcagtcgcctttcagcaggcagccttggcggtttatcgccctggcaggcaggggccctgcagctctcatgctgcccctgccttggggtcaggttgacaggaggttggagggaaagccttaagctgcaggattctcaccagctgtgtccggcccagttttggggtgtgacctcaatttcaattttgtctgtacttgaacattatgaagatgggggcctctttcagtgaatttgtgaacagcagaattgaccgacagctttccagtacccatggggctaggtcattaaggccacatccacagtctcccccacccttgttccagttgttagttactacctcctctcctgacaatactgtatgtcgtcgagctccccccaggtctacccctcccggccctgcctgctggtgggcttgtcatagccagtgggattgccggtcttgacagctcagtgagctggagatacttggtcacagccaggcgctagcacagctcccttctgttgatgctgtattcccatatcaaaagacacaggggacacccagaaacgccacatcccccaatccatcagtgccaaactagccaacggccccagcttctcagctcgctggatggcggaagctgctactcgtgagcgccagtgcgggtgcagacaatcttctgttgggtggcatcattccaggcccgaagcatgaacagtgcacctgggacagggagcagccccaaattgtcacctgcttctctgcccagcttttcattgctgtgacagtgatggcgaaagagggtaataaccagacacaaactgccaagttgggtggagaaaggagtttctttagctgacagaatctctgaattttaaatcacttagtaagcggctcaagcccaggagggagcagagggatacgagcggagtcccctgcgcgggaccatctggaattggtttagcccaagtggagcctgacagccagaactctgtgtcccccgtctaaccacagctccttttccagagcattccagtcaggctctctgggctgactgggccaggggaggttacaggtaccagttctttaagaagatctttgggcatatacatttttagcctgtgtcattgccccaaatggattcctgtttcaagttcacacctgcagattctaggacctgtgtcctagacttcagggagtcagctgtttctagagttcctaccatggagtgggtctggaggacctgcccggtgggggggcagagccctgctccctccgggtcttcctactcttctctctgctctgacgggatttgttgattctctccattttggtgtctttctcttttagatattgtatcaatctttagaaaaggcatagtctacttgttataaatcgttaggatactgcctcccccagggtctaaaattacatattagaggggaaaagctgaacactgaagtcagttctcaacaatttagaaggaaaacctagaaaacatttggcagaaaattacatttcgatgtttttgaatgaatacgagcaagcttttacaacagtgctgatctaaaaatacttagcacttggcctgagatgcctggtgagcattacaggcaaggggaatctggaggtagccgacctgaggacatggcttctgaacctgtcttttgggagtggtatggaaggtggagcgttcaccagtgacctggaaggcccagcaccaccctccttcccactcttctcatcttgacagagcctgccccagcgctgacgtgtcaggaaaacacccagggaactaggaaggcacttctgcctgaggggcagcctgccttgcccactcctgctctgctcgcctcggatcagctgagccttctgagctggcctctcactgcctccccaaggccccctgcctgccctgtcaggaggcagaaggaagcaggtgtgagggcagtgcaaggagggagcacaacccccagctcccgctccgggctccgacttgtgcacaggcagagcccagaccctggaggaaatcctacctttgaattcaagaacatttggggaatttggaaatctctttgcccccaaacccccattctgtcctacctttaatcaggtcctgctcagcagtgagagcagatgaggtgaaaaggccaagaggtttggctcctgcccactgatagcccctctccccgcagtgtttgtgtgtcaagtggcaaagctgttcttcctggtgaccctgattatatccagtaacacatagactgtgcgcataggcctgctttgtctcctctatcctgggcttttgttttgctttttagttttgcttttagtttttctgtcccttttatttaacgcaccgactagacacacaaagcagttgaatttttatatatatatctgtatattgcacaattataaactcattttgcttgtggctccacacacacaaaaaaagacctgttaaaattatacctgttgcttaattacaatatttctgataaccatagcataggacaagggaaaataaaaaaagaaaaaaaagaaaaaaaaacgacaaatctgtctgctggtcacttcttctgtccaagcagattcgtggtcttttcctcgcttctttcaagggctttcctgtgccaggtgaaggaggctccaggcagcacccaggttttgcactcttgtttctcccgtgcttgtgaaagaggtcccaaggttctgggtgcaggagcgctcccttgacctgctgaagtccggaacgtagtcggcacagcctggtcgccttccacctctgggagctggagtccactggggtggcctgactcccccagtccccttcccgtgacctggtcagggtgagcccatgtggagtcagcctcgcaggcctccctgccagtagggtccgagtgtgtttcatccttcccactctgtcgagcctgggggctggagcggagacgggaggcctggcctgtctcggaacctgtgagctgcaccaggtagaacgccagggaccccagaatcatgtgcgtcagtccaaggggtcccctccaggagtagtgaagactccagaaatgtccctttcttctcccccatcctacgagtaattgcatttgcttttgtaattcttaatgagcaatatctgctagagagtttagctgtaacagttctttttgatcatctttttttaataattagaaacaccaaaaaaatccagaaacttgttcttccaaagcagagagcattataatcaccagggccaaaagcttccctccctgctgtcattgcttcttctgaggcctgaatccaaaagaaaaacagccataggccctttcagtggccgggctacccgtgagcccttcggaggaccagggctggggcagcctctgggcccacatccggggccagctccggcgtgtgttcagtgttagcagtgggtcatgatgctctttcccacccagcctgggataggggcagaggaggcgaggaggccgttgccgctgatgtttggccgtgaacaggtgggtgtctgcgtgcgtccacgtgcgtgttttctgactgacatgaaatcgacgcccgagttagcctcacccggtgacctctagccctgcccggatggagcggggcccacccggttcagtgtttctggggagctggacagtggagtgcaaaaggcttgcagaacttgaagcctgctccttcccttgctaccacggcctcctttccgtttgatttgtcactgcttcaatcaataacagccgctccagagtcagtagtcaatgaatatatgaccaaatatcaccaggactgttactcaatgtgtgccgagcccttgcccatgctgggctcccgtgtatctggacactgtaacgtgtgctgtgtttgctccccttccccttccttctttgccctttacttgtctttctggggtttttctgtttgggtttggtttggtttttatttctccttttgtgttccaaacatgaggttctctctactggtcctcttaactgtggtgttgaggcttatatttgtgtaatttttggtgggtgaaaggaattttgctaagtaaatctcttctgtgtttgaactgaagtctgtattgtaactatgtttaaagtaattgttccagagacaaatatttctagacactttttctttacaaacaaaagcattcggagggagggggatggtgactgagatgagaggggagagctgaacagatgacccctgcccagatcagccagaagccacccaaagcagtggagcccaggagtcccactccaagccagcaagccgaatagctgatgtgttgccactttccaagtcactgcaaaaccaggttttgttccgcccagtggattcttgttttgcttcccctccccccgagattattaccaccatcccgtgcttttaaggaaaggcaagattgatgtttccttgaggggagccaggaggggatgtgtgtgtgcagagctgaagagctggggagaatggggctgggcccacccaagcaggaggctgggacgctctgctgtgggcacaggtcaggctaatgttggcagatgcagctcttcctggacaggccaggtggtgggcattctctctccaaggtgtgccccgtgggcattactgtttaagacacttccgtcacatcccaccccatcctccagggctcaacactgtgacatctctattccccaccctccccttcccagggcaataaaatgaccatggagggggcttgcactctcttggctgtcacccgatcgccagcaaaacttagatgtgagaaaaccccttcccattccatggcgaaaacatctccttagaaaagccattaccctcattaggcatggttttgggctcccaaaacacctgacagcccctccctcctctgagaggcggagagtgctgactgtagtgaccattgcatgccgggtgcagcatctggaagagctaggcagggtgtctgccccctcctgagttgaagtcatgctcccctgtgccagcccagaggccgagagctatggacagcattgccagtaacacaggccaccctgtgcagaagggagctggctccagcctggaaacctgtctgaggttgggagaggtgcacttggggcacagggagaggccgggacacacttagctggagatgtctctaaaagccctgtatcgtattcaccttcagtttttgtgttttgggacaattactttagaaaataagtaggtcgttttaaaaacaaaaattattgattgcttttttgtagtgttcagaaaaaaggttctttgtgtatagccaaatgactgaaagcactgatatatttaaaaacaaaaggcaatttattaaggaaatttgtaccatttcagtaaacctgtctgaatgtacctgtatacgtttcaaaaacaccccccccccactgaatccctgtaacctatttattatataaagagtttgccttataaatttacataaaaatgtccgtttgtgtcttttgttgtaaaaatcaagtgattttttcataaggttcttttactattggaaaagatgggcagcacgcagttttattttatttttgtaagttttttaatacatgtgaaagcaaagaatactcagcatgcctttctaagtgacgcgtttgcaccttttgttgggaagtactgtatcctgtgctgttagcattctcgataaatctctctgtgaaagtgactcaaggtctgggctttcattataagacagaagtccccctccagctcacatgacagcatggtgctgcgtttcctcattggatctggctgtccctggacacaggtagctgccttcaggcctgccacgagcggccaagggaagcctcctccatatgctggcctcgctggcccctcagcttcttccaagccagtgctctccaggcacactgctccagcgtgtgacgggaagggcctggcatgagtcagcctgcagcacaacctccctgctccagacccgtatggtaggggcaccccctaggtctggatgtgctgtggtgcttttggacacccccacccccgcaggctgtggctcctcctgtgtctcattctggccaggaccctcacgtgccctctgttgactgctaacgtggttctctgaccaggcaagggcaggctgaggggtttgcccaaagggggcccccttgttactggcttccttggctctcaggagcagcctcaccaggttggtaaggggctggaggagacaactgctcaaaggagtccagcttcacatgcacatgctagaaggtaccctcggaaggcctggccttcaaaggtagatcccagggttgaaaagtcaacttgtatgcattgagcatctcgtatgccagccctgttccgtgagctgatgggcctttgtgtgtaagtaggaccaagtgcccccgtggaggttagcatgggtgtgcagtcatttcagatacttgagttggtacatctcagtaaagtctgtcccgtgagaagccatgggtttcatggtatggttggcatcttccttgggagtggccacagtggtggtggcttcaggaaagagactccaacaggggccagctgtgggccttgggcacttctcgtttctaggaaaagtcctaagtctgtagggctaggggtggggaaccccttcgctgtcaggatcaagagggcaaggggaactgtcgctggaggagacatccagctggagaaacaaaagagtaagtctgcgttgctgcttgtggggtcttccccatctcagggcggggaccgggggtggcggtccagacaagtaatcaaggacgatgcccaggaggggacaggtacggggtggcaggagctctgccggcgggctcaggaagccttcaccacagctgcctgagctcacccttgccaaatgagggctggggcagcagcaacgcatacactcacggctgtggcgggcagcgttctcggcatatttcaggacacctaaggagactgaatggctcaaggctgctgccgtgtgcagggggctagacgtggggcgggcaggcagggctcctggtaacagccctgcaggccgcagtggagagcagggttccggcagggccgcccaggagctttcggaaggcccggccccggcccctttccgagcagcccgggcctccgccctgccctctgtccccaacgccgggagccgccgttcgtcctccagagccccgcccgggcgagc

SEQ ID NO: 298145 - DNA, 11714 bp, Homo sapiens
cgcgcgcgtcggcctctcggagagagggctgtggtaaaagccgtccggaaaatggccgccgccgccgccgccgcgccgagcggaggaggaggaggaggcgaggaggagagactgctccataaaaatacagactcaccagttcctgctttgatgtgacatgtgactccccagaatacaccttgcttctgtagaccagctccaacaggattccatggtagctgggatgttagggctcagggaagaaaagtcagaagaccaggacctccagggcctcaaggacaaacccctcaagtttaaaaaggtgaagaaagataagaaagaagagaaagagggcaagcatgagcccgtgcagccatcagcccaccactctgctgagcccgcagaggcaggcaaagcagagacatcagaagggtcaggctccgccccggctgtgccggaagcttctgcctcccccaaacagcggcgctccatcatccgtgaccggggacccatgtatgatgaccccaccctgcctgaaggctggacacggaagcttaagcaaaggaaatctggccgctctgctgggaagtatgatgtgtatttgatcaatccccagggaaaagcctttcgctctaaagtggagttgattgcgtacttcgaaaaggtaggcgacacatccctggaccctaatgattttgacttcacggtaactgggagagggagcccctcccggcgagagcagaaaccacctaagaagcccaaatctcccaaagctccaggaactggcagaggccggggacgccccaaagggagcggcaccacgagacccaaggcggccacgtcagagggtgtgcaggtgaaaagggtcctggagaaaagtcctgggaagctccttgtcaagatgccttttcaaacttcgccagggggcaaggctgaggggggtggggccaccacatccacccaggtcatggtgatcaaacgccccggcaggaagcgaaaagctgaggccgaccctcaggccattcccaagaaacggggccgaaagccggggagtgtggtggcagccgctgccgccgaggccaaaaagaaagccgtgaaggagtcttctatccgatctgtgcaggagaccgtactccccatcaagaagcgcaagacccgggagacggtcagcatcgaggtcaaggaagtggtgaagcccctgctggtgtccaccctcggtgagaagagcgggaaaggactgaagacctgtaagagccctgggcggaaaagcaaggagccagctaagactcagcccgcggttgccaccgccgccacggccgcagaaaagtacaaacaccgaggggagggagagcgcaaagacattgtttcatcctccatgccaaggccaaacagagaggagcctgtggacagccggacgcccgtgaccgagagagttagctgactttacacggagcggattgcaaagcaaaccaacaagaataaaggcagctgttgtctcttctccttatgggtagggctctgacaaagcttcccgattaactgaaataaaaaatatttttttttctttcagtaaacttagagtttcgtggcttcagggtgggagtagttggagcattggggatgtttttcttaccgacaagcacagtcaggttgaagacctaaccagggccagaagtagctttgcacttttctaaactaggctccttcaacaaggcttgctgcagatactactgaccagacaagctgttgaccaggcacctcccctcccgcccaaacctttcccccatgtggtcgttagagacagagcgacagagcagttgagaggacactcccgttttcggtgccatcagtgccccgtctacagctcccccagctccccccacctcccccactcccaaccacgttgggacagggaggtgtgaggcaggagagacagttggattctttagagaagatggatatgaccagtggctatggcctgtgcgatcccacccgtggtggctcaagtctggccccacaccagccccaatccaaaactggcaaggacgcttcacaggacaggaaagtggcacctgtctgctccagctctggcatggctaggaggggggagtcccttgaactactgggtgtagactggcctgaaccacaggagaggatggcccagggtgaggtggcatggtccattctcaagggacgtcctccaacgggtggcgctagaggccatggaggcagtaggacaaggtgcaggcaggctggcctggggtcaggccgggcagagcacagcggggtgagagggattcctaatcactcagagcagtctgtgacttagtggacaggggagggggcaaagggggaggagaagaaaatgttcttccagttactttccaattctcctttagggacagcttagaattatttgcactattgagtcttcatgttcccacttcaaaacaaacagatgctctgagagcaaactggcttgaattggtgacatttagtccctcaagccaccagatgtgacagtgttgagaactacctggatttgtatatatacctgcgcttgttttaaagtgggctcagcacatagggttcccacgaagctccgaaactctaagtgtttgctgcaattttataaggacttcctgattggtttctcttctccccttccatttctgccttttgttcatttcatcctttcacttctttcccttcctccgtcctcctccttcctagttcatcccttctcttccaggcagccgcggtgcccaaccacacttgtcggctccagtccccagaactctgcctgccctttgtcctcctgctgccagtaccagccccaccctgttttgagccctgaggaggccttgggctctgctgagtccgacctggcctgtctgtgaagagcaagagagcagcaaggtcttgctctcctaggtagccccctcttccctggtaagaaaaagcaaaaggcatttcccaccctgaacaacgagccttttcacccttctactctagagaagtggactggaggagctgggcccgatttggtagttgaggaaagcacagaggcctcctgtggcctgccagtcatcgagtggcccaacaggggctccatgccagccgaccttgacctcactcagaagtccagagtctagcgtagtgcagcagggcagtagcggtaccaatgcagaactcccaagacccgagctgggaccagtacctgggtccccagcccttcctctgctcccccttttccctcggagttcttcttgaatggcaatgttttgcttttgctcgatgcagacagggggccagaacaccacacatttcactgtctgtctggtccatagctgtggtgtaggggcttagaggcatgggcttgctgtgggtttttaattgatcagttttcatgtgggatcccatctttttaacctctgttcaggaagtccttatctagctgcatatcttcatcatattggtatatccttttctgtgtttacagagatgtctcttatatctaaatctgtccaactgagaagtaccttatcaaagtagcaaatgagacagcagtcttatgcttccagaaacacccacaggcatgtcccatgtgagctgctgccatgaactgtcaagtgtgtgttgtcttgtgtatttcagttattgtccctggcttccttactatggtgtaatcatgaaggagtgaaacatcatagaaactgtctagcacttccttgccagtctttagtgatcaggaaccatagttgacagttccaatcagtagcttaagaaaaaaccgtgtttgtctcttctggaatggttagaagtgagggagtttgccccgttctgtttgtagagtctcatagttggactttctagcatatatgtgtccatttccttatgctgtaaaagcaagtcctgcaaccaaactcccatcagcccaatccctgatccctgatcccttccacctgctctgctgatgacccccccagcttcacttctgactcttccccaggaagggaaggggggtcagaagagagggtgagtcctccagaactcttcctccaaggacagaaggctcctgcccccatagtggcctcgaactcctggcactaccaaaggacacttatccacgagagcgcagcatccgaccaggttgtcactgagaagatgtttattttggtcagttgggtttttatgtattatacttagtcaaatgtaatgtggcttctggaatcattgtccagagctgcttccccgtcacctgggcgtcatctggtcctggtaagaggagtgcgtggcccaccaggcccccctgtcacccatgacagttcattcagggccgatggggcagtcgtggttgggaacacagcatttcaagcgtcactttatttcattcgggccccacctgcagctccctcaaagaggcagttgcccagcctctttcccttccagtttattccagagctgccagtggggcctgaggctccttagggttttctctctatttccccctttcttcctcattccctcgtctttcccaaaggcatcacgagtcagtcgcctttcagcaggcagccttggcggtttatcgccctggcaggcaggggccctgcagctctcatgctgcccctgccttggggtcaggttgacaggaggttggagggaaagccttaagctgcaggattctcaccagctgtgtccggcccagttttggggtgtgacctcaatttcaattttgtctgtacttgaacattatgaagatgggggcctctttcagtgaatttgtgaacagcagaattgaccgacagctttccagtacccatggggctaggtcattaaggccacatccacagtctcccccacccttgttccagttgttagttactacctcctctcctgacaatactgtatgtcgtcgagctccccccaggtctacccctcccggccctgcctgctggtgggcttgtcatagccagtgggattgccggtcttgacagctcagtgagctggagatacttggtcacagccaggcgctagcacagctcccttctgttgatgctgtattcccatatcaaaagacacaggggacacccagaaacgccacatcccccaatccatcagtgccaaactagccaacggccccagcttctcagctcgctggatggcggaagctgctactcgtgagcgccagtgcgggtgcagacaatcttctgttgggtggcatcattccaggcccgaagcatgaacagtgcacctgggacagggagcagccccaaattgtcacctgcttctctgcccagcttttcattgctgtgacagtgatggcgaaagagggtaataaccagacacaaactgccaagttgggtggagaaaggagtttctttagctgacagaatctctgaattttaaatcacttagtaagcggctcaagcccaggagggagcagagggatacgagcggagtcccctgcgcgggaccatctggaattggtttagcccaagtggagcctgacagccagaactctgtgtcccccgtctaaccacagctccttttccagagcattccagtcaggctctctgggctgactgggccaggggaggttacaggtaccagttctttaagaagatctttgggcatatacatttttagcctgtgtcattgccccaaatggattcctgtttcaagttcacacctgcagattctaggacctgtgtcctagacttcagggagtcagctgtttctagagttcctaccatggagtgggtctggaggacctgcccggtgggggggcagagccctgctccctccgggtcttcctactcttctctctgctctgacgggatttgttgattctctccattttggtgtctttctcttttagatattgtatcaatctttagaaaaggcatagtctacttgttataaatcgttaggatactgcctcccccagggtctaaaattacatattagaggggaaaagctgaacactgaagtcagttctcaacaatttagaaggaaaacctagaaaacatttggcagaaaattacatttcgatgtttttgaatgaatacgagcaagcttttacaacagtgctgatctaaaaatacttagcacttggcctgagatgcctggtgagcattacaggcaaggggaatctggaggtagccgacctgaggacatggcttctgaacctgtcttttgggagtggtatggaaggtggagcgttcaccagtgacctggaaggcccagcaccaccctccttcccactcttctcatcttgacagagcctgccccagcgctgacgtgtcaggaaaacacccagggaactaggaaggcacttctgcctgaggggcagcctgccttgcccactcctgctctgctcgcctcggatcagctgagccttctgagctggcctctcactgcctccccaaggccccctgcctgccctgtcaggaggcagaaggaagcaggtgtgagggcagtgcaaggagggagcacaacccccagctcccgctccgggctccgacttgtgcacaggcagagcccagaccctggaggaaatcctacctttgaattcaagaacatttggggaatttggaaatctctttgcccccaaacccccattctgtcctacctttaatcaggtcctgctcagcagtgagagcagatgaggtgaaaaggccaagaggtttggctcctgcccactgatagcccctctccccgcagtgtttgtgtgtcaagtggcaaagctgttcttcctggtgaccctgattatatccagtaacacatagactgtgcgcataggcctgctttgtctcctctatcctgggcttttgttttgctttttagttttgcttttagtttttctgtcccttttatttaacgcaccgactagacacacaaagcagttgaatttttatatatatatctgtatattgcacaattataaactcattttgcttgtggctccacacacacaaaaaaagacctgttaaaattatacctgttgcttaattacaatatttctgataaccatagcataggacaagggaaaataaaaaaagaaaaaaaagaaaaaaaaacgacaaatctgtctgctggtcacttcttctgtccaagcagattcgtggtcttttcctcgcttctttcaagggctttcctgtgccaggtgaaggaggctccaggcagcacccaggttttgcactcttgtttctcccgtgcttgtgaaagaggtcccaaggttctgggtgcaggagcgctcccttgacctgctgaagtccggaacgtagtcggcacagcctggtcgccttccacctctgggagctggagtccactggggtggcctgactcccccagtccccttcccgtgacctggtcagggtgagcccatgtggagtcagcctcgcaggcctccctgccagtagggtccgagtgtgtttcatccttcccactctgtcgagcctgggggctggagcggagacgggaggcctggcctgtctcggaacctgtgagctgcaccaggtagaacgccagggaccccagaatcatgtgcgtcagtccaaggggtcccctccaggagtagtgaagactccagaaatgtccctttcttctcccccatcctacgagtaattgcatttgcttttgtaattcttaatgagcaatatctgctagagagtttagctgtaacagttctttttgatcatctttttttaataattagaaacaccaaaaaaatccagaaacttgttcttccaaagcagagagcattataatcaccagggccaaaagcttccctccctgctgtcattgcttcttctgaggcctgaatccaaaagaaaaacagccataggccctttcagtggccgggctacccgtgagcccttcggaggaccagggctggggcagcctctgggcccacatccggggccagctccggcgtgtgttcagtgttagcagtgggtcatgatgctctttcccacccagcctgggataggggcagaggaggcgaggaggccgttgccgctgatgtttggccgtgaacaggtgggtgtctgcgtgcgtccacgtgcgtgttttctgactgacatgaaatcgacgcccgagttagcctcacccggtgacctctagccctgcccggatggagcggggcccacccggttcagtgtttctggggagctggacagtggagtgcaaaaggcttgcagaacttgaagcctgctccttcccttgctaccacggcctcctttccgtttgatttgtcactgcttcaatcaataacagccgctccagagtcagtagtcaatgaatatatgaccaaatatcaccaggactgttactcaatgtgtgccgagcccttgcccatgctgggctcccgtgtatctggacactgtaacgtgtgctgtgtttgctccccttccccttccttctttgccctttacttgtctttctggggtttttctgtttgggtttggtttggtttttatttctccttttgtgttccaaacatgaggttctctctactggtcctcttaactgtggtgttgaggcttatatttgtgtaatttttggtgggtgaaaggaattttgctaagtaaatctcttctgtgtttgaactgaagtctgtattgtaactatgtttaaagtaattgttccagagacaaatatttctagacactttttctttacaaacaaaagcattcggagggagggggatggtgactgagatgagaggggagagctgaacagatgacccctgcccagatcagccagaagccacccaaagcagtggagcccaggagtcccactccaagccagcaagccgaatagctgatgtgttgccactttccaagtcactgcaaaaccaggttttgttccgcccagtggattcttgttttgcttcccctccccccgagattattaccaccatcccgtgcttttaaggaaaggcaagattgatgtttccttgaggggagccaggaggggatgtgtgtgtgcagagctgaagagctggggagaatggggctgggcccacccaagcaggaggctgggacgctctgctgtgggcacaggtcaggctaatgttggcagatgcagctcttcctggacaggccaggtggtgggcattctctctccaaggtgtgccccgtgggcattactgtttaagacacttccgtcacatcccaccccatcctccagggctcaacactgtgacatctctattccccaccctccccttcccagggcaataaaatgaccatggagggggcttgcactctcttggctgtcacccgatcgccagcaaaacttagatgtgagaaaaccccttcccattccatggcgaaaacatctccttagaaaagccattaccctcattaggcatggttttgggctcccaaaacacctgacagcccctccctcctctgagaggcggagagtgctgactgtagtgaccattgcatgccgggtgcagcatctggaagagctaggcagggtgtctgccccctcctgagttgaagtcatgctcccctgtgccagcccagaggccgagagctatggacagcattgccagtaacacaggccaccctgtgcagaagggagctggctccagcctggaaacctgtctgaggttgggagaggtgcacttggggcacagggagaggccgggacacacttagctggagatgtctctaaaagccctgtatcgtattcaccttcagtttttgtgttttgggacaattactttagaaaataagtaggtcgttttaaaaacaaaaattattgattgcttttttgtagtgttcagaaaaaaggttctttgtgtatagccaaatgactgaaagcactgatatatttaaaaacaaaaggcaatttattaaggaaatttgtaccatttcagtaaacctgtctgaatgtacctgtatacgtttcaaaaacaccccccccccactgaatccctgtaacctatttattatataaagagtttgccttataaatttacataaaaatgtccgtttgtgtcttttgttgtaaaaatcaagtgattttttcataaggttcttttactattggaaaagatgggcagcacgcagttttattttatttttgtaagttttttaatacatgtgaaagcaaagaatactcagcatgcctttctaagtgacgcgtttgcaccttttgttgggaagtactgtatcctgtgctgttagcattctcgataaatctctctgtgaaagtgactcaaggtctgggctttcattataagacagaagtccccctccagctcacatgacagcatggtgctgcgtttcctcattggatctggctgtccctggacacaggtagctgccttcaggcctgccacgagcggccaagggaagcctcctccatatgctggcctcgctggcccctcagcttcttccaagccagtgctctccaggcacactgctccagcgtgtgacgggaagggcctggcatgagtcagcctgcagcacaacctccctgctccagacccgtatggtaggggcaccccctaggtctggatgtgctgtggtgcttttggacacccccacccccgcaggctgtggctcctcctgtgtctcattctggccaggaccctcacgtgccctctgttgactgctaacgtggttctctgaccaggcaagggcaggctgaggggtttgcccaaagggggcccccttgttactggcttccttggctctcaggagcagcctcaccaggttggtaaggggctggaggagacaactgctcaaaggagtccagcttcacatgcacatgctagaaggtaccctcggaaggcctggccttcaaaggtagatcccagggttgaaaagtcaacttgtatgcattgagcatctcgtatgccagccctgttccgtgagctgatgggcctttgtgtgtaagtaggaccaagtgcccccgtggaggttagcatgggtgtgcagtcatttcagatacttgagttggtacatctcagtaaagtctgtcccgtgagaagccatgggtttcatggtatggttggcatcttccttgggagtggccacagtggtggtggcttcaggaaagagactccaacaggggccagctgtgggccttgggcacttctcgtttctaggaaaagtcctaagtctgtagggctaggggtggggaaccccttcgctgtcaggatcaagagggcaaggggaactgtcgctggaggagacatccagctggagaaacaaaagagtaagtctgcgttgctgcttgtggggtcttccccatctcagggcggggaccgggggtggcggtccagacaagtaatcaaggacgatgcccaggaggggacaggtacggggtggcaggagctctgccggcgggctcaggaagccttcaccacagctgcctgagctcacccttgccaaatgagggctggggcagcagcaacgcatacactcacggctgtggcgggcagcgttctcggcatatttcaggacacctaaggagactgaatggctcaaggctgctgccgtgtgcagggggctagacgtggggcgggcaggcagggctcctggtaacagccctgcaggccgcagtggagagcagggttccggcagggccgcccaggagctttcggaaggcccggccccggcccctttccgagcagcccgggcctccgccctgccctctgtccccaacgccgggagccgccgttcgtcctccagagccccgcccgggcgagc

SEQ ID NO: 298146 - DNA, 11529 bp, Homo sapiens
cgcgcgcgtcggcctctcggagagagggctgtggtaaaagccgtccggaaaatggccgccgccgccgccgccgcgccgagcggaggaggaggaggaggcgaggaggagagactgctccataaaaatacagactcaccagttcctgctttgatgtgacatgtgactccccagaatacaccttgcttctgtagaccagctccaacaggattccatggtagctgggatgttagggctcagggaagaaaagtcagaagaccaggacctccagggcctcaaggacaaacccctcaagtttaaaaaggtgaagaaagataagaaagaagagaaagagggcaagcatgagcccgtgcagccatcagcccaccactctgctgagcccgcagaggcaggcaaagcagagacatcagaagggtcaggctccgccccggctgtgccggaagcttctgcctcccccaaacagcggcgctccatcatccgtgaccggggacccatgtatgatgaccccaccctgcctgaaggctggacacggaagcttaagcaaaggaaatctggccgctctgctgggaagtatgatgtgtatttgatcaatccccagggaaaagcctttcgctctaaagtggagttgattgcgtacttcgaaaaggtaggcgacacatccctggaccctaatgattttgacttcacggtaactgggagagggagcccctcccggcgagagcagaaaccacctaagaagcccaaatctcccaaagctccaggaactggcagaggccggggacgccccaaagggagcggcaccacgagacccaaggcggccacgtcagagggtgtgcaggtgaaaagggtcctggagaaaagtcctgggaagctccttgtcaagatgccttttcaaacttcgccagggggcaaggctgaggggggtggggccaccacatccacctccacctgagcccgagagctccgaggaccccaccagcccccctgagccccaggacttgagcagcagcgtctgcaaagaggagaagatgcccagaggaggctcactggagagcgacggctgccccaaggagccagctaagactcagcccgcggttgccaccgccgccacggccgcagaaaagtacaaacaccgaggggagggagagcgcaaagacattgtttcatcctccatgccaaggccaaacagagaggagcctgtggacagccggacgcccgtgaccgagagagttagctgactttacacggagcggattgcaaagcaaaccaacaagaataaaggcagctgttgtctcttctccttatgggtagggctctgacaaagcttcccgattaactgaaataaaaaatatttttttttctttcagtaaacttagagtttcgtggcttcagggtgggagtagttggagcattggggatgtttttcttaccgacaagcacagtcaggttgaagacctaaccagggccagaagtagctttgcacttttctaaactaggctccttcaacaaggcttgctgcagatactactgaccagacaagctgttgaccaggcacctcccctcccgcccaaacctttcccccatgtggtcgttagagacagagcgacagagcagttgagaggacactcccgttttcggtgccatcagtgccccgtctacagctcccccagctccccccacctcccccactcccaaccacgttgggacagggaggtgtgaggcaggagagacagttggattctttagagaagatggatatgaccagtggctatggcctgtgcgatcccacccgtggtggctcaagtctggccccacaccagccccaatccaaaactggcaaggacgcttcacaggacaggaaagtggcacctgtctgctccagctctggcatggctaggaggggggagtcccttgaactactgggtgtagactggcctgaaccacaggagaggatggcccagggtgaggtggcatggtccattctcaagggacgtcctccaacgggtggcgctagaggccatggaggcagtaggacaaggtgcaggcaggctggcctggggtcaggccgggcagagcacagcggggtgagagggattcctaatcactcagagcagtctgtgacttagtggacaggggagggggcaaagggggaggagaagaaaatgttcttccagttactttccaattctcctttagggacagcttagaattatttgcactattgagtcttcatgttcccacttcaaaacaaacagatgctctgagagcaaactggcttgaattggtgacatttagtccctcaagccaccagatgtgacagtgttgagaactacctggatttgtatatatacctgcgcttgttttaaagtgggctcagcacatagggttcccacgaagctccgaaactctaagtgtttgctgcaattttataaggacttcctgattggtttctcttctccccttccatttctgccttttgttcatttcatcctttcacttctttcccttcctccgtcctcctccttcctagttcatcccttctcttccaggcagccgcggtgcccaaccacacttgtcggctccagtccccagaactctgcctgccctttgtcctcctgctgccagtaccagccccaccctgttttgagccctgaggaggccttgggctctgctgagtccgacctggcctgtctgtgaagagcaagagagcagcaaggtcttgctctcctaggtagccccctcttccctggtaagaaaaagcaaaaggcatttcccaccctgaacaacgagccttttcacccttctactctagagaagtggactggaggagctgggcccgatttggtagttgaggaaagcacagaggcctcctgtggcctgccagtcatcgagtggcccaacaggggctccatgccagccgaccttgacctcactcagaagtccagagtctagcgtagtgcagcagggcagtagcggtaccaatgcagaactcccaagacccgagctgggaccagtacctgggtccccagcccttcctctgctcccccttttccctcggagttcttcttgaatggcaatgttttgcttttgctcgatgcagacagggggccagaacaccacacatttcactgtctgtctggtccatagctgtggtgtaggggcttagaggcatgggcttgctgtgggtttttaattgatcagttttcatgtgggatcccatctttttaacctctgttcaggaagtccttatctagctgcatatcttcatcatattggtatatccttttctgtgtttacagagatgtctcttatatctaaatctgtccaactgagaagtaccttatcaaagtagcaaatgagacagcagtcttatgcttccagaaacacccacaggcatgtcccatgtgagctgctgccatgaactgtcaagtgtgtgttgtcttgtgtatttcagttattgtccctggcttccttactatggtgtaatcatgaaggagtgaaacatcatagaaactgtctagcacttccttgccagtctttagtgatcaggaaccatagttgacagttccaatcagtagcttaagaaaaaaccgtgtttgtctcttctggaatggttagaagtgagggagtttgccccgttctgtttgtagagtctcatagttggactttctagcatatatgtgtccatttccttatgctgtaaaagcaagtcctgcaaccaaactcccatcagcccaatccctgatccctgatcccttccacctgctctgctgatgacccccccagcttcacttctgactcttccccaggaagggaaggggggtcagaagagagggtgagtcctccagaactcttcctccaaggacagaaggctcctgcccccatagtggcctcgaactcctggcactaccaaaggacacttatccacgagagcgcagcatccgaccaggttgtcactgagaagatgtttattttggtcagttgggtttttatgtattatacttagtcaaatgtaatgtggcttctggaatcattgtccagagctgcttccccgtcacctgggcgtcatctggtcctggtaagaggagtgcgtggcccaccaggcccccctgtcacccatgacagttcattcagggccgatggggcagtcgtggttgggaacacagcatttcaagcgtcactttatttcattcgggccccacctgcagctccctcaaagaggcagttgcccagcctctttcccttccagtttattccagagctgccagtggggcctgaggctccttagggttttctctctatttccccctttcttcctcattccctcgtctttcccaaaggcatcacgagtcagtcgcctttcagcaggcagccttggcggtttatcgccctggcaggcaggggccctgcagctctcatgctgcccctgccttggggtcaggttgacaggaggttggagggaaagccttaagctgcaggattctcaccagctgtgtccggcccagttttggggtgtgacctcaatttcaattttgtctgtacttgaacattatgaagatgggggcctctttcagtgaatttgtgaacagcagaattgaccgacagctttccagtacccatggggctaggtcattaaggccacatccacagtctcccccacccttgttccagttgttagttactacctcctctcctgacaatactgtatgtcgtcgagctccccccaggtctacccctcccggccctgcctgctggtgggcttgtcatagccagtgggattgccggtcttgacagctcagtgagctggagatacttggtcacagccaggcgctagcacagctcccttctgttgatgctgtattcccatatcaaaagacacaggggacacccagaaacgccacatcccccaatccatcagtgccaaactagccaacggccccagcttctcagctcgctggatggcggaagctgctactcgtgagcgccagtgcgggtgcagacaatcttctgttgggtggcatcattccaggcccgaagcatgaacagtgcacctgggacagggagcagccccaaattgtcacctgcttctctgcccagcttttcattgctgtgacagtgatggcgaaagagggtaataaccagacacaaactgccaagttgggtggagaaaggagtttctttagctgacagaatctctgaattttaaatcacttagtaagcggctcaagcccaggagggagcagagggatacgagcggagtcccctgcgcgggaccatctggaattggtttagcccaagtggagcctgacagccagaactctgtgtcccccgtctaaccacagctccttttccagagcattccagtcaggctctctgggctgactgggccaggggaggttacaggtaccagttctttaagaagatctttgggcatatacatttttagcctgtgtcattgccccaaatggattcctgtttcaagttcacacctgcagattctaggacctgtgtcctagacttcagggagtcagctgtttctagagttcctaccatggagtgggtctggaggacctgcccggtgggggggcagagccctgctccctccgggtcttcctactcttctctctgctctgacgggatttgttgattctctccattttggtgtctttctcttttagatattgtatcaatctttagaaaaggcatagtctacttgttataaatcgttaggatactgcctcccccagggtctaaaattacatattagaggggaaaagctgaacactgaagtcagttctcaacaatttagaaggaaaacctagaaaacatttggcagaaaattacatttcgatgtttttgaatgaatacgagcaagcttttacaacagtgctgatctaaaaatacttagcacttggcctgagatgcctggtgagcattacaggcaaggggaatctggaggtagccgacctgaggacatggcttctgaacctgtcttttgggagtggtatggaaggtggagcgttcaccagtgacctggaaggcccagcaccaccctccttcccactcttctcatcttgacagagcctgccccagcgctgacgtgtcaggaaaacacccagggaactaggaaggcacttctgcctgaggggcagcctgccttgcccactcctgctctgctcgcctcggatcagctgagccttctgagctggcctctcactgcctccccaaggccccctgcctgccctgtcaggaggcagaaggaagcaggtgtgagggcagtgcaaggagggagcacaacccccagctcccgctccgggctccgacttgtgcacaggcagagcccagaccctggaggaaatcctacctttgaattcaagaacatttggggaatttggaaatctctttgcccccaaacccccattctgtcctacctttaatcaggtcctgctcagcagtgagagcagatgaggtgaaaaggccaagaggtttggctcctgcccactgatagcccctctccccgcagtgtttgtgtgtcaagtggcaaagctgttcttcctggtgaccctgattatatccagtaacacatagactgtgcgcataggcctgctttgtctcctctatcctgggcttttgttttgctttttagttttgcttttagtttttctgtcccttttatttaacgcaccgactagacacacaaagcagttgaatttttatatatatatctgtatattgcacaattataaactcattttgcttgtggctccacacacacaaaaaaagacctgttaaaattatacctgttgcttaattacaatatttctgataaccatagcataggacaagggaaaataaaaaaagaaaaaaaagaaaaaaaaacgacaaatctgtctgctggtcacttcttctgtccaagcagattcgtggtcttttcctcgcttctttcaagggctttcctgtgccaggtgaaggaggctccaggcagcacccaggttttgcactcttgtttctcccgtgcttgtgaaagaggtcccaaggttctgggtgcaggagcgctcccttgacctgctgaagtccggaacgtagtcggcacagcctggtcgccttccacctctgggagctggagtccactggggtggcctgactcccccagtccccttcccgtgacctggtcagggtgagcccatgtggagtcagcctcgcaggcctccctgccagtagggtccgagtgtgtttcatccttcccactctgtcgagcctgggggctggagcggagacgggaggcctggcctgtctcggaacctgtgagctgcaccaggtagaacgccagggaccccagaatcatgtgcgtcagtccaaggggtcccctccaggagtagtgaagactccagaaatgtccctttcttctcccccatcctacgagtaattgcatttgcttttgtaattcttaatgagcaatatctgctagagagtttagctgtaacagttctttttgatcatctttttttaataattagaaacaccaaaaaaatccagaaacttgttcttccaaagcagagagcattataatcaccagggccaaaagcttccctccctgctgtcattgcttcttctgaggcctgaatccaaaagaaaaacagccataggccctttcagtggccgggctacccgtgagcccttcggaggaccagggctggggcagcctctgggcccacatccggggccagctccggcgtgtgttcagtgttagcagtgggtcatgatgctctttcccacccagcctgggataggggcagaggaggcgaggaggccgttgccgctgatgtttggccgtgaacaggtgggtgtctgcgtgcgtccacgtgcgtgttttctgactgacatgaaatcgacgcccgagttagcctcacccggtgacctctagccctgcccggatggagcggggcccacccggttcagtgtttctggggagctggacagtggagtgcaaaaggcttgcagaacttgaagcctgctccttcccttgctaccacggcctcctttccgtttgatttgtcactgcttcaatcaataacagccgctccagagtcagtagtcaatgaatatatgaccaaatatcaccaggactgttactcaatgtgtgccgagcccttgcccatgctgggctcccgtgtatctggacactgtaacgtgtgctgtgtttgctccccttccccttccttctttgccctttacttgtctttctggggtttttctgtttgggtttggtttggtttttatttctccttttgtgttccaaacatgaggttctctctactggtcctcttaactgtggtgttgaggcttatatttgtgtaatttttggtgggtgaaaggaattttgctaagtaaatctcttctgtgtttgaactgaagtctgtattgtaactatgtttaaagtaattgttccagagacaaatatttctagacactttttctttacaaacaaaagcattcggagggagggggatggtgactgagatgagaggggagagctgaacagatgacccctgcccagatcagccagaagccacccaaagcagtggagcccaggagtcccactccaagccagcaagccgaatagctgatgtgttgccactttccaagtcactgcaaaaccaggttttgttccgcccagtggattcttgttttgcttcccctccccccgagattattaccaccatcccgtgcttttaaggaaaggcaagattgatgtttccttgaggggagccaggaggggatgtgtgtgtgcagagctgaagagctggggagaatggggctgggcccacccaagcaggaggctgggacgctctgctgtgggcacaggtcaggctaatgttggcagatgcagctcttcctggacaggccaggtggtgggcattctctctccaaggtgtgccccgtgggcattactgtttaagacacttccgtcacatcccaccccatcctccagggctcaacactgtgacatctctattccccaccctccccttcccagggcaataaaatgaccatggagggggcttgcactctcttggctgtcacccgatcgccagcaaaacttagatgtgagaaaaccccttcccattccatggcgaaaacatctccttagaaaagccattaccctcattaggcatggttttgggctcccaaaacacctgacagcccctccctcctctgagaggcggagagtgctgactgtagtgaccattgcatgccgggtgcagcatctggaagagctaggcagggtgtctgccccctcctgagttgaagtcatgctcccctgtgccagcccagaggccgagagctatggacagcattgccagtaacacaggccaccctgtgcagaagggagctggctccagcctggaaacctgtctgaggttgggagaggtgcacttggggcacagggagaggccgggacacacttagctggagatgtctctaaaagccctgtatcgtattcaccttcagtttttgtgttttgggacaattactttagaaaataagtaggtcgttttaaaaacaaaaattattgattgcttttttgtagtgttcagaaaaaaggttctttgtgtatagccaaatgactgaaagcactgatatatttaaaaacaaaaggcaatttattaaggaaatttgtaccatttcagtaaacctgtctgaatgtacctgtatacgtttcaaaaacaccccccccccactgaatccctgtaacctatttattatataaagagtttgccttataaatttacataaaaatgtccgtttgtgtcttttgttgtaaaaatcaagtgattttttcataaggttcttttactattggaaaagatgggcagcacgcagttttattttatttttgtaagttttttaatacatgtgaaagcaaagaatactcagcatgcctttctaagtgacgcgtttgcaccttttgttgggaagtactgtatcctgtgctgttagcattctcgataaatctctctgtgaaagtgactcaaggtctgggctttcattataagacagaagtccccctccagctcacatgacagcatggtgctgcgtttcctcattggatctggctgtccctggacacaggtagctgccttcaggcctgccacgagcggccaagggaagcctcctccatatgctggcctcgctggcccctcagcttcttccaagccagtgctctccaggcacactgctccagcgtgtgacgggaagggcctggcatgagtcagcctgcagcacaacctccctgctccagacccgtatggtaggggcaccccctaggtctggatgtgctgtggtgcttttggacacccccacccccgcaggctgtggctcctcctgtgtctcattctggccaggaccctcacgtgccctctgttgactgctaacgtggttctctgaccaggcaagggcaggctgaggggtttgcccaaagggggcccccttgttactggcttccttggctctcaggagcagcctcaccaggttggtaaggggctggaggagacaactgctcaaaggagtccagcttcacatgcacatgctagaaggtaccctcggaaggcctggccttcaaaggtagatcccagggttgaaaagtcaacttgtatgcattgagcatctcgtatgccagccctgttccgtgagctgatgggcctttgtgtgtaagtaggaccaagtgcccccgtggaggttagcatgggtgtgcagtcatttcagatacttgagttggtacatctcagtaaagtctgtcccgtgagaagccatgggtttcatggtatggttggcatcttccttgggagtggccacagtggtggtggcttcaggaaagagactccaacaggggccagctgtgggccttgggcacttctcgtttctaggaaaagtcctaagtctgtagggctaggggtggggaaccccttcgctgtcaggatcaagagggcaaggggaactgtcgctggaggagacatccagctggagaaacaaaagagtaagtctgcgttgctgcttgtggggtcttccccatctcagggcggggaccgggggtggcggtccagacaagtaatcaaggacgatgcccaggaggggacaggtacggggtggcaggagctctgccggcgggctcaggaagccttcaccacagctgcctgagctcacccttgccaaatgagggctggggcagcagcaacgcatacactcacggctgtggcgggcagcgttctcggcatatttcaggacacctaaggagactgaatggctcaaggctgctgccgtgtgcagggggctagacgtggggcgggcaggcagggctcctggtaacagccctgcaggccgcagtggagagcagggttccggcagggccgcccaggagctttcggaaggcccggccccggcccctttccgagcagcccgggcctccgccctgccctctgtccccaacgccgggagccgccgttcgtcctccagagccccgcccgggcgagc

SEQ ID NO: 298147 - DNA, 6281 bp, Homo sapiens
  misc_feature (25)..(25): n is a, c, g, or t
tacggctaggtacgaggctgggttngctggaattggtttagcccaagtggagcctgacagccagaactctgtgtcccccgtctaaccacagctccttttccagagcattccagtcaggctctctgggctgactgggccaggggaggttacaggtaccagttctttaagaagatctttgggcatatacatttttagcctgtgtcattgccccaaatggattcctgtttcaagttcacacctgcagattctaggacctgtgtcctagacttcagggagtcagctgtttctagagttcctaccatggagtgggtctggaggacctgcccggtgggggggcagagccctgctccctccgggtcttcctactcttctctctgctctgacgggatttgttgattctctccattttggtgtctttctcttttagatattgtatcaatctttagaaaaggcatagtctacttgttataaatcgttaggatactgcctcccccagggtctaaaattacatattagaggggaaaagctgaacactgaagtcagttctcaacaatttagaaggaaaacctagaaaacatttggcagaaaattacatttcgatgtttttgaatgaatacgagcaagcttttacaacagtgctgatctaaaaatacttagcacttggcctgagatgcctggtgagcattacaggcaaggggaatctggaggtagccgacctgaggacatggcttctgaacctgtcttttgggagtggtatggaaggtggagcgttcaccagtgacctggaaggcccagcaccaccctccttcccactcttctcatcttgacagagcctgccccagcgctgacgtgtcaggaaaacacccagggaactaggaaggcacttctgcctgaggggcagcctgccttgcccactcctgctctgctcgcctcggatcagctgagccttctgagctggcctctcactgcctccccaaggccccctgcctgccctgtcaggaggcagaaggaagcaggtgtgagggcagtgcaaggagggagcacaacccccagctcccgctccgggctccgacttgtgcacaggcagagcccagaccctggaggaaatcctacctttgaattcaagaacatttggggaatttggaaatctctttgcccccaaacccccattctgtcctacctttaatcaggtcctgctcagcagtgagagcagatgaggtgaaaaggccaagaggtttggctcctgcccactgatagcccctctccccgcagtgtttgtgtgtcaagtggcaaagctgttcttcctggtgaccctgattatatccagtaacacatagactgtgcgcataggcctgctttgtctcctctatcctgggcttttgttttgctttttagttttgcttttagtttttctgtcccttttatttaacgcaccgactagacacacaaagcagttgaatttttatatatatatctgtatattgcacaattataaactcattttgcttgtggctccacacacacaaaaaaagacctgttaaaattatacctgttgcttaattacaatatttctgataaccatagcataggacaagggaaaataaaaaaagaaaaaaaagaaaaaaaaacgacaaatctgtctgctggtcacttcttctgtccaagcagattcgtggtcttttcctcgcttctttcaagggctttcctgtgccaggtgaaggaggctccaggcagcacccaggttttgcactcttgtttctcccgtgcttgtgaaagaggtcccaaggttctgggtgcaggagcgctcccttgacctgctgaagtccggaacgtagtcggcacagcctggtcgccttccacctctgggagctggagtccactggggtggcctgactcccccagtccccttcccgtgacctggtcagggtgagcccatgtggagtcagcctcgcaggcctccctgccagtagggtccgagtgtgtttcatccttcccactctgtcgagcctgggggctggagcggagacgggaggcctggcctgtctcggaacctgtgagctgcaccaggtagaacgccagggaccccagaatcatgtgcgtcagtccaaggggtcccctccaggagtagtgaagactccagaaatgtccctttcttctcccccatcctacgagtaattgcatttgcttttgtaattcttaatgagcaatatctgctagagagtttagctgtaacagttctttttgatcatctttttttaataattagaaacaccaaaaaaatccagaaacttgttcttccaaagcagagagcattataatcaccagggccaaaagcttccctccctgctgtcattgcttcttctgaggcctgaatccaaaagaaaaacagccataggccctttcagtggccgggctacccgtgagcccttcggaggaccagggctggggcagcctctgggcccacatccggggccagctccggcgtgtgttcagtgttagcagtgggtcatgatgctctttcccacccagcctgggataggggcagaggaggcgaggaggccgttgccgctgatgtttggccgtgaacaggtgggtgtctgcgtgcgtccacgtgcgtgttttctgactgacatgaaatcgacgcccgagttagcctcacccggtgacctctagccctgcccggatggagcggggcccacccggttcagtgtttctggggagctggacagtggagtgcaaaaggcttgcagaacttgaagcctgctccttcccttgctaccacggcctcctttccgtttgatttgtcactgcttcaatcaataacagccgctccagagtcagtagtcaatgaatatatgaccaaatatcaccaggactgttactcaatgtgtgccgagcccttgcccatgctgggctcccgtgtatctggacactgtaacgtgtgctgtgtttgctccccttccccttccttctttgccctttacttgtctttctggggtttttctgtttgggtttggtttggtttttatttctccttttgtgttccaaacatgaggttctctctactggtcctcttaactgtggtgttgaggcttatatttgtgtaatttttggtgggtgaaaggaattttgctaagtaaatctcttctgtgtttgaactgaagtctgtattgtaactatgtttaaagtaattgttccagagacaaatatttctagacactttttctttacaaacaaaagcattcggagggagggggatggtgactgagatgagaggggagagctgaacagatgacccctgcccagatcagccagaagccacccaaagcagtggagcccaggagtcccactccaagccagcaagccgaatagctgatgtgttgccactttccaagtcactgcaaaaccaggttttgttccgcccagtggattcttgttttgcttcccctccccccgagattattaccaccatcccgtgcttttaaggaaaggcaagattgatgtttccttgaggggagccaggaggggatgtgtgtgtgcagagctgaagagctggggagaatggggctgggcccacccaagcaggaggctgggacgctctgctgtgggcacaggtcaggctaatgttggcagatgcagctcttcctggacaggccaggtggtgggcattctctctccaaggtgtgccccgtgggcattactgtttaagacacttccgtcacatcccaccccatcctccagggctcaacactgtgacatctctattccccaccctccccttcccagggcaataaaatgaccatggagggggcttgcactctcttggctgtcacccgatcgccagcaaaacttagatgtgagaaaaccccttcccattccatggcgaaaacatctccttagaaaagccattaccctcattaggcatggttttgggctcccaaaacacctgacagcccctccctcctctgagaggcggagagtgctgactgtagtgaccattgcatgccgggtgcagcatctggaagagctaggcagggtgtctgccccctcctgagttgaagtcatgctcccctgtgccagcccagaggccgagagctatggacagcattgccagtaacacaggccaccctgtgcagaagggagctggctccagcctggaaacctgtctgaggttgggagaggtgcacttggggcacagggagaggccgggacacacttagctggagatgtctctaaaagccctgtatcgtattcaccttcagtttttgtgttttgggacaattactttagaaaataagtaggtcgttttaaaaacaaaaattattgattgcttttttgtagtgttcagaaaaaaggttctttgtgtatagccaaatgactgaaagcactgatatatttaaaaacaaaaggcaatttattaaggaaatttgtaccatttcagtaaacctgtctgaatgtacctgtatacgtttcaaaaacaccccccccccactgaatccctgtaacctatttattatataaagagtttgccttataaatttacataaaaatgtccgtttgtgtcttttgttgtaaaaatcaagtgattttttcataaggttcttttactattggaaaagatgggcagcacgcagttttattttatttttgtaagttttttaatacatgtgaaagcaaagaatactcagcatgcctttctaagtgacgcgtttgcaccttttgttgggaagtactgtatcctgtgctgttagcattctcgataaatctctctgtgaaagtgactcaaggtctgggctttcattataagacagaagtccccctccagctcacatgacagcatggtgctgcgtttcctcattggatctggctgtccctggacacaggtagctgccttcaggcctgccacgagcggccaagggaagcctcctccatatgctggcctcgctggcccctcagcttcttccaagccagtgctctccaggcacactgctccagcgtgtgacgggaagggcctggcatgagtcagcctgcagcacaacctccctgctccagacccgtatggtaggggcaccccctaggtctggatgtgctgtggtgcttttggacacccccacccccgcaggctgtggctcctcctgtgtctcattctggccaggaccctcacgtgccctctgttgactgctaacgtggttctctgaccaggcaagggcaggctgaggggtttgcccaaagggggcccccttgttactggcttccttggctctcaggagcagcctcaccaggttggtaaggggctggaggagacaactgctcaaaggagtccagcttcacatgcacatgctagaaggtaccctcggaaggcctggccttcaaaggtagatcccagggttgaaaagtcaacttgtatgcattgagcatctcgtatgccagccctgttccgtgagctgatgggcctttgtgtgtaagtaggaccaagtgcccccgtggaggttagcatgggtgtgcagtcatttcagatacttgagttggtacatctcagtaaagtctgtcccgtgagaagccatgggtttcatggtatggttggcatcttccttgggagtggccacagtggtggtggcttcaggaaagagactccaacaggggccagctgtgggccttgggcacttctcgtttctaggaaaagtcctaagtctgtagggctaggggtggggaaccccttcgctgtcaggatcaagagggcaaggggaactgtcgctggaggagacatccagctggagaaacaaaagagtaagtctgcgttgctgcttgtggggtcttccccatctcagggcggggaccgggggtggcggtccagacaagtaatcaaggacgatgcccaggaggggacaggtacggggtggcaggagctctgccggcgggctcaggaagccttcaccacagctgcctgagctcacccttgccaaatgagggctggggcagcagcaacgcatacactcacggctgtggcgggcagcgttctcggcatatttcaggacacctaaggagactgaatggctcaaggctgctgccgtgtgcagggggctagacgtggggcgggcaggcagggctcctggtaacagccctgcaggccgcagtggagagcagggttccggcagggccgcccaggagctttcggaaggcccggccccggcccctttccgagcagcccgggcctccgccctgccctctgtccccaacgccgggagccgccgttcgtcctccagagccccgcccgggcgagc

SEQ ID NO: 298148 - DNA, 1803 bp, Homo sapiens
cgcgcgcgtcggcctctcggagagagggctgtggtaaaagccgtccggaaaatggccgccgccgccgccgccgcgccgagcggaggaggaggaggaggcgaggaggagagactgctccataaaaatacagactcaccagttcctgctttgatgtgacatgtgactccccagaatacaccttgcttctgtagaccagctccaacaggattccatggtagctgggatgttagggctcagggaagaaaagtcagaagaccaggacctccagggcctcaaggacaaacccctcaagtttaaaaaggtgaagaaagataagaaagaagagaaagagggcaagcatgagcccgtgcagccatcagcccaccactctgctgagcccgcagaggcaggcaaagcagagacatcagaagggtcaggctccgccccggctgtgccggaagcttctgcctcccccaaacagcggcgctccatcatccgtgaccggggacccatgtatgatgaccccaccctgcctgaaggctggacacggaagcttaagcaaaggaaatctggccgctctgctgggaagtatgatgtgtatttgatcaatccccagggaaaagcctttcgctctaaagtggagttgattgcgtacttcgaaaaggtaggcgacacatccctggaccctaatgattttgacttcacggtaactgggagagggagcccctcccggcgagagcagaaaccacctaagaagcccaaatctcccaaagctccaggaactggcagaggccggggacgccccaaagggagcggcaccacgagacccaaggcggccacgtcagagggtgtgcaggtgaaaagggtcctggagaaaagtcctgggaagctccttgtcaagatgccttttcaaacttcgccagggggcaaggctgaggggggtggggccaccacatccacccaggtcatggtgatcaaacgccccggcaggaagcgaaaagctgaggccgaccctcaggccattcccaagaaacggggccgaaagccggggagtgtggtggcagccgctgccgccgaggccaaaaagaaagccgtgaaggagtcttctatccgatctgtgcaggagaccgtactccccatcaagaagcgcaagacccgggagacggtcagcatcgaggtcaaggaagtggtgaagcccctgctggtgtccaccctcggtgagaagagcgggaaaggactgaagacctgtaagagccctgggcggaaaagcaaggagagcagccccaaggggcgcagcagcagcgcctcctcaccccccaagaaggagcaccaccaccatcaccaccactcagagtccccaaaggcccccgtgccactgctcccacccctgcccccacctccacctgagcccgagagctccgaggaccccaccagcccccctgagccccaggacttgagcagcagcgtctgcaaagaggagaagatgcccagaggaggctcactggagagcgacggctgccccaaggagccagctaagactcagcccgcggttgccaccgccgccacggccgcagaaaagtacaaacaccgaggggagggagagcgcaaagacattgtttcatcctccatgccaaggccaaacagagaggagcctgtggacagccggacgcccgtgaccgagagagttagctgactttacacggagcggattgcaaagcaaaccaacaagaataaaggcagctgttgtctcttctccttatgggtagggctctgacaaagcttcccgattaactgaaataaaaaatatttttttttctttcagta

SEQ ID NO: 298149 - DNA, 6215 bp, Homo sapiens
gtatccccactatctgctcatgaaacgctccttcccagtcttctcattttgacagagcctgccccagcgctgtcgtgtctggaaaacacccagttctttaagaagatctttgggcatatacatttttagcctgtgtcattgccccaaatggattcctgtttcaagttcacacctgcagattctaggacctgtgtcctagacttcagggagtcagctgtttctagagttcctaccatggagtgggtctggaggacctgcccggtgggggggcagagccctgctccctccgggtcttcctactcttctctctgctctgacgggatttgttgattctctccattttggtgtctttctcttttagatattgtatcaatctttagaaaaggcatagtctacttgttataaatcgttaggatactgcctcccccagggtctaaaattacatattagaggggaaaagctgaacactgaagtcagttctcaacaatttagaaggaaaacctagaaaacatttggcagaaaattacatttcgatgtttttgaatgaatacgagcaagcttttacaacagtgctgatctaaaaatacttagcacttggcctgagatgcctggtgagcattacaggcaaggggaatctggaggtagccgacctgaggacatggcttctgaacctgtcttttgggagtggtatggaaggtggagcgttcaccagtgacctggaaggcccagcaccaccctccttcccactcttctcatcttgacagagcctgccccagcgctgacgtgtcaggaaaacacccagggaactaggaaggcacttctgcctgaggggcagcctgccttgcccactcctgctctgctcgcctcggatcagctgagccttctgagctggcctctcactgcctccccaaggccccctgcctgccctgtcaggaggcagaaggaagcaggtgtgagggcagtgcaaggagggagcacaacccccagctcccgctccgggctccgacttgtgcacaggcagagcccagaccctggaggaaatcctacctttgaattcaagaacatttggggaatttggaaatctctttgcccccaaacccccattctgtcctacctttaatcaggtcctgctcagcagtgagagcagatgaggtgaaaaggccaagaggtttggctcctgcccactgatagcccctctccccgcagtgtttgtgtgtcaagtggcaaagctgttcttcctggtgaccctgattatatccagtaacacatagactgtgcgcataggcctgctttgtctcctctatcctgggcttttgttttgctttttagttttgcttttagtttttctgtcccttttatttaacgcaccgactagacacacaaagcagttgaatttttatatatatatctgtatattgcacaattataaactcattttgcttgtggctccacacacacaaaaaaagacctgttaaaattatacctgttgcttaattacaatatttctgataaccatagcataggacaagggaaaataaaaaaagaaaaaaaagaaaaaaaaacgacaaatctgtctgctggtcacttcttctgtccaagcagattcgtggtcttttcctcgcttctttcaagggctttcctgtgccaggtgaaggaggctccaggcagcacccaggttttgcactcttgtttctcccgtgcttgtgaaagaggtcccaaggttctgggtgcaggagcgctcccttgacctgctgaagtccggaacgtagtcggcacagcctggtcgccttccacctctgggagctggagtccactggggtggcctgactcccccagtccccttcccgtgacctggtcagggtgagcccatgtggagtcagcctcgcaggcctccctgccagtagggtccgagtgtgtttcatccttcccactctgtcgagcctgggggctggagcggagacgggaggcctggcctgtctcggaacctgtgagctgcaccaggtagaacgccagggaccccagaatcatgtgcgtcagtccaaggggtcccctccaggagtagtgaagactccagaaatgtccctttcttctcccccatcctacgagtaattgcatttgcttttgtaattcttaatgagcaatatctgctagagagtttagctgtaacagttctttttgatcatctttttttaataattagaaacaccaaaaaaatccagaaacttgttcttccaaagcagagagcattataatcaccagggccaaaagcttccctccctgctgtcattgcttcttctgaggcctgaatccaaaagaaaaacagccataggccctttcagtggccgggctacccgtgagcccttcggaggaccagggctggggcagcctctgggcccacatccggggccagctccggcgtgtgttcagtgttagcagtgggtcatgatgctctttcccacccagcctgggataggggcagaggaggcgaggaggccgttgccgctgatgtttggccgtgaacaggtgggtgtctgcgtgcgtccacgtgcgtgttttctgactgacatgaaatcgacgcccgagttagcctcacccggtgacctctagccctgcccggatggagcggggcccacccggttcagtgtttctggggagctggacagtggagtgcaaaaggcttgcagaacttgaagcctgctccttcccttgctaccacggcctcctttccgtttgatttgtcactgcttcaatcaataacagccgctccagagtcagtagtcaatgaatatatgaccaaatatcaccaggactgttactcaatgtgtgccgagcccttgcccatgctgggctcccgtgtatctggacactgtaacgtgtgctgtgtttgctccccttccccttccttctttgccctttacttgtctttctggggtttttctgtttgggtttggtttggtttttatttctccttttgtgttccaaacatgaggttctctctactggtcctcttaactgtggtgttgaggcttatatttgtgtaatttttggtgggtgaaaggaattttgctaagtaaatctcttctgtgtttgaactgaagtctgtattgtaactatgtttaaagtaattgttccagagacaaatatttctagacactttttctttacaaacaaaagcattcggagggagggggatggtgactgagatgagaggggagagctgaacagatgacccctgcccagatcagccagaagccacccaaagcagtggagcccaggagtcccactccaagccagcaagccgaatagctgatgtgttgccactttccaagtcactgcaaaaccaggttttgttccgcccagtggattcttgttttgcttcccctccccccgagattattaccaccatcccgtgcttttaaggaaaggcaagattgatgtttccttgaggggagccaggaggggatgtgtgtgtgcagagctgaagagctggggagaatggggctgggcccacccaagcaggaggctgggacgctctgctgtgggcacaggtcaggctaatgttggcagatgcagctcttcctggacaggccaggtggtgggcattctctctccaaggtgtgccccgtgggcattactgtttaagacacttccgtcacatcccaccccatcctccagggctcaacactgtgacatctctattccccaccctccccttcccagggcaataaaatgaccatggagggggcttgcactctcttggctgtcacccgatcgccagcaaaacttagatgtgagaaaaccccttcccattccatggcgaaaacatctccttagaaaagccattaccctcattaggcatggttttgggctcccaaaacacctgacagcccctccctcctctgagaggcggagagtgctgactgtagtgaccattgcatgccgggtgcagcatctggaagagctaggcagggtgtctgccccctcctgagttgaagtcatgctcccctgtgccagcccagaggccgagagctatggacagcattgccagtaacacaggccaccctgtgcagaagggagctggctccagcctggaaacctgtctgaggttgggagaggtgcacttggggcacagggagaggccgggacacacttagctggagatgtctctaaaagccctgtatcgtattcaccttcagtttttgtgttttgggacaattactttagaaaataagtaggtcgttttaaaaacaaaaattattgattgcttttttgtagtgttcagaaaaaaggttctttgtgtatagccaaatgactgaaagcactgatatatttaaaaacaaaaggcaatttattaaggaaatttgtaccatttcagtaaacctgtctgaatgtacctgtatacgtttcaaaaacaccccccccccactgaatccctgtaacctatttattatataaagagtttgccttataaatttacataaaaatgtccgtttgtgtcttttgttgtaaaaatcaagtgattttttcataaggttcttttactattggaaaagatgggcagcacgcagttttattttatttttgtaagttttttaatacatgtgaaagcaaagaatactcagcatgcctttctaagtgacgcgtttgcaccttttgttgggaagtactgtatcctgtgctgttagcattctcgataaatctctctgtgaaagtgactcaaggtctgggctttcattataagacagaagtccccctccagctcacatgacagcatggtgctgcgtttcctcattggatctggctgtccctggacacaggtagctgccttcaggcctgccacgagcggccaagggaagcctcctccatatgctggcctcgctggcccctcagcttcttccaagccagtgctctccaggcacactgctccagcgtgtgacgggaagggcctggcatgagtcagcctgcagcacaacctccctgctccagacccgtatggtaggggcaccccctaggtctggatgtgctgtggtgcttttggacacccccacccccgcaggctgtggctcctcctgtgtctcattctggccaggaccctcacgtgccctctgttgactgctaacgtggttctctgaccaggcaagggcaggctgaggggtttgcccaaagggggcccccttgttactggcttccttggctctcaggagcagcctcaccaggttggtaaggggctggaggagacaactgctcaaaggagtccagcttcacatgcacatgctagaaggtaccctcggaaggcctggccttcaaaggtagatcccagggttgaaaagtcaacttgtatgcattgagcatctcgtatgccagccctgttccgtgagctgatgggcctttgtgtgtaagtaggaccaagtgcccccgtggaggttagcatgggtgtgcagtcatttcagatacttgagttggtacatctcagtaaagtctgtcccgtgagaagccatgggtttcatggtatggttggcatcttccttgggagtggccacagtggtggtggcttcaggaaagagactccaacaggggccagctgtgggccttgggcacttctcgtttctaggaaaagtcctaagtctgtagggctaggggtggggaaccccttcgctgtcaggatcaagagggcaaggggaactgtcgctggaggagacatccagctggagaaacaaaagagtaagtctgcgttgctgcttgtggggtcttccccatctcagggcggggaccgggggtggcggtccagacaagtaatcaaggacgatgcccaggaggggacaggtacggggtggcaggagctctgccggcgggctcaggaagccttcaccacagctgcctgagctcacccttgccaaatgagggctggggcagcagcaacgcatacactcacggctgtggcgggcagcgttctcggcatatttcaggacacctaaggagactgaatggctcaaggctgctgccgtgtgcagggggctagacgtggggcgggcaggcagggctcctggtaacagccctgcaggccgcagtggagagcagggttccggcagggccgcccaggagctttcggaaggcccggccccggcccctttccgagcagcccgggcctccgccctgccctctgtccccaacgccgggagccgccgttcgtcctccagagccccgcccgggcgagc

SEQ ID NO: 298150 - DNA, 1537 bp, Homo sapiens
  misc_feature (1537)..(1537): n is a, c, g, or t
cgcgcgcgtcggcctctcggagagagggctgtggtaaaagccgtccggaaaatggccgccgccgccgccgccgcgccgagcggaggaggaggaggaggcgaggaggagagactgctccataaaaatacagactcaccagttcctgctttgatgtgacatgtgactccccagaatacaccttgcttctgtagaccagctccaacaggattccatggtagctgggatgttagggctcagggaagaaaagtcagaagaccaggacctccagggcctcaaggacaaacccctcaagtttaaaaaggtgaagaaagataagaaagaagagaaagagggcaagcatgagcccgtgcagccatcagcccaccactctgctgagcccgcagaggcaggcaaagcagagacatcagaagggtcaggctccgccccggctgtgccggaagcttctgcctcccccaaacagcggcgctccatcatccgtgaccggggacccatgtatgatgaccccaccctgcctgaaggctggacacggaagcttaagcaaaggaaatctggccgctctgctgggaagtatgatgtgtatttgatcaatccccagggaaaagcctttcgctctaaagtggagttgattgcgtacttcgaaaaggtaggcgacacatccctggaccctaatgattttgacttcacggtaactgggagagggagcccctcccggcgagagcagaaaccacctaagaagcccaaatctcccaaagctccaggaactggcagaggccggggacgccccaaagggagcggcaccacgagacccaaggcggccacgtcagagggtgtgcaggtgaaaagggtcctggagaaaagtcctgggaagctccttgtcaagatgccttttcaaacttcgccagggggcaaggctgaggggggtggggccaccacatccacccaggtcatggtgatcaaacgccccggcaggaagcgaaaagctgaggccgaccctcaggccattcccaagaaacggggccgaaagccggggagtgtggtggcagccgctgccgccgaggccaaaaagaaagccgtgaaggagtcttctatccgatctgtgcaggagaccgtactccccatcaagaagcgcaagacccgggagacggtcagcatcgaggtcaaggaagtggtgaagcccctgctggtgtccaccctcggtgagaagagcgggaaaggactgaagacctgtaagagccctgggcggaaaagcaaggagagcagccccaaggggcgcagcagcagcgcctcctcaccccccaagaaggagcaccaccaccatcacaataaagtcccaaagggcccggcaatgcaccacaccgtaccaacacatacacaggcgcaaacaagactacacagacaaaccgcgacaccagagaccccagctaaaaacagacgagcgaaagcgacaaagaaaaaaaaaacataacgagaacccaacaacagaaaagaaaaaaagaacgagctccactcagacaaccacggcacgacatacgactan

SEQ ID NO: 298151 - DNA, 1366 bp, Homo sapiens
cgcgcgcgtcggcctctcggagagagggctgtggtaaaagccgtccggaaaatggccgccgccgccgccgccgcgccgagcggaggaggaggaggaggcgaggaggagagactgctccataaaaatacagactcaccagttcctgctttgatgtgacatgtgactccccagaatacaccttgcttctgtagaccagctccaacaggattccatggtagctgggatgttagggctcagggaagaaaagtcagaagaccaggacctccagggcctcaaggacaaacccctcaagtttaaaaaggtgaagaaagataagaaagaagagaaagagggcaagcatgagcccgtgcagccatcagcccaccactctgctgagcccgcagaggcaggcaaagcagagacatcagaagggtcaggctccgccccggctgtgccggaagcttctgcctcccccaaacagcggcgctccatcatccgtgaccggggacccatgtatgatgaccccaccctgcctgaaggctggacacggaagcttaagcaaaggaaatctggccgctctgctgggaagtatgatgtgtatttgatcaatccccagggaaaagcctttcgctctaaagtggagttgattgcgtacttcgaaaaggtaggcgacacatccctggaccctaatgattttgacttcacggtaactgggagagggagcccctcccggcgagagcagaaaccacctaagaagcccaaatctcccaaagctccaggaactggcagaggccggggacgccccaaagggagcggcaccacgagacccaaggcggccacgtcagagggtgtgcaggtgaaaagggtcctggagaaaagtcctgggaagctccttgtcaagatgccttttcaaacttcgccagggggcaaggctgaggggggtggggccaccacatccacctccacctgagcccgagagctccgaggaccccaccagcccccctgagccccaggacttgagcagcagcgtctgcaaagaggagaagatgcccagaggaggctcactggagagcgacggctgccccaaggagccagctaagactcagcccgcggttgccaccgccgccacggccgcagaaaagtacaaacaccgaggggagggagagcgcaaagacattgtttcatcctccatgccaaggccaaacagagaggagcctgtggacagccggacgcccgtgaccgagagagttagctgactttacacggagcggattgcaaagcaaaccaacaagaataaaggcagctgttgtctcttctccttatgggtagggctctgacaaagcttcccgattaactgaaataaaaaatatttttttttctttcagta

SEQ ID NO: 298152 - DNA, 1198 bp, Homo sapiens
cgcgcgcgtcggcctctcggagagagggctgtggtaaaagccgtccggaaaatggccgccgccgccgccgccgcgccgagcggaggaggaggaggaggcgaggaggagagactgctccataaaaatacagactcaccagttcctgctttgatgtgacatgtgactccccagaatacaccttgcttctgtagaccagctccaacaggattccatggtagctgggatgttagggctcagggaagaaaagtcagaagaccaggacctccagggcctcaaggacaaacccctcaagtttaaaaaggtgaagaaagataagaaagaagagaaagagggcaagcatgagcccgtgcagccatcagcccaccactctgctgagcccgcagaggcaggcaaagcagagacatcagaagggtcaggctccgccccggctgtgccggaagcttctgcctcccccaaacagcggcgctccatcatccgtgaccggggacccatgtatgatgaccccaccctgcctgaaggctggacacggaagcttaagcaaaggaaatctggccgctctgctgggaagtatgatgtgtatttgatcaatccccagggaaaagcctttcgctctaaagtggagttgattgcgtacttcgaaaaggtaggcgacacatccctggaccctaatgattttgacttcacggtaactgggagagggagcccctcccggcgagagcagaaaccacctaagaagcccaaatctcccaaagctccaggaactggcagaggccggggacgccccaaagggagcggcaccacgagacccaaggcggccacgtcagagggtgtgcaggtgaaaagggtcctggagaaaagtcctgggaagctccttgtcaagatgccttttcaaacttcgccagggggcaaggctgaggggggtggggccaccacatccacccaggtcatggtgatcaaacgccccggcaggaagcgaaaagctgaggccgaccctcaggccattccagaacggcgaagccggatgtgttgagcgtgcgcgaagcaaagaagcggaggcttcatcgatgggaggaacgatcccataaaggcgacggaagccatcagtagaaggagccctggtccccgaaaggagagactgtaacggggaataccagggggctcccaggcacaaagcgaggtcaaaaccaggagaaccaaa

SEQ ID NO: 298153 - DNA, 447 bp, Homo sapiens
aagtgtcccctagaggtgacaaggcttgtgatagtgttgattctaacaagcatgaatctttcctttattttagcactgtgtgttacgtgccagtaatttgcagcttatcctttgtttctagctaggtaagctgggaaatagcctagtactttgtctatgtgtttatcttcaaaatgtcccaaatagccctgggaaaaaggtcgtgcagctcaatgggggctttcaacttacaattttctttgttttaggctccgctccataaaaatacagactcaccagttcctgctttgatgtgacatgtgactccccagaatacaccttgcttctgtagaccagctccaacaggattccatggtagctgggatgttagggctcaggtaagtaaccttcctttttttttttttagtatatgtcctggtttggccatctgttttttttttttttaaa

SEQ ID NO: 298154 - DNA, 566 bp, Homo sapiens
actaccagcctccagaattgtgaggctagatcacaaaacctttgtgtttatgacatagtttatgacactatgctatgacatagcatagaaaacgaacgtatccacaacaaccatggaatggagcttctcccttgcaatggcctagaaaagacatgagaagaggatctaaaaggtcacaataatatagagccatggtaagagagaagggtggttgcagcttcaactggcattctctgtcacctttacccagttgccctagcactcagaatctatggattgatcccaaaacaatgtacgtgctgactgctgtcactgtcttaaggtagcggtaaaggaataactgaaaggaagaaatgatgacttgaaggtccatgagccaaaatatccaggagaagagtagtcagtaagaaatcagaaagccaagaacaagaagtttctgaagggaaggctagaaaagaagagtagatgtgagaagaaatattttggacactgtaaaccaacatttattcaaaagatatataatttgatcttttctgtgccaataaactaggtattcaaagtagaaa

SEQ ID NO: 298155 - DNA, 1410 bp, Homo sapiens
taattccaggactgtttactgaattgtctttctcaagtaatttgaacactcaagaattttgaacactttgctctggtataagggccatgaagttaaaccttcacattgtctgggcttgctcactgtgtgctcctaagcaaggctggttaacttctgtcagacttcggtttcttttttctttctttttctttttcttttttttttttttttttttttttgagacgcagtcttgctctgtcgccaggctggggtgcagtggcgcagtctctgctcactgcaacctccatctcccgggttcaagtgactctccttcctcagcctccccacttcagtttctttatctgtcaattgtggttagtgggctgttaatgaaaattattaggtcaaacatctactaagtatctgtcacatagtaggctcttcgtcaattggcccttttccttcccactagacaacttgagaaagcttcctcctagcctatagctactcttccgttccacttcttggtttcctgctctgattgccatgttttgttctcacagaggcaggagaggcaggtccgagaccgcggggtgacccggtccaaggcggaaaaagtgcggccgcccactgtgccagtgccgcaggtggatattgtgcctgggcggctcagtgaggccgagtggatggcgcttacagccctcgaggagggcgaggacgtcgtaggggacatcttggccgacttgctggctcgagtcatggactctgctttcaaagtctacctgactcagcaggtgggccgggatccgggtccttcagactcgtctccctctcccgcccctccctgccgacctgagatcctctctcgcctccgcagtgcattccattcaccatcagccaggcccgggaggccatgctgcagatcaccgagtggcgcttcctggcccgggacgagggagaatctgcagtagctgaggaccccacatggggtgaggacgaggagccttcggcatgcacgacggactcctgggctcagggttcagtgcccgtgctgcacgcgtccacctcggagggcctggagaacttccaaggcgaagtacactcctcaggagcctctccggactcctctgccattgctcctgctctcccctttccgacatctcactgcccgagtgcatttccccaggaccctgggggcgtggaccggatccctttaggaaggtcgtggatgggtcgaggctcccaggagcagatggaatcttgggagccttctccgcagctgagagtcacgtcggcccctcctcccacatcagagctgtttcaggaggcagggcccggaggtcctgtagaggaagcggacggccagtctagaggcctctcctcggccgggtccttgagcgcgagcttccaactgtcggtggaggaggcgcc

SEQ ID NO: 298156 - DNA, 1294 bp, Homo sapiens
tggtggtgacattgctctctgggcttttggtttgggagccacttctctgctcctccactgttgcctctggcttcccatagaggggcctgggagggttcccctggtcttaaaaggggcccaagcccccattctggcacaccccactccactgtcctggcagcagcaggtgtggccaatggaggggggtgctggcccccaggattcccccagccaaactgtctttgtcaccacgtgaggctcacacctttcatccttccccaccttccctagtccctgcactaggttggacagcccccattggctacaggaaagcgggaggggtgtgagtcccctactccctctttgcagtggccccagcccccttaccgtctgcctgggatctgagtacatattgcagtgatggagatgcagtcacctattgtccagaggcaggagaggcaggtccgagaccgcggggtgacccggtccaaggcggaaaaagtgcggccgcccactgtgccagtgccgcaggtggatattgtgcctgggcggctcagtgaggccgagtggatggcgcttacagccctcgaggagggcgaggacgtcgtaggggacatcttggccgacttgctggctcgagtcatggactctgctttcaaagtctacctgactcagcaggtgggccgggatccgggtccttcagactcgtctccctctcccgcccctccctgccgacctgagatcctctctcgcctccgcagtgcattccattcaccatcagccaggcccgggaggccatgctgcagatcaccgagtggcgcttcctggcccgggacgagggagaatctgcagtagctgaggaccccacatggggtgaggacgaggagccttcggcatgcacgacggactcctgggctcagggttcagtgcccgtgctgcacgcgtccacctcggagggcctggagaacttccaaggcgaagtacactcctcaggagcctctccggactcctctgccattgctcctgctctcccctttccgacatctcactgcccgagtgcatttccccaggaccctgggggcgtggaccggatccctttaggaaggtcgtggatgggtcgaggctcccaggagcagatggaatcttgggagccttctccgcagctgagagtcacgtcggcccctcctcccacatcagagctgtttcaggaggcagggcccggaggtcctgtagaggaagcggacggccagtctagaggcctctcctcggccgggtccttgagcgcgagcttccaactgtcggtggaggaggcgcc

SEQ ID NO: 298157 - DNA, 9118 bp, Homo sapiens
agcggccgccgccctcgccaccccgcctgcccactcccgccgccgccccgctctcgctttccccccggcctcccctcgccccttcccctcccccttcccggcgcactcggggggctgggaacgagctgccatgtgatgcgcgtcccctccgcgagctttcggtgacccacgaactgcccacctcgccggctgccgggagggggctgcgagccgggaagacgcggggaagaggaggcggaaaaggacgcaaagttctccggcgagcgcgttcattcacatagctcccagttttaacatttcgccacctactgaagacatcatttgggaccaagctgatgagcccttgaagcacagcagataagagtgttgctgttgatcatctttgcctgggaagttgaatgataaagccagaagaaagcatgctttctgatcatttgcagctgtctgcttcagaaagtgagggctccaggaatgaggagaatcttcaagaacttcctcgcactgtgacatgtctgatcccttgctcccatccctgcagcatgaacaaggtggacactcactgacctgtcacaaggttgccccacaaaactttggggtccatgtctgaatggattgccagagccttctcatctctcccttcgcccagttccctgcatcctaagactcgaaggcagcacaggacctggaaaaattacatggtgtgaacggcatgtctgtggatgagaagcctgactcccccatgtatgtgtatgagtccacagtccactgcaccaacatcctcctgggcctcaatgaccagcggaaaaaggatattctctgtgacgtgactttgatcgtggagaggaaggagttccgggcccaccgggctgtgctggccgcatgcagtgaatatttttggcaggcgctggttggacagacaaaaaatgatttggtggtcagcttgcctgaggaggtcacagccaggggctttgggccgctgttacagtttgcctacactgccaagctgttactcagcagagaaaacatccgcgaggtcatccgctgtgctgagttcctgcgcatgcacaacctggaggactcctgcttcagcttcctgcagacccagctcctgaacagtgaggatggcctgtttgtgtgccggaaggatgctgcgtgccagcgcccacacgaggactgcgagaactctgcaggagaggaggaggatgaagaggaggagacgatggattcagagacggccaagatggcttgccccagggaccagatgcttccagagcccatcagctttgaggccgccgccatccccgtagcagagaaggaagaagccctgctgcccgagcctgacgtgcccacagacaccaaggagagctcagaaaaggacgcgttaacgcagtaccccagatacaagaaataccagcttgcatgtaccaagaatgtctataatgcatcatcacacagtacctcaggttttgcaagcacattccgggaagataactctagcaacagcctcaagccggggcttgccagggggcagattaaaagtgagccgcccagtgaagagaatgaggaagagagcatcacgctctgcctgtctggagatgagcctgacgccaaggacagagcgggggatgtcgagatggaccggaaacagcccagccctgcccctacccccacggccccagctggggccgcctgcctggagagatccaggagcgtggcctcgccctcctgcttaaggtctctgttcagcataacgaaaagtgtggagctgtctggcctgcccagtacatctcagcagcactttgccaggagtccagcctgcccttttgacaaggggatcactcagggtgaccttaaaactgactacacccctttcacagggaattatggacagccccacgtgggccagaaggaggtgtccaacttcaccatggggtcgcccctcagggggcctgggttggaggctctctgtaaacaggagggagagctggaccggaggagcgtgatcttctcctccagcgcttgtgaccaagtgagcacctcggtgcattcttattctggggtgagcagtttggacaaagacctctctgagccggtgccaaagggtctgtgggtgggagccggccagtccctccccagctcgcaggcctactcccacggtgggctgatggccgaccacttgccaggaaggatgcggcccaacaccagctgcccggtgccaatcaaagtctgccctcgctcaccccccttggagaccaggaccaggacttccagctcctgctcttcctattcctacgcggaggacgggagcgggggctcaccctgcagcctccctctctgtgagttctcctcctcgccctgttcccagggagccagattccttgccacagaacatcaggaaccaggcctgatgggagatggaatgtacaaccaagtgcggccccaaattaaatgtgagcagtcttatggaaccaactccagtgacgaatccggatcgttctcggaagcagacagtgagtcgtgtcctgtgcaggacaggggccaggaggtaaaacttccttttcctgtagatcaaatcacagatcttccaaggaacgatttccagatgatgattaaaatgcacaagctaacctcagaacagttagagtttattcatgatgtccgacggcgcagcaagaaccgcatcgcggcccagcgctgccgcaaaaggaaactggactgtattcagaatttagaatgtgaaatccgcaaattggtgtgtgagaaagagaaactgttgtcagagaggaatcaactgaaagcatgcatgggggaactgttggacaacttctcctgcctttcccaggaagtttgccgagacatccagagccccgagcagatccaggccctgcatcggtattgccctgtcctcagacccatggacttgcccacggcctccagtattaaccctgcgcccttgggtgctgagcagaacattgcggcctcccaatgcgcagtgggggaaaacgtgccctgctgcttggagccaggcgcggctccccccggacccccctgggcacccagcaacacctccgagaattgtacctctgggaggagactagaaggcactgacccgggaaccttctcagagagaggacctcctcttgaacccaggagccaaacagtgaccgtggacttctgccaggaaatgactgataagtgtacaactgacgaacagcccaggaaagattatacctagtgactcggctctgcctcccagtccgcacacctctcccatccaggcgttcttcagtcagcctgtggcactgttcatctgctgtcccgaagaaaccgagaacacatttggtgcacactacagcggtcttagcagcaatactgttccgaagtatcctctcctcttctcgagcaggagtgatagttaccttcacaatggtgctaccccttgcccaggcaaggaaagacagcagtgatgacactgtctgtctgtggctcaatttcagtcttcacagggatagactacaacacctctaggccccaaccacggattttttttctcagtggcccatgtcacaaaccctatctcaggaatttcttctgaatgttcaatttttttcattgaagacagcttctatacacatcaaagttttatagctagactgtacatattatatataatatatatataaaaaatatatatatatatatatatccatatgcaaaagtcctgcatgcctcaactttctcatcctaaaactggaaacttatttctcatttagaaacaggttccaacattcctcttcttttgtctctgatgctagaactagtttggtaactgttaacatggtcatttttcttgcttcacagttcaattttcaattcgtacttatttatggacaaaattcagtgttggaagctttttcccaaggttttatttcagatttctttttcgtttggtttggttttggcacctccaagtggtgtcatttgagcattgtaggtttgttttttgtttgtttggggggttttgtttgtttttgtttttgtttttgttttccttgcagatactgtacagtaatggtcaactttgccacttgcactgagttttgggtcaaacctattttcttaaatgaagttgtaacttcggtataactcaagtatactgtatattctttgcttttagttaaaaaagtaaaacattttagctaattaaaaagcactcaggtgataattatgtaggaaaaacaatcttgccaaataatgaattcatcctaggatgtgtagacaataatctgcttgaatatttttatatttcacctcctccccacctttccctaagcaaagtttaaacgcagatagagagttcagagttgatgctggatgttcagattcctaagtggggagagagtttggacatctcactcaaaagtacatcagaaaaacaggaatccgtgattttataccagaactcagcaggcattggctcctagaaatcaagttagaaagttttcacccagggagtaagtcccattcatttcaacacgtcctgaggcctcggcttgctcttggaagtggtgtgcagtaggacctgctcccctgaaggacggggccaaccagccactggctttcctgcccaggcttggcctcccaggacatctggcctgaggggatttgaatcacagccccgaaggtcctgccttcaccccattgggagagagcagggcatcctggcatctgcgatccatccctgacacaggctgacacattctttctcctttccttctccaaaggcttggagttttcttctgaggtttttctgccagtgtcttgtctgaaggcagacttcattctgaggctttggacaagctatcaccgggaaccctccctgtccccttcccgaatcacacacataccctaccctcacctgatgataattttctcttcttgctgcaaaactggttggcttgcaacccagagagagcagcttcccttggctctggggccgtgttggccccagccacgtttacaggaaggtgtgccccagaggaggaggaatcagctccctcgctccagtggccttgggtccgggtctcactgagcagcccgagggccactccagcccggctggggaagagagtcctgaacggtttgatgtggggatggggtggtgggcagtggggaatagatggttgactttgtttctttatttgtgccattgtttggacaatattaaagctgcatgtaaaaggggaaattagtatatgatgtaggctaaaagtgaaatcatagtaacatatgttttagtattattaacttttttctgtacaaatattagcactaaatgtttaaatatgtatgaatgccagaaatttgtcagttcatgcagtaggataaaaaaaaaaaaaaaaaaaaaaaggcttttctttttaaacagttccacttttaaaacctgcctctgggtttttgttttttcttgtttgtgtgtgtgtgtgtgtgtgtgtgtgtgtgtgtgtgtgtgtgtgtgtgtctgaaacagatcttgataaagctctgtgttggagctgctggtttttgttatggttgttggaatttcttggcctactaggacagttctgtgcttcaccatgaggtttgcctttgtggaaaactggtgacagtgagaatataaactcaatgtgaatcacgtgatacttcggcaggcgtgtgttacagtggagtcagctgacagtattttgctttttaactctattgttgcctttccaagtgacctctcctcttcttttaaaaaaagaacactttctgctcatatcataaccaggtccaacccagcttcttggcatgaggtttaccctggtaacaactcatgtgcaactggtagtcttgaccacattccatccatttcctcaggtttctgtggttcagtagcccagacctgtttggcagccatttctagcaggggcggggcctctttatttctctccaccctaactcagacctcaccttcctcccacccacccctgccttgcttttcttcctcttcccccaacctaacttctgccatgggaactggttaaaaacactgctctaaaaaccatcttccaatttcatagagatttctcacaagttatttcattcataatccaccatgaacagtgactagcttcgtgcagttgttcatgtgatgtgtgtgtgtcttttcctattcagaactatgtgcttgtcaaaattatttctgggttgattcaaagggaggacttgctggggaccagaatccaaacggcctcaagtggaattttaaaacctagcctgtctcttttccctgggatccctctgtcaaccccacgccttttaggaaaaagaaaagtgagtgaacagcaaggaagagtgtttgcacagtacagtaacatttggttgttcttaaggctcttttcttacaaaaataagagaccctccaaccacgggctgtttaggaggatgcctgcttgggtctccaaatggctggggtaggaatggttgttggggcagagccagtggaggtgagtgaccctgagactaatgaacatcccacctaaatccagtcctccccttggatctgcctttgtcctgcttgtgtatccaggcaacctcttttcaagttggtcaggctttggacaggtgagtgatttgctgtatgtgtttgtttctctgcgttacctgggggtgccttgattaaaatcgaactttattacatactgattctggaacaaaacagttagaaaaactttaaaaaaaaaaaaaaccgacaaagttacgaggccatcctgctatttatcttctgagttcccagcaatgactcaggcatcagagatgatgctgcagtggaaaacctgactctgtgtgtctgcaactgaatgttgtgcgagtaatttattaactgtctttctaaaggtttgctgcttttaagatgcactataattcgggatgtaatccttacattgcttttccaaggaagggaacaaaagtctagtgattagtatgccaactgccactactccttcaaaaggagccaggaccagcgacaagactcatgagaggactggctaaagtgaagtgtgcacagtgtgaagtttaatgctgttgtcaagaggcctaaacccacattttctcttttaatattttatgattgccatcaaagaagaagaaaaagaaggaacagacaaaggtttgaaaatgataagcctgttaagacaccaaaaactcctgtcccgtgaagctgcttgacatcctgtggagtagcataatcctctcaaaatgaggaagagctgcctgcaaagctttctcaagtccctatttggctacctacttctctacattatgccccatttaaactaggagctgtcttagaaatgacttcaaactgcttcactattgcttacagtttaggaggagtctcagatccagaaggagcaagaatcaagtttggtcctcaaatgactgtaaatagactaaagaacaaggtgttttttgtttttgtttttgttttctaagaataaagctgttcgttgtatcatgagttagtgtttcttccccaaactgaagactgtgttggaagtgcaatttctggtgagtcagtccacaatacaatgccctgtgtggagttggtattcatacaggaaatctgtgtgcacgaggcattgtgtgttgaaagtgtatgtttatagtactgcctgagccatctcatgaccccagcgtccaaaaccgatgctgtagaacagaacatatctgtacacaaatagtgtgtgcaaatagcatttgtacatagaaaagtctcattgtggcagattgagcataaattattcaactgacggtgcaaaaacattacttgcaaagaaaagtttatagtattttcctacactccaccctgggagatgatatttctatcaaatgaatatcagtgcattttaaatgtaatatgaaaacgatgctgccattttgtgaagaatacccacttggttgcagaggccaactttcatagctttgatttaatgttgtgacacggtgtatgcattttgctgtcaagcaatggataaacagctctgactttcattctcattccagtttattgacctcagataaaacactggcccttcttagaagcagaagtgtgcaccaagaccattcatttcaggtagactcacattcagtgccaagtgctcccatgggaataatcagacgcatatgttgcgaaagagtgaagggacttggacaaagaggggttttcctacagatggatgctcagtcttctaccaaaacatgtttggaggcagaactatgacctccccttaagtcctaacaatgtattttgtgtgtgcaaatcctgggatgcccgtttcacgctctgacataaagacatggcacctctagtgagtgatcaggaagattccatatgcatttgggagcttcaggtgcttgttagacacagtgagccattcaaggcaagcaccacctttgctagtgaggccaagagagcctgtgacaatttgacaatttgttccagaaccagtctgatgcaagtgcacctctaatatatgccttacaaactccagaggccatattcaaaacagggtcttctcagtgtatgcaaggggctgcagcccctcttctcttcctccccaggttgaacaatacggacagttttcacacatatctacctgtataaccctctgtacctctcataactggtcaacgactgtaacaggttacatcaggtgtttttctacatactttttacacagattctatgcgattaatgtaatttaattcaatgcatcattttattgtactagttcttaggcttgtccttatttttttctaagtgattgtggtttttctcgtggtttttattgtaaaaaatgaaaggctgttgatgcttattctctgtaactaagaatttttaccttttgggggaaaaaagcattgctatgaactaatgaattgaaacttcatttactcattgtaaatacactattgtgcaaaaaaagttttcactcaattgaattgctagtgttaactgaattttgtctagacaccatttctgttgatgaaataaagacatatcattatgcattgtaaactgaaaatctct

SEQ ID NO: 298158 - DNA, 541 bp, Homo sapiens
agcggccgccgccctcgccaccccgcctgcccactcccgccgccgccccgctctcgctttccccccggcctcccctcgccccttcccctcccccttcccggcgcactcggggggctgggaacgagctgccatgtgatgcgcgtcccctccgcgagctttcggtgacccacgaactgcccacctcgccggctgccgggagggggctgcgagccgggaagacgcggggaagaggaggcggaaaaggacgcaaagttctccggcgagcgcgttcattcacatagctcccagttttaacatttcgccacctactgaagacatcatttgggaccaagctgatgagcccttgaagcacagcagtgcagctgtctgcttcagaaagtgagggctccaggaatgaggagaatcttcaagaacttcctcgcactgtgacatgtctgatcccttgctcccatccctgcagcatgaacaagaaaccgctcctgcctcaactccaagggccagagcgagttggcacaccctccaagaggagcacctcgcttct

SEQ ID NO: 298159 - DNA, 419 bp, Homo sapiens
  misc_feature (341)..(341): n is a, c, g, or t
agcggccgccgccctcgccaccccgcctgcccactcccgccgccgccccgctctcgctttccccccggcctcccctcgccccttcccctcccccttcccggcgcactcggggggctgggaacgagctgccatgtgatgcgcgtcccctccgcgagctttcggtgacccacgaactgcccacctcgccggctgccgggagggggctgcgagccgggaagacgcggggaagaggaggcggaaaaggacgcaaagttctccggcgagtgcagctgtctgcttcagaaagtgagggctccaggaatgaggagaatcttcaagaacttccctccgccatctgctgnagcatggttcctggataccctttggcttccccattcccctggcaagcatggaaacataggtttggggtggttcttttg

SEQ ID NO: 298160 - DNA, 7374 bp, Homo sapiens
agcggccgccgccctcgccaccccgcctgcccactcccgccgccgccccgctctcgctttccccccggcctcccctcgccccttcccctcccccttcccggcgcactcggggggctgggaacgagctgccatgtgatgcgcgtcccctccgcgagctttcggtgacccacgaactgcccacctcgccggctgccgggagggggctgcgagccgggaagacgcggggaagaggaggcggaaaaggacgcaaagttctccggcgagtgcagctgtctgcttcagaaagtgagggctccaggaatgaggagaatcttcaagaacttcctcgcactgtgacatgtctgatcccttgctcccatccctgcagcatgaacaaggtggacactcactgacctgtcacaaggttgccccacaaaactttggggtccatgtctgaatggattgccagagccttctcatctctcccttcgcccagttccctgcatcctaagactcgaaggcagcacaggacctggaaaaattacatggtgtgaacggcatgtctgtggatgagaagcctgactcccccatgtatgtgtatgagtccacagtccactgcaccaacatcctcctgggcctcaatgaccagcggaaaaaggatattctctgtgacgtgactttgatcgtggagaggaaggagttccgggcccaccgggctgtgctggccgcatgcagtgaatatttttggcaggcgctggttggacagacaaaaaatgatttggtggtcagcttgcctgaggaggtcacagccaggggctttgggccgctgttacagtttgcctacactgccaagctgttactcagcagagaaaacatccgcgaggtcatccgctgtgctgagttcctgcgcatgcacaacctggaggactcctgcttcagcttcctgcagacccagctcctgaacagtgaggatggcctgtttgtgtgccggaaggatgctgcgtgccagcgcccacacgaggactgcgagaactctgcaggagaggaggaggatgaagaggaggagacgatggattcagagacggccaagatggcttgccccagggaccagatgcttccagagcccatcagctttgaggccgccgccatccccgtagcagagaaggaagaagccctgctgcccgagcctgacgtgcccacagacaccaaggagagctcagaaaaggacgcgttaacgcagtaccccagatacaagaaataccagcttgcatgtaccaagaatgtctataatgcatcatcacacagtacctcaggttttgcaagcacattccgggaagataactctagcaacagcctcaagccggggcttgccagggggcagattaaaagtgagccgcccagtgaagagaatgaggaagagagcatcacgctctgcctgtctggagatgagcctgacgccaaggacagagcgggggatgtcgagatggaccggaaacagcccagccctgcccctacccccacggccccagctggggccgcctgcctggagagatccaggagcgtggcctcgccctcctgcttaaggtctctgttcagcataacgaaaagtgtggagctgtctggcctgcccagtacatctcagcagcactttgccaggagtccagcctgcccttttgacaaggggatcactcagggtgaccttaaaactgactacacccctttcacagggaattatggacagccccacgtgggccagaaggaggtgtccaacttcaccatggggtcgcccctcagggggcctgggttggaggctctctgtaaacaggagggagagctggaccggaggagcgtgatcttctcctccagcgcttgtgaccaagtgagcacctcggtgcattcttattctggggtgagcagtttggacaaagacctctctgagccggtgccaaagggtctgtgggtgggagccggccagtccctccccagctcgcaggcctactcccacggtgggctgatggccgaccacttgccaggaaggatgcggcccaacaccagctgcccggtgccaatcaaagtctgccctcgctcaccccccttggagaccaggaccaggacttccagctcctgctcttcctattcctacgcggaggacgggagcgggggctcaccctgcagcctccctctctgtgagttctcctcctcgccctgttcccagggagccagattccttgccacagaacatcaggaaccaggcctgatgggagatggaatgtacaaccaagtgcggccccaaattaaatgtgagcagtcttatggaaccaactccagtgacgaatccggatcgttctcggaagcagacagtgagtcgtgtcctgtgcaggacaggggccaggaggtaaaacttccttttcctgtagatcaaatcacagatcttccaaggaacgatttccagatgatgattaaaatgcacaagctaacctcagaacagttagagtttattcatgatgtccgacggcgcagcaagaaccgcatcgcggcccagcgctgccgcaaaaggaaactggactgtattcagaatttagaatgtgaaatccgcaaattggtgtgtgagaaagagaaactgttgtcagagaggaatcaactgaaagcatgcatgggggaactgttggacaacttctcctgcctttcccaggaagtttgccgagacatccagagccccgagcagatccaggccctgcatcggtattgccctgtcctcagacccatggacttgcccacggcctccagtattaaccctgcgcccttgggtgctgagcagaacattgcggcctcccaatgcgcagtgggggaaaacgtgccctgctgcttggagccaggcgcggctccccccggacccccctgggcacccagcaacacctccgagaattgtacctctgggaggagactagaaggcactgacccgggaaccttctcagagagaggacctcctcttgaacccaggagccaaacagtgaccgtggacttctgccaggaaatgactgataagtgtacaactgacgaacagcccaggaaagattatacctagtgactcggctctgcctcccagtccgcacacctctcccatccaggcgttcttcagtcagcctgtggcactgttcatctgctgtcccgaagaaaccgagaacacatttggtgcacactacagcggtcttagcagcaatactgttccgaagtatcctctcctcttctcgagcaggagtgatagttaccttcacaatggtgctaccccttgcccaggcaaggaaagacagcagtgatgacactgtctgtctgtggctcaatttcagtcttcacagggatagactacaacacctctaggccccaaccacggattttttttctcagtggcccatgtcacaaaccctatctcaggaatttcttctgaatgttcaatttttttcattgaagacagcttctatacacatcaaagttttatagctagactgtacatattatatataatatatatataaaaaatatatatatatatatatatccatatgcaaaagtcctgcatgcctcaactttctcatcctaaaactggaaacttatttctcatttagaaacaggttccaacattcctcttcttttgtctctgatgctagaactagtttggtaactgttaacatggtcatttttcttgcttcacagttcaattttcaattcgtacttatttatggacaaaattcagtgttggaagctttttcccaaggttttatttcagatttctttttcgtttggtttggttttggcacctccaagtggtgtcatttgagcattgtaggtttgttttttgtttgtttggggggttttgtttgtttttgtttttgtttttgttttccttgcagatactgtacagtaatggtcaactttgccacttgcactgagttttgggtcaaacctattttcttaaatgaagttgtaacttcggtataactcaagtatactgtatattctttgcttttagttaaaaaagtaaaacattttagctaattaaaaagcactcaggtgataattatgtaggaaaaacaatcttgccaaataatgaattcatcctaggatgtgtagacaataatctgcttgaatatttttatatttcacctcctccccacctttccctaagcaaagtttaaacgcagatagagagttcagagttgatgctggatgttcagattcctaagtggggagagagtttggacatctcactcaaaagtacatcagaaaaacaggaatccgtgattttataccagaactcagcaggcattggctcctagaaatcaagttagaaagttttcacccagggagtaagtcccattcatttcaacacgtcctgaggcctcggcttgctcttggaagtggtgtgcagtaggacctgctcccctgaaggacggggccaaccagccactggctttcctgcccaggcttggcctcccaggacatctggcctgaggggatttgaatcacagccccgaaggtcctgccttcaccccattgggagagagcagggcatcctggcatctgcgatccatccctgacacaggctgacacattctttctcctttccttctccaaaggcttggagttttcttctgaggtttttctgccagtgtcttgtctgaaggcagacttcattctgaggctttggacaagctatcaccgggaaccctccctgtccccttcccgaatcacacacataccctaccctcacctgatgataattttctcttcttgctgcaaaactggttggcttgcaacccagagagagcagcttcccttggctctggggccgtgttggccccagccacgtttacaggaaggtgtgccccagaggaggaggaatcagctccctcgctccagtggccttgggtccgggtctcactgagcagcccgagggccactccagcccggctggggaagagagtcctgaacggtttgatgtggggatggggtggtgggcagtggggaatagatggttgactttgtttctttatttgtgccattgtttggacaatattaaagctgcatgtaaaaggggaaattagtatatgatgtaggctaaaagtgaaatcatagtaacatatgttttagtattattaacttttttctgtacaaatattagcactaaatgtttaaatatgtatgaatgccagaaatttgtcagttcatgcagtaggataaaaaaaaaaaaaaaaaaaaaaaggcttttctttttaaacagttccacttttaaaacctgcctctgggtttttgttttttcttgtttgtgtgtgtgtgtgtgtgtgtgtgtgtgtgtgtgtgtgtgtgtgtgtgtctgaaacagatcttgataaagctctgtgttggagctgctggtttttgttatggttgttggaatttcttggcctactaggacagttctgtgcttcaccatgaggtttgcctttgtggaaaactggtgacagtgagaatataaactcaatgtgaatcacgtgatacttcggcaggcgtgtgttacagtggagtcagctgacagtattttgctttttaactctattgttgcctttccaagtgacctctcctcttcttttaaaaaaagaacactttctgctcatatcataaccaggtccaacccagcttcttggcatgaggtttaccctggtaacaactcatgtgcaactggtagtcttgaccacattccatccatttcctcaggtttctgtggttcagtagcccagacctgtttggcagccatttctagcaggggcggggcctctttatttctctccaccctaactcagacctcaccttcctcccacccacccctgccttgcttttcttcctcttcccccaacctaacttctgccatgggaactggttaaaaacactgctctaaaaaccatcttccaatttcatagagatttctcacaagttatttcattcataatccaccatgaacagtgactagcttcgtgcagttgttcatgtgatgtgtgtgtgtcttttcctattcagaactatgtgcttgtcaaaattatttctgggttgattcaaagggaggacttgctggggaccagaatccaaacggcctcaagtggaattttaaaacctagcctgtctcttttccctgggatccctctgtcaaccccacgccttttaggaaaaagaaaagtgagtgaacagcaaggaagagtgtttgcacagtacagtaacatttggttgttcttaaggctcttttcttacaaaaataagagaccctccaaccacgggctgtttaggaggatgcctgcttgggtctccaaatggctggggtaggaatggttgttggggcagagccagtggaggtgagtgaccctgagactaatgaacatcccacctaaatccagtcctccccttggatctgcctttgtcctgcttgtgtatccaggcaacctcttttcaagttggtcaggctttggacaggtgagtgatttgctgtatgtgtttgtttctctgcgttacctgggggtgccttgattaaaatcgaactttattacatactgattctggaacaaaacagttagaaaaactttaaaaaaaaaaaaaaccgacaaagttacgaggccatcctgctatttatcttctgagttcccagcaatgactcaggcatcagagatgatgctgcagtggaaaacctgactctgtgtgtctgcaactgaatgttgtgcgagtaatttattaactgtctttctaaaggtttgctgcttttaagatgcactataattcgggatgtaatccttacattgcttttccaaggaagggaacaaaagtctagtgattagtatgccaactgccactactccttcaaaaggagccaggaccagcgacaagactcatgagaggactggctaaagtgaagtgtgcacagtgtgaagtttaatgctgttgtcaagaggcctaaacccacattttctcttttaatattttatgattgccatcaaagaagaagaaaaagaaggaacagacaaaggtttgaaaatgataagcctgttaagacaccaaaaactcctgtcccgtgaagctgcttgacatcctgtggagtagcataatcctctcaaaatgaggaagagctgcctgcaaagctttctcaagtccctatttggctacctacttctctacattatgccccatttaaactaggagctgtcttagaaatgacttcaaactgcttcactattgcttacagtttaggaggagtctcagatccagaaggagcaagaatcaagtttggtcctcaaatgactgtaaatagactaaagaacaaggtgttttttgtttttgtttttgttttctaagaataaagctgttcgttgtatcatg

SEQ ID NO: 298161 - DNA, 7467 bp, Homo sapiens
agcggccgccgccctcgccaccccgcctgcccactcccgccgccgccccgctctcgctttccccccggcctcccctcgccccttcccctcccccttcccggcgcactcggggggctgggaacgagctgccatgtgatgcgcgtcccctccgcgagctttcggtgacccacgaactgcccacctcgccggctgccgggagggggctgcgagccgggaagacgcggggaagaggaggcggaaaaggacgcaaagttctccggcgagcgcgttcattcacatagctcccagttttaacatttcgccacctactgaagacatcatttgggaccaagctgatgagcccttgaagcacagcagtgcagctgtctgcttcagaaagtgagggctccaggaatgaggagaatcttcaagaacttcctcgcactgtgacatgtctgatcccttgctcccatccctgcagcatgaacaaggtggacactcactgacctgtcacaaggttgccccacaaaactttggggtccatgtctgaatggattgccagagccttctcatctctcccttcgcccagttccctgcatcctaagactcgaaggcagcacaggacctggaaaaattacatggtgtgaacggcatgtctgtggatgagaagcctgactcccccatgtatgtgtatgagtccacagtccactgcaccaacatcctcctgggcctcaatgaccagcggaaaaaggatattctctgtgacgtgactttgatcgtggagaggaaggagttccgggcccaccgggctgtgctggccgcatgcagtgaatatttttggcaggcgctggttggacagacaaaaaatgatttggtggtcagcttgcctgaggaggtcacagccaggggctttgggccgctgttacagtttgcctacactgccaagctgttactcagcagagaaaacatccgcgaggtcatccgctgtgctgagttcctgcgcatgcacaacctggaggactcctgcttcagcttcctgcagacccagctcctgaacagtgaggatggcctgtttgtgtgccggaaggatgctgcgtgccagcgcccacacgaggactgcgagaactctgcaggagaggaggaggatgaagaggaggagacgatggattcagagacggccaagatggcttgccccagggaccagatgcttccagagcccatcagctttgaggccgccgccatccccgtagcagagaaggaagaagccctgctgcccgagcctgacgtgcccacagacaccaaggagagctcagaaaaggacgcgttaacgcagtaccccagatacaagaaataccagcttgcatgtaccaagaatgtctataatgcatcatcacacagtacctcaggttttgcaagcacattccgggaagataactctagcaacagcctcaagccggggcttgccagggggcagattaaaagtgagccgcccagtgaagagaatgaggaagagagcatcacgctctgcctgtctggagatgagcctgacgccaaggacagagcgggggatgtcgagatggaccggaaacagcccagccctgcccctacccccacggccccagctggggccgcctgcctggagagatccaggagcgtggcctcgccctcctgcttaaggtctctgttcagcataacgaaaagtgtggagctgtctggcctgcccagtacatctcagcagcactttgccaggagtccagcctgcccttttgacaaggggatcactcagggtgaccttaaaactgactacacccctttcacagggaattatggacagccccacgtgggccagaaggaggtgtccaacttcaccatggggtcgcccctcagggggcctgggttggaggctctctgtaaacaggagggagagctggaccggaggagcgtgatcttctcctccagcgcttgtgaccaagtgagcacctcggtgcattcttattctggggtgagcagtttggacaaagacctctctgagccggtgccaaagggtctgtgggtgggagccggccagtccctccccagctcgcaggcctactcccacggtgggctgatggccgaccacttgccaggaaggatgcggcccaacaccagctgcccggtgccaatcaaagtctgccctcgctcaccccccttggagaccaggaccaggacttccagctcctgctcttcctattcctacgcggaggacgggagcgggggctcaccctgcagcctccctctctgtgagttctcctcctcgccctgttcccagggagccagattccttgccacagaacatcaggaaccaggcctgatgggagatggaatgtacaaccaagtgcggccccaaattaaatgtgagcagtcttatggaaccaactccagtgacgaatccggatcgttctcggaagcagacagtgagtcgtgtcctgtgcaggacaggggccaggaggtaaaacttccttttcctgtagatcaaatcacagatcttccaaggaacgatttccagatgatgattaaaatgcacaagctaacctcagaacagttagagtttattcatgatgtccgacggcgcagcaagaaccgcatcgcggcccagcgctgccgcaaaaggaaactggactgtattcagaatttagaatgtgaaatccgcaaattggtgtgtgagaaagagaaactgttgtcagagaggaatcaactgaaagcatgcatgggggaactgttggacaacttctcctgcctttcccaggaagtttgccgagacatccagagccccgagcagatccaggccctgcatcggtattgccctgtcctcagacccatggacttgcccacggcctccagtattaaccctgcgcccttgggtgctgagcagaacattgcggcctcccaatgcgcagtgggggaaaacgtgccctgctgcttggagccaggcgcggctccccccggacccccctgggcacccagcaacacctccgagaattgtacctctgggaggagactagaaggcactgacccgggaaccttctcagagagaggacctcctcttgaacccaggagccaaacagtgaccgtggacttctgccaggaaatgactgataagtgtacaactgacgaacagcccaggaaagattatacctagtgactcggctctgcctcccagtccgcacacctctcccatccaggcgttcttcagtcagcctgtggcactgttcatctgctgtcccgaagaaaccgagaacacatttggtgcacactacagcggtcttagcagcaatactgttccgaagtatcctctcctcttctcgagcaggagtgatagttaccttcacaatggtgctaccccttgcccaggcaaggaaagacagcagtgatgacactgtctgtctgtggctcaatttcagtcttcacagggatagactacaacacctctaggccccaaccacggattttttttctcagtggcccatgtcacaaaccctatctcaggaatttcttctgaatgttcaatttttttcattgaagacagcttctatacacatcaaagttttatagctagactgtacatattatatataatatatatataaaaaatatatatatatatatatatccatatgcaaaagtcctgcatgcctcaactttctcatcctaaaactggaaacttatttctcatttagaaacaggttccaacattcctcttcttttgtctctgatgctagaactagtttggtaactgttaacatggtcatttttcttgcttcacagttcaattttcaattcgtacttatttatggacaaaattcagtgttggaagctttttcccaaggttttatttcagatttctttttcgtttggtttggttttggcacctccaagtggtgtcatttgagcattgtaggtttgttttttgtttgtttggggggttttgtttgtttttgtttttgtttttgttttccttgcagatactgtacagtaatggtcaactttgccacttgcactgagttttgggtcaaacctattttcttaaatgaagttgtaacttcggtataactcaagtatactgtatattctttgcttttagttaaaaaagtaaaacattttagctaattaaaaagcactcaggtgataattatgtaggaaaaacaatcttgccaaataatgaattcatcctaggatgtgtagacaataatctgcttgaatatttttatatttcacctcctccccacctttccctaagcaaagtttaaacgcagatagagagttcagagttgatgctggatgttcagattcctaagtggggagagagtttggacatctcactcaaaagtacatcagaaaaacaggaatccgtgattttataccagaactcagcaggcattggctcctagaaatcaagttagaaagttttcacccagggagtaagtcccattcatttcaacacgtcctgaggcctcggcttgctcttggaagtggtgtgcagtaggacctgctcccctgaaggacggggccaaccagccactggctttcctgcccaggcttggcctcccaggacatctggcctgaggggatttgaatcacagccccgaaggtcctgccttcaccccattgggagagagcagggcatcctggcatctgcgatccatccctgacacaggctgacacattctttctcctttccttctccaaaggcttggagttttcttctgaggtttttctgccagtgtcttgtctgaaggcagacttcattctgaggctttggacaagctatcaccgggaaccctccctgtccccttcccgaatcacacacataccctaccctcacctgatgataattttctcttcttgctgcaaaactggttggcttgcaacccagagagagcagcttcccttggctctggggccgtgttggccccagccacgtttacaggaaggtgtgccccagaggaggaggaatcagctccctcgctccagtggccttgggtccgggtctcactgagcagcccgagggccactccagcccggctggggaagagagtcctgaacggtttgatgtggggatggggtggtgggcagtggggaatagatggttgactttgtttctttatttgtgccattgtttggacaatattaaagctgcatgtaaaaggggaaattagtatatgatgtaggctaaaagtgaaatcatagtaacatatgttttagtattattaacttttttctgtacaaatattagcactaaatgtttaaatatgtatgaatgccagaaatttgtcagttcatgcagtaggataaaaaaaaaaaaaaaaaaaaaaaggcttttctttttaaacagttccacttttaaaacctgcctctgggtttttgttttttcttgtttgtgtgtgtgtgtgtgtgtgtgtgtgtgtgtgtgtgtgtgtgtgtgtgtctgaaacagatcttgataaagctctgtgttggagctgctggtttttgttatggttgttggaatttcttggcctactaggacagttctgtgcttcaccatgaggtttgcctttgtggaaaactggtgacagtgagaatataaactcaatgtgaatcacgtgatacttcggcaggcgtgtgttacagtggagtcagctgacagtattttgctttttaactctattgttgcctttccaagtgacctctcctcttcttttaaaaaaagaacactttctgctcatatcataaccaggtccaacccagcttcttggcatgaggtttaccctggtaacaactcatgtgcaactggtagtcttgaccacattccatccatttcctcaggtttctgtggttcagtagcccagacctgtttggcagccatttctagcaggggcggggcctctttatttctctccaccctaactcagacctcaccttcctcccacccacccctgccttgcttttcttcctcttcccccaacctaacttctgccatgggaactggttaaaaacactgctctaaaaaccatcttccaatttcatagagatttctcacaagttatttcattcataatccaccatgaacagtgactagcttcgtgcagttgttcatgtgatgtgtgtgtgtcttttcctattcagaactatgtgcttgtcaaaattatttctgggttgattcaaagggaggacttgctggggaccagaatccaaacggcctcaagtggaattttaaaacctagcctgtctcttttccctgggatccctctgtcaaccccacgccttttaggaaaaagaaaagtgagtgaacagcaaggaagagtgtttgcacagtacagtaacatttggttgttcttaaggctcttttcttacaaaaataagagaccctccaaccacgggctgtttaggaggatgcctgcttgggtctccaaatggctggggtaggaatggttgttggggcagagccagtggaggtgagtgaccctgagactaatgaacatcccacctaaatccagtcctccccttggatctgcctttgtcctgcttgtgtatccaggcaacctcttttcaagttggtcaggctttggacaggtgagtgatttgctgtatgtgtttgtttctctgcgttacctgggggtgccttgattaaaatcgaactttattacatactgattctggaacaaaacagttagaaaaactttaaaaaaaaaaaaaaccgacaaagttacgaggccatcctgctatttatcttctgagttcccagcaatgactcaggcatcagagatgatgctgcagtggaaaacctgactctgtgtgtctgcaactgaatgttgtgcgagtaatttattaactgtctttctaaaggtttgctgcttttaagatgcactataattcgggatgtaatccttacattgcttttccaaggaagggaacaaaagtctagtgattagtatgccaactgccactactccttcaaaaggagccaggaccagcgacaagactcatgagaggactggctaaagtgaagtgtgcacagtgtgaagtttaatgctgttgtcaagaggcctaaacccacattttctcttttaatattttatgattgccatcaaagaagaagaaaaagaaggaacagacaaaggtttgaaaatgataagcctgttaagacaccaaaaactcctgtcccgtgaagctgcttgacatcctgtggagtagcataatcctctcaaaatgaggaagagctgcctgcaaagctttctcaagtccctatttggctacctacttctctacattatgccccatttaaactaggagctgtcttagaaatgacttcaaactgcttcactattgcttacagtttaggaggagtctcagatccagaaggagcaagaatcaagtttggtcctcaaatgactgtaaatagactaaagaacaaggtgttttttgtttttgtttttgttttctaagaataaagctgttcgttgtatcatg

SEQ ID NO: 298162 - DNA, 7452 bp, Homo sapiens
agcggccgccgccctcgccaccccgcctgcccactcccgccgccgccccgctctcgctttccccccggcctcccctcgccccttcccctcccccttcccggcgcactcggggggctgggaacgagctgccatgtgatgcgcgtcccctccgcgagctttcggtgacccacgaactgcccacctcgccggctgccgggagggggctgcgagccgggaagacgcggggaagaggaggcggaaaaggacgcaaagttctccggcgagataagagtgttgctgttgatcatctttgcctgggaagttgaatgataaagccagaagaaagcatgctttctgatcatttgcagctgtctgcttcagaaagtgagggctccaggaatgaggagaatcttcaagaacttcctcgcactgtgacatgtctgatcccttgctcccatccctgcagcatgaacaaggtggacactcactgacctgtcacaaggttgccccacaaaactttggggtccatgtctgaatggattgccagagccttctcatctctcccttcgcccagttccctgcatcctaagactcgaaggcagcacaggacctggaaaaattacatggtgtgaacggcatgtctgtggatgagaagcctgactcccccatgtatgtgtatgagtccacagtccactgcaccaacatcctcctgggcctcaatgaccagcggaaaaaggatattctctgtgacgtgactttgatcgtggagaggaaggagttccgggcccaccgggctgtgctggccgcatgcagtgaatatttttggcaggcgctggttggacagacaaaaaatgatttggtggtcagcttgcctgaggaggtcacagccaggggctttgggccgctgttacagtttgcctacactgccaagctgttactcagcagagaaaacatccgcgaggtcatccgctgtgctgagttcctgcgcatgcacaacctggaggactcctgcttcagcttcctgcagacccagctcctgaacagtgaggatggcctgtttgtgtgccggaaggatgctgcgtgccagcgcccacacgaggactgcgagaactctgcaggagaggaggaggatgaagaggaggagacgatggattcagagacggccaagatggcttgccccagggaccagatgcttccagagcccatcagctttgaggccgccgccatccccgtagcagagaaggaagaagccctgctgcccgagcctgacgtgcccacagacaccaaggagagctcagaaaaggacgcgttaacgcagtaccccagatacaagaaataccagcttgcatgtaccaagaatgtctataatgcatcatcacacagtacctcaggttttgcaagcacattccgggaagataactctagcaacagcctcaagccggggcttgccagggggcagattaaaagtgagccgcccagtgaagagaatgaggaagagagcatcacgctctgcctgtctggagatgagcctgacgccaaggacagagcgggggatgtcgagatggaccggaaacagcccagccctgcccctacccccacggccccagctggggccgcctgcctggagagatccaggagcgtggcctcgccctcctgcttaaggtctctgttcagcataacgaaaagtgtggagctgtctggcctgcccagtacatctcagcagcactttgccaggagtccagcctgcccttttgacaaggggatcactcagggtgaccttaaaactgactacacccctttcacagggaattatggacagccccacgtgggccagaaggaggtgtccaacttcaccatggggtcgcccctcagggggcctgggttggaggctctctgtaaacaggagggagagctggaccggaggagcgtgatcttctcctccagcgcttgtgaccaagtgagcacctcggtgcattcttattctggggtgagcagtttggacaaagacctctctgagccggtgccaaagggtctgtgggtgggagccggccagtccctccccagctcgcaggcctactcccacggtgggctgatggccgaccacttgccaggaaggatgcggcccaacaccagctgcccggtgccaatcaaagtctgccctcgctcaccccccttggagaccaggaccaggacttccagctcctgctcttcctattcctacgcggaggacgggagcgggggctcaccctgcagcctccctctctgtgagttctcctcctcgccctgttcccagggagccagattccttgccacagaacatcaggaaccaggcctgatgggagatggaatgtacaaccaagtgcggccccaaattaaatgtgagcagtcttatggaaccaactccagtgacgaatccggatcgttctcggaagcagacagtgagtcgtgtcctgtgcaggacaggggccaggaggtaaaacttccttttcctgtagatcaaatcacagatcttccaaggaacgatttccagatgatgattaaaatgcacaagctaacctcagaacagttagagtttattcatgatgtccgacggcgcagcaagaaccgcatcgcggcccagcgctgccgcaaaaggaaactggactgtattcagaatttagaatgtgaaatccgcaaattggtgtgtgagaaagagaaactgttgtcagagaggaatcaactgaaagcatgcatgggggaactgttggacaacttctcctgcctttcccaggaagtttgccgagacatccagagccccgagcagatccaggccctgcatcggtattgccctgtcctcagacccatggacttgcccacggcctccagtattaaccctgcgcccttgggtgctgagcagaacattgcggcctcccaatgcgcagtgggggaaaacgtgccctgctgcttggagccaggcgcggctccccccggacccccctgggcacccagcaacacctccgagaattgtacctctgggaggagactagaaggcactgacccgggaaccttctcagagagaggacctcctcttgaacccaggagccaaacagtgaccgtggacttctgccaggaaatgactgataagtgtacaactgacgaacagcccaggaaagattatacctagtgactcggctctgcctcccagtccgcacacctctcccatccaggcgttcttcagtcagcctgtggcactgttcatctgctgtcccgaagaaaccgagaacacatttggtgcacactacagcggtcttagcagcaatactgttccgaagtatcctctcctcttctcgagcaggagtgatagttaccttcacaatggtgctaccccttgcccaggcaaggaaagacagcagtgatgacactgtctgtctgtggctcaatttcagtcttcacagggatagactacaacacctctaggccccaaccacggattttttttctcagtggcccatgtcacaaaccctatctcaggaatttcttctgaatgttcaatttttttcattgaagacagcttctatacacatcaaagttttatagctagactgtacatattatatataatatatatataaaaaatatatatatatatatatatccatatgcaaaagtcctgcatgcctcaactttctcatcctaaaactggaaacttatttctcatttagaaacaggttccaacattcctcttcttttgtctctgatgctagaactagtttggtaactgttaacatggtcatttttcttgcttcacagttcaattttcaattcgtacttatttatggacaaaattcagtgttggaagctttttcccaaggttttatttcagatttctttttcgtttggtttggttttggcacctccaagtggtgtcatttgagcattgtaggtttgttttttgtttgtttggggggttttgtttgtttttgtttttgtttttgttttccttgcagatactgtacagtaatggtcaactttgccacttgcactgagttttgggtcaaacctattttcttaaatgaagttgtaacttcggtataactcaagtatactgtatattctttgcttttagttaaaaaagtaaaacattttagctaattaaaaagcactcaggtgataattatgtaggaaaaacaatcttgccaaataatgaattcatcctaggatgtgtagacaataatctgcttgaatatttttatatttcacctcctccccacctttccctaagcaaagtttaaacgcagatagagagttcagagttgatgctggatgttcagattcctaagtggggagagagtttggacatctcactcaaaagtacatcagaaaaacaggaatccgtgattttataccagaactcagcaggcattggctcctagaaatcaagttagaaagttttcacccagggagtaagtcccattcatttcaacacgtcctgaggcctcggcttgctcttggaagtggtgtgcagtaggacctgctcccctgaaggacggggccaaccagccactggctttcctgcccaggcttggcctcccaggacatctggcctgaggggatttgaatcacagccccgaaggtcctgccttcaccccattgggagagagcagggcatcctggcatctgcgatccatccctgacacaggctgacacattctttctcctttccttctccaaaggcttggagttttcttctgaggtttttctgccagtgtcttgtctgaaggcagacttcattctgaggctttggacaagctatcaccgggaaccctccctgtccccttcccgaatcacacacataccctaccctcacctgatgataattttctcttcttgctgcaaaactggttggcttgcaacccagagagagcagcttcccttggctctggggccgtgttggccccagccacgtttacaggaaggtgtgccccagaggaggaggaatcagctccctcgctccagtggccttgggtccgggtctcactgagcagcccgagggccactccagcccggctggggaagagagtcctgaacggtttgatgtggggatggggtggtgggcagtggggaatagatggttgactttgtttctttatttgtgccattgtttggacaatattaaagctgcatgtaaaaggggaaattagtatatgatgtaggctaaaagtgaaatcatagtaacatatgttttagtattattaacttttttctgtacaaatattagcactaaatgtttaaatatgtatgaatgccagaaatttgtcagttcatgcagtaggataaaaaaaaaaaaaaaaaaaaaaaggcttttctttttaaacagttccacttttaaaacctgcctctgggtttttgttttttcttgtttgtgtgtgtgtgtgtgtgtgtgtgtgtgtgtgtgtgtgtgtgtgtgtgtctgaaacagatcttgataaagctctgtgttggagctgctggtttttgttatggttgttggaatttcttggcctactaggacagttctgtgcttcaccatgaggtttgcctttgtggaaaactggtgacagtgagaatataaactcaatgtgaatcacgtgatacttcggcaggcgtgtgttacagtggagtcagctgacagtattttgctttttaactctattgttgcctttccaagtgacctctcctcttcttttaaaaaaagaacactttctgctcatatcataaccaggtccaacccagcttcttggcatgaggtttaccctggtaacaactcatgtgcaactggtagtcttgaccacattccatccatttcctcaggtttctgtggttcagtagcccagacctgtttggcagccatttctagcaggggcggggcctctttatttctctccaccctaactcagacctcaccttcctcccacccacccctgccttgcttttcttcctcttcccccaacctaacttctgccatgggaactggttaaaaacactgctctaaaaaccatcttccaatttcatagagatttctcacaagttatttcattcataatccaccatgaacagtgactagcttcgtgcagttgttcatgtgatgtgtgtgtgtcttttcctattcagaactatgtgcttgtcaaaattatttctgggttgattcaaagggaggacttgctggggaccagaatccaaacggcctcaagtggaattttaaaacctagcctgtctcttttccctgggatccctctgtcaaccccacgccttttaggaaaaagaaaagtgagtgaacagcaaggaagagtgtttgcacagtacagtaacatttggttgttcttaaggctcttttcttacaaaaataagagaccctccaaccacgggctgtttaggaggatgcctgcttgggtctccaaatggctggggtaggaatggttgttggggcagagccagtggaggtgagtgaccctgagactaatgaacatcccacctaaatccagtcctccccttggatctgcctttgtcctgcttgtgtatccaggcaacctcttttcaagttggtcaggctttggacaggtgagtgatttgctgtatgtgtttgtttctctgcgttacctgggggtgccttgattaaaatcgaactttattacatactgattctggaacaaaacagttagaaaaactttaaaaaaaaaaaaaaccgacaaagttacgaggccatcctgctatttatcttctgagttcccagcaatgactcaggcatcagagatgatgctgcagtggaaaacctgactctgtgtgtctgcaactgaatgttgtgcgagtaatttattaactgtctttctaaaggtttgctgcttttaagatgcactataattcgggatgtaatccttacattgcttttccaaggaagggaacaaaagtctagtgattagtatgccaactgccactactccttcaaaaggagccaggaccagcgacaagactcatgagaggactggctaaagtgaagtgtgcacagtgtgaagtttaatgctgttgtcaagaggcctaaacccacattttctcttttaatattttatgattgccatcaaagaagaagaaaaagaaggaacagacaaaggtttgaaaatgataagcctgttaagacaccaaaaactcctgtcccgtgaagctgcttgacatcctgtggagtagcataatcctctcaaaatgaggaagagctgcctgcaaagctttctcaagtccctatttggctacctacttctctacattatgccccatttaaactaggagctgtcttagaaatgacttcaaactgcttcactattgcttacagtttaggaggagtctcagatccagaaggagcaagaatcaagtttggtcctcaaatgactgtaaatagactaaagaacaaggtgttttttgtttttgtttttgttttctaagaataaagctgttcgttgtatcatg

SEQ ID NO: 298163 - DNA, 7379 bp, Homo sapiens
caccaaacaaagaccacactgttgacagcgttgggttccagtagcggtaaactaccaaggggctggtttacagaaaatgagtttgctctgtgatgtcatacaagtttgctttgtcctgacgccaacatgacactgaggcagcagaggagggagaacaggaaaattggaaccgtactcttagttaatggtttccagagattatttagcaggacttgaacagagggaggaaaatattgtgaaggattgctgcgaggtgtaccataattgcgtgcagctgtctgcttcagaaagtgagggctccaggaatgaggagaatcttcaagaacttcctcgcactgtgacatgtctgatcccttgctcccatccctgcagcatgaacaaggtggacactcactgacctgtcacaaggttgccccacaaaactttggggtccatgtctgaatggattgccagagccttctcatctctcccttcgcccagttccctgcatcctaagactcgaaggcagcacaggacctggaaaaattacatggtgtgaacggcatgtctgtggatgagaagcctgactcccccatgtatgtgtatgagtccacagtccactgcaccaacatcctcctgggcctcaatgaccagcggaaaaaggatattctctgtgacgtgactttgatcgtggagaggaaggagttccgggcccaccgggctgtgctggccgcatgcagtgaatatttttggcaggcgctggttggacagacaaaaaatgatttggtggtcagcttgcctgaggaggtcacagccaggggctttgggccgctgttacagtttgcctacactgccaagctgttactcagcagagaaaacatccgcgaggtcatccgctgtgctgagttcctgcgcatgcacaacctggaggactcctgcttcagcttcctgcagacccagctcctgaacagtgaggatggcctgtttgtgtgccggaaggatgctgcgtgccagcgcccacacgaggactgcgagaactctgcaggagaggaggaggatgaagaggaggagacgatggattcagagacggccaagatggcttgccccagggaccagatgcttccagagcccatcagctttgaggccgccgccatccccgtagcagagaaggaagaagccctgctgcccgagcctgacgtgcccacagacaccaaggagagctcagaaaaggacgcgttaacgcagtaccccagatacaagaaataccagcttgcatgtaccaagaatgtctataatgcatcatcacacagtacctcaggttttgcaagcacattccgggaagataactctagcaacagcctcaagccggggcttgccagggggcagattaaaagtgagccgcccagtgaagagaatgaggaagagagcatcacgctctgcctgtctggagatgagcctgacgccaaggacagagcgggggatgtcgagatggaccggaaacagcccagccctgcccctacccccacggccccagctggggccgcctgcctggagagatccaggagcgtggcctcgccctcctgcttaaggtctctgttcagcataacgaaaagtgtggagctgtctggcctgcccagtacatctcagcagcactttgccaggagtccagcctgcccttttgacaaggggatcactcagggtgaccttaaaactgactacacccctttcacagggaattatggacagccccacgtgggccagaaggaggtgtccaacttcaccatggggtcgcccctcagggggcctgggttggaggctctctgtaaacaggagggagagctggaccggaggagcgtgatcttctcctccagcgcttgtgaccaagtgagcacctcggtgcattcttattctggggtgagcagtttggacaaagacctctctgagccggtgccaaagggtctgtgggtgggagccggccagtccctccccagctcgcaggcctactcccacggtgggctgatggccgaccacttgccaggaaggatgcggcccaacaccagctgcccggtgccaatcaaagtctgccctcgctcaccccccttggagaccaggaccaggacttccagctcctgctcttcctattcctacgcggaggacgggagcgggggctcaccctgcagcctccctctctgtgagttctcctcctcgccctgttcccagggagccagattccttgccacagaacatcaggaaccaggcctgatgggagatggaatgtacaaccaagtgcggccccaaattaaatgtgagcagtcttatggaaccaactccagtgacgaatccggatcgttctcggaagcagacagtgagtcgtgtcctgtgcaggacaggggccaggaggtaaaacttccttttcctgtagatcaaatcacagatcttccaaggaacgatttccagatgatgattaaaatgcacaagctaacctcagaacagttagagtttattcatgatgtccgacggcgcagcaagaaccgcatcgcggcccagcgctgccgcaaaaggaaactggactgtattcagaatttagaatgtgaaatccgcaaattggtgtgtgagaaagagaaactgttgtcagagaggaatcaactgaaagcatgcatgggggaactgttggacaacttctcctgcctttcccaggaagtttgccgagacatccagagccccgagcagatccaggccctgcatcggtattgccctgtcctcagacccatggacttgcccacggcctccagtattaaccctgcgcccttgggtgctgagcagaacattgcggcctcccaatgcgcagtgggggaaaacgtgccctgctgcttggagccaggcgcggctccccccggacccccctgggcacccagcaacacctccgagaattgtacctctgggaggagactagaaggcactgacccgggaaccttctcagagagaggacctcctcttgaacccaggagccaaacagtgaccgtggacttctgccaggaaatgactgataagtgtacaactgacgaacagcccaggaaagattatacctagtgactcggctctgcctcccagtccgcacacctctcccatccaggcgttcttcagtcagcctgtggcactgttcatctgctgtcccgaagaaaccgagaacacatttggtgcacactacagcggtcttagcagcaatactgttccgaagtatcctctcctcttctcgagcaggagtgatagttaccttcacaatggtgctaccccttgcccaggcaaggaaagacagcagtgatgacactgtctgtctgtggctcaatttcagtcttcacagggatagactacaacacctctaggccccaaccacggattttttttctcagtggcccatgtcacaaaccctatctcaggaatttcttctgaatgttcaatttttttcattgaagacagcttctatacacatcaaagttttatagctagactgtacatattatatataatatatatataaaaaatatatatatatatatatatccatatgcaaaagtcctgcatgcctcaactttctcatcctaaaactggaaacttatttctcatttagaaacaggttccaacattcctcttcttttgtctctgatgctagaactagtttggtaactgttaacatggtcatttttcttgcttcacagttcaattttcaattcgtacttatttatggacaaaattcagtgttggaagctttttcccaaggttttatttcagatttctttttcgtttggtttggttttggcacctccaagtggtgtcatttgagcattgtaggtttgttttttgtttgtttggggggttttgtttgtttttgtttttgtttttgttttccttgcagatactgtacagtaatggtcaactttgccacttgcactgagttttgggtcaaacctattttcttaaatgaagttgtaacttcggtataactcaagtatactgtatattctttgcttttagttaaaaaagtaaaacattttagctaattaaaaagcactcaggtgataattatgtaggaaaaacaatcttgccaaataatgaattcatcctaggatgtgtagacaataatctgcttgaatatttttatatttcacctcctccccacctttccctaagcaaagtttaaacgcagatagagagttcagagttgatgctggatgttcagattcctaagtggggagagagtttggacatctcactcaaaagtacatcagaaaaacaggaatccgtgattttataccagaactcagcaggcattggctcctagaaatcaagttagaaagttttcacccagggagtaagtcccattcatttcaacacgtcctgaggcctcggcttgctcttggaagtggtgtgcagtaggacctgctcccctgaaggacggggccaaccagccactggctttcctgcccaggcttggcctcccaggacatctggcctgaggggatttgaatcacagccccgaaggtcctgccttcaccccattgggagagagcagggcatcctggcatctgcgatccatccctgacacaggctgacacattctttctcctttccttctccaaaggcttggagttttcttctgaggtttttctgccagtgtcttgtctgaaggcagacttcattctgaggctttggacaagctatcaccgggaaccctccctgtccccttcccgaatcacacacataccctaccctcacctgatgataattttctcttcttgctgcaaaactggttggcttgcaacccagagagagcagcttcccttggctctggggccgtgttggccccagccacgtttacaggaaggtgtgccccagaggaggaggaatcagctccctcgctccagtggccttgggtccgggtctcactgagcagcccgagggccactccagcccggctggggaagagagtcctgaacggtttgatgtggggatggggtggtgggcagtggggaatagatggttgactttgtttctttatttgtgccattgtttggacaatattaaagctgcatgtaaaaggggaaattagtatatgatgtaggctaaaagtgaaatcatagtaacatatgttttagtattattaacttttttctgtacaaatattagcactaaatgtttaaatatgtatgaatgccagaaatttgtcagttcatgcagtaggataaaaaaaaaaaaaaaaaaaaaaaggcttttctttttaaacagttccacttttaaaacctgcctctgggtttttgttttttcttgtttgtgtgtgtgtgtgtgtgtgtgtgtgtgtgtgtgtgtgtgtgtgtgtgtctgaaacagatcttgataaagctctgtgttggagctgctggtttttgttatggttgttggaatttcttggcctactaggacagttctgtgcttcaccatgaggtttgcctttgtggaaaactggtgacagtgagaatataaactcaatgtgaatcacgtgatacttcggcaggcgtgtgttacagtggagtcagctgacagtattttgctttttaactctattgttgcctttccaagtgacctctcctcttcttttaaaaaaagaacactttctgctcatatcataaccaggtccaacccagcttcttggcatgaggtttaccctggtaacaactcatgtgcaactggtagtcttgaccacattccatccatttcctcaggtttctgtggttcagtagcccagacctgtttggcagccatttctagcaggggcggggcctctttatttctctccaccctaactcagacctcaccttcctcccacccacccctgccttgcttttcttcctcttcccccaacctaacttctgccatgggaactggttaaaaacactgctctaaaaaccatcttccaatttcatagagatttctcacaagttatttcattcataatccaccatgaacagtgactagcttcgtgcagttgttcatgtgatgtgtgtgtgtcttttcctattcagaactatgtgcttgtcaaaattatttctgggttgattcaaagggaggacttgctggggaccagaatccaaacggcctcaagtggaattttaaaacctagcctgtctcttttccctgggatccctctgtcaaccccacgccttttaggaaaaagaaaagtgagtgaacagcaaggaagagtgtttgcacagtacagtaacatttggttgttcttaaggctcttttcttacaaaaataagagaccctccaaccacgggctgtttaggaggatgcctgcttgggtctccaaatggctggggtaggaatggttgttggggcagagccagtggaggtgagtgaccctgagactaatgaacatcccacctaaatccagtcctccccttggatctgcctttgtcctgcttgtgtatccaggcaacctcttttcaagttggtcaggctttggacaggtgagtgatttgctgtatgtgtttgtttctctgcgttacctgggggtgccttgattaaaatcgaactttattacatactgattctggaacaaaacagttagaaaaactttaaaaaaaaaaaaaaccgacaaagttacgaggccatcctgctatttatcttctgagttcccagcaatgactcaggcatcagagatgatgctgcagtggaaaacctgactctgtgtgtctgcaactgaatgttgtgcgagtaatttattaactgtctttctaaaggtttgctgcttttaagatgcactataattcgggatgtaatccttacattgcttttccaaggaagggaacaaaagtctagtgattagtatgccaactgccactactccttcaaaaggagccaggaccagcgacaagactcatgagaggactggctaaagtgaagtgtgcacagtgtgaagtttaatgctgttgtcaagaggcctaaacccacattttctcttttaatattttatgattgccatcaaagaagaagaaaaagaaggaacagacaaaggtttgaaaatgataagcctgttaagacaccaaaaactcctgtcccgtgaagctgcttgacatcctgtggagtagcataatcctctcaaaatgaggaagagctgcctgcaaagctttctcaagtccctatttggctacctacttctctacattatgccccatttaaactaggagctgtcttagaaatgacttcaaactgcttcactattgcttacagtttaggaggagtctcagatccagaaggagcaagaatcaagtttggtcctcaaatgactgtaaatagactaaagaacaaggtgttttttgtttttgtttttgttttctaagaataaagctgttcgttgtatcatg

SEQ ID NO: 298164 - DNA, 1342 bp, Homo sapiens
agcggccgccgccctcgccaccccgcctgcccactcccgccgccgccccgctctcgctttccccccggcctcccctcgccccttcccctcccccttcccggcgcactcggggggctgggaacgagctgccatgtgatgcgcgtcccctccgcgagctttcggtgacccacgaactgcccacctcgccggctgccgggagggggctgcgagccgggaagacgcggggaagaggaggcggaaaaggacgcaaagttctccggcgagtgcagctgtctgcttcagaaagtgagggctccaggaatgaggagaatcttcaagaacttcctcgcactgtgacatgtctgatcccttgctcccatccctgcagcatgaacaaggtggacactcactgacctgtcacaaggttgccccacaaaactttggggtccatgtctgaatggattgccagagccttctcatctctcccttcgcccagttccctgcatcctaagactcgaaggcagcacaggacctggaaaaattacatggtgtgaacggcatgtctgtggatgagaagcctgactcccccatgtatgtgtatgagtccacagtccactgcaccaacatcctcctgggcctcaatgaccagcggaaaaaggatattctctgtgacgtgactttgatcgtggagaggaaggagttccgggcccaccgggctgtgctggccgcatgcagtgaatatttttggcaggcgctggttggacagacaaaaaatgatttggtggtcagcttgcctgaggaggtacagtaatttggtttgtgtgattgttaatgaatgtttattgacttacagaaaactggctgactaggagctagaagatgtactaggtgccatgtccccactcaggagttgatgtccaagtcacatgttaggtctgtggcatagtcagtttctatttgatacacttaaagtctcagaggcacagaatgtgaatatctttcttgaagggaactgaacctcacctgtggctcagtcacttgtagtttctagttcacttacccttcaggttttgagtggttcagcctaagtttggcacagtcctagatgtgggatctgaatcattgctatgatttctgtctttcagatggtgtaaggatcactagatttcccttgagagtaaaagatcgaaagcattcacagcaccttctttgcttgggggaaaaataaaagcaactagtaattttcaccattaattcagtaagattctaagaagtgtaaacttgcttttctcaccgttgttgaaaacagcccactcaggtttcttaatcacatcagtgaatacggttattttggcactttggg

SEQ ID NO: 298165 - DNA, 999 bp, Homo sapiens
agcggccgccgccctcgccaccccgcctgcccactcccgccgccgccccgctctcgctttccccccggcctcccctcgccccttcccctcccccttcccggcgcactcggggggctgggaacgagctgccatgtgatgcgcgtcccctccgcgagctttcggtgacccacgaactgcccacctcgccggctgccgggagggggctgcgagccgggaagacgcggggaagaggaggcggaaaaggacgcaaagttctccggcgagtgcagctgtctgcttcagaaagtgagggctccaggaatgaggagaatcttcaagaacttcctcgcactgtgacatgtctgatcccttgctcccatccctgcagcatgaacaaggtggacactcactgacctgtcacaaggttgccccacaaaactttggggtccatgtctgaatggattgccagagccttctcatctctcccttcgcccagttccctgcatcctaagactcgaaggcagcacaggacctggaaaaattacatggtgtgaacggcatgtctgtggatgagaagcctgactcccccatgtatgtgtatgagtccacagtccactgcaccaacatcctcctgggcctcaatgaccagcggaaaaaggatattctctgtgacgtgactttgatcgtggagaggaaggagttccgggcccaccgggctgtgctggccgcatgcagtgaatatttttggcaggcgctggttggacagacaaaaaatgatttggtggtcagcttgcctgaggagatggtgtaaggatcactagatttcccttgagagtaaaagatcgaaagcattcacagcaccttctttgcttgggggaaaaataaaagcaactagtaattttcaccattaattcagtaagattctaagaagtgtaaacttgcttttctcaccgttgttgaaaacagcccactcaggtttcttaatcacatcagtgaatacggttattttggcactttggg

SEQ ID NO: 298166 - DNA, 2341 bp, Homo sapiens
cgggctcacaactgtctgctgcgcccgaaaaacaagtcggtgcgctggggacccggggccggggccgccttactccggcctagccccgcggccctcggtgcgggctccagggcatgctcgggaccccccgcggctccagcccagacgccccggcctcaggtctcggcccccgcttggggccccggccgtgcggccggagggagcggccggatggagcggaggatgaaagccggatacttggaccagcaagtgccctacaccttcagcagcaaatcgcccggaaatgggagcttgcgcgaagcgctgatcggcccgctggggaagctcatggacccgggctccctgccgcccctcgactctgaagatctcttccaggatctaagtcacttccaggagacgtggctcgctgaagctcaggtaccagacagtgatgagcagtttgttcctgatttccattcagaaaacctagctttccacagccccaccaccaggatcaagaaggagccccagagtccccgcacagacccggccctgtcctgcagcaggaagccgccactcccctaccaccatggcgagcagtgcctttactccagtgcctatgacccccccagacaaatcgccatcaagtcccctgcccctggtgcccttggacagtcgcccctacagccctttccccgggcagagcaacggaatttcctgagatcctctggcacctcccagccccaccctggccatgggtacctcggggaacatagctccgtcttccagcagcccctggacatttgccactccttcacatctcagggagggggccgggaacccctcccagccccctaccaacaccagctgtcggagccctgcccaccctatccccagcagagctttaagcaagaataccatgatcccctgtatgaacaggcgggccagccagccgtggaccagggtggggtcaatgggcacaggtacccaggggcgggggtggtgatcaaacaggaacagacggacttcgcctacgactcagatgtcaccgggtgcgcatcaatgtacctccacacagagggcttctctgggccctctccaggtgacggggccatgggctatggctatgagaaacctctgcgaccattcccagatgatgtctgcgttgtccctgagaaatttgaaggagacatcaagcaggaaggggtcggtgcatttcgagaggggccgccctaccagcgccggggtgccctgcagctgtggcaatttctggtggccttgctggatgacccaacaaatgcccatttcattgcctggacgggccggggaatggagttcaagctcattgagcctgaggaggtcgccaggctctggggcatccagaagaaccggccagccatgaattacgacaagctgagccgctcgctccgatactattatgagaaaggcatcatgcagaaggtggctggtgagcgttacgtgtacaagtttgtgtgtgagcccgaggccctcttctctttggccttcccggacaatcagcgtccagctctcaaggctgagtttgaccggcctgtcagtgaggaggacacagtccctttgtcccacttggatgagagccccgcctacctcccagagctggctggccccgcccagccatttggccccaagggtggctactcttactagcccccagcggctgttccccctgccgcaggtgggtgctgccctgtgtacatataaatgaatctggtgttggggaaaccttcatctgaaacccacagatgtctctggggcagatccccactgtcctaccagttgccctagcccagactctgagctgctcaccggagtcattgggaaggaaaagtggagaaatggcaagtctagagtctcagaaactcccctgggggtttcacctgggccctggaggaattcagctcagcttcttcctaggtccaagccccccacaccttttccccaaccacagagaacaagagtttgttctgttctgggggacagagaaggcgcttcccaacttcatactggcaggagggtgaggaggttcactgagctccccagatctcccactgcggggagacagaagcctggactctgccccacgctgtggccctggagggtcccggtttgtcagttcttggtgctctgtgttcccagaggcaggcggaggttgaagaaaggaacctgggatgaggggtgctgggtataagcagagagggatgggttcctgctccaagggaccctttgcctttcttctgccctttcctaggcccaggcctgggtttgtacttccacctccaccacatctgccagaccttaataaaggcccccacttctcccatta

SEQ ID NO: 298167 - DNA, 390 bp, Homo sapiens
gaacaaactcttgttctctgtggttggggaaaaggtgtgggggacagagaaggcgcttcccaacttcatactggcaggagggtgaggaggttcactgagctccccagatctcccactgcggggagacagaagcctggactctgccccacgctgtggccctggagggtcccggtttgtcagttcttggtgctctgtgttcccagaggcaggcggaggttgaagaaaggaacctgggatgaggggtgctgggtataagcagagagggatgggttcctgctccaagggaccctttgcctttcttctgccctttcctaggcccaggcctgggtttgtacttccacctccaccacatctgccagaccttaataaaggcccccacttctcccatta

SEQ ID NO: 298168 - DNA, 309 bp, Homo sapiens
cgggctcacaactgtctgctgcgcccgaaaaacaagtcggtgcgctggggacccggggccggggccgccttactccggcctagccccgcggccctcggtgcgggctccagggcatgctcgggaccccccgcggctccagcccagacgccccggcctcaggtctcggcccccgcttggggccccggccgtgcggccggagggagcggccggatggagcggaggatgaaagccggatacttggaccagcaagtgccctacaccttcagcagcgtgagcgccgcgccggcctccacgcccgccccgccccgc

SEQ ID NO: 298169 - DNA, 2209 bp, Homo sapiens
tgcgaacgcagccccctcccccaccaggtctcggcccccgcttggggccccggccgtgcggccggagggagcggccggatggagcggaggatgaaagccggatacttggaccagcaagtgccctacaccttcagcagcaaatcgcccggaaatgggagcttgcgcgaagcgctgatcggcccgctggggaagctcatggacccgggctccctgccgcccctcgactctgaagatctcttccaggatctaagtcacttccaggagacgtggctcgctgaagctcaggtaccagacagtgatgagcagtttgttcctgatttccattcagaaaacctagctttccacagccccaccaccaggatcaagaaggagccccagagtccccgcacagacccggccctgtcctgcagcaggaagccgccactcccctaccaccatggcgagcagtgcctttactccagtgcctatgacccccccagacaaatcgccatcaagtcccctgcccctggtgcccttggacagtcgcccctacagccctttccccgggcagagcaacggaatttcctgagatcctctggcacctcccagccccaccctggccatgggtacctcggggaacatagctccgtcttccagcagcccctggacatttgccactccttcacatctcagggagggggccgggaacccctcccagccccctaccaacaccagctgtcggagccctgcccaccctatccccagcagagctttaagcaagaataccatgatcccctgtatgaacaggcgggccagccagccgtggaccagggtggggtcaatgggcacaggtacccaggggcgggggtggtgatcaaacaggaacagacggacttcgcctacgactcagatgtcaccgggtgcgcatcaatgtacctccacacagagggcttctctgggccctctccaggtgacggggccatgggctatggctatgagaaacctctgcgaccattcccagatgatgtctgcgttgtccctgagaaatttgaaggagacatcaagcaggaaggggtcggtgcatttcgagaggggccgccctaccagcgccggggtgccctgcagctgtggcaatttctggtggccttgctggatgacccaacaaatgcccatttcattgcctggacgggccggggaatggagttcaagctcattgagcctgaggaggtcgccaggctctggggcatccagaagaaccggccagccatgaattacgacaagctgagccgctcgctccgatactattatgagaaaggcatcatgcagaaggtggctggtgagcgttacgtgtacaagtttgtgtgtgagcccgaggccctcttctctttggccttcccggacaatcagcgtccagctctcaaggctgagtttgaccggcctgtcagtgaggaggacacagtccctttgtcccacttggatgagagccccgcctacctcccagagctggctggccccgcccagccatttggccccaagggtggctactcttactagcccccagcggctgttccccctgccgcaggtgggtgctgccctgtgtacatataaatgaatctggtgttggggaaaccttcatctgaaacccacagatgtctctggggcagatccccactgtcctaccagttgccctagcccagactctgagctgctcaccggagtcattgggaaggaaaagtggagaaatggcaagtctagagtctcagaaactcccctgggggtttcacctgggccctggaggaattcagctcagcttcttcctaggtccaagccccccacaccttttccccaaccacagagaacaagagtttgttctgttctgggggacagagaaggcgcttcccaacttcatactggcaggagggtgaggaggttcactgagctccccagatctcccactgcggggagacagaagcctggactctgccccacgctgtggccctggagggtcccggtttgtcagttcttggtgctctgtgttcccagaggcaggcggaggttgaagaaaggaacctgggatgaggggtgctgggtataagcagagagggatgggttcctgctccaagggaccctttgcctttcttctgccctttcctaggcccaggcctgggtttgtacttccacctccaccacatctgccagaccttaataaaggcccccacttctcccatta

SEQ ID NO: 298170 - DNA, 2266 bp, Homo sapiens
acacacacacgttcttatgtaaccgagcccgggtaaagcagggctgcagaaagcagaaacggcgagcccggctcctgggagcaggtctcggcccccgcttggggccccggccgtgcggccggagggagcggccggatggagcggaggatgaaagccggatacttggaccagcaagtgccctacaccttcagcagcaaatcgcccggaaatgggagcttgcgcgaagcgctgatcggcccgctggggaagctcatggacccgggctccctgccgcccctcgactctgaagatctcttccaggatctaagtcacttccaggagacgtggctcgctgaagctcaggtaccagacagtgatgagcagtttgttcctgatttccattcagaaaacctagctttccacagccccaccaccaggatcaagaaggagccccagagtccccgcacagacccggccctgtcctgcagcaggaagccgccactcccctaccaccatggcgagcagtgcctttactccagtgcctatgacccccccagacaaatcgccatcaagtcccctgcccctggtgcccttggacagtcgcccctacagccctttccccgggcagagcaacggaatttcctgagatcctctggcacctcccagccccaccctggccatgggtacctcggggaacatagctccgtcttccagcagcccctggacatttgccactccttcacatctcagggagggggccgggaacccctcccagccccctaccaacaccagctgtcggagccctgcccaccctatccccagcagagctttaagcaagaataccatgatcccctgtatgaacaggcgggccagccagccgtggaccagggtggggtcaatgggcacaggtacccaggggcgggggtggtgatcaaacaggaacagacggacttcgcctacgactcagatgtcaccgggtgcgcatcaatgtacctccacacagagggcttctctgggccctctccaggtgacggggccatgggctatggctatgagaaacctctgcgaccattcccagatgatgtctgcgttgtccctgagaaatttgaaggagacatcaagcaggaaggggtcggtgcatttcgagaggggccgccctaccagcgccggggtgccctgcagctgtggcaatttctggtggccttgctggatgacccaacaaatgcccatttcattgcctggacgggccggggaatggagttcaagctcattgagcctgaggaggtcgccaggctctggggcatccagaagaaccggccagccatgaattacgacaagctgagccgctcgctccgatactattatgagaaaggcatcatgcagaaggtggctggtgagcgttacgtgtacaagtttgtgtgtgagcccgaggccctcttctctttggccttcccggacaatcagcgtccagctctcaaggctgagtttgaccggcctgtcagtgaggaggacacagtccctttgtcccacttggatgagagccccgcctacctcccagagctggctggccccgcccagccatttggccccaagggtggctactcttactagcccccagcggctgttccccctgccgcaggtgggtgctgccctgtgtacatataaatgaatctggtgttggggaaaccttcatctgaaacccacagatgtctctggggcagatccccactgtcctaccagttgccctagcccagactctgagctgctcaccggagtcattgggaaggaaaagtggagaaatggcaagtctagagtctcagaaactcccctgggggtttcacctgggccctggaggaattcagctcagcttcttcctaggtccaagccccccacaccttttccccaaccacagagaacaagagtttgttctgttctgggggacagagaaggcgcttcccaacttcatactggcaggagggtgaggaggttcactgagctccccagatctcccactgcggggagacagaagcctggactctgccccacgctgtggccctggagggtcccggtttgtcagttcttggtgctctgtgttcccagaggcaggcggaggttgaagaaaggaacctgggatgaggggtgctgggtataagcagagagggatgggttcctgctccaagggaccctttgcctttcttctgccctttcctaggcccaggcctgggtttgtacttccacctccaccacatctgccagaccttaataaaggcccccacttctcccatta

SEQ ID NO: 298171 - DNA, 2169 bp, Homo sapiens
tgggctgccccgcccctgagtcacccgaggaccccaacctcgtcccccagactaagcgcctcagggtgactcgcgggcattctccccgcttctcgcagaaatcgcccggaaatgggagcttgcgcgaagcgctgatcggcccgctggggaagctcatggacccgggctccctgccgcccctcgactctgaagatctcttccaggatctaagtcacttccaggagacgtggctcgctgaagctcaggtaccagacagtgatgagcagtttgttcctgatttccattcagaaaacctagctttccacagccccaccaccaggatcaagaaggagccccagagtccccgcacagacccggccctgtcctgcagcaggaagccgccactcccctaccaccatggcgagcagtgcctttactccagtgcctatgacccccccagacaaatcgccatcaagtcccctgcccctggtgcccttggacagtcgcccctacagccctttccccgggcagagcaacggaatttcctgagatcctctggcacctcccagccccaccctggccatgggtacctcggggaacatagctccgtcttccagcagcccctggacatttgccactccttcacatctcagggagggggccgggaacccctcccagccccctaccaacaccagctgtcggagccctgcccaccctatccccagcagagctttaagcaagaataccatgatcccctgtatgaacaggcgggccagccagccgtggaccagggtggggtcaatgggcacaggtacccaggggcgggggtggtgatcaaacaggaacagacggacttcgcctacgactcagatgtcaccgggtgcgcatcaatgtacctccacacagagggcttctctgggccctctccaggtgacggggccatgggctatggctatgagaaacctctgcgaccattcccagatgatgtctgcgttgtccctgagaaatttgaaggagacatcaagcaggaaggggtcggtgcatttcgagaggggccgccctaccagcgccggggtgccctgcagctgtggcaatttctggtggccttgctggatgacccaacaaatgcccatttcattgcctggacgggccggggaatggagttcaagctcattgagcctgaggaggtcgccaggctctggggcatccagaagaaccggccagccatgaattacgacaagctgagccgctcgctccgatactattatgagaaaggcatcatgcagaaggtggctggtgagcgttacgtgtacaagtttgtgtgtgagcccgaggccctcttctctttggccttcccggacaatcagcgtccagctctcaaggctgagtttgaccggcctgtcagtgaggaggacacagtccctttgtcccacttggatgagagccccgcctacctcccagagctggctggccccgcccagccatttggccccaagggtggctactcttactagcccccagcggctgttccccctgccgcaggtgggtgctgccctgtgtacatataaatgaatctggtgttggggaaaccttcatctgaaacccacagatgtctctggggcagatccccactgtcctaccagttgccctagcccagactctgagctgctcaccggagtcattgggaaggaaaagtggagaaatggcaagtctagagtctcagaaactcccctgggggtttcacctgggccctggaggaattcagctcagcttcttcctaggtccaagccccccacaccttttccccaaccacagagaacaagagtttgttctgttctgggggacagagaaggcgcttcccaacttcatactggcaggagggtgaggaggttcactgagctccccagatctcccactgcggggagacagaagcctggactctgccccacgctgtggccctggagggtcccggtttgtcagttcttggtgctctgtgttcccagaggcaggcggaggttgaagaaaggaacctgggatgaggggtgctgggtataagcagagagggatgggttcctgctccaagggaccctttgcctttcttctgccctttcctaggcccaggcctgggtttgtacttccacctccaccacatctgccagaccttaataaaggcccccacttctcccatta

SEQ ID NO: 298172 - DNA, 2230 bp, Homo sapiens
cgggctcacaactgtctgctgcgcccgaaaaacaagtcggtgcgctggggacccggggccggggccgccttactccggcctagccccgcggccctcggtgcgggctccagggcatgctcgggaccccccgcggctccagcccagacgccccggcctcagaaatcgcccggaaatgggagcttgcgcgaagcgctgatcggcccgctggggaagctcatggacccgggctccctgccgcccctcgactctgaagatctcttccaggatctaagtcacttccaggagacgtggctcgctgaagctcaggtaccagacagtgatgagcagtttgttcctgatttccattcagaaaacctagctttccacagccccaccaccaggatcaagaaggagccccagagtccccgcacagacccggccctgtcctgcagcaggaagccgccactcccctaccaccatggcgagcagtgcctttactccagtgcctatgacccccccagacaaatcgccatcaagtcccctgcccctggtgcccttggacagtcgcccctacagccctttccccgggcagagcaacggaatttcctgagatcctctggcacctcccagccccaccctggccatgggtacctcggggaacatagctccgtcttccagcagcccctggacatttgccactccttcacatctcagggagggggccgggaacccctcccagccccctaccaacaccagctgtcggagccctgcccaccctatccccagcagagctttaagcaagaataccatgatcccctgtatgaacaggcgggccagccagccgtggaccagggtggggtcaatgggcacaggtacccaggggcgggggtggtgatcaaacaggaacagacggacttcgcctacgactcagatgtcaccgggtgcgcatcaatgtacctccacacagagggcttctctgggccctctccaggtgacggggccatgggctatggctatgagaaacctctgcgaccattcccagatgatgtctgcgttgtccctgagaaatttgaaggagacatcaagcaggaaggggtcggtgcatttcgagaggggccgccctaccagcgccggggtgccctgcagctgtggcaatttctggtggccttgctggatgacccaacaaatgcccatttcattgcctggacgggccggggaatggagttcaagctcattgagcctgaggaggtcgccaggctctggggcatccagaagaaccggccagccatgaattacgacaagctgagccgctcgctccgatactattatgagaaaggcatcatgcagaaggtggctggtgagcgttacgtgtacaagtttgtgtgtgagcccgaggccctcttctctttggccttcccggacaatcagcgtccagctctcaaggctgagtttgaccggcctgtcagtgaggaggacacagtccctttgtcccacttggatgagagccccgcctacctcccagagctggctggccccgcccagccatttggccccaagggtggctactcttactagcccccagcggctgttccccctgccgcaggtgggtgctgccctgtgtacatataaatgaatctggtgttggggaaaccttcatctgaaacccacagatgtctctggggcagatccccactgtcctaccagttgccctagcccagactctgagctgctcaccggagtcattgggaaggaaaagtggagaaatggcaagtctagagtctcagaaactcccctgggggtttcacctgggccctggaggaattcagctcagcttcttcctaggtccaagccccccacaccttttccccaaccacagagaacaagagtttgttctgttctgggggacagagaaggcgcttcccaacttcatactggcaggagggtgaggaggttcactgagctccccagatctcccactgcggggagacagaagcctggactctgccccacgctgtggccctggagggtcccggtttgtcagttcttggtgctctgtgttcccagaggcaggcggaggttgaagaaaggaacctgggatgaggggtgctgggtataagcagagagggatgggttcctgctccaagggaccctttgcctttcttctgccctttcctaggcccaggcctgggtttgtacttccacctccaccacatctgccagaccttaataaaggcccccacttctcccatta

SEQ ID NO: 298173 - DNA, 1583 bp, Homo sapiens
cggcacgaggcttgcccagcccccgctgctgccttccatggcctcagccgcagccctcaagttgaggaggggttccagcatcacactccctctgggtgaactttccctgggattttgtggttggcaggcaacctgggcaaagaacagtcaccaggaagcaggctggaaggaagaaattcttgaatgtggataggacttcctcctcccctgccctcgagctccaccccaagccacttctcacatcaccccttcttcccccacagatgtcaccgggtgcgcatcaatgtacctccacacagagggcttctctgggccctctccaggtgacggggccatgggctatggctatgagaaacctctgcgaccattcccagatgatgtctgcgttgtccctgagaaatttgaaggagacatcaagcaggaaggggtcggtgcatttcgagaggggccgccctaccagcgccggggtgccctgcagctgtggcaatttctggtggccttgctggatgacccaacaaatgcccatttcattgcctggacgggccggggaatggagttcaagctcattgagcctgaggaggtcgccaggctctggggcatccagaagaaccggccagccatgaattacgacaagctgagccgctcgctccgatactattatgagaaaggcatcatgcagaaggtggctggtgagcgttacgtgtacaagtttgtgtgtgagcccgaggccctcttctctttggccttcccggacaatcagcgtccagctctcaaggctgagtttgaccggcctgtcagtgaggaggacacagtccctttgtcccacttggatgagagccccgcctacctcccagagctggctggccccgcccagccatttggccccaagggtggctactcttactagcccccagcggctgttccccctgccgcaggtgggtgctgccctgtgtacatataaatgaatctggtgttggggaaaccttcatctgaaacccacagatgtctctggggcagatccccactgtcctaccagttgccctagcccagactctgagctgctcaccggagtcattgggaaggaaaagtggagaaatggcaagtctagagtctcagaaactcccctgggggtttcacctgggccctggaggaattcagctcagcttcttcctaggtccaagccccccacaccttttccccaaccacagagaacaagagtttgttctgttctgggggacagagaaggcgcttcccaacttcatactggcaggagggtgaggaggttcactgagctccccagatctcccactgcggggagacagaagcctggactctgccccacgctgtggccctggagggtcccggtttgtcagttcttggtgctctgtgttcccagaggcaggcggaggttgaagaaaggaacctgggatgaggggtgctgggtataagcagagagggatgggttcctgctccaagggaccctttgcctttcttctgccctttcctaggcccaggcctgggtttgtacttccacctccaccacatctgccagaccttaataaaggcccccacttctcccatta

SEQ ID NO: 298174 - DNA, 2151 bp, Homo sapiens
tgggctgccccgcccctgagtcacccgaggaccccaacctcgtcccccagactaagcgcctcagggtgactcgcgggcattctccccgcttctcgcagaaatcgcccggaaatgggagcttgcgcgaagcgctgatcggcccgctggggaagctcatggacccgggctccctgccgcccctcgactctgaagatctcttccaggatctaagtcacttccaggagacgtggctcgctgaagctcaggtaccagacagtgatgagcagtttgttcctgatttccattcagaaaacctagctttccacagccccaccaccaggatcaagaaggagccccagagtccccgcacagacccggccctgtcctgcagcaggaagccgccactcccctaccaccatggcgagcagtgcctttactccagacaaatcgccatcaagtcccctgcccctggtgcccttggacagtcgcccctacagccctttccccgggcagagcaacggaatttcctgagatcctctggcacctcccagccccaccctggccatgggtacctcggggaacatagctccgtcttccagcagcccctggacatttgccactccttcacatctcagggagggggccgggaacccctcccagccccctaccaacaccagctgtcggagccctgcccaccctatccccagcagagctttaagcaagaataccatgatcccctgtatgaacaggcgggccagccagccgtggaccagggtggggtcaatgggcacaggtacccaggggcgggggtggtgatcaaacaggaacagacggacttcgcctacgactcagatgtcaccgggtgcgcatcaatgtacctccacacagagggcttctctgggccctctccaggtgacggggccatgggctatggctatgagaaacctctgcgaccattcccagatgatgtctgcgttgtccctgagaaatttgaaggagacatcaagcaggaaggggtcggtgcatttcgagaggggccgccctaccagcgccggggtgccctgcagctgtggcaatttctggtggccttgctggatgacccaacaaatgcccatttcattgcctggacgggccggggaatggagttcaagctcattgagcctgaggaggtcgccaggctctggggcatccagaagaaccggccagccatgaattacgacaagctgagccgctcgctccgatactattatgagaaaggcatcatgcagaaggtggctggtgagcgttacgtgtacaagtttgtgtgtgagcccgaggccctcttctctttggccttcccggacaatcagcgtccagctctcaaggctgagtttgaccggcctgtcagtgaggaggacacagtccctttgtcccacttggatgagagccccgcctacctcccagagctggctggccccgcccagccatttggccccaagggtggctactcttactagcccccagcggctgttccccctgccgcaggtgggtgctgccctgtgtacatataaatgaatctggtgttggggaaaccttcatctgaaacccacagatgtctctggggcagatccccactgtcctaccagttgccctagcccagactctgagctgctcaccggagtcattgggaaggaaaagtggagaaatggcaagtctagagtctcagaaactcccctgggggtttcacctgggccctggaggaattcagctcagcttcttcctaggtccaagccccccacaccttttccccaaccacagagaacaagagtttgttctgttctgggggacagagaaggcgcttcccaacttcatactggcaggagggtgaggaggttcactgagctccccagatctcccactgcggggagacagaagcctggactctgccccacgctgtggccctggagggtcccggtttgtcagttcttggtgctctgtgttcccagaggcaggcggaggttgaagaaaggaacctgggatgaggggtgctgggtataagcagagagggatgggttcctgctccaagggaccctttgcctttcttctgccctttcctaggcccaggcctgggtttgtacttccacctccaccacatctgccagaccttaataaaggcccccacttctcccatta

SEQ ID NO: 298175 - DNA, 2888 bp, Homo sapiens
tgcgaacgcagccccctcccccaccaggtctcggcccccgcttggggccccggccgtgcggccggagggagcggccggatggagcggaggatgaaagccggatacttggaccagcaagtgccctacaccttcagcagcaaatcgcccggaaatgggagcttgcgcgaagcgctgatcggcccgctggggaagctcatggacccgggctccctgccgcccctcgactctgaagatctcttccaggatctaagtcacttccaggagacgtggctcgctgaagctcaggtaccagacagtgatgagcagtttgttcctgatttccattcagaaaacctagctttccacagccccaccaccaggatcaagaaggagccccagagtccccgcacagacccggccctgtcctgcagcaggaagccgccactcccctaccaccatggcgagcagtgcctttactccagtgcctatgacccccccagacaaatcgccatcaagtcccctgcccctggtgcccttggacagtcgcccctacagccctttccccgggcagagcaacggaatttcctgagatcctctggcacctcccagccccaccctggccatgggtacctcggggaacatagctccgtcttccagcagcccctggacatttgccactccttcacatctcagggagggggccgggaacccctcccagccccctaccaacaccagctgtcggagccctgcccaccctatccccagcagagctttaagcaagaataccatgatcccctgtatgaacaggcgggccagccagccgtggaccagggtggggtcaatgggcacaggtacccaggggcgggggtggtgatcaaacaggaacagacggacttcgcctacgactcagatgtcaccgggtgcgcatcaatgtacctccacacagagggcttctctgggccctctccaggtgacggggccatgggctatggctatgagaaacctctgcgaccattcccagatgatgtctgcgttgtccctgagaaatttgaaggagacatcaagcaggaaggggtcggtgcatttcgagaggggccgccctaccagcgccggggtgccctgcagctgtggcaatttctggtggccttgctggatgacccaacaaatgcccatttcattgcctggacgggccggggaatggagttcaagctcattgagcctgaggaggtcgccaggctctggggcatccagaagaaccggccagccatgaattacgacaagctgagccgctcgctccgatactattatgagaaaggcatcatgcagaaggtggctggtgagcgttacgtgtacaagtttgtgtgtgagcccgaggccctcttctctttggccttcccggacaatcagcgtccagctctcaaggctgagtttgaccggcctgtcagtgaggaggacacagtccctttgtcccacttggatgagagccccgcctacctcccagagctggctggccccgcccagccatttggccccaagggtggctactcttactagcccccagcggctgttccccctgccgcaggtgggtgctgccctgtgtacatataaatgaatctggtgttggggaaaccttcatctgaaacccacagatgtctctggggcagatccccactgtcctaccagttgccctagcccagactctgagctgctcaccggagtcattgggaaggaaaagtggagaaatggcaagtctagagtctcagaaactcccctgggggtttcacctgggccctggaggaattcagctcagcttcttcctaggtccaagccccccacaccttttccccaaccacagagaacaagagtttgttctgttctgggggacagagaaggcgcttcccaacttcatactggcaggagggtgaggaggttcactgagctccccagatctcccactgcggggagacagaagcctggactctgccccacgctgtggccctggagggtcccggtttgtcagttcttggtgctctgtgttcccagaggcaggcggaggttgaagaaaggaacctgggatgaggggtgctgggtataagcagagagggatgggttcctgctccaagggaccctttgcctttcttctgccctttcctaggcccaggcctgggtttgtacttccacctccaccacatctgccagaccttaataaaggcccccacttctcccattaaaacaacaaacaacaacaacacacaccgcgaggacatccccaggacgggcagcgcaccacgcggaaacgaaagggccaatgggcacacaaagcggcccccggaccaagctgcttggccaccacacgcgcgacaatcgtgaccggaacccacctataccggaagcccgcaacactcgcgacacagcccaggtcaaccctgcgcatacaggcacgcggaaaccgcacacacaccaaacacaaccgcaccaaaacgacacaaccaacacactacagggcacccaccaaaaacggcgaaaagacaacagcggcccgggagcaccaccccacaccccactgaaccccacaacacaagaccagcgaccacgcaggcgacaagacaaatcgagcgaccacaaaccgcgccacgagagacaggcggagcacaccaagcggccggaagagacgaggcgggggaggagaagacgcgacggcggcaccggcggccggggcaaggagggagaggggccgagcacagcagcaacgcaagcagaggccaaaacgaagcagcagcggcggaagcacgcagcgagcaggcgccacgagcagaaaaaagcgggggcgcagcagcacagagcggaacacgacggcagggcagacagccagagaagcgggaaagagagagcgaccggcggcgcagtgc

SEQ ID NO: 298176 - DNA, 1094 bp, Homo sapiens
tatttctggggacaacgcacgtgaaatttatccatattatgacccatggatgggccggggaatggagttcaagctcattgagcctgaggaggtcgccaggctctggggcatccagaagaaccggccagccatgaattacgacaagctgagccgctcgctccgatactattatgagaaaggcatcatgcagaaggtggctggtgagcgttacgtgtacaagtttgtgtgtgagcccgaggccctcttctctttggccttcccggacaatcagcgtccagctctcaaggctgagtttgaccggcctgtcagtgaggaggacacagtccctttgtcccacttggatgagagccccgcctacctcccagagctggctggccccgcccagccatttggccccaagggtggctactcttactagcccccagcggctgttccccctgccgcaggtgggtgctgccctgtgtacatataaatgaatctggtgttggggaaaccttcatctgaaacccacagatgtctctggggcagatccccactgtcctaccagttgccctagcccagactctgagctgctcaccggagtcattgggaaggaaaagtggagaaatggcaagtctagagtctcagaaactcccctgggggtttcacctgggccctggaggaattcagctcagcttcttcctaggtccaagccccccacaccttttccccaaccacagagaacaagagtttgttctgttctgggggacagagaaggcgcttcccaacttcatactggcaggagggtgaggaggttcactgagctccccagatctcccactgcggggagacagaagcctggactctgccccacgctgtggccctggagggtcccggtttgtcagttcttggtgctctgtgttcccagaggcaggcggaggttgaagaaaggaacctgggatgaggggtgctgggtataagcagagagggatgggttcctgctccaagggaccctttgcctttcttctgccctttcctaggcccaggcctgggtttgtacttccacctccaccacatctgccagaccttaataaaggcccccacttctcccatta

SEQ ID NO: 298177 - DNA, 1867 bp, Homo sapiens
tgcgaacgcagccccctcccccaccaggtctcggcccccgcttggggccccggccgtgcggccggagggagcggccggatggagcggaggatgaaagccggatacttggaccagcaagtgccctacaccttcagcagcaaatcgcccggaaatgggagcttgcgcgaagcgctgatcggcccgctggggaagctcatggacccgggctccctgccgcccctcgactctgaagatctcttccaggatctaagtcacttccaggagacgtggctcgctgaagctcaggtaccagacagtgatgagcagtttgttcctgatttccattcagaaaacctagctttccacagccccaccaccaggatcaagaaggagccccagagtccccgcacagacccggccctgtcctgcagcaggaagccgccactcccctaccaccatggcgagcagtgcctttactccagtgcctatgacccccccagacaaatcgccatcaagtcccctgcccctggtgcccttggacagtcgcccctacagccctttccccgggcagagcaacggaatttcctgagatcctctggcacctcccagccccaccctggccatgggtacctcggggaacatagctccgtcttccagcagcccctggacatttgccactccttcacatctcagggagggggccgggaacccctcccagccccctaccaacaccagctgtcggagccctgcccaccctatccccagcagagctttaagcaagaataccatgatcccctgtatgaacaggcgggccagccagccgtggaccagggtggggtcaatgggcacaggtacccaggggcgggggtggtgatcaaacaggaacagacggacttcgcctacgactcagatgtcaccgggtgcgcatcaatgtacctccacacagagggcttctctgggccctctccaggtgacggggccatgggctatggctatgagaaacctctgcgaccattcccagatgatgtctgcgttgtccctgagaaatttgaaggagacatcaagcaggaaggggtcggtgcatttcgagaggggccgccctaccagcgccggggtgccctgcagctgtggcaatttctggtggccttgctggatgacccaacaaatgcccatttcattgcctggacgggccggggaatggagttcaagctcattgagcctgaggaggtcgccaggctctggggcatccagaagaaccggccagccatgaattacgacaagctgagccgctcgctccgatactattatgagaaaggcatcatgcagaaggtggctggtgagcgttacgtgtacaagtttgtgtgtgagcccgaggccctcttctctttggccttcccggacaatcagcgtccagctctcaaggctgagtttgaccggcctgtcagtgaggaggacacagtccctttgtcccacttggatgagagccccgcctacctcccagagctggctggccccgcccagccatttggccccaagggtggctactcttactagcccccagcggctgttccccctgccgcaggtgggtgctgccctgtgtacatataaatgaatctggtgttggggaaaccttcatctgaaacccacgctgtggccctggagggtcccggtttgtcagttcttggtgctctgtgttcccagaggcaggcggaggttgaagaaaggaacctgggatgaggggtgctgggtataagcagagagggatgggttcctgctccaagggaccctttgcctttcttctgccctttcctaggcccaggcctgggtttgtacttccacctccaccacatctgccagaccttaataaaggcccccacttctcccatta

SEQ ID NO: 298178 - DNA, 270 bp, Homo sapiens
agccaaaatgttcttgtctcactgcgggtctcagaaaattgatacccagagagggaaggaggctgtaccagtcacccagctggtcctcaaagctcagaaggtatcagaagccctgcctgcctcttgtgtgacaggctctggccttgctctgtcccctccacccccacagtagctttccacagccccaccaccaggatcaagaaggagccccagagtccccgcacagacccggccctgtcctgcagcaggaagccgccactcccctaccac

SEQ ID NO: 298179 - DNA, 1336 bp, Homo sapiens
gcttactagtctcggggtccccgagtgcggaaaccctacctttgcggtggggtctggacgcccgagagcccttctcagcaaagtccctgaagaggagcgaggcggctccgaggaaccgcggaggaagtgaagccagtcccgccactcttcagaccggccctccacctcggccaccgtcaccacagagctgaaggaggcctagagagccgcgcgtgccgcgccaccgagaccggaaggaggcggcacagacctggaggacgaccgcggagctgagcgcttagagccgccgaaccatagagatcggaaataggagcgagcggcagcgccggaaaggaggccaagagcgcgggcggcgaggcaagatggcggcaaccaagaggaaacggcgtggaggctttgcagttcaggcgaagaagccaaaaagaaacgaaatagatgcggagccgccagctaagcggcacgccacagcagaggaggtggaggaagaagagagggaccggatcccaggccccgtttgcaagggaaagtggaaaaataaggaacggattctcatcttttcttccagaggaataaattttagaacaagacatttaatgcaggacttgagaatgttgatgcctcattctaaagcagatactaaaatggatcgtaaggataagctatttgtgattaacgaggtttgtgaaatgaagaactgtaataaatgcatctattttgaagctaagaaaaaacaggatctctatatgtggctttcaaattcacctcacggaccatctgctaaattccttgttcaaaatattcataccctcgctgaactgaagatgactggaaactgtttgaaaggttctcggccccttttgtcttttgaccctgcttttgatgaattaccacattatgctttgttaaaagaactcttaattcagatctttagtacaccacggtatcatcccaaaagccaaccatttgtggaccacgtgtttactttcaccattttggataataggatatggtttcggaactttcagatcatagaagaagatgctgctcttgtagaaataggacctcgttttgtcttaaatctcataaagattttccagggaagttttggaggaccaactttatatgaaaatcctcactaccagtcaccaaacatgcatcggcgtgtcataagatccatcacagctgcaaaatacagagagaaacagcaagtgaaagatgtgcaaaaactgagaaagaaagagccgaagactcttcttccacatgatcccactgcagatgtttttgtaacaccagctgaggagaaaccaatagaaatacagtgggtaaaaccagagcc

SEQ ID NO: 298180 - DNA, 2526 bp, Homo sapiens
gcttactagtctcggggtccccgagtgcggaaaccctacctttgcggtggggtctggacgcccgagagcccttctcagcaaagtccctgaagaggagcgaggcggctccgaggaaccgcggaggaagtgaagccagtcccgccactcttcagaccggccctccacctcggccaccgtcaccacagagctgaaggaggcctagagagccgcgcgtgccgcgccaccgagaccggaaggaggcggcacagacctggaggacgaccgcggagctgagcgcttagagccgccgaaccatagagatcggaaataggagcgagcggcagcgccggaaaggaggccaagagcgcgggcggcgaggcaagatggcggcaaccaagaggaaacggcgtggaggctttgcagttcaggcgaagaagccaaaaagaaacgaaatagatgcggagccgccagctaagcggcacgccacagcagaggaggtggaggaagaagagagggaccggatcccaggccccgtttgcaagggaaagtggaaaaataaggaacggattctcatcttttcttccagaggaataaattttagaacaagacatttaatgcaggacttgagaatgttgatgcctcattctaaagcagatactaaaatggatcgtaaggataagctatttgtgattaacgaggtttgtgaaatgaagaactgtaataaatgcatctattttgaagctaagaaaaaacaggatctctatatgtggtaagagaatgtattaagattttggttaaactcatttaagtggatttgttctttgtaccttttatgttatagactcctagtgtttcatgttaagggttgagaatgaagcaaacttttgatttcacgaaacttgatacctttaaagaaaattaaatgtataaatattataagcatattatttatggtgaataggtggtaagcattgactacatttgctaattagtggaaaaagcttactccatatctttcaggctttcaaattcacctcacggaccatctgctaaattccttgttcaaaatagtaagttgactcaataaatttttttagatgaggaaattaaaagtaatcttttgaaatagttgtgcaaaagttacaactatttttgtttttgttgtaatttttctagttcataccctcgctgaactgaagatgactggaaactgtttgaaaggttctcggccccttttgtcttttgaccctgtaagtttctcattcagtgtatgaggtctaattttcttatctggcatggttgtttttagtagatatagttgtgttattcaatttagtttcacccccaccttggttttatggattatcaattctttcaggtacatttataatgaggttatagccaagttatagaaacaaatgagcaaacagttttaaacaaggcagtctactgttaaataatatgcttaccttatttttataggcttttgatgaattaccacattatgctttgttaaaagaactcttaattcaggtaaatatctttaaaattagctatccaaaatatacatgatatatcttggaataaggaactaacatacacttttttaactagatctttagtacaccacggtatcatcccaaaagccaaccatttgtggaccacgtgtttactttcaccattttggataataggatatggtttcggaactttcagatcatagaagaagatgctgctcttgtagaaataggacctcgttttgtcttaaatctcataaagattttccagggaagttttggaggaccaactttatatgaaaatcctcactaccagtcaccaaacatggtaagcggttgtgtcattcagtagtcttcaatgtaccagaaccctttggccaaaatgattctgtgaagtaattgctgttttattacctgtgaaactgaatttggtttttgctgcatagaaacttggaaattactcccttttttcatgacactggctgaaaggatatatggttcataactgaaagtctttgccttatataaaatgtttatttttatttcaaaagcatctaatcttttttttttttttttagcatcggcgtgtcataagatccatcacagctgcaaaatacagagagaaacagcaagtgaaagatgtgcaaaaactgagaaagaaagagccgaagactcttcttccacatgatcccactgcagatgtttttgtaacaccagctgaggagaaaccaatagaaatacagtgggtaaaaccagagccaaaagttgatttgaaagcaagaaagaaacggatttacaaaaggcaaagaaaaatgaaacagaggatggacagtgggaaaacaaaataagtcaatggaaacctgatttgtttttcagttactttatatttattttgtattcaatgtgtaaatacttttattatctaatactatcttacgtctaattagtgtagcatttacaagaaagaaaaattaagatcttaaaatcagtgattatctttttctaaataaaatatcaccagaattcatca

SEQ ID NO: 298181 - DNA, 1508 bp, Homo sapiens
  misc_feature (1288)..(1288): n is a, c, g, or t
  misc_feature (1502)..(1503): n is a, c, g, or t
gcttactagtctcggggtccccgagtgcggaaaccctacctttgcggtggggtctggacgcccgagagcccttctcagcaaagtccctgaagaggagcgaggcggctccgaggaaccgcggaggaagtgaagccagtcccgccactcttcagaccggccctccacctcggccaccgtcaccacagagctgaaggaggcctagagagccgcgcgtgccgcgccaccgagaccggaaggaggcggcacagacctggaggacgaccgcggagctgagcgcttagagccgccgaaccatagagatcggaaataggagcgagcggcagcgccggaaaggaggccaagagcgcgggcggcgaggcaagatggcggcaaccaagaggaaacggcgtggaggctttgcagttcaggcgaagaagccaaaaagaaacgaaatagatgcggagccgccagctaagcggcacgccacagcagaggaggtggaggaagaagagagggaccggatcccaggccccgtttgcaagggaaagtggaaaaataaggaacggattctcatcttttcttccagaggaataaattttagaacaagacatttaatgcaggacttgagaatgttgatgcctcattctaaagcagatactaaaatggatcgtaaggataagctatttgtgattaacgaggtttgtgaaatgaagaactgtaataaatgcatctattttgaagctaagaaaaaacaggatctctatatgtggctttcaaattcacctcacggaccatctgctaaattccttgttcaaaatattcataccctcgctgaactgaagatgactggaaactgtttgaaaggttctcggccccttttgtcttttgaccctgcttttgatgaattaccacattatgctttgttaaaagaactcttaattcagatctttagtacaccacggtatcatcccaaaagccaaccatttgtggaccacgtgtttactttcaccattttggataataggatatggtttcggaactttcagatcatagaagaagatgctgctcttgtagaaataggacctcgttttgtcttaaatctcataaagattttccagggaagttttggaggaccaactttatatgaaaatcctcactaccagtcaccaaacatgcatcggcgtgtcataagatccatcacagctgcaaaatacagagagaaacagcaagtgaaagatgtgcaaaaactgagaaagaaagagccgaagactcttcttccacatgatcccactgcagatgtttgtacacngtgagggaaccatgaatacgtggtaaccagagcaagtggttgaagcgaagacggttcacagggagaaatgacgggtggggggacacacatcaggacgcttgtcggctttatatggcggggaacatcacaatcgcagggggccagaaaaaattaaggctttgtcgcgcaaaaagacaaaaatcgggctggagatatttgcaacaatcacggtganncgcaa

SEQ ID NO: 298182 - DNA, 1606 bp, Homo sapiens
gcttactagtctcggggtccccgagtgcggaaaccctacctttgcggtggggtctggacgcccgagagcccttctcagcaaagtccctgaagaggagcgaggcggctccgaggaaccgcggaggaagtgaagccagtcccgccactcttcagaccggccctccacctcggccaccgtcaccacagagctgaaggaggcctagagagccgcgcgtgccgcgccaccgagaccggaaggaggcggcacagacctggaggacgaccgcggagctgagcgcttagagccgccgaaccatagagatcggaaataggagcgagcggcagcgccggaaaggaggccaagagcgcgggcggcgaggcaagatggcggcaaccaagaggaaacggcgtggaggctttgcagttcaggcgaagaagccaaaaagaaacgaaatagatgcggagccgccagctaagcggcacgccacagcagaggaggtggaggaagaagagagggaccggatcccaggccccgtttgcaagggaaagtggaaaaataaggaacggattctcatcttttcttccagaggaataaattttagaacaagacatttaatgcaggacttgagaatgttgatgcctcattctaaagcagatactaaaatggatcgtaaggataagctatttgtgattaacgaggtttgtgaaatgaagaactgtaataaatgcatctattttgaagctaagaaaaaacaggatctctatatgtggctttcaaattcacctcacggaccatctgctaaattccttgttcaaaatattcataccctcgctgaactgaagatgactggaaactgtttgaaaggttctcggccccttttgtcttttgaccctgcttttgatgaattaccacattatgctttgttaaaagaactcttaattcagatctttagtacaccacggtatcatcccaaaagccaaccatttgtggaccacgtgtttactttcaccattttggataataggatatggtttcggaactttcagatcatagaagaagatgctgctcttgtagaaataggacctcgttttgtcttaaatctcataaagattttccagggaagttttggaggaccaactttatatgaaaatcctcactaccagtcaccaaacatgcatcggcgtgtcataagatccatcacagctgcaaaatacagagagaaacagcaagtgaaagatgtgcaaaaactgagaaagaaagagccgaagactcttcttccacatgatcccactgcagatgtttttgtaacaccagctgaggagaaaccaatagaaatacagtgggtaaaaccagagccaaaagttgatttgaaagcaagaaagaaacggatttacaaaaggcaaagaaaaatgaaacagaggatggacagtgggaaaacaaaataagtcaatggaaacctgatttgtttttcagttactttatatttattttgtattcaatgtgtaaatacttttattatctaatactatcttacgtctaattagtgtagcatttacaagaaagaaaaattaagatcttaaaatcagtgattatctttttctaaataaaatatcaccagaattcatca

SEQ ID NO: 298183 - DNA, 1823 bp, Homo sapiens
gcttactagtctcggggtccccgagtgcggaaaccctacctttgcggtggggtctggacgcccgagagcccttctcagcaaagtccctgaagaggagcgaggcggctccgaggaaccgcggaggaagtgaagccagtcccgccactcttcagaccggccctccacctcggccaccgtcaccacagagctgaaggaggcctagagagccgcgcgtgccgcgccaccgagaccggaaggaggcggcacagacctggaggacgaccgcggagctgagcgcttagagccgccgaaccatagagatcggaaataggagcgagcggcagcgccggaaaggaggccaagagcgcgggcggcgaggcaagatggcggcaaccaagaggaaacggcgtggaggctttgcagttcaggcgaagaagccaaaaagaaacgaaatagatgcggagccgccagctaagcggcacgccacagcagaggaggtggaggaagaagagagggaccggatcccaggccccgtttgcaagggaaagtggaaaaataaggaacggattctcatcttttcttccagaggaataaattttagaacaagacatttaatgcaggacttgagaatgttgatgcctcattctaaagcagatactaaaatggatcgtaaggataagctatttgtgattaacgaggtttgtgaaatgaagaactgtaataaatgcatctattttgaagctaagaaaaaacaggatctctatatgtggctttcaaattcacctcacggaccatctgctaaattccttgttcaaaatattcataccctcgctgaactgaagatgactggaaactgtttgaaaggttctcggccccttttgtcttttgaccctgcttttgatgaattaccacattatgctttgttaaaagaactcttaattcagatctttagtacaccacggtatcatcccaaaagccaaccatttgtggaccacgtgtttactttcaccattttggataataggatatggtttcggaactttcagatcatagaagaagatgctgctcttgtagaaataggacctcgttttgtcttaaatctcataaagattttccagggaagttttggaggaccaactttatatgaaaatcctcactaccagtcaccaaacatgcatcggcgtgtcataagatccatcacagctgcaaaatacagagagaaacagcaagtgaaagatgtgcaaaaactgagaaagaaagagccgaagactcttcttccacatgatcccactgcagatgtttttgtaacaccagctgaggagaaaccaatagaaatacagtgggtaaaaccagagccaaaagttgatttgaaagcaagaaagaaacggatttacaaaaggcaaagaaaaatgaaacagaggatggacagtgggaaaacaaaataagtcaatggaaacctgatttgtttttcagttactttatatttattttgtattcaatgtgtaaatacttttattatctaatactatcttacgtctaattagtgtagcatttacaagaaagaaaaattaagatcttaaaatcagtgattatctttttctaaataaaatatcaccagaattcatcagttaatttctgatttctttttgaagtttgtgttgctaaaaatgtagcacacttaatgtagcctgttctcttgggttggaatttttggtttagcaaagctgaaattcagacatttattaggtcatattatttgtaaaagcattcaacacttcaagagcatcggttgtggatggtaaagtaggagtagactggtagaaaggaaggcatctcactgaagt

SEQ ID NO: 298184 - DNA, 1277 bp, Homo sapiens
cggacgcgtgggtcgacccacgcgtccggcaagatggcggcaaccaagaggaaacggcgtggaggctttgcagttcaggcgaagaagccaaaaagaaacgaaatagatgcggagccgccagctaagcggcacgccacagcagaggaggtggaggaagaagagagggaccggatcccaggccccgtttgcaagggaaagtggaaaaataaggaacggattctcatcttttcttccagaggaataaattttagaacaagacatttaatgcaggacttgagaatgttgatgcctcattctaaagcagatactaaaatggatcgtaaggataagctatttgtgattaacgaggtttgtgaaatgaagaactgtaataaatgcatctattttgaagctaagaaaaaacaggatctctatatgtggctttcaaattcacctcacggaccatctgctaaattccttgttcaaaatattcataccctcgctgaactgaagatgactggaaactgtttgaaaggttctcggccccttttgtcttttgaccctgcttttgatgaattaccacattatgctttgttaaaagaactcttaattcagatctttagtacaccacggtatcatcccaaaagccaaccatttgtggaccacgtgtttactttcaccattttggataataggatatggtttcggaactttcagatcatagaagaagatgctgctcttgtagaaataggacctcgttttgtcttaaatctcataaagattttccagggaagttttggaggaccaactttatatgaaaatcctcactaccagtcaccaaacatgcatcggcgtgtcataagatccatcacagctgcaaaatacagagagaaacagcaagtgaaagatgtgcaaaaactgagaaagaaagagccgaagactcttcttccacatgatcccactgcagatgtttttgtaacaccagctgaggagaaaccaatagaaatacagtgggtaaaaccagagccaaaagttgatttgaaagcaagaaagaaacggatttacaaaaggcaaagaaaaatgaaacagaggatggacagtgggaaaacaaaataagtcaatggaaacctgatttgtttttcagttactttatatttattttgtattcaatgtgtaaatacttttattatctaatactatcttacgtctaattagtgtagcatttacaagaaagaaaaattaagatcttaaaatcagtgattatctttttctaaataaaatatcaccagaattcatca

SEQ ID NO: 298185 - DNA, 886 bp, Homo sapiens
cggacgcgtgggtcgacccacgcgtccggctttcaaattcacctcacggaccatctgctaaattccttgttcaaaatattcataccctcgctgaactgaagatgactggaaactgtttgaaaggttctcggccccttttgtcttttgaccctgcttttgatgaattaccacattatgctttgttaaaagaactcttaattcagatctttagtacaccacggtatcatcccaaaagccaaccatttgtggaccacgtgtttactttcaccattttggataataggatatggtttcggaactttcagatcatagaagaagatgctgctcttgtagaaataggacctcgttttgtcttaaatctcataaagattttccagggaagttttggaggaccaactttatatgaaaatcctcactaccagtcaccaaacatgcatcggcgtgtcataagatccatcacagctgcaaaatacagagagaaacagcaagtgaaagatgtgcaaaaactgagaaagaaagagccgaagactcttcttccacatgatcccactgcagatgtttttgtaacaccagctgaggagaaaccaatagaaatacagtgggtaaaaccagagccaaaagttgatttgaaagcaagaaagaaacggatttacaaaaggcaaagaaaaatgaaacagaggatggacagtgggaaaacaaaataagtcaatggaaacctgatttgtttttcagttactttatatttattttgtattcaatgtgtaaatacttttattatctaatactatcttacgtctaattagtgtagcatttacaagaaagaaaaattaagatcttaaaatcagtgattatctttttctaaataaaatatcaccagaattcatca

SEQ ID NO: 298186 - DNA, 2199 bp, Homo sapiens
  misc_feature (4)..(4): n is a, c, g, or t
  misc_feature (6)..(6): n is a, c, g, or t
  misc_feature (1332)..(1333): n is a, c, g, or t
  misc_feature (1337)..(1338): n is a, c, g, or t
  misc_feature (1343)..(1343): n is a, c, g, or t
  misc_feature (1349)..(1349): n is a, c, g, or t
  misc_feature (1376)..(1377): n is a, c, g, or t
  misc_feature (1384)..(1385): n is a, c, g, or t
  misc_feature (1388)..(1388): n is a, c, g, or t
  misc_feature (1395)..(1395): n is a, c, g, or t
  misc_feature (1407)..(1410): n is a, c, g, or t
  misc_feature (1415)..(1415): n is a, c, g, or t
  misc_feature (1430)..(1431): n is a, c, g, or t
  misc_feature (1436)..(1436): n is a, c, g, or t
  misc_feature (1438)..(1438): n is a, c, g, or t
  misc_feature (1449)..(1449): n is a, c, g, or t
  misc_feature (1494)..(1494): n is a, c, g, or t
  misc_feature (1506)..(1507): n is a, c, g, or t
  misc_feature (1511)..(1511): n is a, c, g, or t
  misc_feature (1532)..(1532): n is a, c, g, or t
  misc_feature (1542)..(1542): n is a, c, g, or t
  misc_feature (1547)..(1547): n is a, c, g, or t
  misc_feature (1552)..(1552): n is a, c, g, or t
  misc_feature (1555)..(1555): n is a, c, g, or t
  misc_feature (1564)..(1564): n is a, c, g, or t
  misc_feature (1570)..(1570): n is a, c, g, or t
  misc_feature (1572)..(1573): n is a, c, g, or t
  misc_feature (1580)..(1580): n is a, c, g, or t
  misc_feature (1594)..(1594): n is a, c, g, or t
  misc_feature (1596)..(1597): n is a, c, g, or t
  misc_feature (1610)..(1611): n is a, c, g, or t
  misc_feature (1613)..(1613): n is a, c, g, or t
  misc_feature (1624)..(1625): n is a, c, g, or t
  misc_feature (1636)..(1636): n is a, c, g, or t
  misc_feature (1640)..(1640): n is a, c, g, or t
cagnanaatttgttagtaggtttgcatagatataacaccttttcactggtataatacatcttttccaaaggattatggcaggcttgtttctattcttcatgtatattctctttttcactctttttttctgttttacatgaaattaaccatatttatcatctggctaccatagttccaaaataaggtccagtagtagtttgaagcacagcaagctcagcagtttcttccctttttaaagcccgacagtcagtggagttttctatagtcgagccacgtgagcactgtcaccccaagtagagactcttgtgaactcaaacggctccagattcacggtcaagaaccttggtgacttcacataactaccacttattgctggaagggagacaatattgtttgcttctgaagttttcaaacagtttctcacctggcagcttctccggatttctttgttgctttcataatcgcttctgacattgcgctttcaaaaatctaaaggtcgaatcatcatagttgtggaacgtaaggagtaactgggccctttgaagtagtgccactttatcccattcagttttccatggttttgtcccgcagtatagaacattccatttagattggaggggccacaagcatcaaaccaccatcctcctgttaacatgagggcacatttgcacatacagttgtcattatcagcatctttagtgctgaaatcagcaccgtgtaagatcaggctgctctgttttcctgctgtcccagtgtgaccttttaaatacaacctatagttttgcttttcatttcctatgtggaatctgtcatactgtgaataggctcggttcccttcccagtccattaactctcgtgccgaattcggcaccagctgatttgtttctatcttcctttcagcatgtcctgttttctaatacaataaaatgcttcgggtttatcttgtacttccctttccaattctggaataaccatttatccaaggaactccgattcctttggggagtgctatttggaaaccaaggtctggcactctaggtatgctcgtagcgatgggagcgtcattgcttccaggctctggctgtgtctcttcagggtccactatagtcatcctgtttctgtctgctgtagattatattaaagcttcattcttcatcccttccattttcctccctataagttagtgtctggaagcattcttagaggtcagacgaaatcattatattcaggtatggaatgcaatttttgtatagataacaaatctatattcatgaaatctgatgctgcccatcatccatctttttgcaaggtcttttcctgtgaaaggtatgnntttnnttttntttttnttttttttttttttgagacagagtctnnctctgtnnccnaggctgnagtgcagtggcnnnntctcngctcactgcaacctnngcctncngggttcaagcnattctcctgcctcagcctcctgagtagctgggattacaggcatgngccaccatgccnngctnattttgtatttttagtagagntggggtttcnccatnttggncangctggtctngaactncnnacctcangtgatccacccacntnngcctcccaaagtnntnggattacaggnntgagccaccgngccnggccagtcctttacttttataggtggagaaactgagacctaagaactgaagtgacttacgtccatggcaaattgattgcagagccaaaagtggagtccagatctcctaacttccatactagaacatttttgctgtggggagtggagagagattgggttgatggtacctgcctgaagtttccatggttgctgggtggaaacagcactcttccttctgtcttggcactcaagcatcccgatggacattgaatttttccaatgattggtcatttgatgaccaggcaggggagcagaaaaggagatagtacagaccagaagctgtttgaggatgtgttgttgcctgaccagacaccttgaggccagaattctaagtagtttcaaaactcctccctttcataccccatctactgactttctgctttcttcaaaatgctctgttggccaggtgcagtggttcacgcctgcaatcccaacacttaggctgaggcgggaggattacatgggcccaggagttcaagaccagttgaggcaacataaggggctgggcccttttctctacg

SEQ ID NO: 298187 - DNA, 1942 bp, Homo sapiens
agggaggcggggcttcccgcgtcccccaagctccagatcctggggtggctgccacgtctccctgccacgcgcctggggggacggaagacgggacggagatgttagtggtgggcgccccccgagggttcaccactgtttcctgagaaacttccccagtgcccacccacccgttctccgtgtgcccgagggccggtcctgggctaggctccgcgccccagccccaaaccgggtccccagccccttccagagagaaagctcccgacgcgggatgccgggcagaggcccagcggcgggtggaagagaagctgagaaggagaaacagaggggagggggagcgaggagctggcggcagagggaacagcagattgcgccgagccaatggcaacggcaggacgaggtggcaccaaattcccttcggccaatgacgagccggagtttacagaagcctcattagcatttccccagaggcaggggcaggggcagaggccgggtggtgtggtgtcggtgtcggcagcatccccggcgccctgctgcggtcgccgcgagcctcggcctctgtctcctccccctcccgcccttacctccacgcgggaccgcccgcgccagtcaactcctcgcactttgcccctgcttggcagcggataaaagggggctgaggaaataccggacacggtcacccgttgccagctctagcctttaaattcccggctcggggacctccacgcaccgcggctagcgccgacaaccagctagcgtgcaaggcgccgcggctcagcgcgtaccggcgggcttcgaaaccgcagtcctccggcgaccccgaactccgctccggagcctcagccccctggaaagtgatcccggcatccgagagccaagatgccggcccacttgctgcaggacgatatctctagctcctataccaccaccaccaccattacagcgcctccctccagggtcctgcagaatggaggagataagttggagacgatgcccctctacttggaagacgacattcgccctgatataaaagatgatatatatgaccccacctacaaggataaggaaggcccaagccccaaggttgaatatgtctggagaaacatcatccttatgtctctgctacacttgggagccctgtatgggatcactttgattcctacctgcaagttctacacctggctttggggggtattctactattttgtcagtgccctgggcataacagcaggagctcatcgtctgtggagccaccgctcttacaaagctcggctgcccctacggctctttctgatcattgccaacacaatggcattccagaatgatgtctatgaatgggctcgtgaccaccgtgcccaccacaagttttcagaaacacatgctgatcctcataattcccgacgtggctttttcttctctcacgtgggttggctgcttgtgcgcaaacacccagctgtcaaagagaaggggagtacgctagacttgtctgacctagaagctgagaaactggtgatgttccagaggaggtactacaaacctggcttgctgatgatgtgcttcatcctgcccacgcttgtgccctggtatttctggggtgaaacttttcaaaacagtgtgttcgttgccactttcttgcgatatgctgtggtgcttaatgccacctggctggtgaacagtgctgcccacctcttcggatatcgtccttatgacaagaacattagcccccgggagaatatcctggtttcacttggagctgtgggtgagggcttccacaactaccaccactcctttccctatgactactctgccagtgagtaccgctggcacatcaacttcaccacattcttcattgattgcatggccgccctcggtctggcctatgaccggaagaaagtctccaaggccgccatcttggccaggattaaaagaaccggagatggaaact

SEQ ID NO: 298188 - DNA, 782 bp, Homo sapiens
gctgtcaaaccggaagcctaagtagacccaatcttgttaatgaaatgttctgagctgtatcttgaagtttagaaaagtattcgttacatcttgtaggatctactttttgaacttttcattccccgtagttgaccattctgcaagtactagtcctctagaaataggttaaactgaagcaacttgatggaaggatctctccacagggcttgttttcccaagaaaagtattgtttggaggagccaaggtaaaagcctacctaagcatatcgtaaagctgttccaaaataactcagacccagtcttgtggatggaaatgtagtgctcgagtcacattctgcttaaagttgtaaccaatacagatgagtttaaaggaaaaaagtctggaaaaaaacaaaaacagaatttgagaaccttggaccactcctgtccctgtagctcagtcatcaaagcagaagtctggctttgctctattaagattggaaatgtacactaccaaacactcagtccactgttgagccccagtgctggaagggaggaaggcctttcttctgtgttaattgcgtagaggctacaggggttagcctggactaaaggcatccttgtcttttgagctattcacctcagtagaaaaggatctaagggaagatcactgtagtttagttctgttgacctgtgcacctaccccttggaaatgtctgctggtatttctaattccacaggtcatcagatgcctgcttgataatatataaacaataaaaacaactttcacttcttcctattgta

SEQ ID NO: 298189 - DNA, 471 bp, Homo sapiens
cctgatggtgttaatcccattgattttattggtcctcttacttttatccgtggtattccttgcaacatactataaaagaaaaagaactaaacaagatccttcagcacaggaattctcaagacctgagtattttttataataggaatgtccaccatgaacttgatacgtccgtgtgtcccagatgctgtcattagtctatatggttctccaagaaactgaatgaatccattggagaagcggtggataactagccagacaaaatttgagaatacataaacaacgcattgccacggaaacatacagaggatgccttttctgtgattgggtgggattttttccctttttatgtgggatatagtagttacttgtgacaagaataattttggaataatttctattaatatcaactctgaagctaattgtactaatctgagattgtgtttgttcataataaaagtgaagtgaatctga

SEQ ID NO: 298190 - DNA, 5227 bp, Homo sapiens
agattctttccattttttattaattgaagcacagagaaaagaggcaaaatgattaaagaaatttatgttttttagacagggtgttggctttacaccaacgaaaaagaaaaacagatgaataagcttttgatcttcattttctttctcttattctcatggtaggctgagatgcttttaaatgtgatgttataagcctaaggcagcttgacttgcagcaacaagttttttaccctcctcggcaaagcaggtctccttatcgtcagccttgcagcacttctctatctctagctcctataccaccaccaccaccattacagcgcctccctccagggtcctgcagaatggaggagataagttggagacgatgcccctctacttggaagacgacattcgccctgatataaaagatgatatatatgaccccacctacaaggataaggaaggcccaagccccaaggttgaatatgtctggagaaacatcatccttatgtctctgctacacttgggagccctgtatgggatcactttgattcctacctgcaagttctacacctggctttggggggtattctactattttgtcagtgccctgggcataacagcaggagctcatcgtctgtggagccaccgctcttacaaagctcggctgcccctacggctctttctgatcattgccaacacaatggcattccagaatgatgtctatgaatgggctcgtgaccaccgtgcccaccacaagttttcagaaacacatgctgatcctcataattcccgacgtggctttttcttctctcacgtgggttggctgcttgtgcgcaaacacccagctgtcaaagagaaggggagtacgctagacttgtctgacctagaagctgagaaactggtgatgttccagaggaggtactacaaacctggcttgctgatgatgtgcttcatcctgcccacgcttgtgccctggtatttctggggtgaaacttttcaaaacagtgtgttcgttgccactttcttgcgatatgctgtggtgcttaatgccacctggctggtgaacagtgctgcccacctcttcggatatcgtccttatgacaagaacattagcccccgggagaatatcctggtttcacttggagctgtgggtgagggcttccacaactaccaccactcctttccctatgactactctgccagtgagtaccgctggcacatcaacttcaccacattcttcattgattgcatggccgccctcggtctggcctatgaccggaagaaagtctccaaggccgccatcttggccaggattaaaagaaccggagatggaaactacaagagtggctgagtttggggtccctcaggttcctttttcaaaaaccagccaggcagaggttttaatgtctgtttattaactactgaataatgctaccaggatgctaaagatgatgatgttaacccattccagtacagtattcttttaaaattcaaaagtattgaaagccaacaactctgcctttatgatgctaagctgatattatttcttctcttatcctctctctcttctaggcccattgtcctccttttcactttattgctatcgccctcctttcccttattgcctcccaggcaagcagctggtcagtctttgctcagtgtccagcttccaaagcctagacaacctttctgtagcctaaaacgaatggtctttgctccagataactctctttccttgagctgttgtgagctttgaagtaggtggcttgagctagagataaaacagaatcttctgggtagtcccctgttgattatcttcagcccaggcttttgctagatggaatggaaaagcaacttcatttgacacaaagcttctaaagcaggtaaattgtcgggggagagagttagcatgtatgaatgtaaggatgagggaagcgaagcaagaggaacctctcgccatgatcagacatacagctgcctacctaatgaggacttcaagccccaccacatagcatgcttcctttctctcctggctcggggtaaaaagtggctgcggtgtttggcaatgctaattcaatgccgcaacatatagttgaggccgaggataaagaaaagacattttaagtttgtagtaaaagtggtctctgctggggaagggttttcttttctttttttctttaataacaaggagatttcttagttcatatatcaagaagtcttgaagttgggtgtttccagaattggtaaaaacagcagctcatagaattttgagtattccatgagctgctcattacagttctttcctctttctgctctgccatcttcaggatattggttcttcccctcatagtaataagatggctgtggcatttccaaacatccaaaaaaagggaaggatttaaggaggtgaagtcgggtcaaaaataaaatatatatacatatatacattgcttagaacgttaaactattagagtatttcccttccaaagagggatgtttggaaaaaactctgaaggagaggaggaattagttgggatgccaatttcctctccactgctggacatgagatggagaggctgagggacaggatctataggcagcttctaagagcgaacttcacataggaagggatctgagaacacgttgccaggggcttgagaaggttactgagtgagttattgggagtcttaataaaataaactagatattaggtccattcattaattagttccagtttctccttgaaatgagtaaaaactagaaggcttctctccacagtgttgtgccccttcactcatttttttttgaggagaagggggtctctgttaacatctagcctaaagtatacaactgcctggggggcagggttaggaatctcttcactaccctgattcttgattcctggctctaccctgtctgtcccttttctttgaccagatctttctcttccctgaacgttttcttctttccctggacaggcagcctcctttgtgtgtattcagaggcagtgatgacttgctgtccaggcagctccctcctgcacacagaatgctcagggtcactgaaccactgcttctcttttgaaagtagagctagctgccactttcacgtggcctccgcagtgtctccacctacacccctgtgctcccctgccacactgatggctcaagacaaggctggcaaaccctcccagaaacatctctggcccagaaagcctctctctccctccctctctcatgaggcacagccaagccaagcgctcatgttgagccagtgggccagccacagagcaaaagagggtttattttcagtcccctctctctgggtcagaaccagagggcatgctgaatgccccctgcttacttggtgagggtgccccgcctgagtcagtgctctcagctggcagtgcaatgcttgtagaagtaggaggaaacagttctcactgggaagaagcaagggcaagaacccaagtgcctcacctcgaaaggaggccctgttccctggagtcagggtgaactgcaaagctttggctgagacctgggatttgagataccacaaaccctgctgaacacagtgtctgttcagcaaactaaccagcattccctacagcctagggcagacaatagtatagaagtctggaaaaaaacaaaaacagaatttgagaaccttggaccactcctgtccctgtagctcagtcatcaaagcagaagtctggctttgctctattaagattggaaatgtacactaccaaacactcagtccactgttgagccccagtgctggaagggaggaaggcctttcttctgtgttaattgcgtagaggctacaggggttagcctggactaaaggcatccttgtcttttgagctattcacctcagtagaaaaggatctaagggaagatcactgtagtttagttctgttgacctgtgcacctaccccttggaaatgtctgctggtatttctaattccacaggtcatcagatgcctgcttgataatatataaacaataaaaacaactttcacttcttcctattgtaatcgtgtgccatggatctgatctgtaccatgaccctacataaggctggatggcacctcaggctgagggccccaatgtatgtgtggctgtgggtgtgggtgggagtgtgtctgctgagtaaggaacacgattttcaagattctaaagctcaattcaagtgacacattaatgataaactcagatctgatcaagagtccggatttctaacagtccttgctttggggggtgtgctgacaacttagctcaggtgccttacatcttttctaatcacagtgttgcatatgagcctgccctcactccctctgcagaatccctttgcacctgagaccctactgaagtggctggtagaaaaaggggcctgagtggaggattatcagtatcacgatttgcaggattcccttctgggcttcattctggaaacttttgttagggctgcttttcttaagtgcccacatttgatggagggtggaaataatttgaatgtatttgatttataagttttttttttttttggggttaaaagatggttgtagcatttaaaatggaaaattttctcctgggttggctagtatctggggtgtattctctgtaagtgtagctcaaataggtcatcatgaaaggttaaaaaagcgaggtggccatgttatgcctggtggttaaggccagggcctctccaaccactgtgccactgacttgctgtgtgaccctgggcaagtcacttaactataaggtgcctcagttttccttctgttaaaatggggataataatactgacctacctcaaagggcagttttgaggcatgactaatgctttttagaaagcattttggggatccttcagcacaggaattctcaagacctgagtattttttataataggaatgtccaccatgaacttgatacgtccgtgtgtcccagatgctgtcattagtctatatggttctccaagaaactgaatgaatccattggagaagcggtggataactagccagacaaaatttgagaatacataaacaacgcattgccacggaaacatacagaggatgccttttctgtgattgggtgggattttttccctttttatgtgggatatagtagttacttgtgacaagaataattttggaataatttctattaatatcaactctgaagctaattgtactaatctgagattgtgtttgttcataataaaagtgaagtgaatctga

SEQ ID NO: 298191 - DNA, 5796 bp, Homo sapiens
agggaggcggggcttcccgcgtcccccaagctccagatcctggggtggctgccacgtctccctgccacgcgcctggggggacggaagacgggacggagatgttagtggtgggcgccccccgagggttcaccactgtttcctgagaaacttccccagtgcccacccacccgttctccgtgtgcccgagggccggtcctgggctaggctccgcgccccagccccaaaccgggtccccagccccttccagagagaaagctcccgacgcgggatgccgggcagaggcccagcggcgggtggaagagaagctgagaaggagaaacagaggggagggggagcgaggagctggcggcagagggaacagcagattgcgccgagccaatggcaacggcaggacgaggtggcaccaaattcccttcggccaatgacgagccggagtttacagaagcctcattagcatttccccagaggcaggggcaggggcagaggccgggtggtgtggtgtcggtgtcggcagcatccccggcgccctgctgcggtcgccgcgagcctcggcctctgtctcctccccctcccgcccttacctccacgcgggaccgcccgcgccagtcaactcctcgcactttgcccctgcttggcagcggataaaagggggctgaggaaataccggacacggtcacccgttgccagctctagcctttaaattcccggctcggggacctccacgcaccgcggctagcgccgacaaccagctagcgtgcaaggcgccgcggctcagcgcgtaccggcgggcttcgaaaccgcagtcctccggcgaccccgaactccgctccggagcctcagccccctggaaagtgatcccggcatccgagagccaagatgccggcccacttgctgcaggacgatatctctagctcctataccaccaccaccaccattacagcgcctccctccagggtcctgcagaatggaggagataagttggagacgatgcccctctacttggaagacgacattcgccctgatataaaagatgatatatatgaccccacctacaaggataaggaaggcccaagccccaaggttgaatatgtctggagaaacatcatccttatgtctctgctacacttgggagccctgtatgggatcactttgattcctacctgcaagttctacacctggctttggggggtattctactattttgtcagtgccctgggcataacagcaggagctcatcgtctgtggagccaccgctcttacaaagctcggctgcccctacggctctttctgatcattgccaacacaatggcattccagaatgatgtctatgaatgggctcgtgaccaccgtgcccaccacaagttttcagaaacacatgctgatcctcataattcccgacgtggctttttcttctctcacgtgggttggctgcttgtgcgcaaacacccagctgtcaaagagaaggggagtacgctagacttgtctgacctagaagctgagaaactggtgatgttccagaggaggtactacaaacctggcttgctgatgatgtgcttcatcctgcccacgcttgtgccctggtatttctggggtgaaacttttcactggctggtgaacagtgctgcccacctcttcggatatcgtccttatgacaagaacattagcccccgggagaatatcctggtttcacttggagctgtgggtgagggcttccacaactaccaccactcctttccctatgactactctgccagtgagtaccgctggcacatcaacttcaccacattcttcattgattgcatggccgccctcggtctggcctatgaccggaagaaagtctccaaggccgccatcttggccaggattaaaagaaccggagatggaaactacaagagtggctgagtttggggtccctcaggttcctttttcaaaaaccagccaggcagaggttttaatgtctgtttattaactactgaataatgctaccaggatgctaaagatgatgatgttaacccattccagtacagtattcttttaaaattcaaaagtattgaaagccaacaactctgcctttatgatgctaagctgatattatttcttctcttatcctctctctcttctaggcccattgtcctccttttcactttattgctatcgccctcctttcccttattgcctcccaggcaagcagctggtcagtctttgctcagtgtccagcttccaaagcctagacaacctttctgtagcctaaaacgaatggtctttgctccagataactctctttccttgagctgttgtgagctttgaagtaggtggcttgagctagagataaaacagaatcttctgggtagtcccctgttgattatcttcagcccaggcttttgctagatggaatggaaaagcaacttcatttgacacaaagcttctaaagcaggtaaattgtcgggggagagagttagcatgtatgaatgtaaggatgagggaagcgaagcaagaggaacctctcgccatgatcagacatacagctgcctacctaatgaggacttcaagccccaccacatagcatgcttcctttctctcctggctcggggtaaaaagtggctgcggtgtttggcaatgctaattcaatgccgcaacatatagttgaggccgaggataaagaaaagacattttaagtttgtagtaaaagtggtctctgctggggaagggttttcttttctttttttctttaataacaaggagatttcttagttcatatatcaagaagtcttgaagttgggtgtttccagaattggtaaaaacagcagctcatagaattttgagtattccatgagctgctcattacagttctttcctctttctgctctgccatcttcaggatattggttcttcccctcatagtaataagatggctgtggcatttccaaacatccaaaaaaagggaaggatttaaggaggtgaagtcgggtcaaaaataaaatatatatacatatatacattgcttagaacgttaaactattagagtatttcccttccaaagagggatgtttggaaaaaactctgaaggagaggaggaattagttgggatgccaatttcctctccactgctggacatgagatggagaggctgagggacaggatctataggcagcttctaagagcgaacttcacataggaagggatctgagaacacgttgccaggggcttgagaaggttactgagtgagttattgggagtcttaataaaataaactagatattaggtccattcattaattagttccagtttctccttgaaatgagtaaaaactagaaggcttctctccacagtgttgtgccccttcactcatttttttttgaggagaagggggtctctgttaacatctagcctaaagtatacaactgcctggggggcagggttaggaatctcttcactaccctgattcttgattcctggctctaccctgtctgtcccttttctttgaccagatctttctcttccctgaacgttttcttctttccctggacaggcagcctcctttgtgtgtattcagaggcagtgatgacttgctgtccaggcagctccctcctgcacacagaatgctcagggtcactgaaccactgcttctcttttgaaagtagagctagctgccactttcacgtggcctccgcagtgtctccacctacacccctgtgctcccctgccacactgatggctcaagacaaggctggcaaaccctcccagaaacatctctggcccagaaagcctctctctccctccctctctcatgaggcacagccaagccaagcgctcatgttgagccagtgggccagccacagagcaaaagagggtttattttcagtcccctctctctgggtcagaaccagagggcatgctgaatgccccctgcttacttggtgagggtgccccgcctgagtcagtgctctcagctggcagtgcaatgcttgtagaagtaggaggaaacagttctcactgggaagaagcaagggcaagaacccaagtgcctcacctcgaaaggaggccctgttccctggagtcagggtgaactgcaaagctttggctgagacctgggatttgagataccacaaaccctgctgaacacagtgtctgttcagcaaactaaccagcattccctacagcctagggcagacaatagtatagaagtctggaaaaaaacaaaaacagaatttgagaaccttggaccactcctgtccctgtagctcagtcatcaaagcagaagtctggctttgctctattaagattggaaatgtacactaccaaacactcagtccactgttgagccccagtgctggaagggaggaaggcctttcttctgtgttaattgcgtagaggctacaggggttagcctggactaaaggcatccttgtcttttgagctattcacctcagtagaaaaggatctaagggaagatcactgtagtttagttctgttgacctgtgcacctaccccttggaaatgtctgctggtatttctaattccacaggtcatcagatgcctgcttgataatatataaacaataaaaacaactttcacttcttcctattgtaatcgtgtgccatggatctgatctgtaccatgaccctacataaggctggatggcacctcaggctgagggccccaatgtatgtgtggctgtgggtgtgggtgggagtgtgtctgctgagtaaggaacacgattttcaagattctaaagctcaattcaagtgacacattaatgataaactcagatctgatcaagagtccggatttctaacagtccttgctttggggggtgtgctgacaacttagctcaggtgccttacatcttttctaatcacagtgttgcatatgagcctgccctcactccctctgcagaatccctttgcacctgagaccctactgaagtggctggtagaaaaaggggcctgagtggaggattatcagtatcacgatttgcaggattcccttctgggcttcattctggaaacttttgttagggctgcttttcttaagtgcccacatttgatggagggtggaaataatttgaatgtatttgatttataagttttttttttttttggggttaaaagatggttgtagcatttaaaatggaaaattttctcctgggttggctagtatctggggtgtattctctgtaagtgtagctcaaataggtcatcatgaaaggttaaaaaagcgaggtggccatgttatgcctggtggttaaggccagggcctctccaaccactgtgccactgacttgctgtgtgaccctgggcaagtcacttaactataaggtgcctcagttttccttctgttaaaatggggataataatactgacctacctcaaagggcagttttgaggcatgactaatgctttttagaaagcattttggggatccttcagcacaggaattctcaagacctgagtattttttataataggaatgtccaccatgaacttgatacgtccgtgtgtcccagatgctgtcattagtctatatggttctccaagaaactgaatgaatccattggagaagcggtggataactagccagacaaaatttgagaatacataaacaacgcattgccacggaaacatacagaggatgccttttctgtgattgggtgggattttttccctttttatgtgggatatagtagttacttgtgacaagaataattttggaataatttctattaatatcaactctgaagctaattgtactaatctgagattgtgtttgttcataataaaagtgaagtgaatctga

SEQ ID NO: 298192 - DNA, 6001 bp, Homo sapiens
  misc_feature (5885)..(5885): n is a, c, g, or t
agggaggcggggcttcccgcgtcccccaagctccagatcctggggtggctgccacgtctccctgccacgcgcctggggggacggaagacgggacggagatgttagtggtgggcgccccccgagggttcaccactgtttcctgagaaacttccccagtgcccacccacccgttctccgtgtgcccgagggccggtcctgggctaggctccgcgccccagccccaaaccgggtccccagccccttccagagagaaagctcccgacgcgggatgccgggcagaggcccagcggcgggtggaagagaagctgagaaggagaaacagaggggagggggagcgaggagctggcggcagagggaacagcagattgcgccgagccaatggcaacggcaggacgaggtggcaccaaattcccttcggccaatgacgagccggagtttacagaagcctcattagcatttccccagaggcaggggcaggggcagaggccgggtggtgtggtgtcggtgtcggcagcatccccggcgccctgctgcggtcgccgcgagcctcggcctctgtctcctccccctcccgcccttacctccacgcgggaccgcccgcgccagtcaactcctcgcactttgcccctgcttggcagcggataaaagggggctgaggaaataccggacacggtcacccgttgccagctctagcctttaaattcccggctcggggacctccacgcaccgcggctagcgccgacaaccagctagcgtgcaaggcgccgcggctcagcgcgtaccggcgggcttcgaaaccgcagtcctccggcgaccccgaactccgctccggagcctcagccccctggaaagtgatcccggcatccgagagccaagatgccggcccacttgctgcaggacgatatctctagctcctataccaccaccaccaccattacagcgcctccctccagggtcctgcagaatggaggagataagttggagacgatgcccctctacttggaagacgacattcgccctgatataaaagatgatatatatgaccccacctacaaggataaggaaggcccaagccccaaggttgaatatgtctggagaaacatcatccttatgtctctgctacacttgggagccctgtatgggatcactttgattcctacctgcaagttctacacctggctttggggggtattctactattttgtcagtgccctgggcataacagcaggagctcatcgtctgtggagccaccgctcttacaaagctcggctgcccctacggctctttctgatcattgccaacacaatggcattccagaatgatgtctatgaatgggctcgtgaccaccgtgcccaccacaagttttcagaaacacatgctgatcctcataattcccgacgtggctttttcttctctcacgtgggttggctgcttgtgcgcaaacacccagctgtcaaagagaaggggagtacgctagacttgtctgacctagaagctgagaaactggtgatgttccagaggaggtactacaaacctggcttgctgatgatgtgcttcatcctgcccacgcttgtgccctggtatttctggggtgaaacttttcaaaacagtgtgttcgttgccactttcttgcgatatgctgtggtgcttaatgccacctggctggtgaacagtgctgcccacctcttcggatatcgtccttatgacaagaacattagcccccgggagaatatcctggtttcacttggagctgtgggtgagggcttccacaactaccaccactcctttccctatgactactctgccagtgagtaccgctggcacatcaacttcaccacattcttcattgattgcatggccgccctcggtctggcctatgaccggaagaaagtctccaaggccgccatcttggccaggattaaaagaaccggagatggaaactacaagagtggctgagtttggggtccctcaggttcctttttcaaaaaccagccaggcagaggttttaatgtctgtttattaactactgaataatgctaccaggatgctaaagatgatgatgttaacccattccagtacagtattcttttaaaattcaaaagtattgaaagccaacaactctgcctttatgatgctaagctgatattatttcttctcttatcctctctctcttctaggcccattgtcctccttttcactttattgctatcgccctcctttcccttattgcctcccaggcaagcagctggtcagtctttgctcagtgtccagcttccaaagcctagacaacctttctgtagcctaaaacgaatggtctttgctccagataactctctttccttgagctgttgtgagctttgaagtaggtggcttgagctagagataaaacagaatcttctgggtagtcccctgttgattatcttcagcccaggcttttgctagatggaatggaaaagcaacttcatttgacacaaagcttctaaagcaggtaaattgtcgggggagagagttagcatgtatgaatgtaaggatgagggaagcgaagcaagaggaacctctcgccatgatcagacatacagctgcctacctaatgaggacttcaagccccaccacatagcatgcttcctttctctcctggctcggggtaaaaagtggctgcggtgtttggcaatgctaattcaatgccgcaacatatagttgaggccgaggataaagaaaagacattttaagtttgtagtaaaagtggtctctgctggggaagggttttcttttctttttttctttaataacaaggagatttcttagttcatatatcaagaagtcttgaagttgggtgtttccagaattggtaaaaacagcagctcatagaattttgagtattccatgagctgctcattacagttctttcctctttctgctctgccatcttcaggatattggttcttcccctcatagtaataagatggctgtggcatttccaaacatccaaaaaaagggaaggatttaaggaggtgaagtcgggtcaaaaataaaatatatatacatatatacattgcttagaacgttaaactattagagtatttcccttccaaagagggatgtttggaaaaaactctgaaggagaggaggaattagttgggatgccaatttcctctccactgctggacatgagatggagaggctgagggacaggatctataggcagcttctaagagcgaacttcacataggaagggatctgagaacacgttgccaggggcttgagaaggttactgagtgagttattgggagtcttaataaaataaactagatattaggtccattcattaattagttccagtttctccttgaaatgagtaaaaactagaaggcttctctccacagtgttgtgccccttcactcatttttttttgaggagaagggggtctctgttaacatctagcctaaagtatacaactgcctggggggcagggttaggaatctcttcactaccctgattcttgattcctggctctaccctgtctgtcccttttctttgaccagatctttctcttccctgaacgttttcttctttccctggacaggcagcctcctttgtgtgtattcagaggcagtgatgacttgctgtccaggcagctccctcctgcacacagaatgctcagggtcactgaaccactgcttctcttttgaaagtagagctagctgccactttcacgtggcctccgcagtgtctccacctacacccctgtgctcccctgccacactgatggctcaagacaaggctggcaaaccctcccagaaacatctctggcccagaaagcctctctctccctccctctctcatgaggcacagccaagccaagcgctcatgttgagccagtgggccagccacagagcaaaagagggtttattttcagtcccctctctctgggtcagaaccagagggcatgctgaatgccccctgcttacttggtgagggtgccccgcctgagtcagtgctctcagctggcagtgcaatgcttgtagaagtaggaggaaacagttctcactgggaagaagcaagggcaagaacccaagtgcctcacctcgaaaggaggccctgttccctggagtcagggtgaactgcaaagctttggctgagacctgggatttgagataccacaaaccctgctgaacacagtgtctgttcagcaaactaaccagcattccctacagcctagggcagacaatagtatagaagtctggaaaaaaacaaaaacagaatttgagaaccttggaccactcctgtccctgtagctcagtcatcaaagcagaagtctggctttgctctattaagattggaaatgtacactaccaaacactcagtccactgttgagccccagtgctggaagggaggaaggcctttcttctgtgttaattgcgtagaggctacaggggttagcctggactaaaggcatccttgtcttttgagctattcacctcagtagaaaaggatctaagggaagatcactgtagtttagttctgttgacctgtgcacctaccccttggaaatgtctgctggtatttctaattccacaggtcatcagatgcctgcttgataatatataaacaataaaaacaactttcacttcttcctattgtaatcgtgtgccatggatctgatctgtaccatgaccctacataaggctggatggcacctcaggctgagggccccaatgtatgtgtggctgtgggtgtgggtgggagtgtgtctgctgagtaaggaacacgattttcaagattctaaagctcaattcaagtgacacattaatgataaactcagatctgatcaagagtccggatttctaacagtccttgctttggggggtgtgctgacaacttagctcaggtgccttacatcttttctaatcacagtgttgcatatgagcctgccctcactccctctgcagaatccctttgcacctgagaccctactgaagtggctggtagaaaaaggggcctgagtggaggattatcagtatcacgatttgcaggattcccttctgggcttcattctggaaacttttgttagggctgcttttcttaagtgcccacatttgatggagggtggaaataatttgaatgtatttgatttataagttttttttttttttggggttaaaagatggttgtagcatttaaaatggaaaattttctcctgggttggctagtatctggggtgtattctctgtaagtgtagctcaaataggtcatcatgaaaggttaaaaaagcgaggtggccatgttatgcctggtggttaaggccagggcctctccaaccactgtgccactgacttgctgtgtgaccctgggcaagtcacttaactataaggtgcctcagttttccttctgttaaaatggggataataatactgacctacctcaaagggcagttttgaggcatgactaatgctttttagaaagcattttggggatccttcagcacaggaattctcaagacctgagtattttttataataggaatgtccaccatgaacttgatacgtccgtgtgtcccagatgctgtcattagtctatatggttctccaagaaactgaatgaatccattggagaagcggtggataactagccagacaaaatttgagaatacataaacaacgcattgccacggaaacatacagaggatgccttttctgtgattgggtgggattttttccctttttatgtgggatatagtagttacttgtgacaagaataattttggaataatttctattaatatcaactctgaagctaattgtactaatctgagattgtgtttgttcataataaaagtgaagtgaatctgaaaaaaaaaaaaaaaaaaaaaaaaaaaaaaaaaaanaaaaaaaaaaaaaaaaaaaaaaaaaaaaaaaaaaaaaaaaaaaaaaaaaaaaaaaaaaaaaaaacaaaaaaaagaaagaaaaaaaaaaaaaaaaaaaaaaaacaagaaaaaaaaaa

SEQ ID NO: 298193 - DNA, 4203 bp, Homo sapiens
agggagagaggattaactctagactggagtcgccttgtcgtcctgcttagcgagagaggcaagaacattagcccccgggagaatatcctggtttcacttggagctgtgggtgagggcttccacaactaccaccactcctttccctatgactactctgccagtgagtaccgctggcacatcaacttcaccacattcttcattgattgcatggccgccctcggtctggcctatgaccggaagaaagtctccaaggccgccatcttggccaggattaaaagaaccggagatggaaactacaagagtggctgagtttggggtccctcaggttcctttttcaaaaaccagccaggcagaggttttaatgtctgtttattaactactgaataatgctaccaggatgctaaagatgatgatgttaacccattccagtacagtattcttttaaaattcaaaagtattgaaagccaacaactctgcctttatgatgctaagctgatattatttcttctcttatcctctctctcttctaggcccattgtcctccttttcactttattgctatcgccctcctttcccttattgcctcccaggcaagcagctggtcagtctttgctcagtgtccagcttccaaagcctagacaacctttctgtagcctaaaacgaatggtctttgctccagataactctctttccttgagctgttgtgagctttgaagtaggtggcttgagctagagataaaacagaatcttctgggtagtcccctgttgattatcttcagcccaggcttttgctagatggaatggaaaagcaacttcatttgacacaaagcttctaaagcaggtaaattgtcgggggagagagttagcatgtatgaatgtaaggatgagggaagcgaagcaagaggaacctctcgccatgatcagacatacagctgcctacctaatgaggacttcaagccccaccacatagcatgcttcctttctctcctggctcggggtaaaaagtggctgcggtgtttggcaatgctaattcaatgccgcaacatatagttgaggccgaggataaagaaaagacattttaagtttgtagtaaaagtggtctctgctggggaagggttttcttttctttttttctttaataacaaggagatttcttagttcatatatcaagaagtcttgaagttgggtgtttccagaattggtaaaaacagcagctcatagaattttgagtattccatgagctgctcattacagttctttcctctttctgctctgccatcttcaggatattggttcttcccctcatagtaataagatggctgtggcatttccaaacatccaaaaaaagggaaggatttaaggaggtgaagtcgggtcaaaaataaaatatatatacatatatacattgcttagaacgttaaactattagagtatttcccttccaaagagggatgtttggaaaaaactctgaaggagaggaggaattagttgggatgccaatttcctctccactgctggacatgagatggagaggctgagggacaggatctataggcagcttctaagagcgaacttcacataggaagggatctgagaacacgttgccaggggcttgagaaggttactgagtgagttattgggagtcttaataaaataaactagatattaggtccattcattaattagttccagtttctccttgaaatgagtaaaaactagaaggcttctctccacagtgttgtgccccttcactcatttttttttgaggagaagggggtctctgttaacatctagcctaaagtatacaactgcctggggggcagggttaggaatctcttcactaccctgattcttgattcctggctctaccctgtctgtcccttttctttgaccagatctttctcttccctgaacgttttcttctttccctggacaggcagcctcctttgtgtgtattcagaggcagtgatgacttgctgtccaggcagctccctcctgcacacagaatgctcagggtcactgaaccactgcttctcttttgaaagtagagctagctgccactttcacgtggcctccgcagtgtctccacctacacccctgtgctcccctgccacactgatggctcaagacaaggctggcaaaccctcccagaaacatctctggcccagaaagcctctctctccctccctctctcatgaggcacagccaagccaagcgctcatgttgagccagtgggccagccacagagcaaaagagggtttattttcagtcccctctctctgggtcagaaccagagggcatgctgaatgccccctgcttacttggtgagggtgccccgcctgagtcagtgctctcagctggcagtgcaatgcttgtagaagtaggaggaaacagttctcactgggaagaagcaagggcaagaacccaagtgcctcacctcgaaaggaggccctgttccctggagtcagggtgaactgcaaagctttggctgagacctgggatttgagataccacaaaccctgctgaacacagtgtctgttcagcaaactaaccagcattccctacagcctagggcagacaatagtatagaagtctggaaaaaaacaaaaacagaatttgagaaccttggaccactcctgtccctgtagctcagtcatcaaagcagaagtctggctttgctctattaagattggaaatgtacactaccaaacactcagtccactgttgagccccagtgctggaagggaggaaggcctttcttctgtgttaattgcgtagaggctacaggggttagcctggactaaaggcatccttgtcttttgagctattcacctcagtagaaaaggatctaagggaagatcactgtagtttagttctgttgacctgtgcacctaccccttggaaatgtctgctggtatttctaattccacaggtcatcagatgcctgcttgataatatataaacaataaaaacaactttcacttcttcctattgtaatcgtgtgccatggatctgatctgtaccatgaccctacataaggctggatggcacctcaggctgagggccccaatgtatgtgtggctgtgggtgtgggtgggagtgtgtctgctgagtaaggaacacgattttcaagattctaaagctcaattcaagtgacacattaatgataaactcagatctgatcaagagtccggatttctaacagtccttgctttggggggtgtgctgacaacttagctcaggtgccttacatcttttctaatcacagtgttgcatatgagcctgccctcactccctctgcagaatccctttgcacctgagaccctactgaagtggctggtagaaaaaggggcctgagtggaggattatcagtatcacgatttgcaggattcccttctgggcttcattctggaaacttttgttagggctgcttttcttaagtgcccacatttgatggagggtggaaataatttgaatgtatttgatttataagttttttttttttttggggttaaaagatggttgtagcatttaaaatggaaaattttctcctgggttggctagtatctggggtgtattctctgtaagtgtagctcaaataggtcatcatgaaaggttaaaaaagcgaggtggccatgttatgcctggtggttaaggccagggcctctccaaccactgtgccactgacttgctgtgtgaccctgggcaagtcacttaactataaggtgcctcagttttccttctgttaaaatggggataataatactgacctacctcaaagggcagttttgaggcatgactaatgctttttagaaagcattttggggatccttcagcacaggaattctcaagacctgagtattttttataataggaatgtccaccatgaacttgatacgtccgtgtgtcccagatgctgtcattagtctatatggttctccaagaaactgaatgaatccattggagaagcggtggataactagccagacaaaatttgagaatacataaacaacgcattgccacggaaacatacagaggatgccttttctgtgattgggtgggattttttccctttttatgtgggatatagtagttacttgtgacaagaataattttggaataatttctattaatatcaactctgaagctaattgtactaatctgagattgtgtttgttcataataaaagtgaagtgaatctga

SEQ ID NO: 298194 - DNA, 4164 bp, Homo sapiens
gcaggattctcccgggggctatgttcttgtcatcaaggacgcatatccgaagaggtgggcagcactgttcaccagccaggtggcattaagcaccactcctttccctatgactactctgccagtgagtaccgctggcacatcaacttcaccacattcttcattgattgcatggccgccctcggtctggcctatgaccggaagaaagtctccaaggccgccatcttggccaggattaaaagaaccggagatggaaactacaagagtggctgagtttggggtccctcaggttcctttttcaaaaaccagccaggcagaggttttaatgtctgtttattaactactgaataatgctaccaggatgctaaagatgatgatgttaacccattccagtacagtattcttttaaaattcaaaagtattgaaagccaacaactctgcctttatgatgctaagctgatattatttcttctcttatcctctctctcttctaggcccattgtcctccttttcactttattgctatcgccctcctttcccttattgcctcccaggcaagcagctggtcagtctttgctcagtgtccagcttccaaagcctagacaacctttctgtagcctaaaacgaatggtctttgctccagataactctctttccttgagctgttgtgagctttgaagtaggtggcttgagctagagataaaacagaatcttctgggtagtcccctgttgattatcttcagcccaggcttttgctagatggaatggaaaagcaacttcatttgacacaaagcttctaaagcaggtaaattgtcgggggagagagttagcatgtatgaatgtaaggatgagggaagcgaagcaagaggaacctctcgccatgatcagacatacagctgcctacctaatgaggacttcaagccccaccacatagcatgcttcctttctctcctggctcggggtaaaaagtggctgcggtgtttggcaatgctaattcaatgccgcaacatatagttgaggccgaggataaagaaaagacattttaagtttgtagtaaaagtggtctctgctggggaagggttttcttttctttttttctttaataacaaggagatttcttagttcatatatcaagaagtcttgaagttgggtgtttccagaattggtaaaaacagcagctcatagaattttgagtattccatgagctgctcattacagttctttcctctttctgctctgccatcttcaggatattggttcttcccctcatagtaataagatggctgtggcatttccaaacatccaaaaaaagggaaggatttaaggaggtgaagtcgggtcaaaaataaaatatatatacatatatacattgcttagaacgttaaactattagagtatttcccttccaaagagggatgtttggaaaaaactctgaaggagaggaggaattagttgggatgccaatttcctctccactgctggacatgagatggagaggctgagggacaggatctataggcagcttctaagagcgaacttcacataggaagggatctgagaacacgttgccaggggcttgagaaggttactgagtgagttattgggagtcttaataaaataaactagatattaggtccattcattaattagttccagtttctccttgaaatgagtaaaaactagaaggcttctctccacagtgttgtgccccttcactcatttttttttgaggagaagggggtctctgttaacatctagcctaaagtatacaactgcctggggggcagggttaggaatctcttcactaccctgattcttgattcctggctctaccctgtctgtcccttttctttgaccagatctttctcttccctgaacgttttcttctttccctggacaggcagcctcctttgtgtgtattcagaggcagtgatgacttgctgtccaggcagctccctcctgcacacagaatgctcagggtcactgaaccactgcttctcttttgaaagtagagctagctgccactttcacgtggcctccgcagtgtctccacctacacccctgtgctcccctgccacactgatggctcaagacaaggctggcaaaccctcccagaaacatctctggcccagaaagcctctctctccctccctctctcatgaggcacagccaagccaagcgctcatgttgagccagtgggccagccacagagcaaaagagggtttattttcagtcccctctctctgggtcagaaccagagggcatgctgaatgccccctgcttacttggtgagggtgccccgcctgagtcagtgctctcagctggcagtgcaatgcttgtagaagtaggaggaaacagttctcactgggaagaagcaagggcaagaacccaagtgcctcacctcgaaaggaggccctgttccctggagtcagggtgaactgcaaagctttggctgagacctgggatttgagataccacaaaccctgctgaacacagtgtctgttcagcaaactaaccagcattccctacagcctagggcagacaatagtatagaagtctggaaaaaaacaaaaacagaatttgagaaccttggaccactcctgtccctgtagctcagtcatcaaagcagaagtctggctttgctctattaagattggaaatgtacactaccaaacactcagtccactgttgagccccagtgctggaagggaggaaggcctttcttctgtgttaattgcgtagaggctacaggggttagcctggactaaaggcatccttgtcttttgagctattcacctcagtagaaaaggatctaagggaagatcactgtagtttagttctgttgacctgtgcacctaccccttggaaatgtctgctggtatttctaattccacaggtcatcagatgcctgcttgataatatataaacaataaaaacaactttcacttcttcctattgtaatcgtgtgccatggatctgatctgtaccatgaccctacataaggctggatggcacctcaggctgagggccccaatgtatgtgtggctgtgggtgtgggtgggagtgtgtctgctgagtaaggaacacgattttcaagattctaaagctcaattcaagtgacacattaatgataaactcagatctgatcaagagtccggatttctaacagtccttgctttggggggtgtgctgacaacttagctcaggtgccttacatcttttctaatcacagtgttgcatatgagcctgccctcactccctctgcagaatccctttgcacctgagaccctactgaagtggctggtagaaaaaggggcctgagtggaggattatcagtatcacgatttgcaggattcccttctgggcttcattctggaaacttttgttagggctgcttttcttaagtgcccacatttgatggagggtggaaataatttgaatgtatttgatttataagttttttttttttttggggttaaaagatggttgtagcatttaaaatggaaaattttctcctgggttggctagtatctggggtgtattctctgtaagtgtagctcaaataggtcatcatgaaaggttaaaaaagcgaggtggccatgttatgcctggtggttaaggccagggcctctccaaccactgtgccactgacttgctgtgtgaccctgggcaagtcacttaactataaggtgcctcagttttccttctgttaaaatggggataataatactgacctacctcaaagggcagttttgaggcatgactaatgctttttagaaagcattttggggatccttcagcacaggaattctcaagacctgagtattttttataataggaatgtccaccatgaacttgatacgtccgtgtgtcccagatgctgtcattagtctatatggttctccaagaaactgaatgaatccattggagaagcggtggataactagccagacaaaatttgagaatacataaacaacgcattgccacggaaacatacagaggatgccttttctgtgattgggtgggattttttccctttttatgtgggatatagtagttacttgtgacaagaataattttggaataatttctattaatatcaactctgaagctaattgtactaatctgagattgtgtttgttcataataaaagtgaagtgaatctga

SEQ ID NO: 298195 - DNA, 5881 bp, Homo sapiens
agggaggcggggcttcccgcgtcccccaagctccagatcctggggtggctgccacgtctccctgccacgcgcctggggggacggaagacgggacggagatgttagtggtgggcgccccccgagggttcaccactgtttcctgagaaacttccccagtgcccacccacccgttctccgtgtgcccgagggccggtcctgggctaggctccgcgccccagccccaaaccgggtccccagccccttccagagagaaagctcccgacgcgggatgccgggcagaggcccagcggcgggtggaagagaagctgagaaggagaaacagaggggagggggagcgaggagctggcggcagagggaacagcagattgcgccgagccaatggcaacggcaggacgaggtggcaccaaattcccttcggccaatgacgagccggagtttacagaagcctcattagcatttccccagaggcaggggcaggggcagaggccgggtggtgtggtgtcggtgtcggcagcatccccggcgccctgctgcggtcgccgcgagcctcggcctctgtctcctccccctcccgcccttacctccacgcgggaccgcccgcgccagtcaactcctcgcactttgcccctgcttggcagcggataaaagggggctgaggaaataccggacacggtcacccgttgccagctctagcctttaaattcccggctcggggacctccacgcaccgcggctagcgccgacaaccagctagcgtgcaaggcgccgcggctcagcgcgtaccggcgggcttcgaaaccgcagtcctccggcgaccccgaactccgctccggagcctcagccccctggaaagtgatcccggcatccgagagccaagatgccggcccacttgctgcaggacgatatctctagctcctataccaccaccaccaccattacagcgcctccctccagggtcctgcagaatggaggagataagttggagacgatgcccctctacttggaagacgacattcgccctgatataaaagatgatatatatgaccccacctacaaggataaggaaggcccaagccccaaggttgaatatgtctggagaaacatcatccttatgtctctgctacacttgggagccctgtatgggatcactttgattcctacctgcaagttctacacctggctttggggggtattctactattttgtcagtgccctgggcataacagcaggagctcatcgtctgtggagccaccgctcttacaaagctcggctgcccctacggctctttctgatcattgccaacacaatggcattccagaatgatgtctatgaatgggctcgtgaccaccgtgcccaccacaagttttcagaaacacatgctgatcctcataattcccgacgtggctttttcttctctcacgtgggttggctgcttgtgcgcaaacacccagctgtcaaagagaaggggagtacgctagacttgtctgacctagaagctgagaaactggtgatgttccagaggaggtactacaaacctggcttgctgatgatgtgcttcatcctgcccacgcttgtgccctggtatttctggggtgaaacttttcaaaacagtgtgttcgttgccactttcttgcgatatgctgtggtgcttaatgccacctggctggtgaacagtgctgcccacctcttcggatatcgtccttatgacaagaacattagcccccgggagaatatcctggtttcacttggagctgtgggtgagggcttccacaactaccaccactcctttccctatgactactctgccagtgagtaccgctggcacatcaacttcaccacattcttcattgattgcatggccgccctcggtctggcctatgaccggaagaaagtctccaaggccgccatcttggccaggattaaaagaaccggagatggaaactacaagagtggctgagtttggggtccctcaggttcctttttcaaaaaccagccaggcagaggttttaatgtctgtttattaactactgaataatgctaccaggatgctaaagatgatgatgttaacccattccagtacagtattcttttaaaattcaaaagtattgaaagccaacaactctgcctttatgatgctaagctgatattatttcttctcttatcctctctctcttctaggcccattgtcctccttttcactttattgctatcgccctcctttcccttattgcctcccaggcaagcagctggtcagtctttgctcagtgtccagcttccaaagcctagacaacctttctgtagcctaaaacgaatggtctttgctccagataactctctttccttgagctgttgtgagctttgaagtaggtggcttgagctagagataaaacagaatcttctgggtagtcccctgttgattatcttcagcccaggcttttgctagatggaatggaaaagcaacttcatttgacacaaagcttctaaagcaggtaaattgtcgggggagagagttagcatgtatgaatgtaaggatgagggaagcgaagcaagaggaacctctcgccatgatcagacatacagctgcctacctaatgaggacttcaagccccaccacatagcatgcttcctttctctcctggctcggggtaaaaagtggctgcggtgtttggcaatgctaattcaatgccgcaacatatagttgaggccgaggataaagaaaagacattttaagtttgtagtaaaagtggtctctgctggggaagggttttcttttctttttttctttaataacaaggagatttcttagttcatatatcaagaagtcttgaagttgggtgtttccagaattggtaaaaacagcagctcatagaattttgagtattccatgagctgctcattacagttctttcctctttctgctctgccatcttcaggatattggttcttcccctcatagtaataagatggctgtggcatttccaaacatccaaaaaaagggaaggatttaaggaggtgaagtcgggtcaaaaataaaatatatatacatatatacattgcttagaacgttaaactattagagtatttcccttccaaagagggatgtttggaaaaaactctgaaggagaggaggaattagttgggatgccaatttcctctccactgctggacatgagatggagaggctgagggacaggatctataggcagcttctaagagcgaacttcacataggaagggatctgagaacacgttgccaggggcttgagaaggttactgagtgagttattgggagtcttaataaaataaactagatattaggtccattcattaattagttccagtttctccttgaaatgagtaaaaactagaaggcttctctccacagtgttgtgccccttcactcatttttttttgaggagaagggggtctctgttaacatctagcctaaagtatacaactgcctggggggcagggttaggaatctcttcactaccctgattcttgattcctggctctaccctgtctgtcccttttctttgaccagatctttctcttccctgaacgttttcttctttccctggacaggcagcctcctttgtgtgtattcagaggcagtgatgacttgctgtccaggcagctccctcctgcacacagaatgctcagggtcactgaaccactgcttctcttttgaaagtagagctagctgccactttcacgtggcctccgcagtgtctccacctacacccctgtgctcccctgccacactgatggctcaagacaaggctggcaaaccctcccagaaacatctctggcccagaaagcctctctctccctccctctctcatgaggcacagccaagccaagcgctcatgttgagccagtgggccagccacagagcaaaagagggtttattttcagtcccctctctctgggtcagaaccagagggcatgctgaatgccccctgcttacttggtgagggtgccccgcctgagtcagtgctctcagctggcagtgcaatgcttgtagaagtaggaggaaacagttctcactgggaagaagcaagggcaagaacccaagtgcctcacctcgaaaggaggccctgttccctggagtcagggtgaactgcaaagctttggctgagacctgggatttgagataccacaaaccctgctgaacacagtgtctgttcagcaaactaaccagcattccctacagcctagggcagacaatagtatagaagtctggaaaaaaacaaaaacagaatttgagaaccttggaccactcctgtccctgtagctcagtcatcaaagcagaagtctggctttgctctattaagattggaaatgtacactaccaaacactcagtccactgttgagccccagtgctggaagggaggaaggcctttcttctgtgttaattgcgtagaggctacaggggttagcctggactaaaggcatccttgtcttttgagctattcacctcagtagaaaaggatctaagggaagatcactgtagtttagttctgttgacctgtgcacctaccccttggaaatgtctgctggtatttctaattccacaggtcatcagatgcctgcttgataatatataaacaataaaaacaactttcacttcttcctattgtaatcgtgtgccatggatctgatctgtaccatgaccctacataaggctggatggcacctcaggctgagggccccaatgtatgtgtggctgtgggtgtgggtgggagtgtgtctgctgagtaaggaacacgattttcaagattctaaagctcaattcaagtgacacattaatgataaactcagatctgatcaagagtccggatttctaacagtccttgctttggggggtgtgctgacaacttagctcaggtgccttacatcttttctaatcacagtgttgcatatgagcctgccctcactccctctgcagaatccctttgcacctgagaccctactgaagtggctggtagaaaaaggggcctgagtggaggattatcagtatcacgatttgcaggattcccttctgggcttcattctggaaacttttgttagggctgcttttcttaagtgcccacatttgatggagggtggaaataatttgaatgtatttgatttataagttttttttttttttggggttaaaagatggttgtagcatttaaaatggaaaattttctcctgggttggctagtatctggggtgtattctctgtaagtgtagctcaaataggtcatcatgaaaggttaaaaaagcgaggtggccatgttatgcctggtggttaaggccagggcctctccaaccactgtgccactgacttgctgtgtgaccctgggcaagtcacttaactataaggtgcctcagttttccttctgttaaaatggggataataatactgacctacctcaaagggcagttttgaggcatgactaatgctttttagaaagcattttggggatccttcagcacaggaattctcaagacctgagtattttttataataggaatgtccaccatgaacttgatacgtccgtgtgtcccagatgctgtcattagtctatatggttctccaagaaactgaatgaatccattggagaagcggtggataactagccagacaaaatttgagaatacataaacaacgcattgccacggaaacatacagaggatgccttttctgtgattgggtgggattttttccctttttatgtgggatatagtagttacttgtgacaagaataattttggaataatttctattaatatcaactctgaagctaattgtactaatctgagattgtgtttgttcataataaaagtgaagtgaatctgaaaaaaaaaaaaaaaaaacaagaaaaaaaaaa

SEQ ID NO: 298196 - DNA, 5783 bp, Homo sapiens
agggaggcggggcttcccgcgtcccccaagctccagatcctggggtggctgccacgtctccctgccacgcgcctggggggacggaagacgggacggagatgttagtggtgggcgccccccgagggttcaccactgtttcctgagaaacttccccagtgcccacccacccgttctccgtgtgcccgagggccggtcctgggctaggctccgcgccccagccccaaaccgggtccccagccccttccagagagaaagctcccgacgcgggatgccgggcagaggcccagcggcgggtggaagagaagctgagaaggagaaacagaggggagggggagcgaggagctggcggcagagggaacagcagattgcgccgagccaatggcaacggcaggacgaggtggcaccaaattcccttcggccaatgacgagccggagtttacagaagcctcattagcatttccccagaggcaggggcaggggcagaggccgggtggtgtggtgtcggtgtcggcagcatccccggcgccctgctgcggtcgccgcgagcctcggcctctgtctcctccccctcccgcccttacctccacgcgggaccgcccgcgccagtcaactcctcgcactttgcccctgcttggcagcggataaaagggggctgaggaaataccggacacggtcacccgttgccagctctagcctttaaattcccggctcggggacctccacgcaccgcggctagcgccgacaaccagctagcgtgcaaggcgccgcggctcagcgcgtaccggcgggcttcgaaaccgcagtcctccggcgaccccgaactccgctccggagcctcagccccctggaaagtgatcccggcatccgagagccaagatgccggcccacttgctgcaggacgatatctctagctcctataccaccaccaccaccattacagcgcctccctccagggtcctgcagaatggaggagataagttggagacgatgcccctctacttggaagacgacattcgccctgatataaaagatgatatatatgaccccacctacaaggataaggaaggcccaagccccaaggttgaatatgtctggagaaacatcatccttatgtctctgctacacttgggagccctgtatgggatcactttgattcctacctgcaagttctacacctggctttggggggtattctactattttgtcagtgccctgggcataacagcaggagctcatcgtctgtggagccaccgctcttacaaagctcggctgcccctacggctctttctgatcattgccaacacaatggcattccagaatgatgtctatgaatgggctcgtgaccaccgtgcccaccacaagttttcagaaacacatgctgatcctcataattcccgacgtggctttttcttctctcacgtgggttggctgcttgtgcgcaaacacccagctgtcaaagagaaggggagtacgctagacttgtctgacctagaagctgagaaactggtgatgttccagaggaggtactacaaacctggcttgctgatgatgtgcttcatcctgcccacgcttgtgccctggtatttctggggtgaaacttttcaaaacagtgtgttcgttgccactttcttgcgatatgctgtggtgcttaatgccacctggctggtgaacagtgctgcccacctcttcggatatcgtccttatgacaagaacattagcccccgggagaatatcctggtttcacttggagctgtgggtgagggcttccacaactaccaccactcctttccctatgactactctgccagtgagtaccgctggcacatcaacttcaccacattcttcattgattgcatggccgccctcggtctggcctatgaccggaagaaagtctccaaggccgccatcttggccaggattaaaagaaccggagatggaaactacaagagtggctgagtttggggtccctcaggttcctttttcaaaaaccagccaggcagaggttttaatgtctgtttattaactactgaataatgctaccaggatgctaaagatgatgatgttaacccattccagtacagtattcttttaaaattcaaaagtattgaaagccaacaactctgcctttatgatgctaagctgatattatttcttctcttatcctctctctcttctaggcccattgtcctccttttcactttattgctatcgccctcctttcccttattgcctcccaggcaagcagctggtcagtctttgctcagtgtccagcttccaaagcctagacaacctttctgtagcctaaaacgaatggtctttgctccagataactctctttccttgagctgttgtgagctttgaagtaggtggcttgagctagagataaaacagaatcttctgggtagtcccctgttgattatcttcagcccaggcttttgctagatggaatggaaaagcaacttcatttgacacaaagcttctaaagcaggtaaattgtcgggggagagagttagcatgtatgaatgtaaggatgagggaagcgaagcaagaggaacctctcgccatgatcagacatacagctgcctacctaatgaggacttcaagccccaccacatagcatgcttcctttctctcctggctcggggtaaaaagtggctgcggtgtttggcaatgctaattcaatgccgcaacatatagttgaggccgaggataaagaaaagacattttaagtttgtagtaaaagtggtctctgctggggaagggttttcttttctttttttctttaataacaaggagatttcttagttcatatatcaagaagtcttgaagttgggtgtttccagaattggtaaaaacagcagctcatagaattttgagtattccatgagctgctcattacagttctttcctctttctgctctgccatcttcaggatattggttcttcccctcatagtaataagatggctgtggcatttccaaacatccaaaaaaagggaaggatttaaggaggtgaagtcgggtcaaaaataaaatatatatacatatatacattgcttagaacgttaaactattagagtatttcccttccaaagatggacatgagatggagaggctgagggacaggatctataggcagcttctaagagcgaacttcacataggaagggatctgagaacacgttgccaggggcttgagaaggttactgagtgagttattgggagtcttaataaaataaactagatattaggtccattcattaattagttccagtttctccttgaaatgagtaaaaactagaaggcttctctccacagtgttgtgccccttcactcatttttttttgaggagaagggggtctctgttaacatctagcctaaagtatacaactgcctggggggcagggttaggaatctcttcactaccctgattcttgattcctggctctaccctgtctgtcccttttctttgaccagatctttctcttccctgaacgttttcttctttccctggacaggcagcctcctttgtgtgtattcagaggcagtgatgacttgctgtccaggcagctccctcctgcacacagaatgctcagggtcactgaaccactgcttctcttttgaaagtagagctagctgccactttcacgtggcctccgcagtgtctccacctacacccctgtgctcccctgccacactgatggctcaagacaaggctggcaaaccctcccagaaacatctctggcccagaaagcctctctctccctccctctctcatgaggcacagccaagccaagcgctcatgttgagccagtgggccagccacagagcaaaagagggtttattttcagtcccctctctctgggtcagaaccagagggcatgctgaatgccccctgcttacttggtgagggtgccccgcctgagtcagtgctctcagctggcagtgcaatgcttgtagaagtaggaggaaacagttctcactgggaagaagcaagggcaagaacccaagtgcctcacctcgaaaggaggccctgttccctggagtcagggtgaactgcaaagctttggctgagacctgggatttgagataccacaaaccctgctgaacacagtgtctgttcagcaaactaaccagcattccctacagcctagggcagacaatagtatagaagtctggaaaaaaacaaaaacagaatttgagaaccttggaccactcctgtccctgtagctcagtcatcaaagcagaagtctggctttgctctattaagattggaaatgtacactaccaaacactcagtccactgttgagccccagtgctggaagggaggaaggcctttcttctgtgttaattgcgtagaggctacaggggttagcctggactaaaggcatccttgtcttttgagctattcacctcagtagaaaaggatctaagggaagatcactgtagtttagttctgttgacctgtgcacctaccccttggaaatgtctgctggtatttctaattccacaggtcatcagatgcctgcttgataatatataaacaataaaaacaactttcacttcttcctattgtaatcgtgtgccatggatctgatctgtaccatgaccctacataaggctggatggcacctcaggctgagggccccaatgtatgtgtggctgtgggtgtgggtgggagtgtgtctgctgagtaaggaacacgattttcaagattctaaagctcaattcaagtgacacattaatgataaactcagatctgatcaagagtccggatttctaacagtccttgctttggggggtgtgctgacaacttagctcaggtgccttacatcttttctaatcacagtgttgcatatgagcctgccctcactccctctgcagaatccctttgcacctgagaccctactgaagtggctggtagaaaaaggggcctgagtggaggattatcagtatcacgatttgcaggattcccttctgggcttcattctggaaacttttgttagggctgcttttcttaagtgcccacatttgatggagggtggaaataatttgaatgtatttgatttataagttttttttttttttggggttaaaagatggttgtagcatttaaaatggaaaattttctcctgggttggctagtatctggggtgtattctctgtaagtgtagctcaaataggtcatcatgaaaggttaaaaaagcgaggtggccatgttatgcctggtggttaaggccagggcctctccaaccactgtgccactgacttgctgtgtgaccctgggcaagtcacttaactataaggtgcctcagttttccttctgttaaaatggggataataatactgacctacctcaaagggcagttttgaggcatgactaatgctttttagaaagcattttggggatccttcagcacaggaattctcaagacctgagtattttttataataggaatgtccaccatgaacttgatacgtccgtgtgtcccagatgctgtcattagtctatatggttctccaagaaactgaatgaatccattggagaagcggtggataactagccagacaaaatttgagaatacataaacaacgcattgccacggaaacatacagaggatgccttttctgtgattgggtgggattttttccctttttatgtgggatatagtagttacttgtgacaagaataattttggaataatttctattaatatcaactctgaagctaattgtactaatctgagattgtgtttgttcataataaaagtgaagtgaatctga

SEQ ID NO: 298197 - DNA, 3339 bp, Homo sapiens
  misc_feature (1)..(1): n is a, c, g, or t
  misc_feature (6)..(6): n is a, c, g, or t
  misc_feature (8)..(8): n is a, c, g, or t
  misc_feature (11)..(11): n is a, c, g, or t
  misc_feature (26)..(26): n is a, c, g, or t
natgancnagnaggaggccgcgtgtnaatcggacgaggaggaacctctcgccatgatcagacatacagctgcctacctaatgaggacttcaagccccaccacatagcatgcttcctttctctcctggctcggggtaaaaagtggctgcggtgtttggcaatgctaattcaatgccgcaacatatagttgaggccgaggataaagaaaagacattttaagtttgtagtaaaagtggtctctgctggggaagggttttcttttctttttttctttaataacaaggagatttcttagttcatatatcaagaagtcttgaagttgggtgtttccagaattggtaaaaacagcagctcatagaattttgagtattccatgagctgctcattacagttctttcctctttctgctctgccatcttcaggatattggttcttcccctcatagtaataagatggctgtggcatttccaaacatccaaaaaaagggaaggatttaaggaggtgaagtcgggtcaaaaataaaatatatatacatatatacattgcttagaacgttaaactattagagtatttcccttccaaagagggatgtttggaaaaaactctgaaggagaggaggaattagttgggatgccaatttcctctccactgctggacatgagatggagaggctgagggacaggatctataggcagcttctaagagcgaacttcacataggaagggatctgagaacacgttgccaggggcttgagaaggttactgagtgagttattgggagtcttaataaaataaactagatattaggtccattcattaattagttccagtttctccttgaaatgagtaaaaactagaaggcttctctccacagtgttgtgccccttcactcatttttttttgaggagaagggggtctctgttaacatctagcctaaagtatacaactgcctggggggcagggttaggaatctcttcactaccctgattcttgattcctggctctaccctgtctgtcccttttctttgaccagatctttctcttccctgaacgttttcttctttccctggacaggcagcctcctttgtgtgtattcagaggcagtgatgacttgctgtccaggcagctccctcctgcacacagaatgctcagggtcactgaaccactgcttctcttttgaaagtagagctagctgccactttcacgtggcctccgcagtgtctccacctacacccctgtgctcccctgccacactgatggctcaagacaaggctggcaaaccctcccagaaacatctctggcccagaaagcctctctctccctccctctctcatgaggcacagccaagccaagcgctcatgttgagccagtgggccagccacagagcaaaagagggtttattttcagtcccctctctctgggtcagaaccagagggcatgctgaatgccccctgcttacttggtgagggtgccccgcctgagtcagtgctctcagctggcagtgcaatgcttgtagaagtaggaggaaacagttctcactgggaagaagcaagggcaagaacccaagtgcctcacctcgaaaggaggccctgttccctggagtcagggtgaactgcaaagctttggctgagacctgggatttgagataccacaaaccctgctgaacacagtgtctgttcagcaaactaaccagcattccctacagcctagggcagacaatagtatagaagtctggaaaaaaacaaaaacagaatttgagaaccttggaccactcctgtccctgtagctcagtcatcaaagcagaagtctggctttgctctattaagattggaaatgtacactaccaaacactcagtccactgttgagccccagtgctggaagggaggaaggcctttcttctgtgttaattgcgtagaggctacaggggttagcctggactaaaggcatccttgtcttttgagctattcacctcagtagaaaaggatctaagggaagatcactgtagtttagttctgttgacctgtgcacctaccccttggaaatgtctgctggtatttctaattccacaggtcatcagatgcctgcttgataatatataaacaataaaaacaactttcacttcttcctattgtaatcgtgtgccatggatctgatctgtaccatgaccctacataaggctggatggcacctcaggctgagggccccaatgtatgtgtggctgtgggtgtgggtgggagtgtgtctgctgagtaaggaacacgattttcaagattctaaagctcaattcaagtgacacattaatgataaactcagatctgatcaagagtccggatttctaacagtccttgctttggggggtgtgctgacaacttagctcaggtgccttacatcttttctaatcacagtgttgcatatgagcctgccctcactccctctgcagaatccctttgcacctgagaccctactgaagtggctggtagaaaaaggggcctgagtggaggattatcagtatcacgatttgcaggattcccttctgggcttcattctggaaacttttgttagggctgcttttcttaagtgcccacatttgatggagggtggaaataatttgaatgtatttgatttataagttttttttttttttggggttaaaagatggttgtagcatttaaaatggaaaattttctcctgggttggctagtatctggggtgtattctctgtaagtgtagctcaaataggtcatcatgaaaggttaaaaaagcgaggtggccatgttatgcctggtggttaaggccagggcctctccaaccactgtgccactgacttgctgtgtgaccctgggcaagtcacttaactataaggtgcctcagttttccttctgttaaaatggggataataatactgacctacctcaaagggcagttttgaggcatgactaatgctttttagaaagcattttggggatccttcagcacaggaattctcaagacctgagtattttttataataggaatgtccaccatgaacttgatacgtccgtgtgtcccagatgctgtcattagtctatatggttctccaagaaactgaatgaatccattggagaagcggtggataactagccagacaaaatttgagaatacataaacaacgcattgccacggaaacatacagaggatgccttttctgtgattgggtgggattttttccctttttatgtgggatatagtagttacttgtgacaagaataattttggaataatttctattaatatcaactctgaagctaattgtactaatctgagattgtgtttgttcataataaaagtgaagtgaatctga

SEQ ID NO: 298198 - DNA, 5419 bp, Homo sapiens
  misc_feature (5408)..(5408): n is a, c, g, or t
  misc_feature (5412)..(5412): n is a, c, g, or t
agggaggcggggcttcccgcgtcccccaagctccagatcctggggtggctgccacgtctccctgccacgcgcctggggggacggaagacgggacggagatgttagtggtgggcgccccccgagggttcaccactgtttcctgagaaacttccccagtgcccacccacccgttctccgtgtgcccgagggccggtcctgggctaggctccgcgccccagccccaaaccgggtccccagccccttccagagagaaagctcccgacgcgggatgccgggcagaggcccagcggcgggtggaagagaagctgagaaggagaaacagaggggagggggagcgaggagctggcggcagagggaacagcagattgcgccgagccaatggcaacggcaggacgaggtggcaccaaattcccttcggccaatgacgagccggagtttacagaagcctcattagcatttccccagaggcaggggcaggggcagaggccgggtggtgtggtgtcggtgtcggcagcatccccggcgccctgctgcggtcgccgcgagcctcggcctctgtctcctccccctcccgcccttacctccacgcgggaccgcccgcgccagtcaactcctcgcactttgcccctgcttggcagcggataaaagggggctgaggaaataccggacacggtcacccgttgccagctctagcctttaaattcccggctcggggacctccacgcaccgcggctagcgccgacaaccagctagcgtgcaaggcgccgcggctcagcgcgtaccggcgggcttcgaaaccgcagtcctccggcgaccccgaactccgctccggagcctcagccccctggaaagtgatcccggcatccgagagccaagatgccggcccacttgctgcaggacgatatctctagctcctataccaccaccaccaccattacagcgcctccctccagggtcctgcagaatggaggagataagttggagacgatgcccctctacttggaagacgacattcgccctgatataaaagatgatatatatgaccccacctacaaggataaggaaggcccaagccccaaggttgaatatgtctggagaaacatcatccttatgtctctgctacacttgggagccctgtatgggatcactttgattcctacctgcaagttctacacctggctttggggggtattctactattttgtcagtgccctgggcataacagcaggagctcatcgtctgtggagccaccgctcttacaaagctcggctgcccctacggctctttctgatcattgccaacacaatggcattccagaatgatgtctatgaatgggctcgtgaccaccgtgcccaccacaagttttcagaaacacatgctgatcctcataattcccgacgtggctttttcttctctcacgtgggttggctgcttgtgcgcaaacacccagctgtcaaagagaaggggagtacgctagacttgtctgacctagaagctgagaaactggtgatgttccagaggaggtactacaaacctggcttgctgatgatgtgcttcatcctgcccacgcttgtgccctggtatttctggggtgaaacttttcaaaacagtgtgttcgttgccactttcttgcgatatgctgtggtgcttaatgccacctggctggtgaacagtgctgcccacctcttcggatatcgtccttatgacaagaacattagcccccgggagaatatcctggtttcacttggagctgtgggtgagggcttccacaactaccaccactcctttccctatgactactctgccagtgagtaccgctggcacatcaacttcaccacattcttcattgattgcatggccgccctcggtctggcctatgaccggaagaaagtctccaaggccgccatcttggccaggattaaaagaaccggagatggaaactacaagagtggctgagtttggggtccctcaggttcctttttcaaaaaccagccaggcagaggttttaatgtctgtttattaactactgaataatgctaccaggatgctaaagatgatgatgttaacccattccagtacagtattcttttaaaattcaaaagtattgaaagccaacaactctgcctttatgatgctaagctgatattatttcttctcttatcctctctctcttctaggcccattgtcctccttttcactttattgctatcgccctcctttcccttattgcctcccaggcaagcagctggtcagtctttgctcagtgtccagcttccaaagcctagacaacctttctgtagcctaaaacgaatggtctttgctccagataactctctttccttgagctgttgtgagctttgaagtaggtggcttgagctagagataaaacagaatcttctgggtagtcccctgttgattatcttcagcccaggcttttgctagatggaatggaaaagcaacttcatttgacacaaagcttctaaagcaggtaaattgtcgggggagagagttagcatgtatgaatgtaaggatgagggaagcgaagcaagaggaacctctcgccatgatcagacatacagctgcctacctaatgaggacttcaagccccaccacatagcatgcttcctttctctcctggctcggggtaaaaagtggctgcggtgtttggcaatgctaattcaatgccgcaacatatagttgaggccgaggataaagaaaagacattttaagtttgtagtaaaagtggtctctgctggggaagggttttcttttctttttttctttaataacaaggagatttcttagttcatatatcaagaagtcttgaagttgggtgtttccagaattggtaaaaacagcagctcatagaattttgagtattccatgagctgctcattacagttctttcctctttctgctctgccatcttcaggatattggttcttcccctcatagtaataagatggctgtggcatttccaaacatccaaaaaaagggaaggatttaaggaggtgaagtcgggtcaaaaataaaatatatatacatatatacattgcttagaacgttaaactattagagtatttcccttccaaagagggatgtttggaaaaaactctgaaggagaggaggaattagttgggatgccaatttcctctccactgctggacatgagatggagaggctgagggacaggatctataggcagcttctaagagcgaacttcacataggaagggatctgagaacacgttgccaggggcttgagaaggttactgagtgagttattgggagtcttaataaaataaactagatattaggtccattcattaattagttccagtttctccttgaaatgagtaaaaactagaaggcttctctccacagtgttgtgccccttcactcatttttttttgaggagaagggggtctctgttaacatctagcctaaagtatacaactgcctggggggcagggttaggaatctcttcactaccctgattcttgattcctggctctaccctgtctgtcccttttctttgaccagatctttctcttccctgaacgttttcttctttccctggacaggcagcctcctttgtgtgtattcagaggcagtgatgacttgctgtccaggcagctccctcctgcacacagaatgctcagggtcactgaaccactgcttctcttttgaaagtagagctagctgccactttcacgtggcctccgcagtgtctccacctacacccctgtgctcccctgccacactgatggctcaagacaaggctggcaaaccctcccagaaacatctctggcccagaaagcctctctctccctccctctctcatgaggcacagccaagccaagcgctcatgttgagccagtgggccagccacagagcaaaagagggtttattttcagtcccctctctctgggtcagaaccagagggcatgctgaatgccccctgcttacttggtgagggtgccccgcctgagtcagtgctctcagctggcagtgcaatgcttgtagaagtaggaggaaacagttctcactgggaagaagcaagggcaagaacccaagtgcctcacctcgaaaggaggccctgttccctggagtcagggtgaactgcaaagctttggctgagacctgggatttgagataccacaaaccctgctgaacacagtgtctgttcagcaaactaaccagcattccctacagcctagggcagacaatagtatagaagtctggaaaaaaacaaaaacagaatttgagaaccttggaccactcctgtccctgtagctcagtcatcaaagcagaagtctggctttgctctattaagattggaaatgtacactaccaaacactcagtccactgttgagccccagtgctggaagggaggaaggcctttcttctgtgttaattgcgtagaggctacaggggttagcctggactaaaggcatccttgtcttttgagctattcacctcagtagaaaaggatctaagggaagatcactgtagtttagttctgttgacctgtgcacctaccccttggaaatgtctgctggtatttctaattccacaggtcatcagatgcctgcttgataatatataaacaataaaaacaactttcacttcttcctattgtaatcgtgtgccatggatctgatctgtaccatgaccctacataaggctggatggcacctcaggctgagggccccaatgtatgtgtggctgtgggtgtgggtgggagtgtgtctgctgagtaaggaacacgattttcaagattctaaagctcaattcaagtgacacattaatgataaactcagatctgatcaagagtccggatttctaacagtccttgctttggggggtgtgctgacaacttagctcaggtgccttacatcttttctaatcacagtgttgcatatgagcctgccctcactccctctgcagaatccctttgcacctgagaccctactgaagtggctggtagaaaaaggggcctgagtggaggattatcagtatcacgatttgcaggattcccttctgggcttcattctggaaacttttgttagggctgcttttcttaagtgcccacatttgatggagggtggaaataatttgaatgtatttgatttataagttttttttttttttggggttaaaagatggttgtagcatttaaaatggaaaattttctcctgggttggctagtatctggggtgtattctctgtaagtgtagctcaaataggtcatcatgaaaggttaaaaaagcgaggtggccatgttatgcctggtggttaaggccagggcctctccaaccactgtgccactgacttgctgtgtgaccctgggcaagtcacttaactataaggtgcctcagttttcctcgccatcgaagggatcctcnagancgccgca

SEQ ID NO: 298199 - DNA, 2994 bp, Homo sapiens
  misc_feature (1)..(1): n is a, c, g, or t
  misc_feature (6)..(6): n is a, c, g, or t
  misc_feature (8)..(8): n is a, c, g, or t
  misc_feature (11)..(11): n is a, c, g, or t
  misc_feature (26)..(26): n is a, c, g, or t
natgancnagnaggaggccgcgtgtnaatcggacgaggattacagttctttcctctttctgctctgccatcttcaggatattggttcttcccctcatagtaataagatggctgtggcatttccaaacatccaaaaaaagggaaggatttaaggaggtgaagtcgggtcaaaaataaaatatatatacatatatacattgcttagaacgttaaactattagagtatttcccttccaaagagggatgtttggaaaaaactctgaaggagaggaggaattagttgggatgccaatttcctctccactgctggacatgagatggagaggctgagggacaggatctataggcagcttctaagagcgaacttcacataggaagggatctgagaacacgttgccaggggcttgagaaggttactgagtgagttattgggagtcttaataaaataaactagatattaggtccattcattaattagttccagtttctccttgaaatgagtaaaaactagaaggcttctctccacagtgttgtgccccttcactcatttttttttgaggagaagggggtctctgttaacatctagcctaaagtatacaactgcctggggggcagggttaggaatctcttcactaccctgattcttgattcctggctctaccctgtctgtcccttttctttgaccagatctttctcttccctgaacgttttcttctttccctggacaggcagcctcctttgtgtgtattcagaggcagtgatgacttgctgtccaggcagctccctcctgcacacagaatgctcagggtcactgaaccactgcttctcttttgaaagtagagctagctgccactttcacgtggcctccgcagtgtctccacctacacccctgtgctcccctgccacactgatggctcaagacaaggctggcaaaccctcccagaaacatctctggcccagaaagcctctctctccctccctctctcatgaggcacagccaagccaagcgctcatgttgagccagtgggccagccacagagcaaaagagggtttattttcagtcccctctctctgggtcagaaccagagggcatgctgaatgccccctgcttacttggtgagggtgccccgcctgagtcagtgctctcagctggcagtgcaatgcttgtagaagtaggaggaaacagttctcactgggaagaagcaagggcaagaacccaagtgcctcacctcgaaaggaggccctgttccctggagtcagggtgaactgcaaagctttggctgagacctgggatttgagataccacaaaccctgctgaacacagtgtctgttcagcaaactaaccagcattccctacagcctagggcagacaatagtatagaagtctggaaaaaaacaaaaacagaatttgagaaccttggaccactcctgtccctgtagctcagtcatcaaagcagaagtctggctttgctctattaagattggaaatgtacactaccaaacactcagtccactgttgagccccagtgctggaagggaggaaggcctttcttctgtgttaattgcgtagaggctacaggggttagcctggactaaaggcatccttgtcttttgagctattcacctcagtagaaaaggatctaagggaagatcactgtagtttagttctgttgacctgtgcacctaccccttggaaatgtctgctggtatttctaattccacaggtcatcagatgcctgcttgataatatataaacaataaaaacaactttcacttcttcctattgtaatcgtgtgccatggatctgatctgtaccatgaccctacataaggctggatggcacctcaggctgagggccccaatgtatgtgtggctgtgggtgtgggtgggagtgtgtctgctgagtaaggaacacgattttcaagattctaaagctcaattcaagtgacacattaatgataaactcagatctgatcaagagtccggatttctaacagtccttgctttggggggtgtgctgacaacttagctcaggtgccttacatcttttctaatcacagtgttgcatatgagcctgccctcactccctctgcagaatccctttgcacctgagaccctactgaagtggctggtagaaaaaggggcctgagtggaggattatcagtatcacgatttgcaggattcccttctgggcttcattctggaaacttttgttagggctgcttttcttaagtgcccacatttgatggagggtggaaataatttgaatgtatttgatttataagttttttttttttttggggttaaaagatggttgtagcatttaaaatggaaaattttctcctgggttggctagtatctggggtgtattctctgtaagtgtagctcaaataggtcatcatgaaaggttaaaaaagcgaggtggccatgttatgcctggtggttaaggccagggcctctccaaccactgtgccactgacttgctgtgtgaccctgggcaagtcacttaactataaggtgcctcagttttccttctgttaaaatggggataataatactgacctacctcaaagggcagttttgaggcatgactaatgctttttagaaagcattttggggatccttcagcacaggaattctcaagacctgagtattttttataataggaatgtccaccatgaacttgatacgtccgtgtgtcccagatgctgtcattagtctatatggttctccaagaaactgaatgaatccattggagaagcggtggataactagccagacaaaatttgagaatacataaacaacgcattgccacggaaacatacagaggatgccttttctgtgattgggtgggattttttccctttttatgtgggatatagtagttacttgtgacaagaataattttggaataatttctattaatatcaactctgaagctaattgtactaatctgagattgtgtttgttcataataaaagtgaagtgaatctga

SEQ ID NO: 298200 - DNA, 5794 bp, Homo sapiens
agggaggcggggcttcccgcgtcccccaagctccagatcctggggtggctgccacgtctccctgccacgcgcctggggggacggaagacgggacggagatgttagtggtgggcgccccccgagggttcaccactgtttcctgagaaacttccccagtgcccacccacccgttctccgtgtgcccgagggccggtcctgggctaggctccgcgccccagccccaaaccgggtccccagccccttccagagagaaagctcccgacgcgggatgccgggcagaggcccagcggcgggtggaagagaagctgagaaggagaaacagaggggagggggagcgaggagctggcggcagagggaacagcagattgcgccgagccaatggcaacggcaggacgaggtggcaccaaattcccttcggccaatgacgagccggagtttacagaagcctcattagcatttccccagaggcaggggcaggggcagaggccgggtggtgtggtgtcggtgtcggcagcatccccggcgccctgctgcggtcgccgcgagcctcggcctctgtctcctccccctcccgcccttacctccacgcgggaccgcccgcgccagtcaactcctcgcactttgcccctgcttggcagcggataaaagggggctgaggaaataccggacacggtcacccgttgccagctctagcctttaaattcccggctcggggacctccacgcaccgcggctagcgccgacaaccagctagcgtgcaaggcgccgcggctcagcgcgtaccggcgggcttcgaaaccgcagtcctccggcgaccccgaactccgctccggagcctcagccccctggaaagtgatcccggcatccgagagccaagatgccggcccacttgctgcaggacgatatctctagctcctataccaccaccaccaccattacagcgcctccctccagggtcctgcagaatggaggagataagttggagacgatgcccctctacttggaagacgacattcgccctgatataaaagatgatatatatgaccccacctacaaggataaggaaggcccaagccccaaggttgaatatgtctggagaaacatcatccttatgtctctgctacacttgggagccctgtatgggatcactttgattcctacctgcaagttctacacctggctttggggggtattctactattttgtcagtgccctgggcataacagcaggagctcatcgtctgtggagccaccgctcttacaaagctcggctgcccctacggctctttctgatcattgccaacacaatggcattccagaatgatgtctatgaatgggctcgtgaccaccgtgcccaccacaagttttcagaaacacatgctgatcctcataattcccgacgtggctttttcttctctcacgtgggttggctgcttgtgcgcaaacacccagctgtcaaagagaaggggagtacgctagacttgtctgacctagaagctgagaaactggtgatgttccagaggaggtactacaaacctggcttgctgatgatgtgcttcatcctgcccacgcttgtgccctggtatttctggggtgaaacttttcaaaacagtgtgttcgttgccactttcttgcgatatgctgtggtgcttaatgccacctggctggtgaacagtgctgcccacctcttcggatatcgtccttatgacaagaacattagcccccgggagaatatcctggtttcacttggagctgtgggtgagggcttccacaactaccaccactcctttccctatgactactctgccagtgagtaccgctggcacatcaacttcaccacattcttcattgattgcatggccgccctcggtctggcctatgaccggaagaaagtctccaaggccgccatcttggccaggattaaaagaaccggagatggaaactacaagagtggctgagtttggggtccctcaggttcctttttcaaaaaccagccaggcagaggttttaatgtctgtttattaactactgaataatgctaccaggatgctaaagatgatgatgttaacccattccagtacagtattcttttaaaattcaaaagtattgaaagccaacaactctgcctttatgatgctaagctgatattatttcttctcttatcctctctctcttctaggcccattgtcctccttttcactttattgctatcgccctcctttcccttattgcctcccaggcaagcagctggtcagtctttgctcagtgtccagcttccaaagcctagacaacctttctgtagcctaaaacgaatggtctttgctccagataactctctttccttgagctgttgtgagctttgaagtaggtggcttgagctagagataaaacagaatcttctgggtagtcccctgttgattatcttcagcccaggcttttgctagatggaatggaaaagcaacttcatttgacacaaagcttctaaagcaggtaaattgtcgggggagagagttagcatgtatgaatgtaaggatgagggaagcgaagcaagaggaacctctcgccatgatcagacatacagctgcctacctaatgaggacttcaagccccaccacatagcatgcttcctttctctcctggctcggggtaaaaagtggctgcggtgtttggcaatgctaattcaatgccgcaacatatagttgaggccgaggataaagaaaagacattttaagtttgtagtaaaagtggtctctgctggggaagggttttcttttctttttttctttaataacaaggagatttcttagttcatatatcaagaagtcttgaagttgggtgtttccagaattggtaaaaacagcagctcatagaattttgagtattccatgagctgctcattacagttctttcctctttctgctctgccatcttcaggatattggttcttcccctcatagtaataagatggctgtggcatttccaaacatccaaaaaaagggaaggatttaaggaggtgaagtcgggtcaaaaataaaatatatatacatatatacattgcttagaacgttaaactattagagtatttcccttccaaagagggatgtttggaaaaaactctgaaggagaggaggaattagttgggatgccaatttcctctccactgctggacatgagatggagaggctgagggacaggatctataggcagcttctaagagcgaacttcacataggaagggatctgagaacacgttgccaggggcttgagaaggttactgagtgagttattgggagtcttaataaaataaactagatattaggtccattcattaattagttccagtttctccttgaaatgagaggagaagggggtctctgttaacatctagcctaaagtatacaactgcctggggggcagggttaggaatctcttcactaccctgattcttgattcctggctctaccctgtctgtcccttttctttgaccagatctttctcttccctgaacgttttcttctttccctggacaggcagcctcctttgtgtgtattcagaggcagtgatgacttgctgtccaggcagctccctcctgcacacagaatgctcagggtcactgaaccactgcttctcttttgaaagtagagctagctgccactttcacgtggcctccgcagtgtctccacctacacccctgtgctcccctgccacactgatggctcaagacaaggctggcaaaccctcccagaaacatctctggcccagaaagcctctctctccctccctctctcatgaggcacagccaagccaagcgctcatgttgagccagtgggccagccacagagcaaaagagggtttattttcagtcccctctctctgggtcagaaccagagggcatgctgaatgccccctgcttacttggtgagggtgccccgcctgagtcagtgctctcagctggcagtgcaatgcttgtagaagtaggaggaaacagttctcactgggaagaagcaagggcaagaacccaagtgcctcacctcgaaaggaggccctgttccctggagtcagggtgaactgcaaagctttggctgagacctgggatttgagataccacaaaccctgctgaacacagtgtctgttcagcaaactaaccagcattccctacagcctagggcagacaatagtatagaagtctggaaaaaaacaaaaacagaatttgagaaccttggaccactcctgtccctgtagctcagtcatcaaagcagaagtctggctttgctctattaagattggaaatgtacactaccaaacactcagtccactgttgagccccagtgctggaagggaggaaggcctttcttctgtgttaattgcgtagaggctacaggggttagcctggactaaaggcatccttgtcttttgagctattcacctcagtagaaaaggatctaagggaagatcactgtagtttagttctgttgacctgtgcacctaccccttggaaatgtctgctggtatttctaattccacaggtcatcagatgcctgcttgataatatataaacaataaaaacaactttcacttcttcctattgtaatcgtgtgccatggatctgatctgtaccatgaccctacataaggctggatggcacctcaggctgagggccccaatgtatgtgtggctgtgggtgtgggtgggagtgtgtctgctgagtaaggaacacgattttcaagattctaaagctcaattcaagtgacacattaatgataaactcagatctgatcaagagtccggatttctaacagtccttgctttggggggtgtgctgacaacttagctcaggtgccttacatcttttctaatcacagtgttgcatatgagcctgccctcactccctctgcagaatccctttgcacctgagaccctactgaagtggctggtagaaaaaggggcctgagtggaggattatcagtatcacgatttgcaggattcccttctgggcttcattctggaaacttttgttagggctgcttttcttaagtgcccacatttgatggagggtggaaataatttgaatgtatttgatttataagttttttttttttttggggttaaaagatggttgtagcatttaaaatggaaaattttctcctgggttggctagtatctggggtgtattctctgtaagtgtagctcaaataggtcatcatgaaaggttaaaaaagcgaggtggccatgttatgcctggtggttaaggccagggcctctccaaccactgtgccactgacttgctgtgtgaccctgggcaagtcacttaactataaggtgcctcagttttccttctgttaaaatggggataataatactgacctacctcaaagggcagttttgaggcatgactaatgctttttagaaagcattttggggatccttcagcacaggaattctcaagacctgagtattttttataataggaatgtccaccatgaacttgatacgtccgtgtgtcccagatgctgtcattagtctatatggttctccaagaaactgaatgaatccattggagaagcggtggataactagccagacaaaatttgagaatacataaacaacgcattgccacggaaacatacagaggatgccttttctgtgattgggtgggattttttccctttttatgtgggatatagtagttacttgtgacaagaataattttggaataatttctattaatatcaactctgaagctaattgtactaatctgagattgtgtttgttcataataaaagtgaagtgaatctga

SEQ ID NO: 298201 - DNA, 5771 bp, Homo sapiens
agggaggcggggcttcccgcgtcccccaagctccagatcctggggtggctgccacgtctccctgccacgcgcctggggggacggaagacgggacggagatgttagtggtgggcgccccccgagggttcaccactgtttcctgagaaacttccccagtgcccacccacccgttctccgtgtgcccgagggccggtcctgggctaggctccgcgccccagccccaaaccgggtccccagccccttccagagagaaagctcccgacgcgggatgccgggcagaggcccagcggcgggtggaagagaagctgagaaggagaaacagaggggagggggagcgaggagctggcggcagagggaacagcagattgcgccgagccaatggcaacggcaggacgaggtggcaccaaattcccttcggccaatgacgagccggagtttacagaagcctcattagcatttccccagaggcaggggcaggggcagaggccgggtggtgtggtgtcggtgtcggcagcatccccggcgccctgctgcggtcgccgcgagcctcggcctctgtctcctccccctcccgcccttacctccacgcgggaccgcccgcgccagtcaactcctcgcactttgcccctgcttggcagcggataaaagggggctgaggaaataccggacacggtcacccgttgccagctctagcctttaaattcccggctcggggacctccacgcaccgcggctagcgccgacaaccagctagcgtgcaaggcgccgcggctcagcgcgtaccggcgggcttcgaaaccgcagtcctccggcgaccccgaactccgctccggagcctcagccccctggaaagtgatcccggcatccgagagccaagatgccggcccacttgctgcaggacgatatctctagctcctataccaccaccaccaccattacagcgcctccctccagggtcctgcagaatggaggagataagttggagacgatgcccctctacttggaagacgacattcgccctgatataaaagatgatatatatgaccccacctacaaggataaggaaggcccaagccccaaggttgaatatgtctggagaaacatcatccttatgtctctgctacacttgggagccctgtatgggatcactttgattcctacctgcaagttctacacctggctttggggggtattctactattttgtcagtgccctgggcataacagcaggagctcatcgtctgtggagccaccgctcttacaaagctcggctgcccctacggctctttctgatcattgccaacacaatggcattccagaatgatgtctatgaatgggctcgtgaccaccgtgcccaccacaagttttcagaaacacatgctgatcctcataattcccgacgtggctttttcttctctcacgtgggttggctgcttgtgcgcaaacacccagctgtcaaagagaaggggagtacgctagacttgtctgacctagaagctgagaaactggtgatgttccagaggaggtactacaaacctggcttgctgatgatgtgcttcatcctgcccacgcttgtgccctggtatttctggggtgaaacttttcaaaacagtgtgttcgttgccactttcttgcgatatgctgtggtgcttaatgccacctggctggtgaacagtgctgcccacctcttcggatatcgtccttatgacaagaacattagcccccgggagaatatcctggtttcacttggagctgtgggtgagggcttccacaactaccaccactcctttccctatgactactctgccagtgagtaccgctggcacatcaacttcaccacattcttcattgattgcatggccgccctcggtctggcctatgaccggaagaaagtctccaaggccgccatcttggccaggattaaaagaaccggagatggaaactacaagagtggctgagtttggggtccctcaggttcctttttcaaaaaccagccaggcagaggttttaatgtctgtttattaactactgaataatgctaccaggatgctaaagatgatgatgttaacccattccagtacagtattcttttaaaattcaaaagtattgaaagccaacaactctgcctttatgatgctaagctgatattatttcttctcttatcctctctctcttctaggcccattgtcctccttttcactttattgctatcgccctcctttcccttattgcctcccaggcaagcagctggtcagtctttgctcagtgtccagcttccaaagcctagacaacctttctgtagcctaaaacgaatggtctttgctccagataactctctttccttgagctgttgtgagctttgaagtaggtggcttgagctagagataaaacagaatcttctgggtagtcccctgttgattatcttcagcccaggcttttgctagatggaatggaaaagcaacttcatttgacacaaagcttctaaagcaggtaaattgtcgggggagagagttagcatgtatgaatgtaaggatgagggaagcgaagcaagaggaacctctcgccatgatcagacatacagctgcctacctaatgaggacttcaagccccaccacatagcatgcttcctttctctcctggctcggggtaaaaagtggctgcggtgtttggcaatgctaattcaatgccgcaacatatagttgaggccgaggataaagaaaagacattttaagtttgtagtaaaagtggtctctgctggggaagggttttcttttctttttttctttaataacaaggagatttcttagttcatatatcaagaagtcttgaagttgggtgtttccagaattggtaaaaacagcagctcatagaattttgagtattccatgagctgctcattacagttctttcctctttctgctctgccatcttcaggatattggttcttcccctcatagtaataagatggctgtggcatttccaaacatccaaaaaaagggaaggatttaaggaggtgaagtcgggtcaaaaataaaatatatatacatatatacattgcttagaacgttaaactattagagtatttcccttccaaagagggatgtttggaaaaaactctgaaggagaggaggaattagttgggatgccaatttcctctccactgctggacatgagatggagaggctgagggacaggatctataggcagcttctaagagcgaacttcacataggaagggatctgagaacacgttgccaggggcttgagaaggttactgagtgagttattgggagtcttaataaaataaactagatattaggtccattcattaattagttccagtttctccttgaaatgagtaaaaactagaaggcttctctccacagtgttgtgccccttcactcatttttttttgaggagaagggggtctctgttaacatctagcctaaagtatacaactgcctggggggcagggttaggaatctcttcactaccctgattcttgattcctggctctaccctgtctgtcccttttctttgaccagatctttctcttccctgaacgttttcttctttccctggacaggcagcctcctttgtgtgtattcagaggcagtgatgacttgctgtccaggcagctccctcctgcacacagaatgctcagggtcactgaaccactgcttctcttttgaaagtagagctagctgccactttcacgtggcctccgcagtgtctccacctacacccctgtgctcccctgccacactgatggctcaagacaaggctggcaaaccctcccagaaacatctctggcccagaaagcctctctctccctccctctctcatgaggcacagccaagccaagcgctcatgttgagccagtgggccagccacagagcaaaagagggtttattttcagtcccctctctctgggtcagaaccagagggcatgctgaatgccccctgcttacttggtgagggtgccccgcctgagtcagtgctctcagctggcagtgcaatgcttgtagaagtaggaggaaacagttctcactgggaagaagcaagggcaagaacccaagtgcctcacctcgaaaggaggccctgttccctggagtcagggtgaactgcaaagctttggctgagacctgggatttgagataccacaaaccctgctgaacacagtgtctgttcagcaaactaaccagcattccctacagcctagggcagacaatagtatagtctggctttgctctattaagattggaaatgtacactaccaaacactcagtccactgttgagccccagtgctggaagggaggaaggcctttcttctgtgttaattgcgtagaggctacaggggttagcctggactaaaggcatccttgtcttttgagctattcacctcagtagaaaaggatctaagggaagatcactgtagtttagttctgttgacctgtgcacctaccccttggaaatgtctgctggtatttctaattccacaggtcatcagatgcctgcttgataatatataaacaataaaaacaactttcacttcttcctattgtaatcgtgtgccatggatctgatctgtaccatgaccctacataaggctggatggcacctcaggctgagggccccaatgtatgtgtggctgtgggtgtgggtgggagtgtgtctgctgagtaaggaacacgattttcaagattctaaagctcaattcaagtgacacattaatgataaactcagatctgatcaagagtccggatttctaacagtccttgctttggggggtgtgctgacaacttagctcaggtgccttacatcttttctaatcacagtgttgcatatgagcctgccctcactccctctgcagaatccctttgcacctgagaccctactgaagtggctggtagaaaaaggggcctgagtggaggattatcagtatcacgatttgcaggattcccttctgggcttcattctggaaacttttgttagggctgcttttcttaagtgcccacatttgatggagggtggaaataatttgaatgtatttgatttataagttttttttttttttggggttaaaagatggttgtagcatttaaaatggaaaattttctcctgggttggctagtatctggggtgtattctctgtaagtgtagctcaaataggtcatcatgaaaggttaaaaaagcgaggtggccatgttatgcctggtggttaaggccagggcctctccaaccactgtgccactgacttgctgtgtgaccctgggcaagtcacttaactataaggtgcctcagttttccttctgttaaaatggggataataatactgacctacctcaaagggcagttttgaggcatgactaatgctttttagaaagcattttggggatccttcagcacaggaattctcaagacctgagtattttttataataggaatgtccaccatgaacttgatacgtccgtgtgtcccagatgctgtcattagtctatatggttctccaagaaactgaatgaatccattggagaagcggtggataactagccagacaaaatttgagaatacataaacaacgcattgccacggaaacatacagaggatgccttttctgtgattgggtgggattttttccctttttatgtgggatatagtagttacttgtgacaagaataattttggaataatttctattaatatcaactctgaagctaattgtactaatctgagattgtgtttgttcataataaaagtgaagtgaatctga

SEQ ID NO: 298202 - DNA, 5451 bp, Homo sapiens
  misc_feature (5149)..(5149): n is a, c, g, or t
  misc_feature (5161)..(5161): n is a, c, g, or t
  misc_feature (5167)..(5167): n is a, c, g, or t
  misc_feature (5169)..(5169): n is a, c, g, or t
  misc_feature (5451)..(5451): n is a, c, g, or t
agggaggcggggcttcccgcgtcccccaagctccagatcctggggtggctgccacgtctccctgccacgcgcctggggggacggaagacgggacggagatgttagtggtgggcgccccccgagggttcaccactgtttcctgagaaacttccccagtgcccacccacccgttctccgtgtgcccgagggccggtcctgggctaggctccgcgccccagccccaaaccgggtccccagccccttccagagagaaagctcccgacgcgggatgccgggcagaggcccagcggcgggtggaagagaagctgagaaggagaaacagaggggagggggagcgaggagctggcggcagagggaacagcagattgcgccgagccaatggcaacggcaggacgaggtggcaccaaattcccttcggccaatgacgagccggagtttacagaagcctcattagcatttccccagaggcaggggcaggggcagaggccgggtggtgtggtgtcggtgtcggcagcatccccggcgccctgctgcggtcgccgcgagcctcggcctctgtctcctccccctcccgcccttacctccacgcgggaccgcccgcgccagtcaactcctcgcactttgcccctgcttggcagcggataaaagggggctgaggaaataccggacacggtcacccgttgccagctctagcctttaaattcccggctcggggacctccacgcaccgcggctagcgccgacaaccagctagcgtgcaaggcgccgcggctcagcgcgtaccggcgggcttcgaaaccgcagtcctccggcgaccccgaactccgctccggagcctcagccccctggaaagtgatcccggcatccgagagccaagatgccggcccacttgctgcaggacgatatctctagctcctataccaccaccaccaccattacagcgcctccctccagggtcctgcagaatggaggagataagttggagacgatgcccctctacttggaagacgacattcgccctgatataaaagatgatatatatgaccccacctacaaggataaggaaggcccaagccccaaggttgaatatgtctggagaaacatcatccttatgtctctgctacacttgggagccctgtatgggatcactttgattcctacctgcaagttctacacctggctttggggggtattctactattttgtcagtgccctgggcataacagcaggagctcatcgtctgtggagccaccgctcttacaaagctcggctgcccctacggctctttctgatcattgccaacacaatggcattccagaatgatgtctatgaatgggctcgtgaccaccgtgcccaccacaagttttcagaaacacatgctgatcctcataattcccgacgtggctttttcttctctcacgtgggttggctgcttgtgcgcaaacacccagctgtcaaagagaaggggagtacgctagacttgtctgacctagaagctgagaaactggtgatgttccagaggaggtactacaaacctggcttgctgatgatgtgcttcatcctgcccacgcttgtgccctggtatttctggggtgaaacttttcaaaacagtgtgttcgttgccactttcttgcgatatgctgtggtgcttaatgccacctggctggtgaacagtgctgcccacctcttcggatatcgtccttatgacaagaacattagcccccgggagaatatcctggtttcacttggagctgtgggtgagggcttccacaactaccaccactcctttccctatgactactctgccagtgagtaccgctggcacatcaacttcaccacattcttcattgattgcatggccgccctcggtctggcctatgaccggaagaaagtctccaaggccgccatcttggccaggattaaaagaaccggagatggaaactacaagagtggctgagtttggggtccctcaggttcctttttcaaaaaccagccaggcagaggttttaatgtctgtttattaactactgaataatgctaccaggatgctaaagatgatgatgttaacccattccagtacagtattcttttaaaattcaaaagtattgaaagccaacaactctgcctttatgatgctaagctgatattatttcttctcttatcctctctctcttctaggcccattgtcctccttttcactttattgctatcgccctcctttcccttattgcctcccaggcaagcagctggtcagtctttgctcagtgtccagcttccaaagcctagacaacctttctgtagcctaaaacgaatggtctttgctccagataactctctttccttgagctgttgtgagctttgaagtaggtggcttgagctagagataaaacagaatcttctgggtagtcccctgttgattatcttcagcccaggcttttgctagatggaatggaaaagcaacttcatttgacacaaagcttctaaagcaggtaaattgtcgggggagagagttagcatgtatgaatgtaaggatgagggaagcgaagcaagaggaacctctcgccatgatcagacatacagctgcctacctaatgaggacttcaagccccaccacatagcatgcttcctttctctcctggctcggggtaaaaagtggctgcggtgtttggcaatgctaattcaatgccgcaacatatagttgaggccgaggataaagaaaagacattttaagtttgtagtaaaagtggtctctgctggggaagggttttcttttctttttttctttaataacaaggagatttcttagttcatatatcaagaagtcttgaagttgggtgtttccagaattggtaaaaacagcagctcatagaattttgagtattccatgagctgctcattacagttctttcctctttctgctctgccatcttcaggatattggttcttcccctcatagtaataagatggctgtggcatttccaaacatccaaaaaaagggaaggatttaaggaggtgaagtcgggtcaaaaataaaatatatatacatatatacattgcttagaacgttaaactattagagtatttcccttccaaagagggatgtttggaaaaaactctgaaggagaggaggaattagttgggatgccaatttcctctccactgctggacatgagatggagaggctgagggacaggatctataggcagcttctaagagcgaacttcacataggaagggatctgagaacacgttgccaggggcttgagaaggttactgagtgagttattgggagtcttaataaaataaactagatattaggtccattcattaattagttccagtttctccttgaaatgagtaaaaactagaaggcttctctccacagtgttgtgccccttcactcatttttttttgaggagaagggggtctctgttaacatctagcctaaagtatacaactgcctggggggcagggttaggaatctcttcactaccctgattcttgattcctggctctaccctgtctgtcccttttctttgaccagatctttctcttccctgaacgttttcttctttccctggacaggcagcctcctttgtgtgtattcagaggcagtgatgacttgctgtccaggcagctccctcctgcacacagaatgctcagggtcactgaaccactgcttctcttttgaaagtagagctagctgccactttcacgtggcctccgcagtgtctccacctacacccctgtgctcccctgccacactgatggctcaagacaaggctggcaaaccctcccagaaacatctctggcccagaaagcctctctctccctccctctctcatgaggcacagccaagccaagcgctcatgttgagccagtgggccagccacagagcaaaagagggtttattttcagtcccctctctctgggtcagaaccagagggcatgctgaatgccccctgcttacttggtgagggtgccccgcctgagtcagtgctctcagctggcagtgcaatgcttgtagaagtaggaggaaacagttctcactgggaagaagcaagggcaagaacccaagtgcctcacctcgaaaggaggccctgttccctggagtcagggtgaactgcaaagctttggctgagacctgggatttgagataccacaaaccctgctgaacacagtgtctgttcagcaaactaaccagcattccctacagcctagggcagacaatagtatagaagtctggaaaaaaacaaaaacagaatttgagaaccttggaccactcctgtccctgtagctcagtcatcaaagcagaagtctggctttgctctattaagattggaaatgtacactaccaaacactcagtccactgttgagccccagtgctggaagggaggaaggcctttcttctgtgttaattgcgtagaggctacaggggttagcctggactaaaggcatccttgtcttttgagctattcacctcagtagaaaaggatctaagggaagatcactgtagtttagttctgttgacctgtgcacctaccccttggaaatgtctgctggtatttctaattccacaggtcatcagatgcctgcttgataatatataaacaataaaaacaactttcacttcttcctattgtaatcgtgtgccatggatctgatctgtaccatgaccctacataaggctggatggcacctcaggctgagggccccaatgtatgtgtggctgtgggtgtgggtgggagtgtgtctgctgagtaaggaacacgattttcaagattctaaagctcaattcaagtgacacattaatgataaactcagatctgatcaagagtccggatttctaacagtccttgctttggggggtgtgctgacaacttagctcaggtgccttacatcttttctaatcacagtgttgcatatgagcctgccctcactccctctgcagaatccctttgcacctgagaccctactgaagtggctggtagaaaaaggggcctgagtggaggattatcagtatcacgatttgcaggattcccttctgggcttcattctggaaacttttgttagggctgcttttcttaagtgcccacatttgatggagggtggaaataatttgaatgtatttgatttataagtttttttantggggttaaaanatggtngnacgcatcttcacaaagggacacacttcactcatggcgttggcacacaaatctgggggtgatatacatcatgcaaagtgctagctccaaaatgagggctcatcatgaaacagggctccacaacaagcgaggtgggccactgctcactgccgggaggtgaacgagcccaggccatccaccaaccaagtgtgaccacggacttcgtcggcgtgacctctggggcacactccacttaccactataagggggcactcaataaccatcccgtcaacagggggcaatan

SEQ ID NO: 298203 - DNA, 5596 bp, Homo sapiens
agggaggcggggcttcccgcgtcccccaagctccagatcctggggtggctgccacgtctccctgccacgcgcctggggggacggaagacgggacggagatgttagtggtgggcgccccccgagggttcaccactgtttcctgagaaacttccccagtgcccacccacccgttctccgtgtgcccgagggccggtcctgggctaggctccgcgccccagccccaaaccgggtccccagccccttccagagagaaagctcccgacgcgggatgccgggcagaggcccagcggcgggtggaagagaagctgagaaggagaaacagaggggagggggagcgaggagctggcggcagagggaacagcagattgcgccgagccaatggcaacggcaggacgaggtggcaccaaattcccttcggccaatgacgagccggagtttacagaagcctcattagcatttccccagaggcaggggcaggggcagaggccgggtggtgtggtgtcggtgtcggcagcatccccggcgccctgctgcggtcgccgcgagcctcggcctctgtctcctccccctcccgcccttacctccacgcgggaccgcccgcgccagtcaactcctcgcactttgcccctgcttggcagcggataaaagggggctgaggaaataccggacacggtcacccgttgccagctctagcctttaaattcccggctcggggacctccacgcaccgcggctagcgccgacaaccagctagcgtgcaaggcgccgcggctcagcgcgtaccggcgggcttcgaaaccgcagtcctccggcgaccccgaactccgctccggagcctcagccccctggaaagtgatcccggcatccgagagccaagatgccggcccacttgctgcaggacgatatctctagctcctataccaccaccaccaccattacagcgcctccctccagggtcctgcagaatggaggagataagttggagacgatgcccctctacttggaagacgacattcgccctgatataaaagatgatatatatgaccccacctacaaggataaggaaggcccaagccccaaggttgaatatgtctggagaaacatcatccttatgtctctgctacacttgggagccctgtatgggatcactttgattcctacctgcaagttctacacctggctttggggggtattctactattttgtcagtgccctgggcataacagcaggagctcatcgtctgtggagccaccgctcttacaaagctcggctgcccctacggctctttctgatcattgccaacacaatggcattccagaatgatgtctatgaatgggctcgtgaccaccgtgcccaccacaagttttcagaaacacatgctgatcctcataattcccgacgtggctttttcttctctcacgtgggttggctgcttgtgcgcaaacacccagctgtcaaagagaaggggagtacgctagacttgtctgacctagaagctgagaaactggtgatgttccagaggaggtactacaaacctggcttgctgatgatgtgcttcatcctgcccacgcttgtgccctggtatttctggggtgaaacttttcaaaacagtgtgttcgttgccactttcttgcgatatgctgtggtgcttaatgccacctggctggtgaacagtgctgcccacctcttcggatatcgtccttatgacaagaacattagcccccgggagaatatcctggtttcacttggagctgtgggtgagggcttccacaactaccaccactcctttccctatgactactctgccagtgagtaccgctggcacatcaacttcaccacattcttcattgattgcatggccgccctcggtctggcctatgaccggaagaaagtctccaaggccgccatcttggccaggattaaaagaaccggagatggaaactacaagagtggctgagtttggggtccctcaggttcctttttcaaaaaccagccaggcagaggttttaatgtctgtttattaactactgaataatgctaccaggatgctaaagatgatgatgttaacccattccagtacagtattcttttaaaattcaaaagtattgaaagccaacaactctgcctttatgatgctaagctgatattatttcttctcttatcctctctctcttctaggcccattgtcctccttttcactttattgctatcgccctcctttcccttattgcctcccaggcaagcagctggtcagtctttgctcagtgtccagcttccaaagcctagacaacctttctgtagcctaaaacgaatggtctttgctccagataactctctttccttgagctgttgtgagctttgaagtaggtggcttgagctagagataaaacagaatcttctgggtagtcccctgttgattatcttcagcccaggcttttgctagatggaatggaaaagcaacttcatttgacacaaagcttctaaagcaggtaaattgtcgggggagagagttagcatgtatgaatgtaaggatgagggaagcgaagcaagaggaacctctcgccatgatcagacatacagctgcctacctaatgaggacttcaagccccaccacatagcatgcttcctttctctcctggctcggggtaaaaagtggctgcggtgtttggcaatgctaattcaatgccgcaacatatagttgaggccgaggataaagaaaagacattttaagtttgtagtaaaagtggtctctgctggggaagggttttcttttctttttttctttaataacaaggagatttcttagttcatatatcaagaagtcttgaagttgggtgtttccagaattggtaaaaacagcagctcatagaattttgagtattccatgagctgctcattacagttctttcctctttctgctctgccatcttcaggatattggttcttcccctcatagtaataagatggctgtggcatttccaaacatccaaaaaaagggaaggatttaaggaggtgaagtcgggtcaaaaataaaatatatatacatatatacattgcttagaacgttaaactattagagtatttcccttccaaagagggatgtttggaaaaaactctgaaggagaggaggaattagttgggatgccaatttcctctccactgctggacatgagatggagaggctgagggacaggatctataggcagcttctaagagcgaacttcacataggaagggatctgagaacacgttgccaggggcttgagaaggttactgagtgagttattgggagtcttaataaaataaactagatattaggtccattcattaattagttccagtttctccttgaaatgagtaaaaactagaaggcttctctccacagtgttgtgccccttcactcatttttttttgaggagaagggggtctctgttaacatctagcctaaagtatacaactgcctggggggcagggttaggaatctcttcactaccctgattcttgattcctggctctaccctgtctgtcccttttctttgaccagatctttctcttccctgaacgttttcttctttccctggacaggcagcctcctttgtgtgtattcagaggcagtgatgacttgctgtccaggcagctccctcctgcacacagaatgctcagggtcactgaaccactgcttctcttttgaaagtagagctagctgccactttcacgtggcctccgcagtgtctccacctacacccctgtgctcccctgccacactgatggctcaagacaaggctggcaaaccctcccagaaacatctctggcccagaaagcctctctctccctccctctctcatgaggcacagccaagccaagcgctcatgttgagccagtgggccagccacagagcaaaagagggtttattttcagtcccctctctctgggtcagaaccagagggcatgctgaatgccccctgcttacttggtgagggtgccccgcctgagtcagtgctctcagctggcagtgcaatgcttgtagaagtaggaggaaacagttctcactgggaagaagcaagggcaagaacccaagtgcctcacctcgaaaggaggccctgttccctggagtcagggtgaactgcaaagctttggctgagacctgggatttgagataccacaaaccctgctgaacacagtgtctgttcagcaaactaaccagcattccctacagcctagggcagacaatagtatagaagtctggaaaaaaacaaaaacagaatttgagaaccttggaccactcctgtccctgtagctcagtcatcaaagcagaagtctggctttgctctattaagattggaaatgtacactaccaaacactcagtccactgttgagccccagtgctggaagggaggaaggcctttcttctgtgttaattgcgtagaggctacaggggttagcctggactaaaggcatccttgtcttttgagctattcacctcagtagaaaaggatctaagggaagatcactgtagtttagttctgttgacctgtgcacctaccccttggaaatgtctgctggtatttctaattccacaggtcatcagatgcctgcttgataatatataaacaataaaaacaactttcacttcttcctattgtaatcgtgtgccatggatctgatctgtaccatgaccctacataaggctggatggcacctcaggctgagggccccaatgtatgtgtggctgtgggtgtgggtgggagtgtgtctgctgagtaaggaacacgattttcaagattctaaagctcaattcaagtgacacattaatgataaactcagatctgatcaagagtccggatttctaacagtccttgctttggggggtgtgctgacaacttagctcaggtgccttacatcttttctaatcacagtgttgcatatgagcctgccctcactccctctgcagaatccctttgcacctgagaccctactgaagtggctggtagaaaaaggggcctgagtggaggattatcagtatcacgatttgcaggattcccttctgggcttcattctggaaacttttgttagggctgcttttcttaagtgcccacatttgatggagggtggaaataatttgaatgtatttgatttataagtttttttttttctttgtggggtttaacaaaagtggttgtgttcccttttaaagtgtggaaacattttccccttgggtgtggcaaattctctgggggtgtattctcgtgaaaggtgttccctcaaattgggctttctcttgcaagggtttcacaaacccggaggtgtgcccagtgttgaagtgcgtgggtggtgtaagcgccaggggccctcctccaaacccgcttgtggtcgccagttgcatttttctctggtgctgccccctgggcaacgctctcttaacttaatagggggccccccaagctatccccgtcttgtttaccagggcgggcagtaaataatctgcgaccatacctcaaaggcggccgtttgagggcatgacctaagggcttttcgacacgcttttgtgcctgcttcgggccgggattcttcgccccgcttttttcatatgtgagtcc

SEQ ID NO: 298204 - DNA, 2902 bp, Homo sapiens
ccggtgcgacttttgaggaaccccccaaaaaaaaaaaaaaaaaaaagggaaggatttaaggaggtgaagtcgggtcaaaaataaaatatatatacatatatacattgcttagaacgttaaactattagagtatttcccttccaaagagggatgtttggaaaaaactctgaaggagaggaggaattagttgggatgccaatttcctctccactgctggacatgagatggagaggctgagggacaggatctataggcagcttctaagagcgaacttcacataggaagggatctgagaacacgttgccaggggcttgagaaggttactgagtgagttattgggagtcttaataaaataaactagatattaggtccattcattaattagttccagtttctccttgaaatgagtaaaaactagaaggcttctctccacagtgttgtgccccttcactcatttttttttgaggagaagggggtctctgttaacatctagcctaaagtatacaactgcctggggggcagggttaggaatctcttcactaccctgattcttgattcctggctctaccctgtctgtcccttttctttgaccagatctttctcttccctgaacgttttcttctttccctggacaggcagcctcctttgtgtgtattcagaggcagtgatgacttgctgtccaggcagctccctcctgcacacagaatgctcagggtcactgaaccactgcttctcttttgaaagtagagctagctgccactttcacgtggcctccgcagtgtctccacctacacccctgtgctcccctgccacactgatggctcaagacaaggctggcaaaccctcccagaaacatctctggcccagaaagcctctctctccctccctctctcatgaggcacagccaagccaagcgctcatgttgagccagtgggccagccacagagcaaaagagggtttattttcagtcccctctctctgggtcagaaccagagggcatgctgaatgccccctgcttacttggtgagggtgccccgcctgagtcagtgctctcagctggcagtgcaatgcttgtagaagtaggaggaaacagttctcactgggaagaagcaagggcaagaacccaagtgcctcacctcgaaaggaggccctgttccctggagtcagggtgaactgcaaagctttggctgagacctgggatttgagataccacaaaccctgctgaacacagtgtctgttcagcaaactaaccagcattccctacagcctagggcagacaatagtatagaagtctggaaaaaaacaaaaacagaatttgagaaccttggaccactcctgtccctgtagctcagtcatcaaagcagaagtctggctttgctctattaagattggaaatgtacactaccaaacactcagtccactgttgagccccagtgctggaagggaggaaggcctttcttctgtgttaattgcgtagaggctacaggggttagcctggactaaaggcatccttgtcttttgagctattcacctcagtagaaaaggatctaagggaagatcactgtagtttagttctgttgacctgtgcacctaccccttggaaatgtctgctggtatttctaattccacaggtcatcagatgcctgcttgataatatataaacaataaaaacaactttcacttcttcctattgtaatcgtgtgccatggatctgatctgtaccatgaccctacataaggctggatggcacctcaggctgagggccccaatgtatgtgtggctgtgggtgtgggtgggagtgtgtctgctgagtaaggaacacgattttcaagattctaaagctcaattcaagtgacacattaatgataaactcagatctgatcaagagtccggatttctaacagtccttgctttggggggtgtgctgacaacttagctcaggtgccttacatcttttctaatcacagtgttgcatatgagcctgccctcactccctctgcagaatccctttgcacctgagaccctactgaagtggctggtagaaaaaggggcctgagtggaggattatcagtatcacgatttgcaggattcccttctgggcttcattctggaaacttttgttagggctgcttttcttaagtgcccacatttgatggagggtggaaataatttgaatgtatttgatttataagttttttttttttttggggttaaaagatggttgtagcatttaaaatggaaaattttctcctgggttggctagtatctggggtgtattctctgtaagtgtagctcaaataggtcatcatgaaaggttaaaaaagcgaggtggccatgttatgcctggtggttaaggccagggcctctccaaccactgtgccactgacttgctgtgtgaccctgggcaagtcacttaactataaggtgcctcagttttccttctgttaaaatggggataataatactgacctacctcaaagggcagttttgaggcatgactaatgctttttagaaagcattttggggatccttcagcacaggaattctcaagacctgagtattttttataataggaatgtccaccatgaacttgatacgtccgtgtgtcccagatgctgtcattagtctatatggttctccaagaaactgaatgaatccattggagaagcggtggataactagccagacaaaatttgagaatacataaacaacgcattgccacggaaacatacagaggatgccttttctgtgattgggtgggattttttccctttttatgtgggatatagtagttacttgtgacaagaataattttggaataatttctattaatatcaactctgaagctaattgtactaatctgagattgtgtttgttcataataaaagtgaagtgaatctga

SEQ ID NO: 298205 - DNA, 5285 bp, Homo sapiens
  misc_feature (5095)..(5095): n is a, c, g, or t
  misc_feature (5285)..(5285): n is a, c, g, or t
agggaggcggggcttcccgcgtcccccaagctccagatcctggggtggctgccacgtctccctgccacgcgcctggggggacggaagacgggacggagatgttagtggtgggcgccccccgagggttcaccactgtttcctgagaaacttccccagtgcccacccacccgttctccgtgtgcccgagggccggtcctgggctaggctccgcgccccagccccaaaccgggtccccagccccttccagagagaaagctcccgacgcgggatgccgggcagaggcccagcggcgggtggaagagaagctgagaaggagaaacagaggggagggggagcgaggagctggcggcagagggaacagcagattgcgccgagccaatggcaacggcaggacgaggtggcaccaaattcccttcggccaatgacgagccggagtttacagaagcctcattagcatttccccagaggcaggggcaggggcagaggccgggtggtgtggtgtcggtgtcggcagcatccccggcgccctgctgcggtcgccgcgagcctcggcctctgtctcctccccctcccgcccttacctccacgcgggaccgcccgcgccagtcaactcctcgcactttgcccctgcttggcagcggataaaagggggctgaggaaataccggacacggtcacccgttgccagctctagcctttaaattcccggctcggggacctccacgcaccgcggctagcgccgacaaccagctagcgtgcaaggcgccgcggctcagcgcgtaccggcgggcttcgaaaccgcagtcctccggcgaccccgaactccgctccggagcctcagccccctggaaagtgatcccggcatccgagagccaagatgccggcccacttgctgcaggacgatatctctagctcctataccaccaccaccaccattacagcgcctccctccagggtcctgcagaatggaggagataagttggagacgatgcccctctacttggaagacgacattcgccctgatataaaagatgatatatatgaccccacctacaaggataaggaaggcccaagccccaaggttgaatatgtctggagaaacatcatccttatgtctctgctacacttgggagccctgtatgggatcactttgattcctacctgcaagttctacacctggctttggggggtattctactattttgtcagtgccctgggcataacagcaggagctcatcgtctgtggagccaccgctcttacaaagctcggctgcccctacggctctttctgatcattgccaacacaatggcattccagaatgatgtctatgaatgggctcgtgaccaccgtgcccaccacaagttttcagaaacacatgctgatcctcataattcccgacgtggctttttcttctctcacgtgggttggctgcttgtgcgcaaacacccagctgtcaaagagaaggggagtacgctagacttgtctgacctagaagctgagaaactggtgatgttccagaggaggtactacaaacctggcttgctgatgatgtgcttcatcctgcccacgcttgtgccctggtatttctggggtgaaacttttcaaaacagtgtgttcgttgccactttcttgcgatatgctgtggtgcttaatgccacctggctggtgaacagtgctgcccacctcttcggatatcgtccttatgacaagaacattagcccccgggagaatatcctggtttcacttggagctgtgggtgagggcttccacaactaccaccactcctttccctatgactactctgccagtgagtaccgctggcacatcaacttcaccacattcttcattgattgcatggccgccctcggtctggcctatgaccggaagaaagtctccaaggccgccatcttggccaggattaaaagaaccggagatggaaactacaagagtggctgagtttggggtccctcaggttcctttttcaaaaaccagccaggcagaggttttaatgtctgtttattaactactgaataatgctaccaggatgctaaagatgatgatgttaacccattccagtacagtattcttttaaaattcaaaagtattgaaagccaacaactctgcctttatgatgctaagctgatattatttcttctcttatcctctctctcttctaggcccattgtcctccttttcactttattgctatcgccctcctttcccttattgcctcccaggcaagcagctggtcagtctttgctcagtgtccagcttccaaagcctagacaacctttctgtagcctaaaacgaatggtctttgctccagataactctctttccttgagctgttgtgagctttgaagtaggtggcttgagctagagataaaacagaatcttctgggtagtcccctgttgattatcttcagcccaggcttttgctagatggaatggaaaagcaacttcatttgacacaaagcttctaaagcaggtaaattgtcgggggagagagttagcatgtatgaatgtaaggatgagggaagcgaagcaagaggaacctctcgccatgatcagacatacagctgcctacctaatgaggacttcaagccccaccacatagcatgcttcctttctctcctggctcggggtaaaaagtggctgcggtgtttggcaatgctaattcaatgccgcaacatatagttgaggccgaggataaagaaaagacattttaagtttgtagtaaaagtggtctctgctggggaagggttttcttttctttttttctttaataacaaggagatttcttagttcatatatcaagaagtcttgaagttgggtgtttccagaattggtaaaaacagcagctcatagaattttgagtattccatgagctgctcattacagttctttcctctttctgctctgccatcttcaggatattggttcttcccctcatagtaataagatggctgtggcatttccaaacatccaaaaaaagggaaggatttaaggaggtgaagtcgggtcaaaaataaaatatatatacatatatacattgcttagaacgttaaactattagagtatttcccttccaaagagggatgtttggaaaaaactctgaaggagaggaggaattagttgggatgccaatttcctctccactgctggacatgagatggagaggctgagggacaggatctataggcagcttctaagagcgaacttcacataggaagggatctgagaacacgttgccaggggcttgagaaggttactgagtgagttattgggagtcttaataaaataaactagatattaggtccattcattaattagttccagtttctccttgaaatgagtaaaaactagaaggcttctctccacagtgttgtgccccttcactcatttttttttgaggagaagggggtctctgttaacatctagcctaaagtatacaactgcctggggggcagggttaggaatctcttcactaccctgattcttgattcctggctctaccctgtctgtcccttttctttgaccagatctttctcttccctgaacgttttcttctttccctggacaggcagcctcctttgtgtgtattcagaggcagtgatgacttgctgtccaggcagctccctcctgcacacagaatgctcagggtcactgaaccactgcttctcttttgaaagtagagctagctgccactttcacgtggcctccgcagtgtctccacctacacccctgtgctcccctgccacactgatggctcaagacaaggctggcaaaccctcccagaaacatctctggcccagaaagcctctctctccctccctctctcatgaggcacagccaagccaagcgctcatgttgagccagtgggccagccacagagcaaaagagggtttattttcagtcccctctctctgggtcagaaccagagggcatgctgaatgccccctgcttacttggtgagggtgccccgcctgagtcagtgctctcagctggcagtgcaatgcttgtagaagtaggaggaaacagttctcactgggaagaagcaagggcaagaacccaagtgcctcacctcgaaaggaggccctgttccctggagtcagggtgaactgcaaagctttggctgagacctgggatttgagataccacaaaccctgctgaacacagtgtctgttcagcaaactaaccagcattccctacagcctagggcagacaatagtatagaagtctggaaaaaaacaaaaacagaatttgagaaccttggaccactcctgtccctgtagctcagtcatcaaagcagaagtctggctttgctctattaagattggaaatgtacactaccaaacactcagtccactgttgagccccagtgctggaagggaggaaggcctttcttctgtgttaattgcgtagaggctacaggggttagcctggactaaaggcatccttgtcttttgagctattcacctcagtagaaaaggatctaagggaagatcactgtagtttagttctgttgacctgtgcacctaccccttggaaatgtctgctggtatttctaattccacaggtcatcagatgcctgcttgataatatataaacaataaaaacaactttcacttcttcctattgtaatcgtgtgccatggatctgatctgtaccatgaccctacataaggctggatggcacctcaggctgagggccccaatgtatgtgtggctgtgggtgtgggtgggagtgtgtctgctgagtaaggaacacgattttcaagattctaaagctcaattcaagtgacacattaatgataaactcagatctgatcaagagtccggatttctaacagtccttgctttggggggtgtgctgacaacttagctcaggtgccttacatcttttctaatcacagtgttgcatatgagcctgccctcactccctctgcagaatccctttgcacctgagaccctactgaagtggctggtagaaaaaggggcctgagtggaggattatcagtatcacgatttgcaggattcccttctgggcttcattctggaaacttttgttagggctgcttttcttaagtgccccnttggtggggggggcatattcgcgtttggacttcagctctttccggtaacaaggtgtgcttctagggaatttcctggtggcgtatcgggctccgaggggccagcctgaggtaccggcgtttgtgggcggccacgcgggggcgggcaagcactcttgggaacacgcggtgatgccctttctgtgtcccaatn

SEQ ID NO: 298206 - DNA, 2664 bp, Homo sapiens
  misc_feature (43)..(43): n is a, c, g, or t
ctgctaactcaggggcgagctgctaactcaggggcgagctgcngaagggatctgagaacacgttgccaggggcttgagaaggttactgagtgagttattgggagtcttaataaaataaactagatattaggtccattcattaattagttccagtttctccttgaaatgagtaaaaactagaaggcttctctccacagtgttgtgccccttcactcatttttttttgaggagaagggggtctctgttaacatctagcctaaagtatacaactgcctggggggcagggttaggaatctcttcactaccctgattcttgattcctggctctaccctgtctgtcccttttctttgaccagatctttctcttccctgaacgttttcttctttccctggacaggcagcctcctttgtgtgtattcagaggcagtgatgacttgctgtccaggcagctccctcctgcacacagaatgctcagggtcactgaaccactgcttctcttttgaaagtagagctagctgccactttcacgtggcctccgcagtgtctccacctacacccctgtgctcccctgccacactgatggctcaagacaaggctggcaaaccctcccagaaacatctctggcccagaaagcctctctctccctccctctctcatgaggcacagccaagccaagcgctcatgttgagccagtgggccagccacagagcaaaagagggtttattttcagtcccctctctctgggtcagaaccagagggcatgctgaatgccccctgcttacttggtgagggtgccccgcctgagtcagtgctctcagctggcagtgcaatgcttgtagaagtaggaggaaacagttctcactgggaagaagcaagggcaagaacccaagtgcctcacctcgaaaggaggccctgttccctggagtcagggtgaactgcaaagctttggctgagacctgggatttgagataccacaaaccctgctgaacacagtgtctgttcagcaaactaaccagcattccctacagcctagggcagacaatagtatagaagtctggaaaaaaacaaaaacagaatttgagaaccttggaccactcctgtccctgtagctcagtcatcaaagcagaagtctggctttgctctattaagattggaaatgtacactaccaaacactcagtccactgttgagccccagtgctggaagggaggaaggcctttcttctgtgttaattgcgtagaggctacaggggttagcctggactaaaggcatccttgtcttttgagctattcacctcagtagaaaaggatctaagggaagatcactgtagtttagttctgttgacctgtgcacctaccccttggaaatgtctgctggtatttctaattccacaggtcatcagatgcctgcttgataatatataaacaataaaaacaactttcacttcttcctattgtaatcgtgtgccatggatctgatctgtaccatgaccctacataaggctggatggcacctcaggctgagggccccaatgtatgtgtggctgtgggtgtgggtgggagtgtgtctgctgagtaaggaacacgattttcaagattctaaagctcaattcaagtgacacattaatgataaactcagatctgatcaagagtccggatttctaacagtccttgctttggggggtgtgctgacaacttagctcaggtgccttacatcttttctaatcacagtgttgcatatgagcctgccctcactccctctgcagaatccctttgcacctgagaccctactgaagtggctggtagaaaaaggggcctgagtggaggattatcagtatcacgatttgcaggattcccttctgggcttcattctggaaacttttgttagggctgcttttcttaagtgcccacatttgatggagggtggaaataatttgaatgtatttgatttataagttttttttttttttggggttaaaagatggttgtagcatttaaaatggaaaattttctcctgggttggctagtatctggggtgtattctctgtaagtgtagctcaaataggtcatcatgaaaggttaaaaaagcgaggtggccatgttatgcctggtggttaaggccagggcctctccaaccactgtgccactgacttgctgtgtgaccctgggcaagtcacttaactataaggtgcctcagttttccttctgttaaaatggggataataatactgacctacctcaaagggcagttttgaggcatgactaatgctttttagaaagcattttggggatccttcagcacaggaattctcaagacctgagtattttttataataggaatgtccaccatgaacttgatacgtccgtgtgtcccagatgctgtcattagtctatatggttctccaagaaactgaatgaatccattggagaagcggtggataactagccagacaaaatttgagaatacataaacaacgcattgccacggaaacatacagaggatgccttttctgtgattgggtgggattttttccctttttatgtgggatatagtagttacttgtgacaagaataattttggaataatttctattaatatcaactctgaagctaattgtactaatctgagattgtgtttgttcataataaaagtgaagtgaatctga

SEQ ID NO: 298207 - DNA, 5319 bp, Homo sapiens
agggaggcggggcttcccgcgtcccccaagctccagatcctggggtggctgccacgtctccctgccacgcgcctggggggacggaagacgggacggagatgttagtggtgggcgccccccgagggttcaccactgtttcctgagaaacttccccagtgcccacccacccgttctccgtgtgcccgagggccggtcctgggctaggctccgcgccccagccccaaaccgggtccccagccccttccagagagaaagctcccgacgcgggatgccgggcagaggcccagcggcgggtggaagagaagctgagaaggagaaacagaggggagggggagcgaggagctggcggcagagggaacagcagattgcgccgagccaatggcaacggcaggacgaggtggcaccaaattcccttcggccaatgacgagccggagtttacagaagcctcattagcatttccccagaggcaggggcaggggcagaggccgggtggtgtggtgtcggtgtcggcagcatccccggcgccctgctgcggtcgccgcgagcctcggcctctgtctcctccccctcccgcccttacctccacgcgggaccgcccgcgccagtcaactcctcgcactttgcccctgcttggcagcggataaaagggggctgaggaaataccggacacggtcacccgttgccagctctagcctttaaattcccggctcggggacctccacgcaccgcggctagcgccgacaaccagctagcgtgcaaggcgccgcggctcagcgcgtaccggcgggcttcgaaaccgcagtcctccggcgaccccgaactccgctccggagcctcagccccctggaaagtgatcccggcatccgagagccaagatgccggcccacttgctgcaggacgatatctctagctcctataccaccaccaccaccattacagcgcctccctccagggtcctgcagaatggaggagataagttggagacgatgcccctctacttggaagacgacattcgccctgatataaaagatgatatatatgaccccacctacaaggataaggaaggcccaagccccaaggttgaatatgtctggagaaacatcatccttatgtctctgctacacttgggagccctgtatgggatcactttgattcctacctgcaagttctacacctggctttggggggtattctactattttgtcagtgccctgggcataacagcaggagctcatcgtctgtggagccaccgctcttacaaagctcggctgcccctacggctctttctgatcattgccaacacaatggcattccagaatgatgtctatgaatgggctcgtgaccaccgtgcccaccacaagttttcagaaacacatgctgatcctcataattcccgacgtggctttttcttctctcacgtgggttggctgcttgtgcgcaaacacccagctgtcaaagagaaggggagtacgctagacttgtctgacctagaagctgagaaactggtgatgttccagaggaggtactacaaacctggcttgctgatgatgtgcttcatcctgcccacgcttgtgccctggtatttctggggtgaaacttttcaaaacagtgtgttcgttgccactttcttgcgatatgctgtggtgcttaatgccacctggctggtgaacagtgctgcccacctcttcggatatcgtccttatgacaagaacattagcccccgggagaatatcctggtttcacttggagctgtgggtgagggcttccacaactaccaccactcctttccctatgactactctgccagtgagtaccgctggcacatcaacttcaccacattcttcattgattgcatggccgccctcggtctggcctatgaccggaagaaagtctccaaggccgccatcttggccaggattaaaagaaccggagatggaaactacaagagtggctgagtttggggtccctcaggttcctttttcaaaaaccagccaggcagaggttttaatgtctgtttattaactactgaataatgctaccaggatgctaaagatgatgatgttaacccattccagtacagtattcttttaaaattcaaaagtattgaaagccaacaactctgcctttatgatgctaagctgatattatttcttctcttatcctctctctcttctaggcccattgtcctccttttcactttattgctatcgccctcctttcccttattgcctcccaggcaagcagctggtcagtctttgctcagtgtccagcttccaaagcctagacaacctttctgtagcctaaaacgaatggtctttgctccagataactctctttccttgagctgttgtgagctttgaagtaggtggcttgagctagagataaaacagaatcttctgggtagtcccctgttgattatcttcagcccaggcttttgctagatggaatggaaaagcaacttcatttgacacaaagcttctaaagcaggtaaattgtcgggggagagagttagcatgtatgaatgtaaggatgagggaagcgaagcaagaggaacctctcgccatgatcagacatacagctgcctacctaatgaggacttcaagccccaccacatagcatgcttcctttctctcctggctcggggtaaaaagtggctgcggtgtttggcaatgctaattcaatgccgcaacatatagttgaggccgaggataaagaaaagacattttaagtttgtagtaaaagtggtctctgctggggaagggttttcttttctttttttctttaataacaaggagatttcttagttcatatatcaagaagtcttgaagttgggtgtttccagaattggtaaaaacagcagctcatagaattttgagtattccatgagctgctcattacagttctttcctctttctgctctgccatcttcaggatattggttcttcccctcatagtaataagatggctgtggcatttccaaacatccaaaaaaagggaaggatttaaggaggtgaagtcgggtcaaaaataaaatatatatacatatatacattgcttagaacgttaaactattagagtatttcccttccaaagagggatgtttggaaaaaactctgaaggagaggaggaattagttgggatgccaatttcctctccactgctggacatgagatggagaggctgagggacaggatctataggcagcttctaagagcgaacttcacataggaagggatctgagaacacgttgccaggggcttgagaaggttactgagtgagttattgggagtcttaataaaataaactagatattaggtccattcattaattagttccagtttctccttgaaatgagtaaaaactagaaggcttctctccacagtgttgtgccccttcactcatttttttttgaggagaagggggtctctgttaacatctagcctaaagtatacaactgcctggggggcagggttaggaatctcttcactaccctgattcttgattcctggctctaccctgtctgtcccttttctttgaccagatctttctcttccctgaacgttttcttctttcctggagtcagggtgaactgcaaagctttggctgagacctgggatttgagataccacaaaccctgctgaacacagtgtctgttcagcaaactaaccagcattccctacagcctagggcagacaatagtatagaagtctggaaaaaaacaaaaacagaatttgagaaccttggaccactcctgtccctgtagctcagtcatcaaagcagaagtctggctttgctctattaagattggaaatgtacactaccaaacactcagtccactgttgagccccagtgctggaagggaggaaggcctttcttctgtgttaattgcgtagaggctacaggggttagcctggactaaaggcatccttgtcttttgagctattcacctcagtagaaaaggatctaagggaagatcactgtagtttagttctgttgacctgtgcacctaccccttggaaatgtctgctggtatttctaattccacaggtcatcagatgcctgcttgataatatataaacaataaaaacaactttcacttcttcctattgtaatcgtgtgccatggatctgatctgtaccatgaccctacataaggctggatggcacctcaggctgagggccccaatgtatgtgtggctgtgggtgtgggtgggagtgtgtctgctgagtaaggaacacgattttcaagattctaaagctcaattcaagtgacacattaatgataaactcagatctgatcaagagtccggatttctaacagtccttgctttggggggtgtgctgacaacttagctcaggtgccttacatcttttctaatcacagtgttgcatatgagcctgccctcactccctctgcagaatccctttgcacctgagaccctactgaagtggctggtagaaaaaggggcctgagtggaggattatcagtatcacgatttgcaggattcccttctgggcttcattctggaaacttttgttagggctgcttttcttaagtgcccacatttgatggagggtggaaataatttgaatgtatttgatttataagttttttttttttttggggttaaaagatggttgtagcatttaaaatggaaaattttctcctgggttggctagtatctggggtgtattctctgtaagtgtagctcaaataggtcatcatgaaaggttaaaaaagcgaggtggccatgttatgcctggtggttaaggccagggcctctccaaccactgtgccactgacttgctgtgtgaccctgggcaagtcacttaactataaggtgcctcagttttccttctgttaaaatggggataataatactgacctacctcaaagggcagttttgaggcatgactaatgctttttagaaagcattttggggatccttcagcacaggaattctcaagacctgagtattttttataataggaatgtccaccatgaacttgatacgtccgtgtgtcccagatgctgtcattagtctatatggttctccaagaaactgaatgaatccattggagaagcggtggataactagccagacaaaatttgagaatacataaacaacgcattgccacggaaacatacagaggatgccttttctgtgattgggtgggattttttccctttttatgtgggatatagtagttacttgtgacaagaataattttggaataatttctattaatatcaactctgaagctaattgtactaatctgagattgtgtttgttcataataaaagtgaagtgaatctga

SEQ ID NO: 298208 - DNA, 2535 bp, Homo sapiens
  misc_feature (29)..(29): n is a, c, g, or t
  misc_feature (37)..(37): n is a, c, g, or t
aactatagctaggtacgaggccggggttnaatcggcngaggtaaaaactagaaggcttctctccacagtgttgtgccccttcactcatttttttttgaggagaagggggtctctgttaacatctagcctaaagtatacaactgcctggggggcagggttaggaatctcttcactaccctgattcttgattcctggctctaccctgtctgtcccttttctttgaccagatctttctcttccctgaacgttttcttctttccctggacaggcagcctcctttgtgtgtattcagaggcagtgatgacttgctgtccaggcagctccctcctgcacacagaatgctcagggtcactgaaccactgcttctcttttgaaagtagagctagctgccactttcacgtggcctccgcagtgtctccacctacacccctgtgctcccctgccacactgatggctcaagacaaggctggcaaaccctcccagaaacatctctggcccagaaagcctctctctccctccctctctcatgaggcacagccaagccaagcgctcatgttgagccagtgggccagccacagagcaaaagagggtttattttcagtcccctctctctgggtcagaaccagagggcatgctgaatgccccctgcttacttggtgagggtgccccgcctgagtcagtgctctcagctggcagtgcaatgcttgtagaagtaggaggaaacagttctcactgggaagaagcaagggcaagaacccaagtgcctcacctcgaaaggaggccctgttccctggagtcagggtgaactgcaaagctttggctgagacctgggatttgagataccacaaaccctgctgaacacagtgtctgttcagcaaactaaccagcattccctacagcctagggcagacaatagtatagaagtctggaaaaaaacaaaaacagaatttgagaaccttggaccactcctgtccctgtagctcagtcatcaaagcagaagtctggctttgctctattaagattggaaatgtacactaccaaacactcagtccactgttgagccccagtgctggaagggaggaaggcctttcttctgtgttaattgcgtagaggctacaggggttagcctggactaaaggcatccttgtcttttgagctattcacctcagtagaaaaggatctaagggaagatcactgtagtttagttctgttgacctgtgcacctaccccttggaaatgtctgctggtatttctaattccacaggtcatcagatgcctgcttgataatatataaacaataaaaacaactttcacttcttcctattgtaatcgtgtgccatggatctgatctgtaccatgaccctacataaggctggatggcacctcaggctgagggccccaatgtatgtgtggctgtgggtgtgggtgggagtgtgtctgctgagtaaggaacacgattttcaagattctaaagctcaattcaagtgacacattaatgataaactcagatctgatcaagagtccggatttctaacagtccttgctttggggggtgtgctgacaacttagctcaggtgccttacatcttttctaatcacagtgttgcatatgagcctgccctcactccctctgcagaatccctttgcacctgagaccctactgaagtggctggtagaaaaaggggcctgagtggaggattatcagtatcacgatttgcaggattcccttctgggcttcattctggaaacttttgttagggctgcttttcttaagtgcccacatttgatggagggtggaaataatttgaatgtatttgatttataagttttttttttttttggggttaaaagatggttgtagcatttaaaatggaaaattttctcctgggttggctagtatctggggtgtattctctgtaagtgtagctcaaataggtcatcatgaaaggttaaaaaagcgaggtggccatgttatgcctggtggttaaggccagggcctctccaaccactgtgccactgacttgctgtgtgaccctgggcaagtcacttaactataaggtgcctcagttttccttctgttaaaatggggataataatactgacctacctcaaagggcagttttgaggcatgactaatgctttttagaaagcattttggggatccttcagcacaggaattctcaagacctgagtattttttataataggaatgtccaccatgaacttgatacgtccgtgtgtcccagatgctgtcattagtctatatggttctccaagaaactgaatgaatccattggagaagcggtggataactagccagacaaaatttgagaatacataaacaacgcattgccacggaaacatacagaggatgccttttctgtgattgggtgggattttttccctttttatgtgggatatagtagttacttgtgacaagaataattttggaataatttctattaatatcaactctgaagctaattgtactaatctgagattgtgtttgttcataataaaagtgaagtgaatctga

SEQ ID NO: 298209 - DNA, 4794 bp, Homo sapiens
  misc_feature (4678)..(4678): n is a, c, g, or t
agggaggcggggcttcccgcgtcccccaagctccagatcctggggtggctgccacgtctccctgccacgcgcctggggggacggaagacgggacggagatgttagtggtgggcgccccccgagggttcaccactgtttcctgagaaacttccccagtgcccacccacccgttctccgtgtgcccgagggccggtcctgggctaggctccgcgccccagccccaaaccgggtccccagccccttccagagagaaagctcccgacgcgggatgccgggcagaggcccagcggcgggtggaagagaagctgagaaggagaaacagaggggagggggagcgaggagctggcggcagagggaacagcagattgcgccgagccaatggcaacggcaggacgaggtggcaccaaattcccttcggccaatgacgagccggagtttacagaagcctcattagcatttccccagaggcaggggcaggggcagaggccgggtggtgtggtgtcggtgtcggcagcatccccggcgccctgctgcggtcgccgcgagcctcggcctctgtctcctccccctcccgcccttacctccacgcgggaccgcccgcgccagtcaactcctcgcactttgcccctgcttggcagcggataaaagggggctgaggaaataccggacacggtcacccgttgccagctctagcctttaaattcccggctcggggacctccacgcaccgcggctagcgccgacaaccagctagcgtgcaaggcgccgcggctcagcgcgtaccggcgggcttcgaaaccgcagtcctccggcgaccccgaactccgctccggagcctcagccccctggaaagtgatcccggcatccgagagccaagatgccggcccacttgctgcaggacgatatctctagctcctataccaccaccaccaccattacagcgcctccctccagggtcctgcagaatggaggagataagttggagacgatgcccctctacttggaagacgacattcgccctgatataaaagatgatatatatgaccccacctacaaggataaggaaggcccaagccccaaggttgaatatgtctggagaaacatcatccttatgtctctgctacacttgggagccctgtatgggatcactttgattcctacctgcaagttctacacctggctttggggggtattctactattttgtcagtgccctgggcataacagcaggagctcatcgtctgtggagccaccgctcttacaaagctcggctgcccctacggctctttctgatcattgccaacacaatggcattccagaatgatgtctatgaatgggctcgtgaccaccgtgcccaccacaagttttcagaaacacatgctgatcctcataattcccgacgtggctttttcttctctcacgtgggttggctgcttgtgcgcaaacacccagctgtcaaagagaaggggagtacgctagacttgtctgacctagaagctgagaaactggtgatgttccagaggaggtactacaaacctggcttgctgatgatgtgcttcatcctgcccacgcttgtgccctggtatttctggggtgaaacttttcaaaacagtgtgttcgttgccactttcttgcgatatgctgtggtgcttaatgccacctggctggtgaacagtgctgcccacctcttcggatatcgtccttatgacaagaacattagcccccgggagaatatcctggtttcacttggagctgtgggtgagggcttccacaactaccaccactcctttccctatgactactctgccagtgagtaccgctggcacatcaacttcaccacattcttcattgattgcatggccgccctcggtctggcctatgaccggaagaaagtctccaaggccgccatcttggccaggattaaaagaaccggagatggaaactacaagagtggctgagtttggggtccctcaggttcctttttcaaaaaccagccaggcagaggttttaatgtctgtttattaactactgaataatgctaccaggatgctaaagatgatgatgttaacccattccagtacagtattcttttaaaattcaaaagtattgaaagccaacaactctgcctttatgatgctaagctgatattatttcttctcttatcctctctctcttctaggcccattgtcctccttttcactttattgctatcgccctcctttcccttattgcctcccaggcaagcagctggtcagtctttgctcagtgtccagcttccaaagcctagacaacctttctgtagcctaaaacgaatggtctttgctccagataactctctttccttgagctgttgtgagctttgaagtaggtggcttgagctagagataaaacagaatcttctgggtagtcccctgttgattatcttcagcccaggcttttgctagatggaatggaaaagcaacttcatttgacacaaagcttctaaagcaggtaaattgtcgggggagagagttagcatgtatgaatgtaaggatgagggaagcgaagcaagaggaacctctcgccatgatcagacatacagctgcctacctaatgaggacttcaagccccaccacatagcatgcttcctttctctcctggctcggggtaaaaagtggctgcggtgtttggcaatgctaattcaatgccgcaacatatagttgaggccgaggataaagaaaagacattttaagtttgtagtaaaagtggtctctgctggggaagggttttcttttctttttttctttaataacaaggagatttcttagttcatatatcaagaagtcttgaagttgggtgtttccagaattggtaaaaacagcagctcatagaattttgagtattccatgagctgctcattacagttctttcctctttctgctctgccatcttcaggatattggttcttcccctcatagtaataagatggctgtggcatttccaaacatccaaaaaaagggaaggatttaaggaggtgaagtcgggtcaaaaataaaatatatatacatatatacattgcttagaacgttaaactattagagtatttcccttccaaagagggatgtttggaaaaaactctgaaggagaggaggaattagttgggatgccaatttcctctccactgctggacatgagatggagaggctgagggacaggatctataggcagcttctaagagcgaacttcacataggaagggatctgagaacacgttgccaggggcttgagaaggttactgagtgagttattgggagtcttaataaaataaactagatattaggtccattcattaattagttccagtttctccttgaaatgagtaaaaactagaaggcttctctccacagtgttgtgccccttcactcatttttttttgaggagaagggggtctctgttaacatctagcctaaagtatacaactgcctggggggcagggttaggaatctcttcactaccctgattcttgattcctggctctaccctgtctgtcccttttctttgaccagatctttctcttccctgaacgttttcttctttccctggacaggcagcctcctttgtgtgtattcagaggcagtgatgacttgctgtccaggcagctccctcctgcacacagaatgctcagggtcactgaaccactgcttctcttttgaaagtagagctagctgccactttcacgtggcctccgcagtgtctccacctacacccctgtgctcccctgccacactgatggctcaagacaaggctggcaaaccctcccagaaacatctctggcccagaaagcctctctctccctccctctctcatgaggcacagccaagccaagcgctcatgttgagccagtgggccagccacagagcaaaagagggtttattttcagtcccctctctctgggtcagaaccagagggcatgctgaatgccccctgcttacttggtgagggtgccccgcctgagtcagtgctctcagctggcagtgcaatgcttgtagaagtaggaggaaacagttctcactgggaagaagcaagggcaagaacccaagtgcctcacctcgaaaggaggccctgttccctggagtcagggtgaactgcaaagctttggctgagacctgggatttgagataccacaaaccctgctgaacacagtgtctgttcagcaaactaaccagcattccctacagcctagggcagacaatagtatagaagtctggaaaaaaacaaaaacagaatttgagaaccttggaccactcctgtccctgtagctcagtcatcaaagcagaagtctggctttgctctattaagattggaaatgtacactaccaaacactcagtccactgttgagccccagtgctggaagggaggaaggcctttcttctgtgttaattgcgtagaggctacaggggttagcctggactaaaggcatccttgtcttttgagctattcacctcagtagaaaaggatctaagggaagatcactgtagtttagttctgttgacctgtgcacctaccccttggaaatgtctgctggtatttctaattccacaggtcatcagatgcctgcttgataatatataaacaataaaaacaactttcacttcttcctattgtaaaaaaaaaaaaaaaaaaaaaaaaaaaaaaaaaaanaaaaaaaaaaaaaaaaaaaaaaaaaaaaaaaaaaaaaaaaaaaaaaaaaaaaaaaaaaaaaaaacaaaaaaaagaaagaaaaaaaaaaaaaaaaaaaaaaaacaagaaaaaaaaaa

SEQ ID NO: 298210 - DNA, 1936 bp, Homo sapiens
taaccttatggctaggtacgaggcctgggtgttagctgaatgccccctgcttacttggtgagggtgccccgcctgagtcagtgctctcagctggcagtgcaatgcttgtagaagtaggaggaaacagttctcactgggaagaagcaagggcaagaacccaagtgcctcacctcgaaaggaggccctgttccctggagtcagggtgaactgcaaagctttggctgagacctgggatttgagataccacaaaccctgctgaacacagtgtctgttcagcaaactaaccagcattccctacagcctagggcagacaatagtatagaagtctggaaaaaaacaaaaacagaatttgagaaccttggaccactcctgtccctgtagctcagtcatcaaagcagaagtctggctttgctctattaagattggaaatgtacactaccaaacactcagtccactgttgagccccagtgctggaagggaggaaggcctttcttctgtgttaattgcgtagaggctacaggggttagcctggactaaaggcatccttgtcttttgagctattcacctcagtagaaaaggatctaagggaagatcactgtagtttagttctgttgacctgtgcacctaccccttggaaatgtctgctggtatttctaattccacaggtcatcagatgcctgcttgataatatataaacaataaaaacaactttcacttcttcctattgtaatcgtgtgccatggatctgatctgtaccatgaccctacataaggctggatggcacctcaggctgagggccccaatgtatgtgtggctgtgggtgtgggtgggagtgtgtctgctgagtaaggaacacgattttcaagattctaaagctcaattcaagtgacacattaatgataaactcagatctgatcaagagtccggatttctaacagtccttgctttggggggtgtgctgacaacttagctcaggtgccttacatcttttctaatcacagtgttgcatatgagcctgccctcactccctctgcagaatccctttgcacctgagaccctactgaagtggctggtagaaaaaggggcctgagtggaggattatcagtatcacgatttgcaggattcccttctgggcttcattctggaaacttttgttagggctgcttttcttaagtgcccacatttgatggagggtggaaataatttgaatgtatttgatttataagttttttttttttttggggttaaaagatggttgtagcatttaaaatggaaaattttctcctgggttggctagtatctggggtgtattctctgtaagtgtagctcaaataggtcatcatgaaaggttaaaaaagcgaggtggccatgttatgcctggtggttaaggccagggcctctccaaccactgtgccactgacttgctgtgtgaccctgggcaagtcacttaactataaggtgcctcagttttccttctgttaaaatggggataataatactgacctacctcaaagggcagttttgaggcatgactaatgctttttagaaagcattttggggatccttcagcacaggaattctcaagacctgagtattttttataataggaatgtccaccatgaacttgatacgtccgtgtgtcccagatgctgtcattagtctatatggttctccaagaaactgaatgaatccattggagaagcggtggataactagccagacaaaatttgagaatacataaacaacgcattgccacggaaacatacagaggatgccttttctgtgattgggtgggattttttccctttttatgtgggatatagtagttacttgtgacaagaataattttggaataatttctattaatatcaactctgaagctaattgtactaatctgagattgtgtttgttcataataaaagtgaagtgaatctga

SEQ ID NO: 298211 - DNA, 1855 bp, Homo sapiens
tcgtagacgtcggccatccatcagatgaggcctgactgcagtgagcagggacccggcgcgcggtggcggcctcgtcaaggggcaacgcgctgctgccttgctgctaccttttggagtcagggtgaactgcaaagctttggctgagacctgggatttgagataccacaaaccctgctgaacacagtgtctgttcagcaaactaaccagcattccctacagcctagggcagacaatagtatagaagtctggaaaaaaacaaaaacagaatttgagaaccttggaccactcctgtccctgtagctcagtcatcaaagcagaagtctggctttgctctattaagattggaaatgtacactaccaaacactcagtccactgttgagccccagtgctggaagggaggaaggcctttcttctgtgttaattgcgtagaggctacaggggttagcctggactaaaggcatccttgtcttttgagctattcacctcagtagaaaaggatctaagggaagatcactgtagtttagttctgttgacctgtgcacctaccccttggaaatgtctgctggtatttctaattccacaggtcatcagatgcctgcttgataatatataaacaataaaaacaactttcacttcttcctattgtaatcgtgtgccatggatctgatctgtaccatgaccctacataaggctggatggcacctcaggctgagggccccaatgtatgtgtggctgtgggtgtgggtgggagtgtgtctgctgagtaaggaacacgattttcaagattctaaagctcaattcaagtgacacattaatgataaactcagatctgatcaagagtccggatttctaacagtccttgctttggggggtgtgctgacaacttagctcaggtgccttacatcttttctaatcacagtgttgcatatgagcctgccctcactccctctgcagaatccctttgcacctgagaccctactgaagtggctggtagaaaaaggggcctgagtggaggattatcagtatcacgatttgcaggattcccttctgggcttcattctggaaacttttgttagggctgcttttcttaagtgcccacatttgatggagggtggaaataatttgaatgtatttgatttataagttttttttttttttggggttaaaagatggttgtagcatttaaaatggaaaattttctcctgggttggctagtatctggggtgtattctctgtaagtgtagctcaaataggtcatcatgaaaggttaaaaaagcgaggtggccatgttatgcctggtggttaaggccagggcctctccaaccactgtgccactgacttgctgtgtgaccctgggcaagtcacttaactataaggtgcctcagttttccttctgttaaaatggggataataatactgacctacctcaaagggcagttttgaggcatgactaatgctttttagaaagcattttggggatccttcagcacaggaattctcaagacctgagtattttttataataggaatgtccaccatgaacttgatacgtccgtgtgtcccagatgctgtcattagtctatatggttctccaagaaactgaatgaatccattggagaagcggtggataactagccagacaaaatttgagaatacataaacaacgcattgccacggaaacatacagaggatgccttttctgtgattgggtgggattttttccctttttatgtgggatatagtagttacttgtgacaagaataattttggaataatttctattaatatcaactctgaagctaattgtactaatctgagattgtgtttgttcataataaaagtgaagtgaatctga

SEQ ID NO: 298212 - DNA, 1989 bp, Homo sapiens
gctgtcaaaccggaagcctaagtagacccaatcttgttaatgaaatgttctgagctgtatcttgaagtttagaaaagtattcgttacatcttgtaggatctactttttgaacttttcattccccgtagttgaccattctgcaagtactagtcctctagaaataggttaaactgaagcaacttgatggaaggatctctccacagggcttgttttcccaagaaaagtattgtttggaggagccaaggtaaaagcctacctaagcatatcgtaaagctgttccaaaataactcagacccagtcttgtggatggaaatgtagtgctcgagtcacattctgcttaaagttgtaaccaatacagatgagtttaaaggaaaaaagtctggaaaaaaacaaaaacagaatttgagaaccttggaccactcctgtccctgtagctcagtcatcaaagcagaagtctggctttgctctattaagattggaaatgtacactaccaaacactcagtccactgttgagccccagtgctggaagggaggaaggcctttcttctgtgttaattgcgtagaggctacaggggttagcctggactaaaggcatccttgtcttttgagctattcacctcagtagaaaaggatctaagggaagatcactgtagtttagttctgttgacctgtgcacctaccccttggaaatgtctgctggtatttctaattccacaggtcatcagatgcctgcttgataatatataaacaataaaaacaactttcacttcttcctattgtaatcgtgtgccatggatctgatctgtaccatgaccctacataaggctggatggcacctcaggctgagggccccaatgtatgtgtggctgtgggtgtgggtgggagtgtgtctgctgagtaaggaacacgattttcaagattctaaagctcaattcaagtgacacattaatgataaactcagatctgatcaagagtccggatttctaacagtccttgctttggggggtgtgctgacaacttagctcaggtgccttacatcttttctaatcacagtgttgcatatgagcctgccctcactccctctgcagaatccctttgcacctgagaccctactgaagtggctggtagaaaaaggggcctgagtggaggattatcagtatcacgatttgcaggattcccttctgggcttcattctggaaacttttgttagggctgcttttcttaagtgcccacatttgatggagggtggaaataatttgaatgtatttgatttataagttttttttttttttggggttaaaagatggttgtagcatttaaaatggaaaattttctcctgggttggctagtatctggggtgtattctctgtaagtgtagctcaaataggtcatcatgaaaggttaaaaaagcgaggtggccatgttatgcctggtggttaaggccagggcctctccaaccactgtgccactgacttgctgtgtgaccctgggcaagtcacttaactataaggtgcctcagttttccttctgttaaaatggggataataatactgacctacctcaaagggcagttttgaggcatgactaatgctttttagaaagcattttggggatccttcagcacaggaattctcaagacctgagtattttttataataggaatgtccaccatgaacttgatacgtccgtgtgtcccagatgctgtcattagtctatatggttctccaagaaactgaatgaatccattggagaagcggtggataactagccagacaaaatttgagaatacataaacaacgcattgccacggaaacatacagaggatgccttttctgtgattgggtgggattttttccctttttatgtgggatatagtagttacttgtgacaagaataattttggaataatttctattaatatcaactctgaagctaattgtactaatctgagattgtgtttgttcataataaaagtgaagtgaatctga

SEQ ID NO: 298213 - DNA, 1130 bp, Homo sapiens
  misc_feature (29)..(29): n is a, c, g, or t
  misc_feature (37)..(37): n is a, c, g, or t
aactatagctaggtacgaggccggggttnaatcggcngagtaaggaacacgattttcaagattctaaagctcaattcaagtgacacattaatgataaactcagatctgatcaagagtccggatttctaacagtccttgctttggggggtgtgctgacaacttagctcaggtgccttacatcttttctaatcacagtgttgcatatgagcctgccctcactccctctgcagaatccctttgcacctgagaccctactgaagtggctggtagaaaaaggggcctgagtggaggattatcagtatcacgatttgcaggattcccttctgggcttcattctggaaacttttgttagggctgcttttcttaagtgcccacatttgatggagggtggaaataatttgaatgtatttgatttataagttttttttttttttggggttaaaagatggttgtagcatttaaaatggaaaattttctcctgggttggctagtatctggggtgtattctctgtaagtgtagctcaaataggtcatcatgaaaggttaaaaaagcgaggtggccatgttatgcctggtggttaaggccagggcctctccaaccactgtgccactgacttgctgtgtgaccctgggcaagtcacttaactataaggtgcctcagttttccttctgttaaaatggggataataatactgacctacctcaaagggcagttttgaggcatgactaatgctttttagaaagcattttggggatccttcagcacaggaattctcaagacctgagtattttttataataggaatgtccaccatgaacttgatacgtccgtgtgtcccagatgctgtcattagtctatatggttctccaagaaactgaatgaatccattggagaagcggtggataactagccagacaaaatttgagaatacataaacaacgcattgccacggaaacatacagaggatgccttttctgtgattgggtgggattttttccctttttatgtgggatatagtagttacttgtgacaagaataattttggaataatttctattaatatcaactctgaagctaattgtactaatctgagattgtgtttgttcataataaaagtgaagtgaatctga

SEQ ID NO: 298214 - DNA, 2738 bp, Homo sapiens
agggaggcggggcttcccgcgtcccccaagctccagatcctggggtggctgccacgtctccctgccacgcgcctggggggacggaagacgggacggagatgttagtggtgggcgccccccgagggttcaccactgtttcctgagaaacttccccagtgcccacccacccgttctccgtgtgcccgagggccggtcctgggctaggctccgcgccccagccccaaaccgggtccccagccccttccagagagaaagctcccgacgcgggatgccgggcagaggcccagcggcgggtggaagagaagctgagaaggagaaacagaggggagggggagcgaggagctggcggcagagggaacagcagattgcgccgagccaatggcaacggcaggacgaggtggcaccaaattcccttcggccaatgacgagccggagtttacagaagcctcattagcatttccccagaggcaggggcaggggcagaggccgggtggtgtggtgtcggtgtcggcagcatccccggcgccctgctgcggtcgccgcgagcctcggcctctgtctcctccccctcccgcccttacctccacgcgggaccgcccgcgccagtcaactcctcgcactttgcccctgcttggcagcggataaaagggggctgaggaaataccggacacggtcacccgttgccagctctagcctttaaattcccggctcggggacctccacgcaccgcggctagcgccgacaaccagctagcgtgcaaggcgccgcggctcagcgcgtaccggcgggcttcgaaaccgcagtcctccggcgaccccgaactccgctccggagcctcagccccctggaaagtgatcccggcatccgagagccaagatgccggcccacttgctgcaggacgatatctctagctcctataccaccaccaccaccattacagcgcctccctccagggtcctgcagaatggaggagataagttggagacgatgcccctctacttggaagacgacattcgccctgatataaaagatgatatatatgaccccacctacaaggataaggaaggcccaagccccaaggttgaatatgtctggagaaacatcatccttatgtctctgctacacttgggagccctgtatgggatcactttgattcctacctgcaagttctacacctggctttggggggtattctactattttgtcagtgccctgggcataacagcaggagctcatcgtctgtggagccaccgctcttacaaagctcggctgcccctacggctctttctgatcattgccaacacaatggcattccagaatgatgtctatgaatgggctcgtgaccaccgtgcccaccacaagttttcagaaacacatgctgatcctcataattcccgacgtggctttttcttctctcacgtgggttggctgcttgtgcgcaaacacccagctgtcaaagagaaggggagtacgctagacttgtctgacctagaagctgagaaactggtgatgttccagaggaggtactacaaacctggcttgctgatgatgtgcttcatcctgcccacgcttgtgccctggtatttctggggtgaaacttttcaaaacagtgtgttcgttgccactttcttgcgatatgctgtggtgcttaatgccacctggctggtgaacagtgctgcccacctcttcggatatcgtccttatgacaagaacattagcccccgggagaatatcctggtttcacttggagctgtgggtgagggcttccacaactaccaccactcctttccctatgactactctgccagtgagtaccgctggcacatcaacttcaccacattcttcattgattgcatggccgccctcggtctggcctatgaccggaagaaagtctccaaggccgccatcttggccaggattaaaagaaccggagatggaaactacaagagtggctgagtttggggtccctcaggttcctttttcaaaaaccagccaggcagaggttttaatgtctgtttattaactactgaataatgctaccaggatgctaaagatgatgatgttaacccattccagtacagtattcttttaaaattcaaaagtattgaaagccaacaactctgcctttatgatgctaagctgatattatttcttctcttatcctctctctcttctaggcccattgtcctccttttcactttattgctatcgccctcctttcccttattgcctcccaggcaagcagctggtcagtctttgctcagtgtccagcttccaaagcctagacaacctttctgtagcctaaaacgaatggtctttgctccagataactctctttccttgagctgttgtgagctttgaagtaggtggcttgagctagagataaaacagaatcttctgggtagtcccctgttgattatcttcagcccaggcttttgctagatggaatggaaaagcaacttcatttgacacaaagcttctaaagcaggtaaattgtcgggggagagagttagcatgtatgaatgtaaggatgagggaagcgaagcaagaggaacctctcgccatgatcagacatacagctgcctacctaatgaggacttcaagccccaccacatagcatggatcagatcccctcatgatttcccgcataagcgtaggcattgtgtgaatgagatttggagactattagggttgcagcctactgagttaagtcttgcccgtatgtaataagtgtagat

SEQ ID NO: 298215 - DNA, 2242 bp, Homo sapiens
agggaggcggggcttcccgcgtcccccaagctccagatcctggggtggctgccacgtctccctgccacgcgcctggggggacggaagacgggacggagatgttagtggtgggcgccccccgagggttcaccactgtttcctgagaaacttccccagtgcccacccacccgttctccgtgtgcccgagggccggtcctgggctaggctccgcgccccagccccaaaccgggtccccagccccttccagagagaaagctcccgacgcgggatgccgggcagaggcccagcggcgggtggaagagaagctgagaaggagaaacagaggggagggggagcgaggagctggcggcagagggaacagcagattgcgccgagccaatggcaacggcaggacgaggtggcaccaaattcccttcggccaatgacgagccggagtttacagaagcctcattagcatttccccagaggcaggggcaggggcagaggccgggtggtgtggtgtcggtgtcggcagcatccccggcgccctgctgcggtcgccgcgagcctcggcctctgtctcctccccctcccgcccttacctccacgcgggaccgcccgcgccagtcaactcctcgcactttgcccctgcttggcagcggataaaagggggctgaggaaataccggacacggtcacccgttgccagctctagcctttaaattcccggctcggggacctccacgcaccgcggctagcgccgacaaccagctagcgtgcaaggcgccgcggctcagcgcgtaccggcgggcttcgaaaccgcagtcctccggcgaccccgaactccgctccggagcctcagccccctggaaagtgatcccggcatccgagagccaagatgccggcccacttgctgcaggacgatatctctagctcctataccaccaccaccaccattacagcgcctccctccagggtcctgcagaatggaggagataagttggagacgatgcccctctacttggaagacgacattcgccctgatataaaagatgatatatatgaccccacctacaaggataaggaaggcccaagccccaaggttgaatatgtctggagaaacatcatccttatgtctctgctacacttgggagccctgtatgggatcactttgattcctacctgcaagttctacacctggctttggggggtattctactattttgtcagtgccctgggcataacagcaggagctcatcgtctgtggagccaccgctcttacaaagctcggctgcccctacggctctttctgatcattgccaacacaatggcattccagaatgatgtctatgaatgggctcgtgaccaccgtgcccaccacaagttttcagaaacacatgctgatcctcataattcccgacgtggctttttcttctctcacgtgggttggctgcttgtgcgcaaacacccagctgtcaaagagaaggggagtacgctagacttgtctgacctagaagctgagaaactggtgatgttccagaggaggtactacaaacctggcttgctgatgatgtgcttcatcctgcccacgcttgtgccctggtatttctggggtgaaacttttcaaaacagtgtgttcgttgccactttcttgcgatatgctgtggtgcttaatgccacctggctggtgaacagtgctgcccacctcttcggatatcgtccttatgacaagaacattagcccccgggagaatatcctggtttcacttggagctgtgggtgagggcttccacaactaccaccactcctttccctatgactactctgccagtgagtaccgctggcacatcaacttcaccacattcttcattgattgcatggccgccctcggtctggcctatgaccggaagaaagtctccaaggccgccatcttggccaggattaaaagaaccggagatggaaactacaagagtggctgagtttggggtccctcaggttcctttttcaaaaaccagccaggcagaggttttaatgtctgtttattaactactgaataatgctaccaggatgctaaagatgatgatgttaacccattccagtacagtattcttttaaaattcaaaagtattgaaagccaacaactctgcctttatgatgctaagctgatattatttcttctcttatcctctctctcttctaggcccattgtcctccttttcactttattgtcgcccagcggggtaccggctcgattcgatcatgtca

SEQ ID NO: 298216 - DNA, 1979 bp, Homo sapiens
agggaggcggggcttcccgcgtcccccaagctccagatcctggggtggctgccacgtctccctgccacgcgcctggggggacggaagacgggacggagatgttagtggtgggcgccccccgagggttcaccactgtttcctgagaaacttccccagtgcccacccacccgttctccgtgtgcccgagggccggtcctgggctaggctccgcgccccagccccaaaccgggtccccagccccttccagagagaaagctcccgacgcgggatgccgggcagaggcccagcggcgggtggaagagaagctgagaaggagaaacagaggggagggggagcgaggagctggcggcagagggaacagcagattgcgccgagccaatggcaacggcaggacgaggtggcaccaaattcccttcggccaatgacgagccggagtttacagaagcctcattagcatttccccagaggcaggggcaggggcagaggccgggtggtgtggtgtcggtgtcggcagcatccccggcgccctgctgcggtcgccgcgagcctcggcctctgtctcctccccctcccgcccttacctccacgcgggaccgcccgcgccagtcaactcctcgcactttgcccctgcttggcagcggataaaagggggctgaggaaataccggacacggtcacccgttgccagctctagcctttaaattcccggctcggggacctccacgcaccgcggctagcgccgacaaccagctagcgtgcaaggcgccgcggctcagcgcgtaccggcgggcttcgaaaccgcagtcctccggcgaccccgaactccgctccggagcctcagccccctggaaagtgatcccggcatccgagagccaagatgccggcccacttgctgcaggacgatatctctagctcctataccaccaccaccaccattacagcgcctccctccagggtcctgcagaatggaggagataagttggagacgatgcccctctacttggaagacgacattcgccctgatataaaagatgatatatatgaccccacctacaaggataaggaaggcccaagccccaaggttgaatatgtctggagaaacatcatccttatgtctctgctacacttgggagccctgtatgggatcactttgattcctacctgcaagttctacacctggctttggggggtattctactattttgtcagtgccctgggcataacagcaggagctcatcgtctgtggagccaccgctcttacaaagctcggctgcccctacggctctttctgatcattgccaacacaatggcattccagaatgatgtctatgaatgggctcgtgaccaccgtgcccaccacaagttttcagaaacacatgctgatcctcataattcccgacgtggctttttcttctctcacgtgggttggctgcttgtgcgcaaacacccagctgtcaaagagaaggggagtacgctagacttgtctgacctagaagctgagaaactggtgatgttccagaggaggtactacaaacctggcttgctgatgatgtgcttcatcctgcccacgcttgtgccctggtatttctggggtgaaacttttcaaaacagtgtgttcgttgccactttcttgcgatatgctgtggtgcttaatgccacctggctggtgaacagtgctgcccacctcttcggatatcgtccttatgacaagaacattagcccccgggagaatatcctggtttcacttggagctgtgggtgagggcttccacaactaccaccactcctttccctatgactactctgccagtgagtaccgctggcacatcaacttcaccacattcttcattgattgcatggccagaaggaccttctggccacgctagaaagaagctcgccccacctccacctgtgagatccgtgaattctcggaatggcaggggaagccttgcactaggttgcagagaagcatcctccacat

SEQ ID NO: 298217 - DNA, 1788 bp, Homo sapiens
agggaggcggggcttcccgcgtcccccaagctccagatcctggggtggctgccacgtctccctgccacgcgcctggggggacggaagacgggacggagatgttagtggtgggcgccccccgagggttcaccactgtttcctgagaaacttccccagtgcccacccacccgttctccgtgtgcccgagggccggtcctgggctaggctccgcgccccagccccaaaccgggtccccagccccttccagagagaaagctcccgacgcgggatgccgggcagaggcccagcggcgggtggaagagaagctgagaaggagaaacagaggggagggggagcgaggagctggcggcagagggaacagcagattgcgccgagccaatggcaacggcaggacgaggtggcaccaaattcccttcggccaatgacgagccggagtttacagaagcctcattagcatttccccagaggcaggggcaggggcagaggccgggtggtgtggtgtcggtgtcggcagcatccccggcgccctgctgcggtcgccgcgagcctcggcctctgtctcctccccctcccgcccttacctccacgcgggaccgcccgcgccagtcaactcctcgcactttgcccctgcttggcagcggataaaagggggctgaggaaataccggacacggtcacccgttgccagctctagcctttaaattcccggctcggggacctccacgcaccgcggctagcgccgacaaccagctagcgtgcaaggcgccgcggctcagcgcgtaccggcgggcttcgaaaccgcagtcctccggcgaccccgaactccgctccggagcctcagccccctggaaagtgatcccggcatccgagagccaagatgccggcccacttgctgcaggacgatatctctagctcctataccaccaccaccaccattacagcgcctccctccagggtcctgcagaatggaggagataagttggagacgatgcccctctacttggaagacgacattcgccctgatataaaagatgatatatatgaccccacctacaaggataaggaaggcccaagccccaaggttgaatatgtctggagaaacatcatccttatgtctctgctacacttgggagccctgtatgggatcactttgattcctacctgcaagttctacacctggctttggggggtattctactattttgtcagtgccctgggcataacagcaggagctcatcgtctgtggagccaccgctcttacaaagctcggctgcccctacggctctttctgatcattgccaacacaatggcattccagaatgatgtctatgaatgggctcgtgaccaccgtgcccaccacaagttttcagaaacacatgctgatcctcataattcccgacgtggctttttcttctctcacgtgggttggctgcttgtgcgcaaacacccagctgtcaaagagaaggggagtacgctagacttgtctgacctagaagctgagaaactggtgatgttccagaggaggtgagtgaagccctgatggaggtggggatatggccctggcacctggtcattagggaccccattttttctcctgagactttcaaaatataagctgagaaatttgctgggtttgcatgttcacaatcttaatttaaaatcccaatttttaacatcccacgggcccgtagccatagactattgctccatttctttctctctggctgttctactttgcactgcccagccagactgaacatctcacagttcccccacggtatcaggtggg

SEQ ID NO: 298218 - DNA, 1707 bp, Homo sapiens
agggaggcggggcttcccgcgtcccccaagctccagatcctggggtggctgccacgtctccctgccacgcgcctggggggacggaagacgggacggagatgttagtggtgggcgccccccgagggttcaccactgtttcctgagaaacttccccagtgcccacccacccgttctccgtgtgcccgagggccggtcctgggctaggctccgcgccccagccccaaaccgggtccccagccccttccagagagaaagctcccgacgcgggatgccgggcagaggcccagcggcgggtggaagagaagctgagaaggagaaacagaggggagggggagcgaggagctggcggcagagggaacagcagattgcgccgagccaatggcaacggcaggacgaggtggcaccaaattcccttcggccaatgacgagccggagtttacagaagcctcattagcatttccccagaggcaggggcaggggcagaggccgggtggtgtggtgtcggtgtcggcagcatccccggcgccctgctgcggtcgccgcgagcctcggcctctgtctcctccccctcccgcccttacctccacgcgggaccgcccgcgccagtcaactcctcgcactttgcccctgcttggcagcggataaaagggggctgaggaaataccggacacggtcacccgttgccagctctagcctttaaattcccggctcggggacctccacgcaccgcggctagcgccgacaaccagctagcgtgcaaggcgccgcggctcagcgcgtaccggcgggcttcgaaaccgcagtcctccggcgaccccgaactccgctccggagcctcagccccctggaaagtgatcccggcatccgagagccaagatgccggcccacttgctgcaggacgatatctctagctcctataccaccaccaccaccattacagcgcctccctccagggtcctgcagaatggaggagataagttggagacgatgcccctctacttggaagacgacattcgccctgatataaaagatgatatatatgaccccacctacaaggataaggaaggcccaagccccaaggttgaatatgtctggagaaacatcatccttatgtctctgctacacttgggagccctgtatgggatcactttgattcctacctgcaagttctacacctggctttggggggtattctactattttgtcagtgccctgggcataacagcaggagctcatcgtctgtggagccaccgctcttacaaagctcggctgcccctacggctctttctgatcattgccaacacaatggcattccagccacttggaaacaagccagtcttttctgcaaggtcagttgaccaagagcatatttcccctctgttgtacatcgttgttttgtgtttgtgttgtaacagtgggtggagggagggtggggtctacatttgttgcatgagtcgatgggtcagaactttagtatacgcatgcgtcctctgagtgacagggcattttgtcgaaaataagcaccttggtaactaaacccctctaatagctataaaggctttagttctgtattgattaagttactgtaaaagcttgggtttatttttgtaggacttaatggctaagaattagaacatagcaagggggctcctctgttggagtaatgtaaattgtaattataaataaacatgcaaacctttaaaattt

SEQ ID NO: 298219 - DNA, 684 bp, Homo sapiens
gtcctgggactttaagttgcttttttctacttaagcttcagtggcaagttgggagaagaagggaggcaactccatgactcctttggagcccagattcctgggtattttgtgaggttgggctgagcgccttgggctcttgatacctgtccattgggattctcctaatagggtgtctatcctcaagccttacattcctcttctctctctccccagaatgatgtctatgaatgggctcgtgaccaccgtgcccaccacaagttttcagaaacacatgctgatcctcataattcccgacgtggctttttcttctctcacgtgggttggctgcttgtgcgcaaacacccagctgtcaaagagaaggggagtacgctagacttgtctgacctagaagctgagaaactggtgatgttccagaggaggtgagtgaagccctgatggaggtggggatatggccctggcacctggtcattagggaccccattttttctcctgagactttcaaaatataagctgagaaatttgctgggtttgcatgttcacaatcttaatttaaaatcccaatttttaacatcccacgggcccgtagccatagactattgctccatttctttctctctggctgttctactttgcactgcccagccagactgaacatctcacagttcccccacggtatcaggtggg

SEQ ID NO: 298220 - DNA, 5850 bp, Homo sapiens
agggaggcggggcttcccgcgtcccccaagctccagatcctggggtggctgccacgtctccctgccacgcgcctggggggacggaagacgggacggagatgttagtggtgggcgccccccgagggttcaccactgtttcctgagaaacttccccagtgcccacccacccgttctccgtgtgcccgagggccggtcctgggctaggctccgcgccccagccccaaaccgggtccccagccccttccagagagaaagctcccgacgcgggatgccgggcagaggcccagcggcgggtggaagagaagctgagaaggagaaacagaggggagggggagcgaggagctggcggcagagggaacagcagattgcgccgagccaatggcaacggcaggacgaggtggcaccaaattcccttcggccaatgacgagccggagtttacagaagcctcattagcatttccccagaggcaggggcaggggcagaggccgggtggtgtggtgtcggtgtcggcagcatccccggcgccctgctgcggtcgccgcgagcctcggcctctgtctcctccccctcccgcccttacctccacgcgggaccgcccgcgccagtcaactcctcgcactttgcccctgcttggcagcggataaaagggggctgaggaaataccggacacggtcacccgttgccagctctagcctttaaattcccggctcggggacctccacgcaccgcggctagcgccgacaaccagctagcgtgcaaggcgccgcggctcagcgcgtaccggcgggcttcgaaaccgcagtcctccggcgaccccgaactccgctccggagcctcagccccctggaaagtgatcccggcatccgagagccaagatgccggcccacttgctgcaggacgatatctctagctcctataccaccaccaccaccattacagcgcctccctccagggtcctgcagaatggaggagataagttggagacgatgcccctctacttggaagacgacattcgccctgatataaaagatgatatatatgaccccacctacaaggataaggaaggcccaagccccaaggttgaatatgtctggagaaacatcatccttatgtctctgctacacttgggagccctgtatgggatcactttgattcctacctgcaagttctacacctggctttggggggtattctactattttgtcagtgccctgggcataacagcaggagctcatcgtctgtggagccaccgctcttacaaagctcggctgcccctacggctctttctgatcattgccaacacaatggcattccagaatgatgtctatgaatgggctcgtgaccaccgtgcccaccacaagttttcagaaacacatgctgatcctcataattcccgacgtggctttttcttctctcacgtgggttggctgcttgtgcgcaaacacccagctgtcaaagagaaggggagtacgctagacttgtctgacctagaagctgagaaactggtgatgttccagaggaggtactacaaacctggcttgctgatgatgtgcttcatcctgcccacgcttgtgccctggtatttctggggtgaaacttttcaaaacagtgtgttcgttgccactttcttgcgatatgctgtggtgcttaatgccacctggctggtgaacagtgctgcccacctcttcggatatcgtccttatgacaagaacattagcccccgggagaatatcctggtttcacttggagctgtgggtgagggcttccacaactaccaccactcctttccctatgactactctgccagtgagtaccgctggcacatcaacttcaccacattcttcattgattgcatggccgccctcggtctggcctatgaccggaagaaagtctccaaggccgccatcttggccaggattaaaagaaccggagatggaaactacaagagtggctgagtttggggtccctcaggttcctttttcaaaaaccagccaggcagaggttttaatgtctgtttattaactactgaataatgctaccaggatgctaaagatgatgatgttaacccattccagtacagtattcttttaaaattcaaaagtattgaaagccaacaactctgcctttatgatgctaagctgatattatttcttctcttatcctctctctcttctaggcccattgtcctccttttcactttattgctatcgccctcctttcccttattgcctcccaggcaagcagctggtcagtctttgctcagtgtccagcttccaaagcctagacaacctttctgtagcctaaaacgaatggtctttgctccagataactctctttccttgagctgttgtgagctttgaagtaggtggcttgagctagagataaaacagaatcttctgggtagtcccctgttgattatcttcagcccaggcttttgctagatggaatggaaaagcaacttcatttgacacaaagcttctaaagcaggtaaattgtcgggggagagagttagcatgtatgaatgtaaggatgagggaagcgaagcaagaggaacctctcgccatgatcagacatacagctgcctacctaatgaggacttcaagccccaccacatagcatgcttcctttctctcctggctcggggtaaaaagtggctgcggtgtttggcaatgctaattcaatgccgcaacatatagttgaggccgaggataaagaaaagacattttaagtttgtagtaaaagtggtctctgctggggaagggttttcttttctttttttctttaataacaaggagatttcttagttcatatatcaagaagtcttgaagttgggtgtttccagaattggtaaaaacagcagctcatagaattttgagtattccatgagctgctcattacagttctttcctctttctgctctgccatcttcaggatattggttcttcccctcatagtaataagatggctgtggcatttccaaacatccaaaaaaagggaaggatttaaggaggtgaagtcgggtcaaaaataaaatatatatacatatatacattgcttagaacgttaaactattagagtatttcccttccaaagagggatgtttggaaaaaactctgaaggagaggaggaattagttgggatgccaatttcctctccactgctggacatgagatggagaggctgagggacaggatctataggcagcttctaagagcgaacttcacataggaagggatctgagaacacgttgccaggggcttgagaaggttactgagtgagttattgggagtcttaataaaataaactagatattaggtccattcattaattagttccagtttctccttgaaatgagtaaaaactagaaggcttctctccacagtgttgtgccccttcactcatttttttttgaggagaagggggtctctgttaacatctagcctaaagtatacaactgcctggggggcagggttaggaatctcttcactaccctgattcttgattcctggctctaccctgtctgtcccttttctttgaccagatctttctcttccctgaacgttttcttctttccctggacaggcagcctcctttgtgtgtattcagaggcagtgatgacttgctgtccaggcagctccctcctgcacacagaatgctcagggtcactgaaccactgcttctcttttgaaagtagagctagctgccactttcacgtggcctccgcagtgtctccacctacacccctgtgctcccctgccacactgatggctcaagacaaggctggcaaaccctcccagaaacatctctggcccagaaagcctctctctccctccctctctcatgaggcacagccaagccaagcgctcatgttgagccagtgggccagccacagagcaaaagagggtttattttcagtcccctctctctgggtcagaaccagagggcatgctgaatgccccctgcttacttggtgagggtgccccgcctgagtcagtgctctcagctggcagtgcaatgcttgtagaagtaggaggaaacagttctcactgggaagaagcaagggcaagaacccaagtgcctcacctcgaaaggaggccctgttccctggagtcagggtgaactgcaaagctttggctgagacctgggatttgagataccacaaaccctgctgaacacagtgtctgttcagcaaactaaccagcattccctacagcctagggcagacaatagtatagaagtctggaaaaaaacaaaaacagaatttgagaaccttggaccactcctgtccctgtagctcagtcatcaaagcagaagtctggctttgctctattaagattggaaatgtacactaccaaacactcagtccactgttgagccccagtgctggaagggaggaaggcctttcttctgtgttaattgcgtagaggctacaggggttagcctggactaaaggcatccttgtcttttgagctattcacctcagtagaaaaggatctaagggaagatcactgtagtttagttctgttgacctgtgcacctaccccttggaaatgtctgctggtatttctaattccacaggtcatcagatgcctgcttgataatatataaacaataaaaacaactttcacttcttcctattgtaatcgtgtgccatggatctgatctgtaccatgaccctacataaggctggatggcacctcaggctgagggccccaatgtatgtgtggctgtgggtgtgggtgggagtgtgtctgctgagtaaggaacacgattttcaagattctaaagctcaattcaagtgacacattaatgataaactcagatctgatcaagagtccggatttctaacagtccttgctttggggggtgtgctgacaacttagctcaggtgccttacatcttttctaatcacagtgttgcatatgagcctgccctcactccctctgcagaatccctttgcacctgagaccctactgaagtggctggtagaaaaaggggcctgagtggaggattatcagtatcacgatttgcaggattcccttctgggcttcattctggaaacttttgttagggctgcttttcttaagtgcccacatttgatggagggtggaaataatttgaatgtatttgatttataagttttttttttttttggggttaaaagatggttgtagcatttaaaatggaaaattttctcctgggttggctagtatctggggtgtattctctgtaagtgtagctcaaataggtcatcatgaaaggttaaaaaagcgaggtggccatgttatgcctggtggttaaggccagggcctctccaaccactgtgccactgacttgctgtgtgaccctgggcaagtcacttaactataaggtgcctcagttttccttctgttaaaatggggataataatactgacctacctcaaagggcagttttgaggcatgactaatgctttttagaaagcattttggggatccttcagcacaggaattctcaagacctgagtattttttataataggaatgtccaccatgaacttgatacgtccgtgtgtcccagatgctgtcattagtctatatggttctccaagaaactgaatgaatccattggagaagcggtggataactagccagacaaaatttgagaatacataaacaacgcattgccacggaaacatacagaggatgccttttctgtgattgggtgggattttttccctttttatgtgggatatagtagttacttgtgacaagaataattttggaataatttctattaatatcaactctgaagctaattgtactaatctgagattgtgtttgttcataataaaagtgaagtgaatctga

SEQ ID NO: 298221 - DNA, 1496 bp, Homo sapiens
  misc_feature (1347)..(1347): n is a, c, g, or t
  misc_feature (1363)..(1363): n is a, c, g, or t
  misc_feature (1409)..(1409): n is a, c, g, or t
  misc_feature (1427)..(1427): n is a, c, g, or t
  misc_feature (1494)..(1494): n is a, c, g, or t
agggaggcggggcttcccgcgtcccccaagctccagatcctggggtggctgccacgtctccctgccacgcgcctggggggacggaagacgggacggagatgttagtggtgggcgccccccgagggttcaccactgtttcctgagaaacttccccagtgcccacccacccgttctccgtgtgcccgagggccggtcctgggctaggctccgcgccccagccccaaaccgggtccccagccccttccagagagaaagctcccgacgcgggatgccgggcagaggcccagcggcgggtggaagagaagctgagaaggagaaacagaggggagggggagcgaggagctggcggcagagggaacagcagattgcgccgagccaatggcaacggcaggacgaggtggcaccaaattcccttcggccaatgacgagccggagtttacagaagcctcattagcatttccccagaggcaggggcaggggcagaggccgggtggtgtggtgtcggtgtcggcagcatccccggcgccctgctgcggtcgccgcgagcctcggcctctgtctcctccccctcccgcccttacctccacgcgggaccgcccgcgccagtcaactcctcgcactttgcccctgcttggcagcggataaaagggggctgaggaaataccggacacggtcacccgttgccagctctagcctttaaattcccggctcggggacctccacgcaccgcggctagcgccgacaaccagctagcgtgcaaggcgccgcggctcagcgcgtaccggcgggcttcgaaaccgcagtcctccggcgaccccgaactccgctccggagcctcagccccctggaaagtgatcccggcatccgagagccaagatgccggcccacttgctgcaggacgatatctctagctcctataccaccaccaccaccattacagcgcctccctccagggtcctgcagaatggaggagataagttggagacgatgcccctctacttggaagacgacattcgccctgatataaaagatgatatatatgaccccacctacaaggataaggaaggcccaagccccaaggttgaatatgtctggagaaacatcatccttatgtctctgctacacttgggagccctgtatgggatcactttgattcctacctgcaagttctacacctggctttggggggtattctactattttgtcagtgccctgggcataacagcaggagctcatcgtctgtggagccaccgctcttacaaaggcttggcccccttacgggctctttttcttgaatcatttgcccaaaccaccaaaatggggcatttccccaaaaaaatggaattngttcttaattgaaaanttgggggcttccggttggaacccaacccggttggcccccaccccancaaaagtttttttcccanaaaaaaaccacccattggcttggaatttcccttccatttaaattttccccccgaaaccgtttgggcntt

SEQ ID NO: 298222 - DNA, 4819 bp, Homo sapiens
ggcacgagggagagtctgtttttcttcctaaaatttggactcttgtctgcacaaacactgggcataacagcaggagcgctggaacattctgcctcttgagtgaaggggccttctttctagcctctatggcactgaggggtgcgccggctggtggaggagtagtccgatggagccctgcgttccccggggacacagggccaagctttgaggtggaaagtttctggttctgaaacctcggctgcccctacggctctttctgatcattgccaacacaatggcattccagaatgatgtctatgaatgggctcgtgaccaccgtgcccaccacaagttttcagaaacacatgctgatcctcataattcccgacgtggctttttcttctctcacgtgggttggctgcttgtgcgcaaacacccagctgtcaaagagaaggggagtacgctagacttgtctgacctagaagctgagaaactggtgatgttccagaggaggtactacaaacctggcttgctgatgatgtgcttcatcctgcccacgcttgtgccctggtatttctggggtgaaacttttcaaaacagtgtgttcgttgccactttcttgcgatatgctgtggtgcttaatgccacctggctggtgaacagtgctgcccacctcttcggatatcgtccttatgacaagaacattagcccccgggagaatatcctggtttcacttggagctgtgggtgagggcttccacaactaccaccactcctttccctatgactactctgccagtgagtaccgctggcacatcaacttcaccacattcttcattgattgcatggccgccctcggtctggcctatgaccggaagaaagtctccaaggccgccatcttggccaggattaaaagaaccggagatggaaactacaagagtggctgagtttggggtccctcaggttcctttttcaaaaaccagccaggcagaggttttaatgtctgtttattaactactgaataatgctaccaggatgctaaagatgatgatgttaacccattccagtacagtattcttttaaaattcaaaagtattgaaagccaacaactctgcctttatgatgctaagctgatattatttcttctcttatcctctctctcttctaggcccattgtcctccttttcactttattgctatcgccctcctttcccttattgcctcccaggcaagcagctggtcagtctttgctcagtgtccagcttccaaagcctagacaacctttctgtagcctaaaacgaatggtctttgctccagataactctctttccttgagctgttgtgagctttgaagtaggtggcttgagctagagataaaacagaatcttctgggtagtcccctgttgattatcttcagcccaggcttttgctagatggaatggaaaagcaacttcatttgacacaaagcttctaaagcaggtaaattgtcgggggagagagttagcatgtatgaatgtaaggatgagggaagcgaagcaagaggaacctctcgccatgatcagacatacagctgcctacctaatgaggacttcaagccccaccacatagcatgcttcctttctctcctggctcggggtaaaaagtggctgcggtgtttggcaatgctaattcaatgccgcaacatatagttgaggccgaggataaagaaaagacattttaagtttgtagtaaaagtggtctctgctggggaagggttttcttttctttttttctttaataacaaggagatttcttagttcatatatcaagaagtcttgaagttgggtgtttccagaattggtaaaaacagcagctcatagaattttgagtattccatgagctgctcattacagttctttcctctttctgctctgccatcttcaggatattggttcttcccctcatagtaataagatggctgtggcatttccaaacatccaaaaaaagggaaggatttaaggaggtgaagtcgggtcaaaaataaaatatatatacatatatacattgcttagaacgttaaactattagagtatttcccttccaaagagggatgtttggaaaaaactctgaaggagaggaggaattagttgggatgccaatttcctctccactgctggacatgagatggagaggctgagggacaggatctataggcagcttctaagagcgaacttcacataggaagggatctgagaacacgttgccaggggcttgagaaggttactgagtgagttattgggagtcttaataaaataaactagatattaggtccattcattaattagttccagtttctccttgaaatgagtaaaaactagaaggcttctctccacagtgttgtgccccttcactcatttttttttgaggagaagggggtctctgttaacatctagcctaaagtatacaactgcctggggggcagggttaggaatctcttcactaccctgattcttgattcctggctctaccctgtctgtcccttttctttgaccagatctttctcttccctgaacgttttcttctttccctggacaggcagcctcctttgtgtgtattcagaggcagtgatgacttgctgtccaggcagctccctcctgcacacagaatgctcagggtcactgaaccactgcttctcttttgaaagtagagctagctgccactttcacgtggcctccgcagtgtctccacctacacccctgtgctcccctgccacactgatggctcaagacaaggctggcaaaccctcccagaaacatctctggcccagaaagcctctctctccctccctctctcatgaggcacagccaagccaagcgctcatgttgagccagtgggccagccacagagcaaaagagggtttattttcagtcccctctctctgggtcagaaccagagggcatgctgaatgccccctgcttacttggtgagggtgccccgcctgagtcagtgctctcagctggcagtgcaatgcttgtagaagtaggaggaaacagttctcactgggaagaagcaagggcaagaacccaagtgcctcacctcgaaaggaggccctgttccctggagtcagggtgaactgcaaagctttggctgagacctgggatttgagataccacaaaccctgctgaacacagtgtctgttcagcaaactaaccagcattccctacagcctagggcagacaatagtatagaagtctggaaaaaaacaaaaacagaatttgagaaccttggaccactcctgtccctgtagctcagtcatcaaagcagaagtctggctttgctctattaagattggaaatgtacactaccaaacactcagtccactgttgagccccagtgctggaagggaggaaggcctttcttctgtgttaattgcgtagaggctacaggggttagcctggactaaaggcatccttgtcttttgagctattcacctcagtagaaaaggatctaagggaagatcactgtagtttagttctgttgacctgtgcacctaccccttggaaatgtctgctggtatttctaattccacaggtcatcagatgcctgcttgataatatataaacaataaaaacaactttcacttcttcctattgtaatcgtgtgccatggatctgatctgtaccatgaccctacataaggctggatggcacctcaggctgagggccccaatgtatgtgtggctgtgggtgtgggtgggagtgtgtctgctgagtaaggaacacgattttcaagattctaaagctcaattcaagtgacacattaatgataaactcagatctgatcaagagtccggatttctaacagtccttgctttggggggtgtgctgacaacttagctcaggtgccttacatcttttctaatcacagtgttgcatatgagcctgccctcactccctctgcagaatccctttgcacctgagaccctactgaagtggctggtagaaaaaggggcctgagtggaggattatcagtatcacgatttgcaggattcccttctgggcttcattctggaaacttttgttagggctgcttttcttaagtgcccacatttgatggagggtggaaataatttgaatgtatttgatttataagttttttttttttttggggttaaaagatggttgtagcatttaaaatggaaaattttctcctgggttggctagtatctggggtgtattctctgtaagtgtagctcaaataggtcatcatgaaaggttaaaaaagcgaggtggccatgttatgcctggtggttaaggccagggcctctccaaccactgtgccactgacttgctgtgtgaccctgggcaagtcacttaactataaggtgcctcagttttccttctgttaaaatggggataataatactgacctacctcaaagggcagttttgaggcatgactaatgctttttagaaagcattttggggatccttcagcacaggaattctcaagacctgagtattttttataataggaatgtccaccatgaacttgatacgtccgtgtgtcccagatgctgtcattagtctatatggttctccaagaaactgaatgaatccattggagaagcggtggataactagccagacaaaatttgagaatacataaacaacgcattgccacggaaacatacagaggatgccttttctgtgattgggtgggattttttccctttttatgtgggatatagtagttacttgtgacaagaataattttggaataatttctattaatatcaactctgaagctaattgtactaatctgagattgtgtttgttcataataaaagtgaagtgaatctga

SEQ ID NO: 298223 - DNA, 4746 bp, Homo sapiens
gtcctgggactttaagttgcttttttctacttaagcttcagtggcaagttgggagaagaagggaggcaactccatgactcctttggagcccagattcctgggtattttgtgaggttgggctgagcgccttgggctcttgatacctgtccattgggattctcctaatagggtgtctatcctcaagccttacattcctcttctctctctccccagaatgatgtctatgaatgggctcgtgaccaccgtgcccaccacaagttttcagaaacacatgctgatcctcataattcccgacgtggctttttcttctctcacgtgggttggctgcttgtgcgcaaacacccagctgtcaaagagaaggggagtacgctagacttgtctgacctagaagctgagaaactggtgatgttccagaggaggtactacaaacctggcttgctgatgatgtgcttcatcctgcccacgcttgtgccctggtatttctggggtgaaacttttcaaaacagtgtgttcgttgccactttcttgcgatatgctgtggtgcttaatgccacctggctggtgaacagtgctgcccacctcttcggatatcgtccttatgacaagaacattagcccccgggagaatatcctggtttcacttggagctgtgggtgagggcttccacaactaccaccactcctttccctatgactactctgccagtgagtaccgctggcacatcaacttcaccacattcttcattgattgcatggccgccctcggtctggcctatgaccggaagaaagtctccaaggccgccatcttggccaggattaaaagaaccggagatggaaactacaagagtggctgagtttggggtccctcaggttcctttttcaaaaaccagccaggcagaggttttaatgtctgtttattaactactgaataatgctaccaggatgctaaagatgatgatgttaacccattccagtacagtattcttttaaaattcaaaagtattgaaagccaacaactctgcctttatgatgctaagctgatattatttcttctcttatcctctctctcttctaggcccattgtcctccttttcactttattgctatcgccctcctttcccttattgcctcccaggcaagcagctggtcagtctttgctcagtgtccagcttccaaagcctagacaacctttctgtagcctaaaacgaatggtctttgctccagataactctctttccttgagctgttgtgagctttgaagtaggtggcttgagctagagataaaacagaatcttctgggtagtcccctgttgattatcttcagcccaggcttttgctagatggaatggaaaagcaacttcatttgacacaaagcttctaaagcaggtaaattgtcgggggagagagttagcatgtatgaatgtaaggatgagggaagcgaagcaagaggaacctctcgccatgatcagacatacagctgcctacctaatgaggacttcaagccccaccacatagcatgcttcctttctctcctggctcggggtaaaaagtggctgcggtgtttggcaatgctaattcaatgccgcaacatatagttgaggccgaggataaagaaaagacattttaagtttgtagtaaaagtggtctctgctggggaagggttttcttttctttttttctttaataacaaggagatttcttagttcatatatcaagaagtcttgaagttgggtgtttccagaattggtaaaaacagcagctcatagaattttgagtattccatgagctgctcattacagttctttcctctttctgctctgccatcttcaggatattggttcttcccctcatagtaataagatggctgtggcatttccaaacatccaaaaaaagggaaggatttaaggaggtgaagtcgggtcaaaaataaaatatatatacatatatacattgcttagaacgttaaactattagagtatttcccttccaaagagggatgtttggaaaaaactctgaaggagaggaggaattagttgggatgccaatttcctctccactgctggacatgagatggagaggctgagggacaggatctataggcagcttctaagagcgaacttcacataggaagggatctgagaacacgttgccaggggcttgagaaggttactgagtgagttattgggagtcttaataaaataaactagatattaggtccattcattaattagttccagtttctccttgaaatgagtaaaaactagaaggcttctctccacagtgttgtgccccttcactcatttttttttgaggagaagggggtctctgttaacatctagcctaaagtatacaactgcctggggggcagggttaggaatctcttcactaccctgattcttgattcctggctctaccctgtctgtcccttttctttgaccagatctttctcttccctgaacgttttcttctttccctggacaggcagcctcctttgtgtgtattcagaggcagtgatgacttgctgtccaggcagctccctcctgcacacagaatgctcagggtcactgaaccactgcttctcttttgaaagtagagctagctgccactttcacgtggcctccgcagtgtctccacctacacccctgtgctcccctgccacactgatggctcaagacaaggctggcaaaccctcccagaaacatctctggcccagaaagcctctctctccctccctctctcatgaggcacagccaagccaagcgctcatgttgagccagtgggccagccacagagcaaaagagggtttattttcagtcccctctctctgggtcagaaccagagggcatgctgaatgccccctgcttacttggtgagggtgccccgcctgagtcagtgctctcagctggcagtgcaatgcttgtagaagtaggaggaaacagttctcactgggaagaagcaagggcaagaacccaagtgcctcacctcgaaaggaggccctgttccctggagtcagggtgaactgcaaagctttggctgagacctgggatttgagataccacaaaccctgctgaacacagtgtctgttcagcaaactaaccagcattccctacagcctagggcagacaatagtatagaagtctggaaaaaaacaaaaacagaatttgagaaccttggaccactcctgtccctgtagctcagtcatcaaagcagaagtctggctttgctctattaagattggaaatgtacactaccaaacactcagtccactgttgagccccagtgctggaagggaggaaggcctttcttctgtgttaattgcgtagaggctacaggggttagcctggactaaaggcatccttgtcttttgagctattcacctcagtagaaaaggatctaagggaagatcactgtagtttagttctgttgacctgtgcacctaccccttggaaatgtctgctggtatttctaattccacaggtcatcagatgcctgcttgataatatataaacaataaaaacaactttcacttcttcctattgtaatcgtgtgccatggatctgatctgtaccatgaccctacataaggctggatggcacctcaggctgagggccccaatgtatgtgtggctgtgggtgtgggtgggagtgtgtctgctgagtaaggaacacgattttcaagattctaaagctcaattcaagtgacacattaatgataaactcagatctgatcaagagtccggatttctaacagtccttgctttggggggtgtgctgacaacttagctcaggtgccttacatcttttctaatcacagtgttgcatatgagcctgccctcactccctctgcagaatccctttgcacctgagaccctactgaagtggctggtagaaaaaggggcctgagtggaggattatcagtatcacgatttgcaggattcccttctgggcttcattctggaaacttttgttagggctgcttttcttaagtgcccacatttgatggagggtggaaataatttgaatgtatttgatttataagttttttttttttttggggttaaaagatggttgtagcatttaaaatggaaaattttctcctgggttggctagtatctggggtgtattctctgtaagtgtagctcaaataggtcatcatgaaaggttaaaaaagcgaggtggccatgttatgcctggtggttaaggccagggcctctccaaccactgtgccactgacttgctgtgtgaccctgggcaagtcacttaactataaggtgcctcagttttccttctgttaaaatggggataataatactgacctacctcaaagggcagttttgaggcatgactaatgctttttagaaagcattttggggatccttcagcacaggaattctcaagacctgagtattttttataataggaatgtccaccatgaacttgatacgtccgtgtgtcccagatgctgtcattagtctatatggttctccaagaaactgaatgaatccattggagaagcggtggataactagccagacaaaatttgagaatacataaacaacgcattgccacggaaacatacagaggatgccttttctgtgattgggtgggattttttccctttttatgtgggatatagtagttacttgtgacaagaataattttggaataatttctattaatatcaactctgaagctaattgtactaatctgagattgtgtttgttcataataaaagtgaagtgaatctga

SEQ ID NO: 298224 - DNA, 4163 bp, Homo sapiens
taactggtgtgcacaaatcaagaaaacctcaatgcaccgtcactccataacttctcgcttttgtttcaggtgagggcttccacaactaccaccactcctttccctatgactactctgccagtgagtaccgctggcacatcaacttcaccacattcttcattgattgcatggccgccctcggtctggcctatgaccggaagaaagtctccaaggccgccatcttggccaggattaaaagaaccggagatggaaactacaagagtggctgagtttggggtccctcaggttcctttttcaaaaaccagccaggcagaggttttaatgtctgtttattaactactgaataatgctaccaggatgctaaagatgatgatgttaacccattccagtacagtattcttttaaaattcaaaagtattgaaagccaacaactctgcctttatgatgctaagctgatattatttcttctcttatcctctctctcttctaggcccattgtcctccttttcactttattgctatcgccctcctttcccttattgcctcccaggcaagcagctggtcagtctttgctcagtgtccagcttccaaagcctagacaacctttctgtagcctaaaacgaatggtctttgctccagataactctctttccttgagctgttgtgagctttgaagtaggtggcttgagctagagataaaacagaatcttctgggtagtcccctgttgattatcttcagcccaggcttttgctagatggaatggaaaagcaacttcatttgacacaaagcttctaaagcaggtaaattgtcgggggagagagttagcatgtatgaatgtaaggatgagggaagcgaagcaagaggaacctctcgccatgatcagacatacagctgcctacctaatgaggacttcaagccccaccacatagcatgcttcctttctctcctggctcggggtaaaaagtggctgcggtgtttggcaatgctaattcaatgccgcaacatatagttgaggccgaggataaagaaaagacattttaagtttgtagtaaaagtggtctctgctggggaagggttttcttttctttttttctttaataacaaggagatttcttagttcatatatcaagaagtcttgaagttgggtgtttccagaattggtaaaaacagcagctcatagaattttgagtattccatgagctgctcattacagttctttcctctttctgctctgccatcttcaggatattggttcttcccctcatagtaataagatggctgtggcatttccaaacatccaaaaaaagggaaggatttaaggaggtgaagtcgggtcaaaaataaaatatatatacatatatacattgcttagaacgttaaactattagagtatttcccttccaaagagggatgtttggaaaaaactctgaaggagaggaggaattagttgggatgccaatttcctctccactgctggacatgagatggagaggctgagggacaggatctataggcagcttctaagagcgaacttcacataggaagggatctgagaacacgttgccaggggcttgagaaggttactgagtgagttattgggagtcttaataaaataaactagatattaggtccattcattaattagttccagtttctccttgaaatgagtaaaaactagaaggcttctctccacagtgttgtgccccttcactcatttttttttgaggagaagggggtctctgttaacatctagcctaaagtatacaactgcctggggggcagggttaggaatctcttcactaccctgattcttgattcctggctctaccctgtctgtcccttttctttgaccagatctttctcttccctgaacgttttcttctttccctggacaggcagcctcctttgtgtgtattcagaggcagtgatgacttgctgtccaggcagctccctcctgcacacagaatgctcagggtcactgaaccactgcttctcttttgaaagtagagctagctgccactttcacgtggcctccgcagtgtctccacctacacccctgtgctcccctgccacactgatggctcaagacaaggctggcaaaccctcccagaaacatctctggcccagaaagcctctctctccctccctctctcatgaggcacagccaagccaagcgctcatgttgagccagtgggccagccacagagcaaaagagggtttattttcagtcccctctctctgggtcagaaccagagggcatgctgaatgccccctgcttacttggtgagggtgccccgcctgagtcagtgctctcagctggcagtgcaatgcttgtagaagtaggaggaaacagttctcactgggaagaagcaagggcaagaacccaagtgcctcacctcgaaaggaggccctgttccctggagtcagggtgaactgcaaagctttggctgagacctgggatttgagataccacaaaccctgctgaacacagtgtctgttcagcaaactaaccagcattccctacagcctagggcagacaatagtatagaagtctggaaaaaaacaaaaacagaatttgagaaccttggaccactcctgtccctgtagctcagtcatcaaagcagaagtctggctttgctctattaagattggaaatgtacactaccaaacactcagtccactgttgagccccagtgctggaagggaggaaggcctttcttctgtgttaattgcgtagaggctacaggggttagcctggactaaaggcatccttgtcttttgagctattcacctcagtagaaaaggatctaagggaagatcactgtagtttagttctgttgacctgtgcacctaccccttggaaatgtctgctggtatttctaattccacaggtcatcagatgcctgcttgataatatataaacaataaaaacaactttcacttcttcctattgtaatcgtgtgccatggatctgatctgtaccatgaccctacataaggctggatggcacctcaggctgagggccccaatgtatgtgtggctgtgggtgtgggtgggagtgtgtctgctgagtaaggaacacgattttcaagattctaaagctcaattcaagtgacacattaatgataaactcagatctgatcaagagtccggatttctaacagtccttgctttggggggtgtgctgacaacttagctcaggtgccttacatcttttctaatcacagtgttgcatatgagcctgccctcactccctctgcagaatccctttgcacctgagaccctactgaagtggctggtagaaaaaggggcctgagtggaggattatcagtatcacgatttgcaggattcccttctgggcttcattctggaaacttttgttagggctgcttttcttaagtgcccacatttgatggagggtggaaataatttgaatgtatttgatttataagttttttttttttttggggttaaaagatggttgtagcatttaaaatggaaaattttctcctgggttggctagtatctggggtgtattctctgtaagtgtagctcaaataggtcatcatgaaaggttaaaaaagcgaggtggccatgttatgcctggtggttaaggccagggcctctccaaccactgtgccactgacttgctgtgtgaccctgggcaagtcacttaactataaggtgcctcagttttccttctgttaaaatggggataataatactgacctacctcaaagggcagttttgaggcatgactaatgctttttagaaagcattttggggatccttcagcacaggaattctcaagacctgagtattttttataataggaatgtccaccatgaacttgatacgtccgtgtgtcccagatgctgtcattagtctatatggttctccaagaaactgaatgaatccattggagaagcggtggataactagccagacaaaatttgagaatacataaacaacgcattgccacggaaacatacagaggatgccttttctgtgattgggtgggattttttccctttttatgtgggatatagtagttacttgtgacaagaataattttggaataatttctattaatatcaactctgaagctaattgtactaatctgagattgtgtttgttcataataaaagtgaagtgaatctga

SEQ ID NO: 298225 - DNA, 5864 bp, Homo sapiens
agggaggcggggcttcccgcgtcccccaagctccagatcctggggtggctgccacgtctccctgccacgcgcctggggggacggaagacgggacggagatgttagtggtgggcgccccccgagggttcaccactgtttcctgagaaacttccccagtgcccacccacccgttctccgtgtgcccgagggccggtcctgggctaggctccgcgccccagccccaaaccgggtccccagccccttccagagagaaagctcccgacgcgggatgccgggcagaggcccagcggcgggtggaagagaagctgagaaggagaaacagaggggagggggagcgaggagctggcggcagagggaacagcagattgcgccgagccaatggcaacggcaggacgaggtggcaccaaattcccttcggccaatgacgagccggagtttacagaagcctcattagcatttccccagaggcaggggcaggggcagaggccgggtggtgtggtgtcggtgtcggcagcatccccggcgccctgctgcggtcgccgcgagcctcggcctctgtctcctccccctcccgcccttacctccacgcgggaccgcccgcgccagtcaactcctcgcactttgcccctgcttggcagcggataaaagggggctgaggaaataccggacacggtcacccgttgccagctctagcctttaaattcccggctcggggacctccacgcaccgcggctagcgccgacaaccagctagcgtgcaaggcgccgcggctcagcgcgtaccggcgggcttcgaaaccgcagtcctccggcgaccccgaactccgctccggagcctcagccccctggaaagtgatcccggcatccgagagccaagatgccggcccacttgctgcaggacgatatctctagctcctataccaccaccaccaccattacagcgcctccctccagggtcctgcagaatggaggagataagttggagacgatgcccctctacttggaagacgacattcgccctgatataaaagatgatatatatgaccccacctacaaggataaggaaggcccaagccccaaggttgaatatgtctggagaaacatcatccttatgtctctgctacacttgggagccctgtatgggatcactttgattcctacctgcaagttctacacctggctttggggggtattctactattttgtcagtgccctgggcataacagcaggagctcatcgtctgtggagccaccgctcttacaaagctcggctgcccctacggctctttctgatcattgccaacacaatggcattccagaatgatgtctatgaatgggctcgtgaccaccgtgcccaccacaagttttcagaaacacatgctgatcctcataattcccgacgtggctttttcttctctcacgtgggttggctgcttgtgcgcaaacacccagctgtcaaagagaaggggagtacgctagacttgtctgacctagaagctgagaaactggtgatgttccagaggaggtactacaaacctggcttgctgatgatgtgcttcatcctgcccacgcttgtgccctggtatttctggggtgaaacttttcaaaacagtgtgttcgttgccactttcttgcgatatgctgtggtgcttaatgccacctggctggtgaacagtgctgcccacctcttcggatatcgtccttatgacaagaacattagcccccgggagaatatcctggtttcacttggagctgtgggtgagggcttccacaactaccaccactcctttccctatgactactctgccagtgagtaccgctggcacatcaacttcaccacattcttcattgattgcatggccgccctcggtctggcctatgaccggaagaaagtctccaaggccgccatcttggccaggattaaaagaaccggagatggaaactacaagagtggctgagtttggggtccctcaggttcctttttcaaaaaccagccaggcagaggttttaatgtctgtttattaactactgaataatgctaccaggatgctaaagatgatgatgttaacccattccagtacagtattcttttaaaattcaaaagtattgaaagccaacaactctgcctttatgatgctaagctgatattatttcttctcttatcctctctctcttctaggcccattgtcctccttttcactttattgctatcgccctcctttcccttattgcctcccaggcaagcagctggtcagtctttgctcagtgtccagcttccaaagcctagacaacctttctgtagcctaaaacgaatggtctttgctccagataactctctttccttgagctgttgtgagctttgaagtaggtggcttgagctagagataaaacagaatcttctgggtagtcccctgttgattatcttcagcccaggcttttgctagatggaatggaaaagcaacttcatttgacacaaagcttctaaagcaggtaaattgtcgggggagagagttagcatgtatgaatgtaaggatgagggaagcgaagcaagaggaacctctcgccatgatcagacatacagctgcctacctaatgaggacttcaagccccaccacatagcatgcttcctttctctcctggctcggggtaaaaagtggctgcggtgtttggcaatgctaattcaatgccgcaacatatagttgaggccgaggataaagaaaagacattttaagtttgtagtaaaagtggtctctgctggggaagggttttcttttctttttttctttaataacaaggagatttcttagttcatatatcaagaagtcttgaagttgggtgtttccagaattggtaaaaacagcagctcatagaattttgagtattccatgagctgctcattacagttctttcctctttctgctctgccatcttcaggatattggttcttcccctcatagtaataagatggctgtggcatttccaaacatccaaaaaaagggaaggatttaaggaggtgaagtcgggtcaaaaataaaatatatatacatatatacattgcttagaacgttaaactattagagtatttcccttccaaagagggatgtttggaaaaaactctgaaggagaggaggaattagttgggatgccaatttcctctccactgctggacatgagatggagaggctgagggacaggatctataggcagcttctaagagcgaacttcacataggaagggatctgagaacacgttgccaggggcttgagaaggttactgagtgagttattgggagtcttaataaaataaactagatattaggtccattcattaattagttccagtttctccttgaaatgagtaaaaactagaaggcttctctccacagtgttgtgccccttcactcatttttttttgaggagaagggggtctctgttaacatctagcctaaagtatacaactgcctggggggcagggttaggaatctcttcactaccctgattcttgattcctggctctaccctgtctgtcccttttctttgaccagatctttctcttccctgaacgttttcttctttccctggacaggcagcctcctttgtgtgtattcagaggcagtgatgacttgctgtccaggcagctccctcctgcacacagaatgctcagggtcactgaaccactgcttctcttttgaaagtagagctagctgccactttcacgtggcctccgcagtgtctccacctacacccctgtgctcccctgccacactgatggctcaagacaaggctggcaaaccctcccagaaacatctctggcccagaaagcctctctctccctccctctctcatgaggcacagccaagccaagcgctcatgttgagccagtgggccagccacagagcaaaagagggtttattttcagtcccctctctctgggtcagaaccagagggcatgctgaatgccccctgcttacttggtgagggtgccccgcctgagtcagtgctctcagctggcagtgcaatgcttgtagaagtaggaggaaacagttctcactgggaagaagcaagggcaagaacccaagtgcctcacctcgaaaggaggccctgttccctggagtcagggtgaactgcaaagctttggctgagacctgggatttgagataccacaaaccctgctgaacacagtgtctgttcagcaaactaaccagcattccctacagcctagggcagacaatagtatagaagtctggaaaaaaacaaaaacagaatttgagaaccttggaccactcctgtccctgtagctcagtcatcaaagcagaagtctggctttgctctattaagattggaaatgtacactaccaaacactcagtccactgttgagccccagtgctggaagggaggaaggcctttcttctgtgttaattgcgtagaggctacaggggttagcctggactaaaggcatccttgtcttttgagctattcacctcagtagaaaaggatctaagggaagatcactgtagtttagttctgttgacctgtgcacctaccccttggaaatgtctgctggtatttctaattccacaggtcatcagatgcctgcttgataatatataaacaataaaaacaactttcacttcttcctattgtaatcgtgtgccatggatctgatctgtaccatgaccctacataaggctggatggcacctcaggctgagggccccaatgtatgtgtggctgtgggtgtgggtgggagtgtgtctgctgagtaaggaacacgattttcaagattctaaagctcaattcaagtgacacattaatgataaactcagatctgatcaagagtccggatttctaacagtccttgctttggggggtgtgctgacaacttagctcaggtgccttacatcttttctaatcacagtgttgcatatgagcctgccctcactccctctgcagaatccctttgcacctgagaccctactgaagtggctggtagaaaaaggggcctgagtggaggattatcagtatcacgatttgcaggattcccttctgggcttcattctggaaacttttgttagggctgcttttcttaagtgcccacatttgatggagggtggaaataatttgaatgtatttgatttataagttttttttttttttggggttaaaagatggttgtagcatttaaaatggaaaattttctcctgggttggctagtatctggggtgtattctctgtaagtgtagctcaaataggtcatcatgaaaggttaaaaaagcgaggtggccatgttatgcctggtggttaaggccagggcctctccaaccactgtgccactgacttgctgtgtgaccctgggcaagtcacttaactataaggtgcctcagttttccttctgttaaaatggggataataatactgacctacctcaaagggcagttttgaggcatgactaatgctttttagaaagcattttggggatccttcagcacaggaattctcaagacctgagtattttttataataggaatgtccaccatgaacttgatacgtccgtgtgtcccagatgctgtcattagtctatatggttctccaagaaactgaatgaatccattggagaagcggtggataactagccagacaaaatttgagaatacataaacaacgcattgccacggaaacatacagaggatgccttttctgtgattgggtgggattttttccctttttatgtgggatatagtagttacttgtgacaagaataattctctccacctctcctccttccattttcccccaatactgcagcacctccaggcctgtgtgctatgagagccaacctgtatgtcaataaacaacagctgaagcaa

SEQ ID NO: 298226 - DNA, 5791 bp, Homo sapiens
agggaggcggggcttcccgcgtcccccaagctccagatcctggggtggctgccacgtctccctgccacgcgcctggggggacggaagacgggacggagatgttagtggtgggcgccccccgagggttcaccactgtttcctgagaaacttccccagtgcccacccacccgttctccgtgtgcccgagggccggtcctgggctaggctccgcgccccagccccaaaccgggtccccagccccttccagagagaaagctcccgacgcgggatgccgggcagaggcccagcggcgggtggaagagaagctgagaaggagaaacagaggggagggggagcgaggagctggcggcagagggaacagcagattgcgccgagccaatggcaacggcaggacgaggtggcaccaaattcccttcggccaatgacgagccggagtttacagaagcctcattagcatttccccagaggcaggggcaggggcagaggccgggtggtgtggtgtcggtgtcggcagcatccccggcgccctgctgcggtcgccgcgagcctcggcctctgtctcctccccctcccgcccttacctccacgcgggaccgcccgcgccagtcaactcctcgcactttgcccctgcttggcagcggataaaagggggctgaggaaataccggacacggtcacccgttgccagctctagcctttaaattcccggctcggggacctccacgcaccgcggctagcgccgacaaccagctagcgtgcaaggcgccgcggctcagcgcgtaccggcgggcttcgaaaccgcagtcctccggcgaccccgaactccgctccggagcctcagccccctggaaagtgatcccggcatccgagagccaagatgccggcccacttgctgcaggacgatatctctagctcctataccaccaccaccaccattacagcgcctccctccagggtcctgcagaatggaggagataagttggagacgatgcccctctacttggaagacgacattcgccctgatataaaagatgatatatatgaccccacctacaaggataaggaaggcccaagccccaaggttgaatatgtctggagaaacatcatccttatgtctctgctacacttgggagccctgtatgggatcactttgattcctacctgcaagttctacacctggctttggggggtattctactattttgtcagtgccctgggcataacagcaggagctcatcgtctgtggagccaccgctcttacaaagctcggctgcccctacggctctttctgatcattgccaacacaatggcattccagaatgatgtctatgaatgggctcgtgaccaccgtgcccaccacaagttttcagaaacacatgctgatcctcataattcccgacgtggctttttcttctctcacgtgggttggctgcttgtgcgcaaacacccagctgtcaaagagaaggggagtacgctagacttgtctgacctagaagctgagaaactggtgatgttccagaggaggtactacaaacctggcttgctgatgatgtgcttcatcctgcccacgcttgtgccctggtatttctggggtgaaacttttcaaaacagtgtgttcgttgccactttcttgcgatatgctgtggtgcttaatgccacctggctggtgaacagtgctgcccacctcttcggatatcgtccttatgacaagaacattagcccccgggagaatatcctggtttcacttggagctgtgggtgagggcttccacaactaccaccactcctttccctatgactactctgccagtgagtaccgctggcacatcaacttcaccacattcttcattgattgcatggccgccctcggtctggcctatgaccggaagaaagtctccaaggccgccatcttggccaggattaaaagaaccggagatggaaactacaagagtggctgagtttggggtccctcaggttcctttttcaaaaaccagccaggcagaggttttaatgtctgtttattaactactgaataatgctaccaggatgctaaagatgatgatgttaacccattccagtacagtattcttttaaaattcaaaagtattgaaagccaacaactctgcctttatgatgctaagctgatattatttcttctcttatcctctctctcttctaggcccattgtcctccttttcactttattgctatcgccctcctttcccttattgcctcccaggcaagcagctggtcagtctttgctcagtgtccagcttccaaagcctagacaacctttctgtagcctaaaacgaatggtctttgctccagataactctctttccttgagctgttgtgagctttgaagtaggtggcttgagctagagataaaacagaatcttctgggtagtcccctgttgattatcttcagcccaggcttttgctagatggaatggaaaagcaacttcatttgacacaaagcttctaaagcaggtaaattgtcgggggagagagttagcatgtatgaatgtaaggatgagggaagcgaagcaagaggaacctctcgccatgatcagacatacagctgcctacctaatgaggacttcaagccccaccacatagcatgcttcctttctctcctggctcggggtaaaaagtggctgcggtgtttggcaatgctaattcaatgccgcaacatatagttgaggccgaggataaagaaaagacattttaagtttgtagtaaaagtggtctctgctggggaagggttttcttttctttttttctttaataacaaggagatttcttagttcatatatcaagaagtcttgaagttgggtgtttccagaattggtaaaaacagcagctcatagaattttgagtattccatgagctgctcattacagttctttcctctttctgctctgccatcttcaggatattggttcttcccctcatagtaataagatggctgtggcatttccaaacatccaaaaaaagggaaggatttaaggaggtgaagtcgggtcaaaaataaaatatatatacatatatacattgcttagaacgttaaactattagagtatttcccttccaaagagggatgtttggaaaaaactctgaaggagaggaggaattagttgggatgccaatttcctctccactgctggacatgagatggagaggctgagggacaggatctataggcagcttctaagagcgaacttcacataggaagggatctgagaacacgttgccaggggcttgagaaggttactgagtgagttattgggagtcttaataaaataaactagatattaggtccattcattaattagttccagtttctccttgaaatgagtaaaaactagaaggcttctctccacagtgttgtgccccttcactcatttttttttgaggagaagggggtctctgttaacatctagcctaaagtatacaactgcctggggggcagggttaggaatctcttcactaccctgattcttgattcctggctctaccctgtctgtcccttttctttgaccagatctttctcttccctgaacgttttcttctttccctggacaggcagcctcctttgtgtgtattcagaggcagtgatgacttgctgtccaggcagctccctcctgcacacagaatgctcagggtcactgaaccactgcttctcttttgaaagtagagctagctgccactttcacgtggcctccgcagtgtctccacctacacccctgtgctcccctgccacactgatggctcaagacaaggctggcaaaccctcccagaaacatctctggcccagaaagcctctctctccctccctctctcatgaggcacagccaagccaagcgctcatgttgagccagtgggccagccacagagcaaaagagggtttattttcagtcccctctctctgggtcagaaccagagggcatgctgaatgccccctgcttacttggtgagggtgccccgcctgagtcagtgctctcagctggcagtgcaatgcttgtagaagtaggaggaaacagttctcactgggaagaagcaagggcaagaacccaagtgcctcacctcgaaaggaggccctgttccctggagtcagggtgaactgcaaagctttggctgagacctgggatttgagataccacaaaccctgctgaacacagtgtctgttcagcaaactaaccagcattccctacagcctagggcagacaatagtatagaagtctggaaaaaaacaaaaacagaatttgagaaccttggaccactcctgtccctgtagctcagtcatcaaagcagaagtctggctttgctctattaagattggaaatgtacactaccaaacactcagtccactgttgagccccagtgctggaagggaggaaggcctttcttctgtgttaattgcgtagaggctacaggggttagcctggactaaaggcatccttgtcttttgagctattcacctcagtagaaaaggatctaagggaagatcactgtagtttagttctgttgacctgtgcacctaccccttggaaatgtctgctggtatttctaattccacaggtcatcagatgcctgcttgataatatataaacaataaaaacaactttcacttcttcctattgtaatcgtgtgccatggatctgatctgtaccatgaccctacataaggctggatggcacctcaggctgagggccccaatgtatgtgtggctgtgggtgtgggtgggagtgtgtctgctgagtaaggaacacgattttcaagattctaaagctcaattcaagtgacacattaatgataaactcagatctgatcaagagtccggatttctaacagtccttgctttggggggtgtgctgacaacttagctcaggtgccttacatcttttctaatcacagtgttgcatatgagcctgccctcactccctctgcagaatccctttgcacctgagaccctactgaagtggctggtagaaaaaggggcctgagtggaggattatcagtatcacgatttgcaggattcccttctgggcttcattctggaaacttttgttagggctgcttttcttaagtgcccacatttgatggagggtggaaataatttgaatgtatttgatttataagttttttttttttttggggttaaaagatggttgtagcatttaaaatggaaaattttctcctgggttggctagtatctggggtgtattctctgtaagtgtagctcaaataggtcatcatgaaaggttaaaaaagcgaggtggccatgttatgcctggtggttaaggccagggcctctccaaccactgtgccactgacttgctgtgtgaccctgggcaagtcacttaactataaggtgcctcagttttccttaatgctttttagaaagcattttggggatccttcagcacaggaattctcaagacctgagtattttttataataggaatgtccaccatgaacttgatacgtccgtgtgtcccagatgctgtcattagtctatatggttctccaagaaactgaatgaatccattggagaagcggtggataactagccagacaaaatttgagaatacataaacaacgcattgccacggaaacatacagaggatgccttttctgtgattgggtgggattttttccctttttatgtgggatatagtagttacttgtgacaagaataattttggaataatttctattaatatcaactctgaagctaattgtactaatctgagattgtgtttgttcataataaaagtgaagtgaatctga

SEQ ID NO: 298227 - DNA, 5670 bp, Homo sapiens
  misc_feature (5670)..(5670): n is a, c, g, or t
agggaggcggggcttcccgcgtcccccaagctccagatcctggggtggctgccacgtctccctgccacgcgcctggggggacggaagacgggacggagatgttagtggtgggcgccccccgagggttcaccactgtttcctgagaaacttccccagtgcccacccacccgttctccgtgtgcccgagggccggtcctgggctaggctccgcgccccagccccaaaccgggtccccagccccttccagagagaaagctcccgacgcgggatgccgggcagaggcccagcggcgggtggaagagaagctgagaaggagaaacagaggggagggggagcgaggagctggcggcagagggaacagcagattgcgccgagccaatggcaacggcaggacgaggtggcaccaaattcccttcggccaatgacgagccggagtttacagaagcctcattagcatttccccagaggcaggggcaggggcagaggccgggtggtgtggtgtcggtgtcggcagcatccccggcgccctgctgcggtcgccgcgagcctcggcctctgtctcctccccctcccgcccttacctccacgcgggaccgcccgcgccagtcaactcctcgcactttgcccctgcttggcagcggataaaagggggctgaggaaataccggacacggtcacccgttgccagctctagcctttaaattcccggctcggggacctccacgcaccgcggctagcgccgacaaccagctagcgtgcaaggcgccgcggctcagcgcgtaccggcgggcttcgaaaccgcagtcctccggcgaccccgaactccgctccggagcctcagccccctggaaagtgatcccggcatccgagagccaagatgccggcccacttgctgcaggacgatatctctagctcctataccaccaccaccaccattacagcgcctccctccagggtcctgcagaatggaggagataagttggagacgatgcccctctacttggaagacgacattcgccctgatataaaagatgatatatatgaccccacctacaaggataaggaaggcccaagccccaaggttgaatatgtctggagaaacatcatccttatgtctctgctacacttgggagccctgtatgggatcactttgattcctacctgcaagttctacacctggctttggggggtattctactattttgtcagtgccctgggcataacagcaggagctcatcgtctgtggagccaccgctcttacaaagctcggctgcccctacggctctttctgatcattgccaacacaatggcattccagaatgatgtctatgaatgggctcgtgaccaccgtgcccaccacaagttttcagaaacacatgctgatcctcataattcccgacgtggctttttcttctctcacgtgggttggctgcttgtgcgcaaacacccagctgtcaaagagaaggggagtacgctagacttgtctgacctagaagctgagaaactggtgatgttccagaggaggtactacaaacctggcttgctgatgatgtgcttcatcctgcccacgcttgtgccctggtatttctggggtgaaacttttcaaaacagtgtgttcgttgccactttcttgcgatatgctgtggtgcttaatgccacctggctggtgaacagtgctgcccacctcttcggatatcgtccttatgacaagaacattagcccccgggagaatatcctggtttcacttggagctgtgggtgagggcttccacaactaccaccactcctttccctatgactactctgccagtgagtaccgctggcacatcaacttcaccacattcttcattgattgcatggccgccctcggtctggcctatgaccggaagaaagtctccaaggccgccatcttggccaggattaaaagaaccggagatggaaactacaagagtggctgagtttggggtccctcaggttcctttttcaaaaaccagccaggcagaggttttaatgtctgtttattaactactgaataatgctaccaggatgctaaagatgatgatgttaacccattccagtacagtattcttttaaaattcaaaagtattgaaagccaacaactctgcctttatgatgctaagctgatattatttcttctcttatcctctctctcttctaggcccattgtcctccttttcactttattgctatcgccctcctttcccttattgcctcccaggcaagcagctggtcagtctttgctcagtgtccagcttccaaagcctagacaacctttctgtagcctaaaacgaatggtctttgctccagataactctctttccttgagctgttgtgagctttgaagtaggtggcttgagctagagataaaacagaatcttctgggtagtcccctgttgattatcttcagcccaggcttttgctagatggaatggaaaagcaacttcatttgacacaaagcttctaaagcaggtaaattgtcgggggagagagttagcatgtatgaatgtaaggatgagggaagcgaagcaagaggaacctctcgccatgatcagacatacagctgcctacctaatgaggacttcaagccccaccacatagcatgcttcctttctctcctggctcggggtaaaaagtggctgcggtgtttggcaatgctaattcaatgccgcaacatatagttgaggccgaggataaagaaaagacattttaagtttgtagtaaaagtggtctctgctggggaagggttttcttttctttttttctttaataacaaggagatttcttagttcatatatcaagaagtcttgaagttgggtgtttccagaattggtaaaaacagcagctcatagaattttgagtattccatgagctgctcattacagttctttcctctttctgctctgccatcttcaggatattggttcttcccctcatagtaataagatggctgtggcatttccaaacatccaaaaaaagggaaggatttaaggaggtgaagtcgggtcaaaaataaaatatatatacatatatacattgcttagaacgttaaactattagagtatttcccttccaaagagggatgtttggaaaaaactctgaaggagaggaggaattagttgggatgccaatttcctctccactgctggacatgagatggagaggctgagggacaggatctataggcagcttctaagagcgaacttcacataggaagggatctgagaacacgttgccaggggcttgagaaggttactgagtgagttattgggagtcttaataaaataaactagatattaggtccattcattaattagttccagtttctccttgaaatgagtaaaaactagaaggcttctctccacagtgttgtgccccttcactcatttttttttgaggagaagggggtctctgttaacatctagcctaaagtatacaactgcctggggggcagggttaggaatctcttcactaccctgattcttgattcctggctctaccctgtctgtcccttttctttgaccagatctttctcttccctgaacgttttcttctttccctggacaggcagcctcctttgtgtgtattcagaggcagtgatgacttgctgtccaggcagctccctcctgcacacagaatgctcagggtcactgaaccactgcttctcttttgaaagtagagctagctgccactttcacgtggcctccgcagtgtctccacctacacccctgtgctcccctgccacactgatggctcaagacaaggctggcaaaccctcccagaaacatctctggcccagaaagcctctctctccctccctctctcatgaggcacagccaagccaagcgctcatgttgagccagtgggccagccacagagcaaaagagggtttattttcagtcccctctctctgggtcagaaccagagggcatgctgaatgccccctgcttacttggtgagggtgccccgcctgagtcagtgctctcagctggcagtgcaatgcttgtagaagtaggaggaaacagttctcactgggaagaagcaagggcaagaacccaagtgcctcacctcgaaaggaggccctgttccctggagtcagggtgaactgcaaagctttggctgagacctgggatttgagataccacaaaccctgctgaacacagtgtctgttcagcaaactaaccagcattccctacagcctagggcagacaatagtatagaagtctggaaaaaaacaaaaacagaatttgagaaccttggaccactcctgtccctgtagctcagtcatcaaagcagaagtctggctttgctctattaagattggaaatgtacactaccaaacactcagtccactgttgagccccagtgctggaagggaggaaggcctttcttctgtgttaattgcgtagaggctacaggggttagcctggactaaaggcatccttgtcttttgagctattcacctcagtagaaaaggatctaagggaagatcactgtagtttagttctgttgacctgtgcacctaccccttggaaatgtctgctggtatttctaattccacaggtcatcagatgcctgcttgataatatataaacaataaaaacaactttcacttcttcctattgtaatcgtgtgccatggatctgatctgtaccatgaccctacataaggctggatggcacctcaggctgagggccccaatgtatgtgtggctgtgggtgtgggtgggagtgtgtctgctgagtaaggaacacgattttcaagattctaaagctcaattcaagtgacacattaatgataaactcagatctgatcaagagtccggatttctaacagtccttgctttggggggtgtgctgacaacttagctcaggtgccttacatcttttctaatcacagtgttgcatatgagcctgccctcactccctctgcagaatccctttgcacctgagaccctactgaagtggctggtagaaaaaggggcctgagtggaggattatcagtatcacgatttgcaggattcccttctgggcttcattctggaaacttttgttagggctgcttttcttaagtgcccacatttgatggagggtggaaataatttgaatgtatttgatttataagttttttttttttttggggttaaaagatggttgtagcatttaaaatggaaaattttctcctgggttggctagtatctggggtgtattctctgtaagtgtagctcaaataggtcatcatgaaaggttaaaaaagcgaggtggccatgttatgcctggtggttaaggccagggcctctccaaccactgtgccactgacttgctgtgtgaccctgggcaagtcacttaactataaggtgcctcagttttccttagctctcttagatcgcatcttttggatctttcatctcaccgcttcctcttgacctcgtgttatactttattcttactgcttgtcctcctatactctttcatcctttccctcttcatcctcgattctctctttctctccttcagcgttctttcatgcaacctttcttcactcctatctttcatatcttgtttttttctttctatcttccttaatctctctctctcctttttatatagaactctgcactcgtactctcttcgtctttttctctttcttcttcn

SEQ ID NO: 298228 - DNA, 5982 bp, Homo sapiens
  misc_feature (5246)..(5246): n is a, c, g, or t
  misc_feature (5717)..(5717): n is a, c, g, or t
agggaggcggggcttcccgcgtcccccaagctccagatcctggggtggctgccacgtctccctgccacgcgcctggggggacggaagacgggacggagatgttagtggtgggcgccccccgagggttcaccactgtttcctgagaaacttccccagtgcccacccacccgttctccgtgtgcccgagggccggtcctgggctaggctccgcgccccagccccaaaccgggtccccagccccttccagagagaaagctcccgacgcgggatgccgggcagaggcccagcggcgggtggaagagaagctgagaaggagaaacagaggggagggggagcgaggagctggcggcagagggaacagcagattgcgccgagccaatggcaacggcaggacgaggtggcaccaaattcccttcggccaatgacgagccggagtttacagaagcctcattagcatttccccagaggcaggggcaggggcagaggccgggtggtgtggtgtcggtgtcggcagcatccccggcgccctgctgcggtcgccgcgagcctcggcctctgtctcctccccctcccgcccttacctccacgcgggaccgcccgcgccagtcaactcctcgcactttgcccctgcttggcagcggataaaagggggctgaggaaataccggacacggtcacccgttgccagctctagcctttaaattcccggctcggggacctccacgcaccgcggctagcgccgacaaccagctagcgtgcaaggcgccgcggctcagcgcgtaccggcgggcttcgaaaccgcagtcctccggcgaccccgaactccgctccggagcctcagccccctggaaagtgatcccggcatccgagagccaagatgccggcccacttgctgcaggacgatatctctagctcctataccaccaccaccaccattacagcgcctccctccagggtcctgcagaatggaggagataagttggagacgatgcccctctacttggaagacgacattcgccctgatataaaagatgatatatatgaccccacctacaaggataaggaaggcccaagccccaaggttgaatatgtctggagaaacatcatccttatgtctctgctacacttgggagccctgtatgggatcactttgattcctacctgcaagttctacacctggctttggggggtattctactattttgtcagtgccctgggcataacagcaggagctcatcgtctgtggagccaccgctcttacaaagctcggctgcccctacggctctttctgatcattgccaacacaatggcattccagaatgatgtctatgaatgggctcgtgaccaccgtgcccaccacaagttttcagaaacacatgctgatcctcataattcccgacgtggctttttcttctctcacgtgggttggctgcttgtgcgcaaacacccagctgtcaaagagaaggggagtacgctagacttgtctgacctagaagctgagaaactggtgatgttccagaggaggtactacaaacctggcttgctgatgatgtgcttcatcctgcccacgcttgtgccctggtatttctggggtgaaacttttcaaaacagtgtgttcgttgccactttcttgcgatatgctgtggtgcttaatgccacctggctggtgaacagtgctgcccacctcttcggatatcgtccttatgacaagaacattagcccccgggagaatatcctggtttcacttggagctgtgggtgagggcttccacaactaccaccactcctttccctatgactactctgccagtgagtaccgctggcacatcaacttcaccacattcttcattgattgcatggccgccctcggtctggcctatgaccggaagaaagtctccaaggccgccatcttggccaggattaaaagaaccggagatggaaactacaagagtggctgagtttggggtccctcaggttcctttttcaaaaaccagccaggcagaggttttaatgtctgtttattaactactgaataatgctaccaggatgctaaagatgatgatgttaacccattccagtacagtattcttttaaaattcaaaagtattgaaagccaacaactctgcctttatgatgctaagctgatattatttcttctcttatcctctctctcttctaggcccattgtcctccttttcactttattgctatcgccctcctttcccttattgcctcccaggcaagcagctggtcagtctttgctcagtgtccagcttccaaagcctagacaacctttctgtagcctaaaacgaatggtctttgctccagataactctctttccttgagctgttgtgagctttgaagtaggtggcttgagctagagataaaacagaatcttctgggtagtcccctgttgattatcttcagcccaggcttttgctagatggaatggaaaagcaacttcatttgacacaaagcttctaaagcaggtaaattgtcgggggagagagttagcatgtatgaatgtaaggatgagggaagcgaagcaagaggaacctctcgccatgatcagacatacagctgcctacctaatgaggacttcaagccccaccacatagcatgcttcctttctctcctggctcggggtaaaaagtggctgcggtgtttggcaatgctaattcaatgccgcaacatatagttgaggccgaggataaagaaaagacattttaagtttgtagtaaaagtggtctctgctggggaagggttttcttttctttttttctttaataacaaggagatttcttagttcatatatcaagaagtcttgaagttgggtgtttccagaattggtaaaaacagcagctcatagaattttgagtattccatgagctgctcattacagttctttcctctttctgctctgccatcttcaggatattggttcttcccctcatagtaataagatggctgtggcatttccaaacatccaaaaaaagggaaggatttaaggaggtgaagtcgggtcaaaaataaaatatatatacatatatacattgcttagaacgttaaactattagagtatttcccttccaaagagggatgtttggaaaaaactctgaaggagaggaggaattagttgggatgccaatttcctctccactgctggacatgagatggagaggctgagggacaggatctataggcagcttctaagagcgaacttcacataggaagggatctgagaacacgttgccaggggcttgagaaggttactgagtgagttattgggagtcttaataaaataaactagatattaggtccattcattaattagttccagtttctccttgaaatgagtaaaaactagaaggcttctctccacagtgttgtgccccttcactcatttttttttgaggagaagggggtctctgttaacatctagcctaaagtatacaactgcctggggggcagggttaggaatctcttcactaccctgattcttgattcctggctctaccctgtctgtcccttttctttgaccagatctttctcttccctgaacgttttcttctttccctggacaggcagcctcctttgtgtgtattcagaggcagtgatgacttgctgtccaggcagctccctcctgcacacagaatgctcagggtcactgaaccactgcttctcttttgaaagtagagctagctgccactttcacgtggcctccgcagtgtctccacctacacccctgtgctcccctgccacactgatggctcaagacaaggctggcaaaccctcccagaaacatctctggcccagaaagcctctctctccctccctctctcatgaggcacagccaagccaagcgctcatgttgagccagtgggccagccacagagcaaaagagggtttattttcagtcccctctctctgggtcagaaccagagggcatgctgaatgccccctgcttacttggtgagggtgccccgcctgagtcagtgctctcagctggcagtgcaatgcttgtagaagtaggaggaaacagttctcactgggaagaagcaagggcaagaacccaagtgcctcacctcgaaaggaggccctgttccctggagtcagggtgaactgcaaagctttggctgagacctgggatttgagataccacaaaccctgctgaacacagtgtctgttcagcaaactaaccagcattccctacagcctagggcagacaatagtatagaagtctggaaaaaaacaaaaacagaatttgagaaccttggaccactcctgtccctgtagctcagtcatcaaagcagaagtctggctttgctctattaagattggaaatgtacactaccaaacactcagtccactgttgagccccagtgctggaagggaggaaggcctttcttctgtgttaattgcgtagaggctacaggggttagcctggactaaaggcatccttgtcttttgagctattcacctcagtagaaaaggatctaagggaagatcactgtagtttagttctgttgacctgtgcacctaccccttggaaatgtctgctggtatttctaattccacaggtcatcagatgcctgcttgataatatataaacaataaaaacaactttcacttcttcctattgtaatcgtgtgccatggatctgatctgtaccatgaccctacataaggctggatggcacctcaggctgagggccccaatgtatgtgtggctgtgggtgtgggtgggagtgtgtctgctgagtaaggaacacgattttcaagattctaaagctcaattcaagtgacacattaatgataaactcagatctgatcaagagtccggatttctaacagtccttgctttggggggtgtgctgacaacttagctcaggtgccttacatcttttctaatcacagtgttgcatatgagcctgccctcactccctctgcagaatccctttgcacctgagaccctactgaagtggctggtagaaaaaggggcctgagtggaggattatcagtatcacgatttgcaggattcccttctgggcttcattctggaaacttttgttagggctgcttttcttaagtgcccacatttgatggagggtggaaataatttgaatgtatttgatttataagttttttttggggttataaaagatgggggtgggtagcatttttaaaatgtggaaaaatttctcctcctgtgggtttggctagtatactcttgggggtgttattctcntcgtgtataagtgtgatagcctcaaatataggctcactcatgtaaagggtttaaaaaagcgaagggtggccagtgttaaatgtgcggtgggtggatatagggccagggccttcttccaaccactgtggtgccaatgtgactgtgtgcgtggtgatgaccccgtgggcaagctccattataacttattaggggtgccttcaagtttcccttctcgtggtaaaaaggggggattaattaattactggacctaccttaaaggggcgagtttttgtgaggctttgactaagtgcttgactgacaaacaagagccatttggggggaacccctttcagccaccgggggaattctctcaaaaacccgggagctattcttctgactcaaataggaaatggtcccaccaggaaacgtggaaaaacgtccgtgttgctccccacaaggctggccataaggtcgtagtggggttcctcccangacaagaaactgaatgaatccattggagaagcggtggataactagccagacaaaatttgagaatacataaacaacgcattgccacggaaacatacagaggatgccttttctgtgattgggtgggattttttccctttttatgtgggatatagtagttacttgtgacaagaataattttggaataatttctattaatatcaactctgaagctaattgtactaatctgagattgtgtttgttcataataaaagtgaagtgaatctga

SEQ ID NO: 298229 - DNA, 5269 bp, Homo sapiens
  misc_feature (5153)..(5153): n is a, c, g, or t
agggaggcggggcttcccgcgtcccccaagctccagatcctggggtggctgccacgtctccctgccacgcgcctggggggacggaagacgggacggagatgttagtggtgggcgccccccgagggttcaccactgtttcctgagaaacttccccagtgcccacccacccgttctccgtgtgcccgagggccggtcctgggctaggctccgcgccccagccccaaaccgggtccccagccccttccagagagaaagctcccgacgcgggatgccgggcagaggcccagcggcgggtggaagagaagctgagaaggagaaacagaggggagggggagcgaggagctggcggcagagggaacagcagattgcgccgagccaatggcaacggcaggacgaggtggcaccaaattcccttcggccaatgacgagccggagtttacagaagcctcattagcatttccccagaggcaggggcaggggcagaggccgggtggtgtggtgtcggtgtcggcagcatccccggcgccctgctgcggtcgccgcgagcctcggcctctgtctcctccccctcccgcccttacctccacgcgggaccgcccgcgccagtcaactcctcgcactttgcccctgcttggcagcggataaaagggggctgaggaaataccggacacggtcacccgttgccagctctagcctttaaattcccggctcggggacctccacgcaccgcggctagcgccgacaaccagctagcgtgcaaggcgccgcggctcagcgcgtaccggcgggcttcgaaaccgcagtcctccggcgaccccgaactccgctccggagcctcagccccctggaaagtgatcccggcatccgagagccaagatgccggcccacttgctgcaggacgatatctctagctcctataccaccaccaccaccattacagcgcctccctccagggtcctgcagaatggaggagataagttggagacgatgcccctctacttggaagacgacattcgccctgatataaaagatgatatatatgaccccacctacaaggataaggaaggcccaagccccaaggttgaatatgtctggagaaacatcatccttatgtctctgctacacttgggagccctgtatgggatcactttgattcctacctgcaagttctacacctggctttggggggtattctactattttgtcagtgccctgggcataacagcaggagctcatcgtctgtggagccaccgctcttacaaagctcggctgcccctacggctctttctgatcattgccaacacaatggcattccagaatgatgtctatgaatgggctcgtgaccaccgtgcccaccacaagttttcagaaacacatgctgatcctcataattcccgacgtggctttttcttctctcacgtgggttggctgcttgtgcgcaaacacccagctgtcaaagagaaggggagtacgctagacttgtctgacctagaagctgagaaactggtgatgttccagaggaggtactacaaacctggcttgctgatgatgtgcttcatcctgcccacgcttgtgccctggtatttctggggtgaaacttttcaaaacagtgtgttcgttgccactttcttgcgatatgctgtggtgcttaatgccacctggctggtgaacagtgctgcccacctcttcggatatcgtccttatgacaagaacattagcccccgggagaatatcctggtttcacttggagctgtgggtgagggcttccacaactaccaccactcctttccctatgactactctgccagtgagtaccgctggcacatcaacttcaccacattcttcattgattgcatggccgccctcggtctggcctatgaccggaagaaagtctccaaggccgccatcttggccaggattaaaagaaccggagatggaaactacaagagtggctgagtttggggtccctcaggttcctttttcaaaaaccagccaggcagaggttttaatgtctgtttattaactactgaataatgctaccaggatgctaaagatgatgatgttaacccattccagtacagtattcttttaaaattcaaaagtattgaaagccaacaactctgcctttatgatgctaagctgatattatttcttctcttatcctctctctcttctaggcccattgtcctccttttcactttattgctatcgccctcctttcccttattgcctcccaggcaagcagctggtcagtctttgctcagtgtccagcttccaaagcctagacaacctttctgtagcctaaaacgaatggtctttgctccagataactctctttccttgagctgttgtgagctttgaagtaggtggcttgagctagagataaaacagaatcttctgggtagtcccctgttgattatcttcagcccaggcttttgctagatggaatggaaaagcaacttcatttgacacaaagcttctaaagcaggtaaattgtcgggggagagagttagcatgtatgaatgtaaggatgagggaagcgaagcaagaggaacctctcgccatgatcagacatacagctgcctacctaatgaggacttcaagccccaccacatagcatgcttcctttctctcctggctcggggtaaaaagtggctgcggtgtttggcaatgctaattcaatgccgcaacatatagttgaggccgaggataaagaaaagacattttaagtttgtagtaaaagtggtctctgctggggaagggttttcttttctttttttctttaataacaaggagatttcttagttcatatatcaagaagtcttgaagttgggtgtttccagaattggtaaaaacagcagctcatagaattttgagtattccatgagctgctcattacagttctttcctctttctgctctgccatcttcaggatattggttcttcccctcatagtaataagatggctgtggcatttccaaacatccaaaaaaagggaaggatttaaggaggtgaagtcgggtcaaaaataaaatatatatacatatatacattgcttagaacgttaaactattagagtatttcccttccaaagagggatgtttggaaaaaactctgaaggagaggaggaattagttgggatgccaatttcctctccactgctggacatgagatggagaggctgagggacaggatctataggcagcttctaagagcgaacttcacataggaagggatctgagaacacgttgccaggggcttgagaaggttactgagtgagttattgggagtcttaataaaataaactagatattaggtccattcattaattagttccagtttctccttgaaatgagtaaaaactagaaggcttctctccacagtgttgtgccccttcactcatttttttttgaggagaagggggtctctgttaacatctagcctaaagtatacaactgcctggggggcagggttaggaatctcttcactaccctgattcttgattcctggctctaccctgtctgtcccttttctttgaccagatctttctcttccctgaacgttttcttctttccctggacaggcagcctcctttgtgtgtattcagaggcagtgatgacttgctgtccaggcagctccctcctgcacacagaatgctcagggtcactgaaccactgcttctcttttgaaagtagagctagctgccactttcacgtggcctccgcagtgtctccacctacacccctgtgctcccctgccacactgatggctcaagacaaggctggcaaaccctcccagaaacatctctggcccagaaagcctctctctccctccctctctcatgaggcacagccaagccaagcgctcatgttgagccagtgggccagccacagagcaaaagagggtttattttcagtcccctctctctgggtcagaaccagagggcatgctgaatgccccctgcttacttggtgagggtgccccgcctgagtcagtgctctcagctggcagtgcaatgcttgtagaagtaggaggaaacagttctcactgggaagaagcaagggcaagaacccaagtgcctcacctcgaaaggaggccctgttccctggagtcagggtgaactgcaaagctttggctgagacctgggatttgagataccacaaaccctgctgaacacagtgtctgttcagcaaactaaccagcattccctacagcctagggcagacaatagtatagaagtctggaaaaaaacaaaaacagaatttgagaaccttggaccactcctgtccctgtagctcagtcatcaaagcagaagtctggctttgctctattaagattggaaatgtacactaccaaacactcagtccactgttgagccccagtgctggaagggaggaaggcctttcttctgtgttaattgcgtagaggctacaggggttagcctggactaaaggcatccttgtcttttgagctattcacctcagtagaaaaggatctaagggaagatcactgtagtttagttctgttgacctgtgcacctaccccttggaaatgtctgctggtatttctaattccacaggtcatcagatgcctgcttgataatatataaacaataaaaacaactttcacttcttcctattgtaatcgtgtgccatggatctgatctgtaccatgaccctacataaggctggatggcacctcaggctgagggccccaatgtatgtgtggctgtgggtgtgggtgggagtgtgtctgctgagtaaggaacacgattttcaagattctaaagctcaattcaagtgacacattaatgataaactcagatctgatcaagagtccggatttctaacagtccttgctttggggggtgtgctgacaacttagctcaggtgccttacatcttttctaatcacagtgttgcatatgagcctgccctcactccctctgcagaatccctttgcacctgagaccctactgaagtggctggtagaaaaaggggcctgagtggaggattatcagtatcacgatttgcaggattcccttctgggcttcattctggaaacttttgttagggctgcttttcttaagtgcccacatttgatggagggtggaaataatttgaatgtatttgatttataagtttttttaaaaantaacggggtgaaagatggtggggtttaaaggaaaatgtcctgggtgcaaaaattgggggatactggagaggggtcaaagggctcggaaggttaaaagcggggcattgcggggtaag

SEQ ID NO: 298230 - DNA, 5709 bp, Homo sapiens
agggaggcggggcttcccgcgtcccccaagctccagatcctggggtggctgccacgtctccctgccacgcgcctggggggacggaagacgggacggagatgttagtggtgggcgccccccgagggttcaccactgtttcctgagaaacttccccagtgcccacccacccgttctccgtgtgcccgagggccggtcctgggctaggctccgcgccccagccccaaaccgggtccccagccccttccagagagaaagctcccgacgcgggatgccgggcagaggcccagcggcgggtggaagagaagctgagaaggagaaacagaggggagggggagcgaggagctggcggcagagggaacagcagattgcgccgagccaatggcaacggcaggacgaggtggcaccaaattcccttcggccaatgacgagccggagtttacagaagcctcattagcatttccccagaggcaggggcaggggcagaggccgggtggtgtggtgtcggtgtcggcagcatccccggcgccctgctgcggtcgccgcgagcctcggcctctgtctcctccccctcccgcccttacctccacgcgggaccgcccgcgccagtcaactcctcgcactttgcccctgcttggcagcggataaaagggggctgaggaaataccggacacggtcacccgttgccagctctagcctttaaattcccggctcggggacctccacgcaccgcggctagcgccgacaaccagctagcgtgcaaggcgccgcggctcagcgcgtaccggcgggcttcgaaaccgcagtcctccggcgaccccgaactccgctccggagcctcagccccctggaaagtgatcccggcatccgagagccaagatgccggcccacttgctgcaggacgatatctctagctcctataccaccaccaccaccattacagcgcctccctccagggtcctgcagaatggaggagataagttggagacgatgcccctctacttggaagacgacattcgccctgatataaaagatgatatatatgaccccacctacaaggataaggaaggcccaagccccaaggttgaatatgtctggagaaacatcatccttatgtctctgctacacttgggagccctgtatgggatcactttgattcctacctgcaagttctacacctggctttggggggtattctactattttgtcagtgccctgggcataacagcaggagctcatcgtctgtggagccaccgctcttacaaagctcggctgcccctacggctctttctgatcattgccaacacaatggcattccagaatgatgtctatgaatgggctcgtgaccaccgtgcccaccacaagttttcagaaacacatgctgatcctcataattcccgacgtggctttttcttctctcacgtgggttggctgcttgtgcgcaaacacccagctgtcaaagagaaggggagtacgctagacttgtctgacctagaagctgagaaactggtgatgttccagaggaggtactacaaacctggcttgctgatgatgtgcttcatcctgcccacgcttgtgccctggtatttctggggtgaaacttttcaaaacagtgtgttcgttgccactttcttgcgatatgctgtggtgcttaatgccacctggctggtgaacagtgctgcccacctcttcggatatcgtccttatgacaagaacattagcccccgggagaatatcctggtttcacttggagctgtgggtgagggcttccacaactaccaccactcctttccctatgactactctgccagtgagtaccgctggcacatcaacttcaccacattcttcattgattgcatggccgccctcggtctggcctatgaccggaagaaagtctccaaggccgccatcttggccaggattaaaagaaccggagatggaaactacaagagtggctgagtttggggtccctcaggttcctttttcaaaaaccagccaggcagaggttttaatgtctgtttattaactactgaataatgctaccaggatgctaaagatgatgatgttaacccattccagtacagtattcttttaaaattcaaaagtattgaaagccaacaactctgcctttatgatgctaagctgatattatttcttctcttatcctctctctcttctaggcccattgtcctccttttcactttattgctatcgccctcctttcccttattgcctcccaggcaagcagctggtcagtctttgctcagtgtccagcttccaaagcctagacaacctttctgtagcctaaaacgaatggtctttgctccagataactctctttccttgagctgttgtgagctttgaagtaggtggcttgagctagagataaaacagaatcttctgggtagtcccctgttgattatcttcagcccaggcttttgctagatggaatggaaaagcaacttcatttgacacaaagcttctaaagcaggtaaattgtcgggggagagagttagcatgtatgaatgtaaggatgagggaagcgaagcaagaggaacctctcgccatgatcagacatacagctgcctacctaatgaggacttcaagccccaccacatagcatgcttcctttctctcctggctcggggtaaaaagtggctgcggtgtttggcaatgctaattcaatgccgcaacatatagttgaggccgaggataaagaaaagacattttaagtttgtagtaaaagtggtctctgctggggaagggttttcttttctttttttctttaataacaaggagatttcttagttcatatatcaagaagtcttgaagttgggtgtttccagaattggtaaaaacagcagctcatagaattttgagtattccatgagctgctcattacagttctttcctctttctgctctgccatcttcaggatattggttcttcccctcatagtaataagatggctgtggcatttccaaacatccaaaaaaagggaaggatttaaggaggtgaagtcgggtcaaaaataaaatatatatacatatatacattgcttagaacgttaaactattagagtatttcccttccaaagagggatgtttggaaaaaactctgaaggagaggaggaattagttgggatgccaatttcctctccactgctggacatgagatggagaggctgagggacaggatctataggcagcttctaagagcgaacttcacataggaagggatctgagaacacgttgccaggggcttgagaaggttactgagtgagttattgggagtcttaataaaataaactagatattaggtccattcattaattagttccagtttctccttgaaatgagtaaaaactagaaggcttctctccacagtgttgtgccccttcactcatttttttttgaggagaagggggtctctgttaacatctagcctaaagtatacaactgcctggggggcagggttaggaatctcttcactaccctgattctcctgcacacagaatgctcagggtcactgaaccactgcttctcttttgaaagtagagctagctgccactttcacgtggcctccgcagtgtctccacctacacccctgtgctcccctgccacactgatggctcaagacaaggctggcaaaccctcccagaaacatctctggcccagaaagcctctctctccctccctctctcatgaggcacagccaagccaagcgctcatgttgagccagtgggccagccacagagcaaaagagggtttattttcagtcccctctctctgggtcagaaccagagggcatgctgaatgccccctgcttacttggtgagggtgccccgcctgagtcagtgctctcagctggcagtgcaatgcttgtagaagtaggaggaaacagttctcactgggaagaagcaagggcaagaacccaagtgcctcacctcgaaaggaggccctgttccctggagtcagggtgaactgcaaagctttggctgagacctgggatttgagataccacaaaccctgctgaacacagtgtctgttcagcaaactaaccagcattccctacagcctagggcagacaatagtatagaagtctggaaaaaaacaaaaacagaatttgagaaccttggaccactcctgtccctgtagctcagtcatcaaagcagaagtctggctttgctctattaagattggaaatgtacactaccaaacactcagtccactgttgagccccagtgctggaagggaggaaggcctttcttctgtgttaattgcgtagaggctacaggggttagcctggactaaaggcatccttgtcttttgagctattcacctcagtagaaaaggatctaagggaagatcactgtagtttagttctgttgacctgtgcacctaccccttggaaatgtctgctggtatttctaattccacaggtcatcagatgcctgcttgataatatataaacaataaaaacaactttcacttcttcctattgtaatcgtgtgccatggatctgatctgtaccatgaccctacataaggctggatggcacctcaggctgagggccccaatgtatgtgtggctgtgggtgtgggtgggagtgtgtctgctgagtaaggaacacgattttcaagattctaaagctcaattcaagtgacacattaatgataaactcagatctgatcaagagtccggatttctaacagtccttgctttggggggtgtgctgacaacttagctcaggtgccttacatcttttctaatcacagtgttgcatatgagcctgccctcactccctctgcagaatccctttgcacctgagaccctactgaagtggctggtagaaaaaggggcctgagtggaggattatcagtatcacgatttgcaggattcccttctgggcttcattctggaaacttttgttagggctgcttttcttaagtgcccacatttgatggagggtggaaataatttgaatgtatttgatttataagttttttttttttttggggttaaaagatggttgtagcatttaaaatggaaaattttctcctgggttggctagtatctggggtgtattctctgtaagtgtagctcaaataggtcatcatgaaaggttaaaaaagcgaggtggccatgttatgcctggtggttaaggccagggcctctccaaccactgtgccactgacttgctgtgtgaccctgggcaagtcacttaactataaggtgcctcagttttccttctgttaaaatggggataataatactgacctacctcaaagggcagttttgaggcatgactaatgctttttagaaagcattttggggatccttcagcacaggaattctcaagacctgagtattttttataataggaatgtccaccatgaacttgatacgtccgtgtgtcccagatgctgtcattagtctatatggttctccaagaaactgaatgaatccattggagaagcggtggataactagccagacaaaatttgagaatacataaacaacgcattgccacggaaacatacagaggatgccttttctgtgattgggtgggattttttccctttttatgtgggatatagtagttacttgtgacaagaataattttggaataatttctattaatatcaactctgaagctaattgtactaatctgagattgtgtttgttcataataaaagtgaagtgaatctga

SEQ ID NO: 298231 - DNA, 5254 bp, Homo sapiens
agggaggcggggcttcccgcgtcccccaagctccagatcctggggtggctgccacgtctccctgccacgcgcctggggggacggaagacgggacggagatgttagtggtgggcgccccccgagggttcaccactgtttcctgagaaacttccccagtgcccacccacccgttctccgtgtgcccgagggccggtcctgggctaggctccgcgccccagccccaaaccgggtccccagccccttccagagagaaagctcccgacgcgggatgccgggcagaggcccagcggcgggtggaagagaagctgagaaggagaaacagaggggagggggagcgaggagctggcggcagagggaacagcagattgcgccgagccaatggcaacggcaggacgaggtggcaccaaattcccttcggccaatgacgagccggagtttacagaagcctcattagcatttccccagaggcaggggcaggggcagaggccgggtggtgtggtgtcggtgtcggcagcatccccggcgccctgctgcggtcgccgcgagcctcggcctctgtctcctccccctcccgcccttacctccacgcgggaccgcccgcgccagtcaactcctcgcactttgcccctgcttggcagcggataaaagggggctgaggaaataccggacacggtcacccgttgccagctctagcctttaaattcccggctcggggacctccacgcaccgcggctagcgccgacaaccagctagcgtgcaaggcgccgcggctcagcgcgtaccggcgggcttcgaaaccgcagtcctccggcgaccccgaactccgctccggagcctcagccccctggaaagtgatcccggcatccgagagccaagatgccggcccacttgctgcaggacgatatctctagctcctataccaccaccaccaccattacagcgcctccctccagggtcctgcagaatggaggagataagttggagacgatgcccctctacttggaagacgacattcgccctgatataaaagatgatatatatgaccccacctacaaggataaggaaggcccaagccccaaggttgaatatgtctggagaaacatcatccttatgtctctgctacacttgggagccctgtatgggatcactttgattcctacctgcaagttctacacctggctttggggggtattctactattttgtcagtgccctgggcataacagcaggagctcatcgtctgtggagccaccgctcttacaaagctcggctgcccctacggctctttctgatcattgccaacacaatggcattccagaatgatgtctatgaatgggctcgtgaccaccgtgcccaccacaagttttcagaaacacatgctgatcctcataattcccgacgtggctttttcttctctcacgtgggttggctgcttgtgcgcaaacacccagctgtcaaagagaaggggagtacgctagacttgtctgacctagaagctgagaaactggtgatgttccagaggaggtactacaaacctggcttgctgatgatgtgcttcatcctgcccacgcttgtgccctggtatttctggggtgaaacttttcaaaacagtgtgttcgttgccactttcttgcgatatgctgtggtgcttaatgccacctggctggtgaacagtgctgcccacctcttcggatatcgtccttatgacaagaacattagcccccgggagaatatcctggtttcacttggagctgtgggtgagggcttccacaactaccaccactcctttccctatgactactctgccagtgagtaccgctggcacatcaacttcaccacattcttcattgattgcatggccgccctcggtctggcctatgaccggaagaaagtctccaaggccgccatcttggccaggattaaaagaaccggagatggaaactacaagagtggctgagtttggggtccctcaggttcctttttcaaaaaccagccaggcagaggttttaatgtctgtttattaactactgaataatgctaccaggatgctaaagatgatgatgttaacccattccagtacagtattcttttaaaattcaaaagtattgaaagccaacaactctgcctttatgatgctaagctgatattatttcttctcttatcctctctctcttctaggcccattgtcctccttttcactttattgctatcgccctcctttcccttattgcctcccaggcaagcagctggtcagtctttgctcagtgtccagcttccaaagcctagacaacctttctgtagcctaaaacgaatggtctttgctccagataactctctttccttgagctgttgtgagctttgaagtaggtggcttgagctagagataaaacagaatcttctgggtagtcccctgttgattatcttcagcccaggcttttgctagatggaatggaaaagcaacttcatttgacacaaagcttctaaagcaggtaaattgtcgggggagagagttagcatgtatgaatgtaaggatgagggaagcgaagcaagaggaacctctcgccatgatcagacatacagctgcctacctaatgaggacttcaagccccaccacatagcatgcttcctttctctcctggctcggggtaaaaagtggctgcggtgtttggcaatgctaattcaatgccgcaacatatagttgaggccgaggataaagaaaagacattttaagtttgtagtaaaagtggtctctgctggggaagggttttcttttctttttttctttaataacaaggagatttcttagttcatatatcaagaagtcttgaagttgggtgtttccagaattggtaaaaacagcagctcatagaattttgagtattccatgagctgctcattacagttctttcctctttctgctctgccatcttcaggatattggttcttcccctcatagtaataagatggctgtggcatttccaaacatccaaaaaaagggaaggatttaaggaggtgaagtcgggtcaaaaataaaatatatatacatatatacattgcttagaacgttaaactattagagtatttcccttccaaagagggatgtttggaaaaaactctgaaggagaggaggaattagttgggatgccaatttcctctccactgctggacatgagatggagaggctgagggacaggatctataggcagcttctaagagcgaacttcacataggaagggatctgagaacacgttgccaggggcttgagaaggttactgagtgagttattgggagtcttaataaaataaactagatattaggtccattcattaattagttccagtttctccttgaaatgagtaaaaactagaaggcttctctccacagtgttgtgccccttcactcatttttttttgaggagaagggggtctctgttaacatctagcctaaagtatacaactgcctggggggcagggttaggaatctcttcactaccctgattcttgattcctggctctaccctgtctgtcccttttctttgaccagatctttctcttccctgaacgttttcttctttccctggacaggcagcctcctttgtgtgtattcagaggcagtgatgacttgctgtccaggcagctccctcctgcacacagaatgctcagggtcactgaaccactgcttctcttttgaaagtagagctagctgccactttcacgtggcctccgcagtgtctccacctacacccctgtgctcccctgccacactgatggctcaagacaaggctggcaaaccctcccagaaacatctctggcccagaaagcctctctctccctccctctctcatgaggcacagccaagccaagcgctcatgttgagccagtgggccagccacagagcaaaagagggtttattttcagtcccctctctctgggtcagaaccagagggcatgctgaatgccccctgcttacttggtgagggtgccccgcctgagtcagtgctctcagctggcagtgcaatgcttgtagaagtaggaggaaacagttctcactgggaagaagcaagggcaagaacccaagtgcctcacctcgaaaggaggccctgttccctggagtcagggtgaactgcaaagctttggctgagacctgggatttgagataccacaaaccctgctgaacacagtgtctgttcagcaaactaaccagcattccctacagcctagggcagacaatagtatagaagtctggaaaaaaacaaaaacagaatttgagaaccttggaccactcctgtccctgtagctcagtcatcaaagcagaagtctggctttgctctattaagattggaaatgtacactaccaaacactcagtccactgttgagccccagtgctggaagggaggaaggcctttcttctgtgttaattgcgtagaggctacaggggttagcctggactaaaggcatccttgtcttttgagctattcacctcagtagaaaaggatctaagggaagatcactgtagtttagttctgttgacctgtgcacctaccccttggaaatgtctgctggtatttctaattccacaggtcatcagatgcctgcttgataatatataaacaataaaaacaactttcacttcttcctattgtaatcgtgtgccatggatctgatctgtaccatgaccctacataaggctggatggcacctcaggctgagggccccaatgtatgtgtggctgtgggtgtgggtgggagtgtgtctgctgagtaaggaacacgattttcaagattctaaagctcaattcaagtgacacattaatgataaactcagatctgatcaagagtccggatttctaacagtccttgctttggggggtgtgctgacaacttagctcaggtgccttacatcttttctaatcacagtgttgcatatgagcctgccctcactccctctgcagaatccctttgcacctgagacttgaagaacccccttaacttggaacagtggggcttggggtaagaaacacaaacgggcggccttgaagttgggaggattatcagtaatcaacgatttgcaagggatttccccttttctgggggccttttcaatttttcctttgggggcgaacaaaactaaaaaccccctttttttttaaaccaattaggggggttaccttcaaacaccgggaggggaggggccctttgggcctttttttcctttaaagttgccccaacatttggaatcggaagggggtggaacaa

SEQ ID NO: 298232 - DNA, 4643 bp, Homo sapiens
agggaggcggggcttcccgcgtcccccaagctccagatcctggggtggctgccacgtctccctgccacgcgcctggggggacggaagacgggacggagatgttagtggtgggcgccccccgagggttcaccactgtttcctgagaaacttccccagtgcccacccacccgttctccgtgtgcccgagggccggtcctgggctaggctccgcgccccagccccaaaccgggtccccagccccttccagagagaaagctcccgacgcgggatgccgggcagaggcccagcggcgggtggaagagaagctgagaaggagaaacagaggggagggggagcgaggagctggcggcagagggaacagcagattgcgccgagccaatggcaacggcaggacgaggtggcaccaaattcccttcggccaatgacgagccggagtttacagaagcctcattagcatttccccagaggcaggggcaggggcagaggccgggtggtgtggtgtcggtgtcggcagcatccccggcgccctgctgcggtcgccgcgagcctcggcctctgtctcctccccctcccgcccttacctccacgcgggaccgcccgcgccagtcaactcctcgcactttgcccctgcttggcagcggataaaagggggctgaggaaataccggacacggtcacccgttgccagctctagcctttaaattcccggctcggggacctccacgcaccgcggctagcgccgacaaccagctagcgtgcaaggcgccgcggctcagcgcgtaccggcgggcttcgaaaccgcagtcctccggcgaccccgaactccgctccggagcctcagccccctggaaagtgatcccggcatccgagagccaagatgccggcccacttgctgcaggacgatatctctagctcctataccaccaccaccaccattacagcgcctccctccagggtcctgcagaatggaggagataagttggagacgatgcccctctacttggaagacgacattcgccctgatataaaagatgatatatatgaccccacctacaaggataaggaaggcccaagccccaaggttgaatatgtctggagaaacatcatccttatgtctctgctacacttgggagccctgtatgggatcactttgattcctacctgcaagttctacacctggctttggggggtattctactattttgtcagtgccctgggcataacagcaggagctcatcgtctgtggagccaccgctcttacaaagctcggctgcccctacggctctttctgatcattgccaacacaatggcattccagaatgatgtctatgaatgggctcgtgaccaccgtgcccaccacaagttttcagaaacacatgctgatcctcataattcccgacgtggctttttcttctctcacgtgggttggctgcttgtgcgcaaacacccagctgtcaaagagaaggggagtacgctagacttgtctgacctagaagctgagaaactggtgatgttccagaggaggtactacaaacctggcttgctgatgatgtgcttcatcctgcccacgcttgtgccctggtatttctggggtgaaacttttcaaaacagtgtgttcgttgccactttcttgcgatatgctgtggtgcttaatgccacctggctggtgaacagtgctgcccacctcttcggatatcgtccttatgacaagaacattagcccccgggagaatatcctggtttcacttggagctgtgggtgagggcttccacaactaccaccactcctttccctatgactactctgccagtgagtaccgctggcacatcaacttcaccacattcttcattgattgcatggccgccctcggtctggcctatgaccggaagaaagtctccaaggccgccatcttggccaggattaaaagaaccggagatggaaactacaagagtggctgagtttggggtccctcaggttcctttttcaaaaaccagccaggcagaggttttaatgtctgtttattaactactgaataatgctaccaggatgctaaagatgatgatgttaacccattccagtacagtattcttttaaaattcaaaagtattgaaagccaacaactctgcctttatgatgctaagctgatattatttcttctcttatcctctctctcttctaggcccattgtcctccttttcactttattgctatcgccctcctttcccttattgcctcccaggcaagcagctggtcagtctttgctcagtgtccagcttccaaagcctagacaacctttctgtagcctaaaacgaatggtctttgctccagataactctctttccttgagctgttgtgagctttgaagtaggtggcttgagctagagataaaacagaatcttctgggtagtcccctgttgattatcttcagcccaggcttttgctagatggaatggaaaagcaacttcatttgacacaaagcttctaaagcaggtaaattgtcgggggagagagttagcatgtatgaatgtaaggatgagggaagcgaagcaagaggaacctctcgccatgatcagacatacagctgcctacctaatgaggacttcaagccccaccacatagcatgcttcctttctctcctggctcggggtaaaaagtggctgcggtgtttggcaatgctaattcaatgccgcaacatatagttgaggccgaggataaagaaaagacattttaagtttgtagtaaaagtggtctctgctggggaagggttttcttttctttttttctttaataacaaggagatttcttagttcatatatcaagaagtcttgaagttgggtgtttccagaattggtaaaaacagcagctcatagaattttgagtattccatgagctgctcattacagttctttcctctttctgctctgccatcttcaggatattggttcttcccctcatagtaataagatggctgtggcatttccaaacatccaaaaaaagggaaggatttaaggaggtgaagtcgggtcaaaaataaaatatatatacatatatacattgcttagaacgttaaactattagagtatttcccttccaaagagggatgtttggaaaaaactctgaaggagaggaggaattagttgggatgccaatttcctctccactgctggacatgagatggagaggctgagggacaggatctataggcagcttctaagagcgaacttcacataggaagggatctgagaacacgttgccaggggcttgagaaggttactgagtgagttattgggagtcttaataaaataaactagatattaggtccattcattaattagttccagtttctccttgaaatgagtaaaaactagaaggcttctctccacagtgttgtgccccttcactcatttttttttgaggagaagggggtctctgttaacatctagcctaaagtatacaactgcctggggggcagggttaggaatctcttcactaccctgattcttgattcctggctctaccctgtctgtcccttttctttgaccagatctttctcttccctgaacgttttcttctttccctggacaggcagcctcctttgtgtgtattcagaggcagtgatgacttgctgtccaggcagctccctcctgcacacagaatgctcagggtcactgaaccactgcttctcttttgaaagtagagctagctgccactttcacgtggcctccgcagtgtctccacctacacccctgtgctcccctgccacactgatggctcaagacaaggctggcaaaccctcccagaaacatctctggcccagaaagcctctctctccctccctctctcatgaggcacagccaagccaagcgctcatgttgagccagtgggccagccacagagcaaaagagggtttattttcagtcccctctctctgggtcagaaccagagggcatgctgaatgccccctgcttacttggtgagggtgccccgcctgagtcagtgctctcagctggcagtgcaatgcttgtagaagtaggaggaaacagttctcactgggaagaagcaagggcaagaacccaagtgcctcacctcgaaaggaggccctgttccctggagtcagggtgaactgcaaagctttggctgagacctgggatttgagataccacaaaccctgctgaacacagtgtctgttcagcaaactaaccagcattccctacagcctagggcagacaatagtatagaagtctggaaaaaaacaaaaacagaatttgagaaccttggaccactcctgtccctgtagctcagtcatcaaagcagaagtctggctttgctctattaagattggaaatgtacactaccaaacactcagtccactgttgagccccagtgctggaagggaggaaggcctttcttctgtgttaattgcgtagaggctacaggggttagcctggactaaaggcatccttgtcttttgagctattcacctcagtagaaaaggatctaagggaagatcactgtagtttagttctgttgacctgtgcacctaccccttggaaatgtctgctggtatttctaattccacaggtcatcagatgcctgcttgataatatataaacaataaaaacaactttcacttcttcctattgta

SEQ ID NO: 298233 - DNA, 4921 bp, Homo sapiens
  misc_feature (4921)..(4921): n is a, c, g, or t
agggaggcggggcttcccgcgtcccccaagctccagatcctggggtggctgccacgtctccctgccacgcgcctggggggacggaagacgggacggagatgttagtggtgggcgccccccgagggttcaccactgtttcctgagaaacttccccagtgcccacccacccgttctccgtgtgcccgagggccggtcctgggctaggctccgcgccccagccccaaaccgggtccccagccccttccagagagaaagctcccgacgcgggatgccgggcagaggcccagcggcgggtggaagagaagctgagaaggagaaacagaggggagggggagcgaggagctggcggcagagggaacagcagattgcgccgagccaatggcaacggcaggacgaggtggcaccaaattcccttcggccaatgacgagccggagtttacagaagcctcattagcatttccccagaggcaggggcaggggcagaggccgggtggtgtggtgtcggtgtcggcagcatccccggcgccctgctgcggtcgccgcgagcctcggcctctgtctcctccccctcccgcccttacctccacgcgggaccgcccgcgccagtcaactcctcgcactttgcccctgcttggcagcggataaaagggggctgaggaaataccggacacggtcacccgttgccagctctagcctttaaattcccggctcggggacctccacgcaccgcggctagcgccgacaaccagctagcgtgcaaggcgccgcggctcagcgcgtaccggcgggcttcgaaaccgcagtcctccggcgaccccgaactccgctccggagcctcagccccctggaaagtgatcccggcatccgagagccaagatgccggcccacttgctgcaggacgatatctctagctcctataccaccaccaccaccattacagcgcctccctccagggtcctgcagaatggaggagataagttggagacgatgcccctctacttggaagacgacattcgccctgatataaaagatgatatatatgaccccacctacaaggataaggaaggcccaagccccaaggttgaatatgtctggagaaacatcatccttatgtctctgctacacttgggagccctgtatgggatcactttgattcctacctgcaagttctacacctggctttggggggtattctactattttgtcagtgccctgggcataacagcaggagctcatcgtctgtggagccaccgctcttacaaagctcggctgcccctacggctctttctgatcattgccaacacaatggcattccagaatgatgtctatgaatgggctcgtgaccaccgtgcccaccacaagttttcagaaacacatgctgatcctcataattcccgacgtggctttttcttctctcacgtgggttggctgcttgtgcgcaaacacccagctgtcaaagagaaggggagtacgctagacttgtctgacctagaagctgagaaactggtgatgttccagaggaggtactacaaacctggcttgctgatgatgtgcttcatcctgcccacgcttgtgccctggtatttctggggtgaaacttttcaaaacagtgtgttcgttgccactttcttgcgatatgctgtggtgcttaatgccacctggctggtgaacagtgctgcccacctcttcggatatcgtccttatgacaagaacattagcccccgggagaatatcctggtttcacttggagctgtgggtgagggcttccacaactaccaccactcctttccctatgactactctgccagtgagtaccgctggcacatcaacttcaccacattcttcattgattgcatggccgccctcggtctggcctatgaccggaagaaagtctccaaggccgccatcttggccaggattaaaagaaccggagatggaaactacaagagtggctgagtttggggtccctcaggttcctttttcaaaaaccagccaggcagaggttttaatgtctgtttattaactactgaataatgctaccaggatgctaaagatgatgatgttaacccattccagtacagtattcttttaaaattcaaaagtattgaaagccaacaactctgcctttatgatgctaagctgatattatttcttctcttatcctctctctcttctaggcccattgtcctccttttcactttattgctatcgccctcctttcccttattgcctcccaggcaagcagctggtcagtctttgctcagtgtccagcttccaaagcctagacaacctttctgtagcctaaaacgaatggtctttgctccagataactctctttccttgagctgttgtgagctttgaagtaggtggcttgagctagagataaaacagaatcttctgggtagtcccctgttgattatcttcagcccaggcttttgctagatggaatggaaaagcaacttcatttgacacaaagcttctaaagcaggtaaattgtcgggggagagagttagcatgtatgaatgtaaggatgagggaagcgaagcaagaggaacctctcgccatgatcagacatacagctgcctacctaatgaggacttcaagccccaccacatagcatgcttcctttctctcctggctcggggtaaaaagtggctgcggtgtttggcaatgctaattcaatgccgcaacatatagttgaggccgaggataaagaaaagacattttaagtttgtagtaaaagtggtctctgctggggaagggttttcttttctttttttctttaataacaaggagatttcttagttcatatatcaagaagtcttgaagttgggtgtttccagaattggtaaaaacagcagctcatagaattttgagtattccatgagctgctcattacagttctttcctctttctgctctgccatcttcaggatattggttcttcccctcatagtaataagatggctgtggcatttccaaacatccaaaaaaagggaaggatttaaggaggtgaagtcgggtcaaaaataaaatatatatacatatatacattgcttagaacgttaaactattagagtatttcccttccaaagagggatgtttggaaaaaactctgaaggagaggaggaattagttgggatgccaatttcctctccactgctggacatgagatggagaggctgagggacaggatctataggcagcttctaagagcgaacttcacataggaagggatctgagaacacgttgccaggggcttgagaaggttactgagtgagttattgggagtcttaataaaataaactagatattaggtccattcattaattagttccagtttctccttgaaatgagtaaaaactagaaggcttctctccacagtgttgtgccccttcactcatttttttttgaggagaagggggtctctgttaacatctagcctaaagtatacaactgcctggggggcagggttaggaatctcttcactaccctgattcttgattcctggctctaccctgtctgtcccttttctttgaccagatctttctcttccctgaacgttttcttctttccctggacaggcagcctcctttgtgtgtattcagaggcagtgatgacttgctgtccaggcagctccctcctgcacacagaatgctcagggtcactgaaccactgcttctcttttgaaagtagagctagctgccactttcacgtggcctccgcagtgtctccacctacacccctgtgctcccctgccacactgatggctcaagacaaggctggcaaaccctcccagaaacatctctggcccagaaagcctctctctccctccctctctcatgaggcacagccaagccaagcgctcatgttgagccagtgggccagccacagagcaaaagagggtttattttcagtcccctctctctgggtcagaaccagagggcatgctgaatgccccctgcttacttggtgagggtgccccgcctgagtcagtgctctcagctggcagtgcaatgcttgtagaagtaggaggaaacagttctcactgggaagaagcaagggcaagaacccaagtgcctcacctcgaaaggaggccctgttccctggagtcagggtgaactgcaaagctttggctgagacctgggatttgagataccacaaaccctgctgaacacagtgtctgttcagcaaactaaccagcattccctacagcctagggcagacaatagtatagaagtctggaaaaaaacaaaaacagaatttgagaaccttggaccactcctgtccctgtagctcagtcatcaaagcagaagtctggctttgctctattaagattggaaatgtacactaccaaacactcagtccactgttgagccccagtgctggaagggaggaaggcctttcttctgtgttaattgcgtagaggctacaggggttagcctggactaaaggcatccttgtcttttgagctattcacctcagtagaaaaggatctaagggaagatcactgtagtttagttctgttgacctgtgcacctaccccttggaaatgtctgctggtatttctaattccacaggtcatcagatgcctgcttgataatatataaacaataaaaacaactttcacttcttcctattgtaaaaaaaaaaaaaaaaaaaaaaaaaaaaaaaaaaaaaaaaaacggggggtttttttgggggggggggaaaaaggggatatgataagagaaagtgggacaagtgggtctaataagaggtgtgtttcagcgtaacccacaagtttttctgtgaataaaaggtggggataatatcttggcggggtctatcccatatatgtaggtggagggaaatatataatattgtcagaaaagacgccagaggggtgtaaacccgggatattaaagaatctgggacacatn

SEQ ID NO: 298234 - DNA, 2395 bp, Homo sapiens
  misc_feature (43)..(43): n is a, c, g, or t
ctgctaactcaggggcgagctgctaactcaggggcgagctgcncttgattcctggctctaccctgtctgtcccttttctttgaccagatctttctcttccctgaacgttttcttctttccctggacaggcagcctcctttgtgtgtattcagaggcagtgatgacttgctgtccaggcagctccctcctgcacacagaatgctcagggtcactgaaccactgcttctcttttgaaagtagagctagctgccactttcacgtggcctccgcagtgtctccacctacacccctgtgctcccctgccacactgatggctcaagacaaggctggcaaaccctcccagaaacatctctggcccagaaagcctctctctccctccctctctcatgaggcacagccaagccaagcgctcatgttgagccagtgggccagccacagagcaaaagagggtttattttcagtcccctctctctgggtcagaaccagagggcatgctgaatgccccctgcttacttggtgagggtgccccgcctgagtcagtgctctcagctggcagtgcaatgcttgtagaagtaggaggaaacagttctcactgggaagaagcaagggcaagaacccaagtgcctcacctcgaaaggaggccctgttccctggagtcagggtgaactgcaaagctttggctgagacctgggatttgagataccacaaaccctgctgaacacagtgtctgttcagcaaactaaccagcattccctacagcctagggcagacaatagtatagaagtctggaaaaaaacaaaaacagaatttgagaaccttggaccactcctgtccctgtagctcagtcatcaaagcagaagtctggctttgctctattaagattggaaatgtacactaccaaacactcagtccactgttgagccccagtgctggaagggaggaaggcctttcttctgtgttaattgcgtagaggctacaggggttagcctggactaaaggcatccttgtcttttgagctattcacctcagtagaaaaggatctaagggaagatcactgtagtttagttctgttgacctgtgcacctaccccttggaaatgtctgctggtatttctaattccacaggtcatcagatgcctgcttgataatatataaacaataaaaacaactttcacttcttcctattgtaatcgtgtgccatggatctgatctgtaccatgaccctacataaggctggatggcacctcaggctgagggccccaatgtatgtgtggctgtgggtgtgggtgggagtgtgtctgctgagtaaggaacacgattttcaagattctaaagctcaattcaagtgacacattaatgataaactcagatctgatcaagagtccggatttctaacagtccttgctttggggggtgtgctgacaacttagctcaggtgccttacatcttttctaatcacagtgttgcatatgagcctgccctcactccctctgcagaatccctttgcacctgagaccctactgaagtggctggtagaaaaaggggcctgagtggaggattatcagtatcacgatttgcaggattcccttctgggcttcattctggaaacttttgttagggctgcttttcttaagtgcccacatttgatggagggtggaaataatttgaatgtatttgatttataagttttttttttttttggggttaaaagatggttgtagcatttaaaatggaaaattttctcctgggttggctagtatctggggtgtattctctgtaagtgtagctcaaataggtcatcatgaaaggttaaaaaagcgaggtggccatgttatgcctggtggttaaggccagggcctctccaaccactgtgccactgacttgctgtgtgaccctgggcaagtcacttaactataaggtgcctcagttttccttctgttaaaatggggataataatactgacctacctcaaagggcagttttgaggcatgactaatgctttttagaaagcattttggggatccttcagcacaggaattctcaagacctgagtattttttataataggaatgtccaccatgaacttgatacgtccgtgtgtcccagatgctgtcattagtctatatggttctccaagaaactgaatgaatccattggagaagcggtggataactagccagacaaaatttgagaatacataaacaacgcattgccacggaaacatacagaggatgccttttctgtgattgggtgggattttttccctttttatgtgggatatagtagttacttgtgacaagaataattttggaataatttctattaatatcaactctgaagctaattgtactaatctgagattgtgtttgttcataataaaagtgaagtgaatctga

SEQ ID NO: 298235 - DNA, 4511 bp, Homo sapiens
  misc_feature (4408)..(4408): n is a, c, g, or t
  misc_feature (4411)..(4412): n is a, c, g, or t
  misc_feature (4422)..(4422): n is a, c, g, or t
agggaggcggggcttcccgcgtcccccaagctccagatcctggggtggctgccacgtctccctgccacgcgcctggggggacggaagacgggacggagatgttagtggtgggcgccccccgagggttcaccactgtttcctgagaaacttccccagtgcccacccacccgttctccgtgtgcccgagggccggtcctgggctaggctccgcgccccagccccaaaccgggtccccagccccttccagagagaaagctcccgacgcgggatgccgggcagaggcccagcggcgggtggaagagaagctgagaaggagaaacagaggggagggggagcgaggagctggcggcagagggaacagcagattgcgccgagccaatggcaacggcaggacgaggtggcaccaaattcccttcggccaatgacgagccggagtttacagaagcctcattagcatttccccagaggcaggggcaggggcagaggccgggtggtgtggtgtcggtgtcggcagcatccccggcgccctgctgcggtcgccgcgagcctcggcctctgtctcctccccctcccgcccttacctccacgcgggaccgcccgcgccagtcaactcctcgcactttgcccctgcttggcagcggataaaagggggctgaggaaataccggacacggtcacccgttgccagctctagcctttaaattcccggctcggggacctccacgcaccgcggctagcgccgacaaccagctagcgtgcaaggcgccgcggctcagcgcgtaccggcgggcttcgaaaccgcagtcctccggcgaccccgaactccgctccggagcctcagccccctggaaagtgatcccggcatccgagagccaagatgccggcccacttgctgcaggacgatatctctagctcctataccaccaccaccaccattacagcgcctccctccagggtcctgcagaatggaggagataagttggagacgatgcccctctacttggaagacgacattcgccctgatataaaagatgatatatatgaccccacctacaaggataaggaaggcccaagccccaaggttgaatatgtctggagaaacatcatccttatgtctctgctacacttgggagccctgtatgggatcactttgattcctacctgcaagttctacacctggctttggggggtattctactattttgtcagtgccctgggcataacagcaggagctcatcgtctgtggagccaccgctcttacaaagctcggctgcccctacggctctttctgatcattgccaacacaatggcattccagaatgatgtctatgaatgggctcgtgaccaccgtgcccaccacaagttttcagaaacacatgctgatcctcataattcccgacgtggctttttcttctctcacgtgggttggctgcttgtgcgcaaacacccagctgtcaaagagaaggggagtacgctagacttgtctgacctagaagctgagaaactggtgatgttccagaggaggtactacaaacctggcttgctgatgatgtgcttcatcctgcccacgcttgtgccctggtatttctggggtgaaacttttcaaaacagtgtgttcgttgccactttcttgcgatatgctgtggtgcttaatgccacctggctggtgaacagtgctgcccacctcttcggatatcgtccttatgacaagaacattagcccccgggagaatatcctggtttcacttggagctgtgggtgagggcttccacaactaccaccactcctttccctatgactactctgccagtgagtaccgctggcacatcaacttcaccacattcttcattgattgcatggccgccctcggtctggcctatgaccggaagaaagtctccaaggccgccatcttggccaggattaaaagaaccggagatggaaactacaagagtggctgagtttggggtccctcaggttcctttttcaaaaaccagccaggcagaggttttaatgtctgtttattaactactgaataatgctaccaggatgctaaagatgatgatgttaacccattccagtacagtattcttttaaaattcaaaagtattgaaagccaacaactctgcctttatgatgctaagctgatattatttcttctcttatcctctctctcttctaggcccattgtcctccttttcactttattgctatcgccctcctttcccttattgcctcccaggcaagcagctggtcagtctttgctcagtgtccagcttccaaagcctagacaacctttctgtagcctaaaacgaatggtctttgctccagataactctctttccttgagctgttgtgagctttgaagtaggtggcttgagctagagataaaacagaatcttctgggtagtcccctgttgattatcttcagcccaggcttttgctagatggaatggaaaagcaacttcatttgacacaaagcttctaaagcaggtaaattgtcgggggagagagttagcatgtatgaatgtaaggatgagggaagcgaagcaagaggaacctctcgccatgatcagacatacagctgcctacctaatgaggacttcaagccccaccacatagcatgcttcctttctctcctggctcggggtaaaaagtggctgcggtgtttggcaatgctaattcaatgccgcaacatatagttgaggccgaggataaagaaaagacattttaagtttgtagtaaaagtggtctctgctggggaagggttttcttttctttttttctttaataacaaggagatttcttagttcatatatcaagaagtcttgaagttgggtgtttccagaattggtaaaaacagcagctcatagaattttgagtattccatgagctgctcattacagttctttcctctttctgctctgccatcttcaggatattggttcttcccctcatagtaataagatggctgtggcatttccaaacatccaaaaaaagggaaggatttaaggaggtgaagtcgggtcaaaaataaaatatatatacatatatacattgcttagaacgttaaactattagagtatttcccttccaaagagggatgtttggaaaaaactctgaaggagaggaggaattagttgggatgccaatttcctctccactgctggacatgagatggagaggctgagggacaggatctataggcagcttctaagagcgaacttcacataggaagggatctgagaacacgttgccaggggcttgagaaggttactgagtgagttattgggagtcttaataaaataaactagatattaggtccattcattaattagttccagtttctccttgaaatgagtaaaaactagaaggcttctctccacagtgttgtgccccttcactcatttttttttgaggagaagggggtctctgttaacatctagcctaaagtatacaactgcctggggggcagggttaggaatctcttcactaccctgattcttgattcctggctctaccctgtctgtcccttttctttgaccagatctttctcttccctgaacgttttcttctttccctggacaggcagcctcctttgtgtgtattcagaggcagtgatgacttgctgtccaggcagctccctcctgcacacagaatgctcagggtcactgaaccactgcttctcttttgaaagtagagctagctgccactttcacgtggcctccgcagtgtctccacctacacccctgtgctcccctgccacactgatggctcaagacaaggctggcaaaccctcccagaaacatctctggcccagaaagcctctctctccctccctctctcatgaggcacagccaagccaagcgctcatgttgagccagtgggccagccacagagcaaaagagggtttattttcagtcccctctctctgggtcagaaccagagggcatgctgaatgccccctgcttacttggtgagggtgccccgcctgagtcagtgctctcagctggcagtgcaatgcttgtagaagtaggaggaaacagttctcactgggaagaagcaagggcaagaacccaagtgcctcacctcgaaaggaggccctgttccctggagtcagggtgaactgcaaagctttggctgagacctgggatttgagataccacaaaccctgctgaacacagtgtctgttcagcaaactaaccagcattccctacagcctagggcagacaatagtatagaagtctggaaaaaaacaaaaacagaatttgagaaccttggaccactcctgtccctgtagctcagtcatcaaagcagaagtctggctttgctctattaagattggaaatgtacactaccaaacactcagtccactgttgagccccagtgctggaagggaggaaggcctccttnggnnatgcggaacncaggggtagcgggctaaggccccgcgtttgggctccccgggaagggtccgggagcacgggttcgttcgggcgggccaacccgggagtgg

SEQ ID NO: 298236 - DNA, 3739 bp, Homo sapiens
agggaggcggggcttcccgcgtcccccaagctccagatcctggggtggctgccacgtctccctgccacgcgcctggggggacggaagacgggacggagatgttagtggtgggcgccccccgagggttcaccactgtttcctgagaaacttccccagtgcccacccacccgttctccgtgtgcccgagggccggtcctgggctaggctccgcgccccagccccaaaccgggtccccagccccttccagagagaaagctcccgacgcgggatgccgggcagaggcccagcggcgggtggaagagaagctgagaaggagaaacagaggggagggggagcgaggagctggcggcagagggaacagcagattgcgccgagccaatggcaacggcaggacgaggtggcaccaaattcccttcggccaatgacgagccggagtttacagaagcctcattagcatttccccagaggcaggggcaggggcagaggccgggtggtgtggtgtcggtgtcggcagcatccccggcgccctgctgcggtcgccgcgagcctcggcctctgtctcctccccctcccgcccttacctccacgcgggaccgcccgcgccagtcaactcctcgcactttgcccctgcttggcagcggataaaagggggctgaggaaataccggacacggtcacccgttgccagctctagcctttaaattcccggctcggggacctccacgcaccgcggctagcgccgacaaccagctagcgtgcaaggcgccgcggctcagcgcgtaccggcgggcttcgaaaccgcagtcctccggcgaccccgaactccgctccggagcctcagccccctggaaagtgatcccggcatccgagagccaagatgccggcccacttgctgcaggacgatatctctagctcctataccaccaccaccaccattacagcgcctccctccagggtcctgcagaatggaggagataagttggagacgatgcccctctacttggaagacgacattcgccctgatataaaagatgatatatatgaccccacctacaaggataaggaaggcccaagccccaaggttgaatatgtctggagaaacatcatccttatgtctctgctacacttgggagccctgtatgggatcactttgattcctacctgcaagttctacacctggctttggggggtattctactattttgtcagtgccctgggcataacagcaggagctcatcgtctgtggagccaccgctcttacaaagctcggctgcccctacggctctttctgatcattgccaacacaatggcattccagaatgatgtctatgaatgggctcgtgaccaccgtgcccaccacaagttttcagaaacacatgctgatcctcataattcccgacgtggctttttcttctctcacgtgggttggctgcttgtgcgcaaacacccagctgtcaaagagaaggggagtacgctagacttgtctgacctagaagctgagaaactggtgatgttccagaggaggtactacaaacctggcttgctgatgatgtgcttcatcctgcccacgcttgtgccctggtatttctggggtgaaacttttcaaaacagtgtgttcgttgccactttcttgcgatatgctgtggtgcttaatgccacctggctggtgaacagtgctgcccacctcttcggatatcgtccttatgacaagaacattagcccccgggagaatatcctggtttcacttggagctgtgggtgagggcttccacaactaccaccactcctttccctatgactactctgccagtgagtaccgctggcacatcaacttcaccacattcttcattgattgcatggccgccctcggtctggcctatgaccggaagaaagtctccaaggccgccatcttggccaggattaaaagaaccggagatggaaactacaagagtggctgagtttggggtccctcaggttcctttttcaaaaaccagccaggcagaggttttaatgtctgtttattaactactgaataatgctaccaggatgctaaagatgatgatgttaacccattccagtacagtattcttttaaaattcaaaagtattgaaagccaacaactctgcctttatgatgctaagctgatattatttcttctcttatcctctctctcttctaggcccattgtcctccttttcactttattgctatcgccctcctttcccttattgcctcccaggcaagcagctggtcagtctttgctcagtgtccagcttccaaagcctagacaacctttcttctgtgttaattgcgtagaggctacaggggttagcctggactaaaggcatccttgtcttttgagctattcacctcagtagaaaaggatctaagggaagatcactgtagtttagttctgttgacctgtgcacctaccccttggaaatgtctgctggtatttctaattccacaggtcatcagatgcctgcttgataatatataaacaataaaaacaactttcacttcttcctattgtaatcgtgtgccatggatctgatctgtaccatgaccctacataaggctggatggcacctcaggctgagggccccaatgtatgtgtggctgtgggtgtgggtgggagtgtgtctgctgagtaaggaacacgattttcaagattctaaagctcaattcaagtgacacattaatgataaactcagatctgatcaagagtccggatttctaacagtccttgctttggggggtgtgctgacaacttagctcaggtgccttacatcttttctaatcacagtgttgcatatgagcctgccctcactccctctgcagaatccctttgcacctgagaccctactgaagtggctggtagaaaaaggggcctgagtggaggattatcagtatcacgatttgcaggattcccttctgggcttcattctggaaacttttgttagggctgcttttcttaagtgcccacatttgatggagggtggaaataatttgaatgtatttgatttataagttttttttttttttggggttaaaagatggttgtagcatttaaaatggaaaattttctcctgggttggctagtatctggggtgtattctctgtaagtgtagctcaaataggtcatcatgaaaggttaaaaaagcgaggtggccatgttatgcctggtggttaaggccagggcctctccaaccactgtgccactgacttgctgtgtgaccctgggcaagtcacttaactataaggtgcctcagttttccttctgttaaaatggggataataatactgacctacctcaaagggcagttttgaggcatgactaatgctttttagaaagcattttggggatccttcagcacaggaattctcaagacctgagtattttttataataggaatgtccaccatgaacttgatacgtccgtgtgtcccagatgctgtcattagtctatatggttctccaagaaactgaatgaatccattggagaagcggtggataactagccagacaaaatttgagaatacataaacaacgcattgccacggaaacatacagaggatgccttttctgtgattgggtgggattttttccctttttatgtgggatatagtagttacttgtgacaagaataattttggaataatttctattaatatcaactctgaagctaattgtactaatctgagattgtgtttgttcataataaaagtgaagtgaatctga

SEQ ID NO: 298237 - DNA, 2532 bp, Homo sapiens
agggaggcggggcttcccgcgtcccccaagctccagatcctggggtggctgccacgtctccctgccacgcgcctggggggacggaagacgggacggagatgttagtggtgggcgccccccgagggttcaccactgtttcctgagaaacttccccagtgcccacccacccgttctccgtgtgcccgagggccggtcctgggctaggctccgcgccccagccccaaaccgggtccccagccccttccagagagaaagctcccgacgcgggatgccgggcagaggcccagcggcgggtggaagagaagctgagaaggagaaacagaggggagggggagcgaggagctggcggcagagggaacagcagattgcgccgagccaatggcaacggcaggacgaggtggcaccaaattcccttcggccaatgacgagccggagtttacagaagcctcattagcatttccccagaggcaggggcaggggcagaggccgggtggtgtggtgtcggtgtcggcagcatccccggcgccctgctgcggtcgccgcgagcctcggcctctgtctcctccccctcccgcccttacctccacgcgggaccgcccgcgccagtcaactcctcgcactttgcccctgcttggcagcggataaaagggggctgaggaaataccggacacggtcacccgttgccagctctagcctttaaattcccggctcggggacctccacgcaccgcggctagcgccgacaaccagctagcgtgcaaggcgccgcggctcagcgcgtaccggcgggcttcgaaaccgcagtcctccggcgaccccgaactccgctccggagcctcagccccctggaaagtgatcccggcatccgagagccaagatgccggcccacttgctgcaggacgatatctctagctcctataccaccaccaccaccattacagcgcctccctccagggtcctgcagaatggaggagataagttggagacgatgcccctctacttggaagacgacattcgccctgatataaaagatgatatatatgaccccacctacaaggataaggaaggcccaagccccaaggttgaatatgtctggagaaacatcatccttatgtctctgctacacttgggagccctgtatgggatcactttgattcctacctgcaagttctacacctggctttggggggtattctactattttgtcagtgccctgggcataacagcaggagctcatcgtctgtggagccaccgctcttacaaagctcggctgcccctacggctctttctgatcattgccaacacaatggcattccagaatgatgtctatgaatgggctcgtgaccaccgtgcccaccacaagttttcagaaacacatgctgatcctcataattcccgacgtggctttttcttctctcacgtgggttggctgcttgtgcgcaaacacccagctgtcaaagagaaggggagtacgctagacttgtctgacctagaagctgagaaactggtgatgttccagaggaggtactacaaacctggcttgctgatgatgtgcttcatcctgcccacgcttgtgccctggtatttctggggtgaaacttttcaaaacagtgtgttcgttgccactttcttgcgatatgctgtggtgcttaatgccacctggctggtgaacagtgctgcccacctcttcggatatcgtccttatgacaagaacattagcccccgggagaatatcctggtttcacttggagctgtgggtgagggcttccacaactaccaccactcctttccctatgactactctgccagtgagtaccgctggcacatcaacttcaccacattcttcattgattgcatggccgccctcggtctggcctatgaccggaagaaagtctccaaggccgccatcttggccaggattaaaagaaccggagatggaaactacaagagtggctgagtttggggtccctcaggttcctttttcaaaaaccagccaggcagaggttttaatgtctgtttattaactactgaataatgctaccaggatgctaaagatgatgatgttaacccattccagtacagtattcttttaaaattcaaaagtattgaaagccaacaactctgcctttatgatgctaagctgatattatttcttctcttatcctctctctcttctaggcccattgtcctccttttcactttattgctatcgccctcctttcccttattgcctcccaggcaagcagctggtcagtctttgctcagtgtccagcttccaaagcctagacaacctttcttctgtgttaattgcgtagaggctacaggggttagcctggactaaaggcatccttgtcttttgagctattcacctcagtagaaaaggatctaagggaagatcactgtagtttagttctgttgacctgtgcacctaccccttggaaatgtctgctggtatttctaattccacaggtcatcagatgcctgcttgataatatataaacaataaaaacaactttcacttcttcctattgta

SEQ ID NO: 298238 - DNA, 2264 bp, Homo sapiens
agggaggcggggcttcccgcgtcccccaagctccagatcctggggtggctgccacgtctccctgccacgcgcctggggggacggaagacgggacggagatgttagtggtgggcgccccccgagggttcaccactgtttcctgagaaacttccccagtgcccacccacccgttctccgtgtgcccgagggccggtcctgggctaggctccgcgccccagccccaaaccgggtccccagccccttccagagagaaagctcccgacgcgggatgccgggcagaggcccagcggcgggtggaagagaagctgagaaggagaaacagaggggagggggagcgaggagctggcggcagagggaacagcagattgcgccgagccaatggcaacggcaggacgaggtggcaccaaattcccttcggccaatgacgagccggagtttacagaagcctcattagcatttccccagaggcaggggcaggggcagaggccgggtggtgtggtgtcggtgtcggcagcatccccggcgccctgctgcggtcgccgcgagcctcggcctctgtctcctccccctcccgcccttacctccacgcgggaccgcccgcgccagtcaactcctcgcactttgcccctgcttggcagcggataaaagggggctgaggaaataccggacacggtcacccgttgccagctctagcctttaaattcccggctcggggacctccacgcaccgcggctagcgccgacaaccagctagcgtgcaaggcgccgcggctcagcgcgtaccggcgggcttcgaaaccgcagtcctccggcgaccccgaactccgctccggagcctcagccccctggaaagtgatcccggcatccgagagccaagatgccggcccacttgctgcaggacgatatctctagctcctataccaccaccaccaccattacagcgcctccctccagggtcctgcagaatggaggagataagttggagacgatgcccctctacttggaagacgacattcgccctgatataaaagatgatatatatgaccccacctacaaggataaggaaggcccaagccccaaggttgaatatgtctggagaaacatcatccttatgtctctgctacacttgggagccctgtatgggatcactttgattcctacctgcaagttctacacctggctttggggggtattctactattttgtcagtgccctgggcataacagcaggagctcatcgtctgtggagccaccgctcttacaaagctcggctgcccctacggctctttctgatcattgccaacacaatggcattccagaatgatgtctatgaatgggctcgtgaccaccgtgcccaccacaagttttcagaaacacatgctgatcctcataattcccgacgtggctttttcttctctcacgtgggttggctgcttgtgcgcaaacacccagctgtcaaagagaaggggagtacgctagacttgtctgacctagaagctgagaaactggtgatgttccagaggaggtactacaaacctggcttgctgatgatgtgcttcatcctgcccacgcttgtgccctggtatttctggggtgaaacttttcaaaacagtgtgttcgttgccactttcttgcgatatgctgtggtgcttaatgccacctggctggtgaacagtgctgcccacctcttcggatatcgtccttatgacaagaacattagcccccgggagaatatcctggtttcacttggagctgtgggtgagggcttccacaactaccaccactcctttccctatgactactctgccagtgagtaccgctggcacatcaacttcaccacattcttcattgattgcatggccgccctcggtctggcctatgaccggaagaaagtctccaaggccgccatcttggccaggattaaaagaaccggagatggaaactacaagagtggctgagtttggggtccctcaggttcctttttcaaaaaccagccaggcagaggttttaatgtctgtttattaactactgaataatgctaccaggatgctaaagatgatgatgttaacccattccagtacagtattcttttaaaattcaaaagtattgaaagccaacaactctgcctttatgatgctaagctgatattatttcttctcttatcctctctcttagggcgtcttgtcacaggcttcgggtcagacggattcaaccctgcatcagccatttgtagccaggtcactctgttctttgtctgtaaatgaga

SEQ ID NO: 298239 - DNA, 2030 bp, Homo sapiens
agggaggcggggcttcccgcgtcccccaagctccagatcctggggtggctgccacgtctccctgccacgcgcctggggggacggaagacgggacggagatgttagtggtgggcgccccccgagggttcaccactgtttcctgagaaacttccccagtgcccacccacccgttctccgtgtgcccgagggccggtcctgggctaggctccgcgccccagccccaaaccgggtccccagccccttccagagagaaagctcccgacgcgggatgccgggcagaggcccagcggcgggtggaagagaagctgagaaggagaaacagaggggagggggagcgaggagctggcggcagagggaacagcagattgcgccgagccaatggcaacggcaggacgaggtggcaccaaattcccttcggccaatgacgagccggagtttacagaagcctcattagcatttccccagaggcaggggcaggggcagaggccgggtggtgtggtgtcggtgtcggcagcatccccggcgccctgctgcggtcgccgcgagcctcggcctctgtctcctccccctcccgcccttacctccacgcgggaccgcccgcgccagtcaactcctcgcactttgcccctgcttggcagcggataaaagggggctgaggaaataccggacacggtcacccgttgccagctctagcctttaaattcccggctcggggacctccacgcaccgcggctagcgccgacaaccagctagcgtgcaaggcgccgcggctcagcgcgtaccggcgggcttcgaaaccgcagtcctccggcgaccccgaactccgctccggagcctcagccccctggaaagtgatcccggcatccgagagccaagatgccggcccacttgctgcaggacgatatctctagctcctataccaccaccaccaccattacagcgcctccctccagggtcctgcagaatggaggagataagttggagacgatgcccctctacttggaagacgacattcgccctgatataaaagatgatatatatgaccccacctacaaggataaggaaggcccaagccccaaggttgaatatgtctggagaaacatcatccttatgtctctgctacacttgggagccctgtatgggatcactttgattcctacctgcaagttctacacctggctttggggggtattctactattttgtcagtgccctgggcataacagcaggagctcatcgtctgtggagccaccgctcttacaaagctcggctgcccctacggctctttctgatcattgccaacacaatggcattccagaatgatgtctatgaatgggctcgtgaccaccgtgcccaccacaagttttcagaaacacatgctgatcctcataattcccgacgtggctttttcttctctcacgtgggttggctgcttgtgcgcaaacacccagctgtcaaagagaaggggagtacgctagacttgtctgacctagaagctgagaaactggtgatgttccagaggaggtactacaaacctggcttgctgatgatgtgcttcatcctgcccacgcttgtgccctggtatttctggggtgaaacttttcaaaacagtgtgttcgttgccactttcttgcgatatgctgtggtgcttaatgccacctggctggtgaacagtgctgcccacctcttcggatatcgtccttatgacaagaacattagcccccgggagaatatcctggtttcacttggagctgtgggtaagtcagctgtccaagtaagactacatccagtggtctgctgattaggggattaggctaggagccagaaaaactagataaatctgttttttatggctactttgtatctcagtttttccactataaaattagggggcagtatactggaaaacgcttttgagagtcaggcaacatgttttatgtaaaaatgaaaggataagaaacaaaacacaaaaaaacactgattttgattccaggttctaaaacaatttccaaatgccatgtatgctccggg

SEQ ID NO: 298240 - DNA, 1200 bp, Homo sapiens
agggaggcggggcttcccgcgtcccccaagctccagatcctggggtggctgccacgtctccctgccacgcgcctggggggacggaagacgggacggagatgttagtggtgggcgccccccgagggttcaccactgtttcctgagaaacttccccagtgcccacccacccgttctccgtgtgcccgagggccggtcctgggctaggctccgcgccccagccccaaaccgggtccccagccccttccagagagaaagctcccgacgcgggatgccgggcagaggcccagcggcgggtggaagagaagctgagaaggagaaacagaggggagggggagcgaggagctggcggcagagggaacagcagattgcgccgagccaatggcaacggcaggacgaggtggcaccaaattcccttcggccaatgacgagccggagtttacagaagcctcattagcatttccccagaggcaggggcaggggcagaggccgggtggtgtggtgtcggtgtcggcagcatccccggcgccctgctgcggtcgccgcgagcctcggcctctgtctcctccccctcccgcccttacctccacgcgggaccgcccgcgccagtcaactcctcgcactttgcccctgcttggcagcggataaaagggggctgaggaaataccggacacggtcacccgttgccagctctagcctttaaattcccggctcggggacctccacgcaccgcggctagcgccgacaaccagctagcgtgcaaggcgccgcggctcagcgcgtaccggcgggcttcgaaaccgcagtcctccggcgaccccgaactccgctccggagcctcagccccctggaaagtgatcccggcatccgagagccaagatgccggcccacttgctgcaggacgatatctctagctcctataccaccaccaccaccattacagcgcctccctccagggtcctgcagaatggaggagataagttggagacgatgcccctctacttggaagacgacattcgccctgatataaaagatgatatatatgaccccacctacaaggataaggaaggcccaagccccaaggttgaatatgtctggagaaacatcatccttatgtctctgctacacttgggagccctgtattcgtctctgatataaaagatgatatatatgaccccacctacgaggataaggaaggcccgc

SEQ ID NO: 298241 - DNA, 736 bp, Homo sapiens
acagcttgtactctgcctctgactctcttccaagaacaatttggcaagttctaatctacatcttgcaaaaaaaaaacaaaaaacaaaaaacagagaggtaggagggccacagcacctggggtcccagaaggcagactgacctattcctacagcagggagacaaggtctcattctgttgcccaggctggagtgcagtggtgcaatcacggttcactgcaacctggaactccagggttcaagcaatcctcctgcctcagcctgccgagtagctgtgacaacaggtgcgagccaccatgcccagctaagatttcaccatgttgcccagctggtcttgaactcctggcctcaagcaattctcctgctttaggctcccaagttgctggaattacagggctgcacggagcctgctgagtctccaacccacctcgctcaccgctctgaccactgacaggcagagcaaaggatgcgggagttgcctctgctgcccatctaaggggacgtaggcagagaagcaaaggcctctgctctccctccatccatcccggtgtgctggccccaacggaacaggagtccttcaactattgcctgccagagacccaattgcagggactgtagtctgcatctggatgagctgggctgtagattgaagtctcagaagcagggaaggttggaaggggtagggtcccagagcccatggagttattgctgagaagatatgcaggggacacattcccca

SEQ ID NO: 298242 - DNA, 491 bp, Homo sapiens
caaacgccatctttgaaggaccgtgcttccttcgaagaatcaggatgcccatgagagaccaaagcagtctcttggcccctagacatgccctccaggaacaacctggctgtgagcggagagtctaacaggcaagaaggaagggagaagacagaaggaagatgctcgcccatacagagacagagggagggggggctccaaagccgaaagaggaggtccccaagtactgtggacactagccaggtatatatgcagaggctgcaggaggcaatgtctgatttgcgtagggctcaggggagagatgaaaacacaaatcatatggaagatgggaaccctcaggcctacctcaacttaaaaatgggtgtaataacagtaccggccttctagcattgttagggagattaaatgtgatcatgcattcaagggcttagcacggggccaggctgctgggaaaggcttgatgatagtatcggcaataaaacctgtacaattac

SEQ ID NO: 298243 - DNA, 635 bp, Homo sapiens
gacagtgctctgattttcctctcctctccctgtttccagcccccttttatcccccgtagtgacaaaggccaagacatcaatgtggccaggtcccaccttccggctgtcggggagagtcttctgccggaggcgcatctccaagtccccagctcttcctggccccttgttttgctctcagccatgagctgtcttcgtggcttttcagtacattcattaacctttgtgcagggggtccttgggagagactaaaaggactgggtgatactttatgtcaccatgttgtgctcagaagcatatatctttaatgctattctttaatgttgcaaaccatagttttgcaacatatcaaatgtatccctaatgaaaattcagacccaaaggcttaggaaccctaaaatttctaagagttttgatttaaaacttcattcatagttttaaataatacagcagatcttcaaatagcattgtttcattcaacatcattttgttacaataatgatgagaatcggtactttgacttcctcccacgtcccaaagatatacaggtgaagtttactggcatgtcagtgagtgtgggtttgtaagtgcaccctgcgatgatatgcatcttgtccagggctggttcccatcttgtg

SEQ ID NO: 298244 - DNA, 1927 bp, Homo sapiens
gacttgcaaaaccacagataatgttcagcccagcacagtaggggtcaatttggtccacttgctcagtgacaaaaagaaaaaaaaagtgggctgtcactaaagattttgactcacaagagaggggctggtctggaggtgggaggagggagtgacgagtcaaggaggagacagggacgcaggagggtgcaaggaagtgtcttaactgagacgggggtaaggcaagagagggtggaggaaattctgcaggagacaggcttcctccagggtctggagaacccagaggcagctcctcctgagtgctgggaaggactctgggcatcttcagcccttcttactctctgaggctcaagccagaaattcaggctgcttgcagagtgggtgacagagccacggagctggtgtccctgggaccctctgcccgtcttctctccactccccagcatggaggaaggtggtgattttgacaactactatggggcagacaaccagtctgagtgtgagtacacagactggaaatcctcgggggccctcatccctgccatctacatgttggtcttcctcctgggcaccacgggaaacggtctggtgctctggaccgtgtttcggagcagccgggagaagaggcgctcagctgatatcttcattgctagcctggcggtggctgacctgaccttcgtggtgacgctgcccctgtgggctacctacacgtaccgggactatgactggccctttgggaccttcttctgcaagctcagcagctacctcatcttcgtcaacatgtacgccagcgtcttctgcctcaccggcctcagcttcgaccgctacctggccatcgtgaggccagtggccaatgctcggctgaggctgcgggtcagcggggccgtggccacggcagttctttgggtgctggccgccctcctggccatgcctgtcatggtgttacgcaccaccggggacttggagaacaccactaaggtgcagtgctacatggactactccatggtggccactgtgagctcagagtgggcctgggaggtgggccttggggtctcgtccaccaccgtgggctttgtggtgcccttcaccatcatgctgacctgttacttcttcatcgcccaaaccatcgctggccacttccgcaaggaacgcatcgagggcctgcggaagcggcgccggctgctcagcatcatcgtggtgctggtggtgacctttgccctgtgctggatgccctaccacctggtgaagacgctgtacatgctgggcagcctgctgcactggccctgtgactttgacctcttcctcatgaacatcttcccctactgcacctgcatcagctacgtcaacagctgcctcaaccccttcctctatgcctttttcgacccccgcttccgccaggcctgcacctccatgctctgctgtggccagagcaggtgcgcaggcacctcccacagcagcagtggggagaagtcagccagctactcttcggggcacagccaggggcccggccccaacatgggcaagggtggagaacagatgcacgagaaatccatcccctacagccaggagacccttgtggttgactagggctgggagcagagagaagcctggcgccctcggccctccccggcctttgcccttgctttctgaaaatcagacctcctctgcccagagctgtcctcaaagcatccagtgaacactggaagaggcttctagaagggaagaaattgtccctctgaggccgccgtgggtgacctgcagagacttcctgcctggaactcatctgtgaactgggacagaagcagaggaggctgcctgctgtgatacccccttacctcccccagtgccttcttcagaatatctgcactgtcttctgatcctgttagtcactgtggttcatcaaataaaactgtttgtgcaaaaaaaatgt

SEQ ID NO: 298245 - DNA, 3864 bp, Homo sapiens
gacttgcaaaaccacagataatgttcagcccagcacagtaggggtcaatttggtccacttgctcagtgacaaaaagaaaaaaaaagtgggctgtcactaaagattttgactcacaagagaggggctggtctggaggtgggaggagggagtgacgagtcaaggaggagacagggacgcaggagggtgcaaggaagtgtcttaactgagacgggggtaaggcaagagagggtggaggaaattctgcaggagacaggcttcctccagggtctggagaacccagaggcagctcctcctgagtgctgggaaggactctgggcatcttcagcccttcttactctctgaggctcaagccagaaattcaggctgcttgcagagtgggtgacagagccacggagctggtgtccctgggaccctctgcccgtcttctctccactccccagcatggaggaaggtggtgattttgacaactactatggggcagacaaccagtctgagtgtgagtacacagactggaaatcctcgggggccctcatccctgccatctacatgttggtcttcctcctgggcaccacgggaaacggtctggtgctctggaccgtgtttcggagcagccgggagaagaggcgctcagctgatatcttcattgctagcctggcggtggctgacctgaccttcgtggtgacgctgcccctgtgggctacctacacgtaccgggactatgactggccctttgggaccttcttctgcaagctcagcagctacctcatcttcgtcaacatgtacgccagcgtcttctgcctcaccggcctcagcttcgaccgctacctggccatcgtgaggccagtggccaatgctcggctgaggctgcgggtcagcggggccgtggccacggcagttctttgggtgctggccgccctcctggccatgcctgtcatggtgttacgcaccaccggggacttggagaacaccactaaggtgcagtgctacatggactactccatggtggccactgtgagctcagagtgggcctgggaggtgggccttggggtctcgtccaccaccgtgggctttgtggtgcccttcaccatcatgctgacctgttacttcttcatcgcccaaaccatcgctggccacttccgcaaggaacgcatcgagggcctgcggaagcggcgccggctgctcagcatcatcgtggtgctggtggtgacctttgccctgtgctggatgccctaccacctggtgaagacgctgtacatgctgggcagcctgctgcactggccctgtgactttgacctcttcctcatgaacatcttcccctactgcacctgcatcagctacgtcaacagctgcctcaaccccttcctctatgcctttttcgacccccgcttccgccaggcctgcacctccatgctctgctgtggccagagcaggtgcgcaggcacctcccacagcagcagtggggagaagtcagccagctactcttcggggcacagccaggggcccggccccaacatgggcaagggtggagaacagatgcacgagaaatccatcccctacagccaggagacccttgtggttgactagggctgggagcagagagaagcctggcgccctcggccctccccggcctttgcccttgctttctgaaaatcaggtagtgtggctactccttgtcctatgcacatcctttaactgtcccctgattctgccccgccctgtcctcctctactgctttattctttctcagaggtttgtggtttaggggaaagagactgggctctacagacctgaccctgcacaagccatttaatctcactcagcctcagtttctccattggtatgaaatgggggaaagtcatattgatcctaaaatgttgaagcctgagtctggacgcagtaaaagcttgtttccctctgctgctttcttagatctgcaatcgtctttcctcccttctttccttgtagtttttcccccaccactctctgcagctgccgctccttatccctgccttctggcaccaatcccctcctacagctcgtccccctccctccatccatccttctcccctgtctactttcttgttctgaagggctactaagggttaaggatcccaaagcttgcagagactgaccctgtttaagctttctatcctgttttctgagtgtgaggcagggaatgggctggggccgggggtgggctgtgtgtcagcagataattagtgctccagcccttagatctgggagctccagagcttgccctaaaattggatcacttccctgtcattttgggcattggggctagtgtgattcctgcagttcccccatggcaccatgacactgactagatatgctttctccaaattgtccgcagaccctttcatccttcctctattttctatgagaattggaaggcagcagggctgatgaatggatgtactccttggtttcattatgtgagtggggagttgggaagggcaactagagagagaggatggaggggtgtctgcatttagtccagacactgcttggctcgctccccgagtcctcctgtttctgacttcctgcataactgtgagctgaagggtttcctcatctccccatcttaccccatcatactgatttctttcttgggcactggtgctacttggtgccaagaatcatgttgtttgggatggagatgcctgcctcttgtctgtgtgtgttgtacttatatgtctatatggatgagcctggcatgaacagcagtgtgcctgggtcatttggacaaatctcctcccaccccccaatccactgcaactctgctgttcatacattacccttggcagggggtggtggggggcagggacacactgaggcaatgaaaaatgtagaataaaaatgagtccaccccctactggatttgggggctccaacggctggtccgtgctttaggagcgaagttaatgtttgcaccaggcttcctgtagggagatccctccccaaagcagctggcgccaaggcttgggggcgtcctactgagctgggttcctgctccttcttgggctccatgaaggaagtaagaggctagttgagagcctcccttggcccctttccagtgcctccccgcctggcttcaaatttatgagcattgccctcatcgtcctttcttgttccagggtcagtggccctcttcctaaggaggcctcctgcttgccatgggccaaaaggcacggggtgggttttttctctccctaccctcaggattggacctcttggcttctgctggattggggatctgggaatagggactggagcaagtgtgcagatagcatgatgtctacactgccagagagaccgtgaggatgaaattaatagtggggcctttgtgagctagaggctgggagtgtctattccgggttttgttcttggaggactatgaaagtgaaggacaagacatgagcgatggagataagaaaagcccagcttgatgtgaatggacatcttgaccctccctggaatgacgccagctctgggggcagagggaggaggagaggggaaggggctcctcacagcctagtctccccatcttaagatagcatctttcacagagtcacctcctctgcccagagctgtcctcaaagcatccagtgaacactggaagaggcttctagaagggaagaaattgtccctctgaggccgccgtgggtgacctgcagagacttcctgcctggaactcatctgtgaactgggacagaagcagaggaggctgcctgctgtgatacccccttacctcccccagtgccttcttcagaatatctgcactgtcttctgatcctgttagtcactgtggttcatcaaataaaactgtttgtgcaaaaaaaatgt

SEQ ID NO: 298246 - DNA, 2758 bp, Homo sapiens
gacttgcaaaaccacagataatgttcagcccagcacagtaggggtcaatttggtccacttgctcagtgacaaaaagaaaaaaaaagtgggctgtcactaaagattttgactcacaagagaggggctggtctggaggtgggaggagggagtgacgagtcaaggaggagacagggacgcaggagggtgcaaggaagtgtcttaactgagacgggggtaaggcaagagagggtggaggaaattctgcaggagacaggcttcctccagggtctggagaacccagaggcagctcctcctgagtgctgggaaggactctgggcatcttcagcccttcttactctctgaggctcaagccagaaattcaggctgcttgcagagtgggtgacacagccaggggcccggccccaacatgggcaagggtggagaacagatgcacgagaaatccatcccctacagccaggagacccttgtggttgactagggctgggagcagagagaagcctggcgccctcggccctccccggcctttgcccttgctttctgaaaatcaggtagtgtggctactccttgtcctatgcacatcctttaactgtcccctgattctgccccgccctgtcctcctctactgctttattctttctcagaggtttgtggtttaggggaaagagactgggctctacagacctgaccctgcacaagccatttaatctcactcagcctcagtttctccattggtatgaaatgggggaaagtcatattgatcctaaaatgttgaagcctgagtctggacgcagtaaaagcttgtttccctctgctgctttcttagatctgcaatcgtctttcctcccttctttccttgtagtttttcccccaccactctctgcagctgccgctccttatccctgccttctggcaccaatcccctcctacagctcgtccccctccctccatccatccttctcccctgtctactttcttgttctgaagggctactaagggttaaggatcccaaagcttgcagagactgaccctgtttaagctttctatcctgttttctgagtgtgaggcagggaatgggctggggccgggggtgggctgtgtgtcagcagataattagtgctccagcccttagatctgggagctccagagcttgccctaaaattggatcacttccctgtcattttgggcattggggctagtgtgattcctgcagttcccccatggcaccatgacactgactagatatgctttctccaaattgtccgcagaccctttcatccttcctctattttctatgagaattggaaggcagcagggctgatgaatggatgtactccttggtttcattatgtgagtggggagttgggaagggcaactagagagagaggatggaggggtgtctgcatttagtccagacactgcttggctcgctccccgagtcctcctgtttctgacttcctgcataactgtgagctgaagggtttcctcatctccccatcttaccccatcatactgatttctttcttgggcactggtgctacttggtgccaagaatcatgttgtttgggatggagatgcctgcctcttgtctgtgtgtgttgtacttatatgtctatatggatgagcctggcatgaacagcagtgtgcctgggtcatttggacaaatctcctcccaccccccaatccactgcaactctgctgttcatacattacccttggcagggggtggtggggggcagggacacactgaggcaatgaaaaatgtagaataaaaatgagtccaccccctactggatttgggggctccaacggctggtccgtgctttaggagcgaagttaatgtttgcaccaggcttcctgtagggagatccctccccaaagcagctggcgccaaggcttgggggcgtcctactgagctgggttcctgctccttcttgggctccatgaaggaagtaagaggctagttgagagcctcccttggcccctttccagtgcctccccgcctggcttcaaatttatgagcattgccctcatcgtcctttcttgttccagggtcagtggccctcttcctaaggaggcctcctgcttgccatgggccaaaaggcacggggtgggttttttctctccctaccctcaggattggacctcttggcttctgctggattggggatctgggaatagggactggagcaagtgtgcagatagcatgatgtctacactgccagagagaccgtgaggatgaaattaatagtggggcctttgtgagctagaggctgggagtgtctattccgggttttgttcttggaggactatgaaagtgaaggacaagacatgagcgatggagataagaaaagcccagcttgatgtgaatggacatcttgaccctccctggaatgacgccagctctgggggcagagggaggaggagaggggaaggggctcctcacagcctagtctccccatcttaagatagcatctttcacagagtcacctcctctgcccagagctgtcctcaaagcatccagtgaacactggaagaggcttctagaagggaagaaattgtccctctgaggccgccgtgggtgacctgcagagacttcctgcctggaactcatctgtgaactgggacagaagcagaggaggctgcctgctgtgatacccccttacctcccccagtgccttcttcagaatatctgcactgtcttctgatcctgttagtcactgtggttcatcaaataaaactgtttgtgcaaaaaaaatgt

SEQ ID NO: 298247 - DNA, 3810 bp, Homo sapiens
gacttgcaaaaccacagataatgttcagcccagcacagtaggggtcaatttggtccacttgctcagtgacaaaaagaaaaaaaaagtgggctgtcactaaagattttgactcacaagagaggggctggtctggaggtgggaggagggagtgacgagtcaaggaggagacagggacgcaggagggtgcaaggaagtgtcttaactgagacgggggtaaggcaagagagggtggaggaaattctgcaggagacaggcttcctccagggtctggagaacccagaggcagctcctcctgagtgctgggaaggactctgggcatcttcagcccttcttactctctgaggctcaagccagaaattcaggctgcttgcagagtgggtgacagagccacggagctggtgtccctgggaccctctgcccgtcttctctccactccccagcatggaggaaggtggtgattttgacaactactatggggcagacaaccagtctgagtgtgagtacacagactggaaatcctcgggggccctcatccctgccatctacatgttggtcttcctcctgggcaccacgggaaacggtctggtgctctggaccgtgtttcggagcagccgggagaagaggcgctcagctgatatcttcattgctagcctggcggtggctgacctgaccttcgtggtgacgctgcccctgtgggctacctacacgtaccgggactatgactggccctttgggaccttcttctgcaagctcagcagctacctcatcttcgtcaacatgtacgccagcgtcttctgcctcaccggcctcagcttcgaccgctacctggccatcgtgaggccagtggccaatgctcggctgaggctgcgggtcagcggggccgtggccacggcagttctttgggtgctggccgccctcctggccatgcctgtcatggtgttacgcaccaccggggacttggagaacaccactaaggtgcagtgctacatggactactccatggtggccactgtgagctcagagtgggcctgggaggtgggccttggggtctcgtccaccaccgtgggctttgtggtgcccttcaccatcatgctgacctgttacttcttcatcgcccaaaccatcgctggccacttccgcaaggaacgcatcgagggcctgcggaagcggcgccggctgctcagcatcatcgtggtgctggtggtgacctttgccctgtgctggatgccctaccacctggtgaagacgctgtacatgctgggcagcctgctgcactggccctgtgactttgacctcttcctcatgaacatcttcccctactgcacctgcatcagctacgtcaacagctgcctcaaccccttcctctatgcctttttcgacccccgcttccgccaggcctgcacctccatgctctgctgtggccagagcaggtgcgcaggcacctcccacagcagcagtggggagaagtcagccagctactcttcggggcacagccaggggcccggccccaacatgggcaagggtggagaacagatgcacgagaaatccatcccctacagccaggagacccttgtggttgactagggctgggagcagagagaagcctggcgccctcggccctccccggcctttgcccttgctttctgaaaatcaggtagtgtggctactccttgtcctatgcacatcctttaactgtcccctgattctgccccgccctgtcctcctctactgctttattctttctcagaggtttgtggtttaggggaaagagactgggctctacagacctgaccctgcacaagccatttaatctcactcagcctcagtttctccattggtatgaaatgggggaaagtcatattgatcctaaaatgttgaagcctgagtctggacgcagtaaaagcttgtttccctctgctgctttcttagatctgcaatcgtctttcctcccttctttccttgtagtttttcccccaccactctctgcagctgccgctccttatccctgccttctggcaccaatcccctcctacagctcgtccccctccctccatccatccttctcccctgtctactttcttgttctgaagggctactaagggttaaggatcccaaagcttgcagagactgaccctgtttaagctttctatcctgttttctgagtgtgaggcagggaatgggctggggccgggggtgggctgtgtgtcagcagataattagtgctccagcccttagatctgggagctccagagcttgccctaaaattggatcacttccctgtcattttgggcattggggctagtgtgattcctgcagttcccccatggcaccatgacactgactagatatgctttctccaaattgtccgcagaccctttcatccttcctctattttctatgagaattggaaggcagcagggctgatgaatggatgtactccttggtttcattatgtgagtggggagttgggaagggcaactagagagagaggatggaggggtgtctgcatttagtccagacactgcttggctcgctccccgagtcctcctgtttctgacttcctgcataactgtgagctgaagggtttcctcatctccccatcttaccccatcatactgatttctttcttgggcactggtgctacttggtgccaagaatcatgttgtttgggatggagatgcctgcctcttgtctgtgtgtgttgtacttatatgtctatatggatgagcctggcatgaacagcagtgtgcctgggtcatttggacaaatctcctcccaccccccaatccactgcaactctgctgttcatacattacccttggcagggggtggtggggggcagggacacactgaggcaatgaaaaatgtagaataaaaatgagtccaccccctactggatttgggggctccaacggctggtccgtgctttaggagcgaagttaatgtttgcaccaggcttcctgtagggagatccctccccaaagcagctggcgccaaggcttgggggcgtcctactgagctgggttcctgctccttcttgggctccatgaaggaagtaagaggctagttgagagcctcccttggcccctttccagtgcctccccgcctggcttcaaatttatgagcattgccctcatcgtcctttcttgttccagggtcagtggccctcttcctaaggaggcctcctgcttgccatgggccaaaaggcacggggtgggttttttctctccctaccctcaggattggacctcttggcttctgctggattggggatctgggaatagggactggagcaagtgtgcagatagcatgatgtctacactgccagagagaccgtgaggatgaaattaatagtggggcctttgtgagctagaggctgggagtgtctattccgggttttgttcttggaggactatgaaagtgaaggacaagacatgagcgatggagataagctctgggggcagagggaggaggagaggggaaggggctcctcacagcctagtctccccatcttaagatagcatctttcacagagtcacctcctctgcccagagctgtcctcaaagcatccagtgaacactggaagaggcttctagaagggaagaaattgtccctctgaggccgccgtgggtgacctgcagagacttcctgcctggaactcatctgtgaactgggacagaagcagaggaggctgcctgctgtgatacccccttacctcccccagtgccttcttcagaatatctgcactgtcttctgatcctgttagtcactgtggttcatcaaataaaactgtttgtgcaaaaaaaatgt

SEQ ID NO: 298248 - DNA, 3779 bp, Homo sapiens
gacttgcaaaaccacagataatgttcagcccagcacagtaggggtcaatttggtccacttgctcagtgacaaaaagaaaaaaaaagtgggctgtcactaaagattttgactcacaagagaggggctggtctggaggtgggaggagggagtgacgagtcaaggaggagacagggacgcaggagggtgcaaggaagtgtcttaactgagacgggggtaaggcaagagagggtggaggaaattctgcaggagacaggcttcctccagggtctggagaacccagaggcagctcctcctgagtgctgggaaggactctgggcatcttcagcccttcttactctctgaggctcaagccagaaattcaggctgcttgcagagtgggtgacagagccacggagctggtgtccctgggaccctctgcccgtcttctctccactccccagcatggaggaaggtggtgattttgacaactactatggggcagacaaccagtctgagtgtgagtacacagactggaaatcctcgggggccctcatccctgccatctacatgttggtcttcctcctgggcaccacgggaaacggtctggtgctctggaccgtgtttcggagcagccgggagaagaggcgctcagctgatatcttcattgctagcctggcggtggctgacctgaccttcgtggtgacgctgcccctgtgggctacctacacgtaccgggactatgactggccctttgggaccttcttctgcaagctcagcagctacctcatcttcgtcaacatgtacgccagcgtcttctgcctcaccggcctcagcttcgaccgctacctggccatcgtgaggccagtggccaatgctcggctgaggctgcgggtcagcggggccgtggccacggcagttctttgggtgctggccgccctcctggccatgcctgtcatggtgttacgcaccaccggggacttggagaacaccactaaggtgcagtgctacatggactactccatggtggccactgtgagctcagagtgggcctgggaggtgggccttggggtctcgtccaccaccgtgggctttgtggtgcccttcaccatcatgctgacctgttacttcttcatcgcccaaaccatcgctggccacttccgcaaggaacgcatcgagggcctgcggaagcggcgccggctgctcagcatcatcgtggtgctggtggtgacctttgccctgtgctggatgccctaccacctggtgaagacgctgtacatgctgggcagcctgctgcactggccctgtgactttgacctcttcctcatgaacatcttcccctactgcacctgcatcagctacgtcaacagctgcctcaaccccttcctctatgcctttttcgacccccgcttccgccaggcctgcacctccatgctctgctgtggccagagcaggtgcgcaggcacctcccacagcagcagtggggagaagtcagccagctactcttcggggcacagccaggggcccggccccaacatgggcaagggtggagaacagatgcacgagaaatccatcccctacagccaggagacccttgtggttgactagggctgggagcagagagaagcctggcgccctcggccctccccggcctttgcccttgctttctgaaaatcaggtagtgtggctactccttgtcctatgcacatcctttaactgtcccctgattctgccccgccctgtcctcctctactgctttattctttctcagaggtttgtggtttaggggaaagagactgggctctacagacctgaccctgcacaagccatttaatctcactcagcctcagtttctccattggtatgaaatgggggaaagtcatattgatcctaaaatgttgaagcctgagtctggacgcagtaaaagcttgtttccctctgctgctttcttagatctgcaatcgtctttcctcccttctttccttgtagtttttcccccaccactctctgcagctgccgctccttatccctgccttctggcaccaatcccctcctacagctcgtccccctccctccatccatccttctcccctgtctactttcttgttctgaagggctactaagggttaaggatcccaaagcttgcagagactgaccctgtttaagctttctatcctgttttctgagtgtgaggcagggaatgggctggggccgggggtgggctgtgtgtcagcagataattagtgctccagcccttagatctgggagctccagagcttgccctaaaattggatcacttccctgtcattttgggcattggggctagtgtgattcctgcagttcccccatggcaccatgacactgactagatatgctttctccaaattgtccgcagaccctttcatccttcctctattttctatgagaattggaaggcagcagggctgatgaatggatgtactccttggtttcattatgtgagtggggagttgggaagggcaactagagagagaggatggaggggtgtctgcatttagtccagacactgcttggctcgctccccgagtcctcctgtttctgacttcctgcataactgtgagctgaagggtttcctcatctccccatcttaccccatcatactgatttctttcttgggcactggtgctacttggtgccaagaatcatgttgtttgggatggagatgcctgcctcttgtctgtgtgtgttgtacttatatgtctatatggatgagcctggcatgaacagcagtgtgcctgggtcatttggacaaatctcctcccaccccccaatccactgcaactctgctgttcatacattacccttggcagggggtggtggggggcagggacacactgaggcaatgaaaaatgtagaataaaaatgagtccaccccctactggatttgggggctccaacggctggtccgtgctttaggagcgaagttaatgtttgcaccaggcttcctgtagggagatccctccccaaagcagctggcgccaaggcttgggggcgtcctactgagctgggttcctgctccttcttgggctccatgaaggaagtaagaggctagttgagagcctcccttggcccctttccagtgcctccccgcctggcttcaaatttatgagcattgccctcatcgtcctttcttgttccagggtcagtggccctcttcctaaggaggcctcctgcttgccatgggccaaaaggcacggggtgggttttttctctccctaccctcaggattggacctcttggcttctgctggattggggatctgggaatagggactggagcaagtgtgcagatagcatgatgtctacactgccagagagaccgtgaggatgaaattaatagtggggcctttgtgagctagaggctgggagtgtctattccgggttttgttcttggaggactatgaaagtgaaggacaagacatgagcgatggagataagaaaagcccagcttgatgtgaatggacatcttgaccctccctggaatgacgccagacctcctctgcccagagctgtcctcaaagcatccagtgaacactggaagaggcttctagaagggaagaaattgtccctctgaggccgccgtgggtgacctgcagagacttcctgcctggaactcatctgtgaactgggacagaagcagaggaggctgcctgctgtgatacccccttacctcccccagtgccttcttcagaatatctgcactgtcttctgatcctgttagtcactgtggttcatcaaataaaactgtttgtgcaaaaaaaatgt

SEQ ID NO: 298249 - DNA, 2597 bp, Homo sapiens
gacttgcaaaaccacagataatgttcagcccagcacagtaggggtcaatttggtccacttgctcagtgacaaaaagaaaaaaaaagtgggctgtcactaaagattttgactcacaagagaggggctggtctggaggtgggaggagggagtgacgagtcaaggaggagacagggacgcaggagggtgcaaggaagtgtcttaactgagacgggggtaaggcaagagagggtggaggaaattctgcaggagacaggcttcctccagggtctggagaacccagaggcagctcctcctgagtgctgggaaggactctgggcatcttcagcccttcttactctctgaggctcaagccagaaattcaggctgcttgcagagtgggtgacagagccacggagctggtgtccctgggaccctctgcccgtcttctctccactccccagcatggaggaaggtggtgattttgacaactactatggggcagacaaccagtctgagtgtgagtacacagactggaaatcctcgggggccctcatccctgccatctacatgttggtcttcctcctgggcaccacgggaaacggtctggtgctctggaccgtgtttcggagcagccgggagaagaggcgctcagctgatatcttcattgctagcctggcggtggctgacctgaccttcgtggtgacgctgcccctgtgggctacctacacgtaccgggactatgactggccctttgggaccttcttctgcaagctcagcagctacctcatcttcgtcaacatgtacgccagcgtcttctgcctcaccggcctcagcttcgaccgctacctggccatcgtgaggccagtggccaatgctcggctgaggctgcgggtcagcggggccgtggccacggcagttctttgggtgctggccgccctcctggccatgcctgtcatggtgttacgcaccaccggggacttggagaacaccactaaggtgcagtgctacatggactactccatggtggccactgtgagctcagagtgggcctgggaggtgggccttggggtctcgtccaccaccgtgggctttgtggtgcccttcaccatcatgctgacctgttacttcttcatcgcccaaaccatcgctggccacttccgcaaggaacgcatcgagggcctgcggaagcggcgccggctgctcagcatcatcgtggtgctggtggtgacctttgccctgtgctggatgccctaccacctggtgaagacgctgtacatgctgggcagcctgctgcactggccctgtgactttgacctcttcctcatgaacatcttcccctactgcacctgcatcagctacgtcaacagctgcctcaaccccttcctctatgcctttttcgacccccgcttccgccaggcctgcacctccatgctctgctgtggccagagcaggtgcgcaggcacctcccacagcagcagtggggagaagtcagccagctactcttcggggcacagccaggggcccggccccaacatgggcaagggtggagaacagatgcacgagaaatccatcccctacagccaggagacccttgtggttgactagggctgggagcagagagaagcctggcgccctcggccctccccggcctttgcccttgctttctgaaaatcaggtagtgtggctactccttgtcctatgcacatcctttaactgtcccctgattctgccccgccctgtcctcctctactgctttattctttctcagaggtttgtggtttaggggaaagagactgggctctacagacctgaccctgcacaagccatttaatctcactcagcctcagtttctccattggtatgaaatgggggaaagtcatattgatcctaaaatgttgaagcctgagtctggacgcagtaaaagcttgtttccctctgctgctttcttagatctgcaatcgtctttcctcccttctttccttgtagtttttcccccaccactctctgcagctgccgctccttatccctgccttctggcaccaatcccctcctacagctcgtccccctccctccatccatccttctcccctgtctactttcttgttctgaagggctactaagggttaaggatcccaaagcttgcagagactgaccctgtttaagctttctatcctgttttctgagtgtgaggcagggaatgggctggggccgggggtgggctgtgtgtcagcagataattagtgctccagcccttagatctgggagctccagagcttgccctaaaattggatcacttccctgtcattttgggcattggggctagtgtgattcctgcagttcccccatggcaccatgacactgactagatatgctttctccaaattgtccgcagaccctttcatccttcctctattttctatgagaattggaaggcagcagggctgatgaatggatgtactccttggtttcattatgtgagtggggagttgggaagggcaactagagagagaggatggaggggtgattgtataaaaacttatggatttactggacagacatgtagaagatggaaatgtaacagtactgcatgcatcactaagtgccctttaaaacctggc

SEQ ID NO: 298250 - DNA, 761 bp, Homo sapiens
aagcttgcggccgccttcctgctggggatcctgtttgccctcgtctgccggagcccgcgcgcccagccgcccgacttcgccgccgcctggagccggctggccgcgacctcagccgcccgccgcccgccggggagtcctgtgtatggaaactcacatgagtcagctcagtctagaagggtagtaatttctcataatatggataaagctctgaaagaagtgttcgactacagttatagagattacattctgtcctggtatggaaacctcagcagagatgagggacaactttaccatctgctcttggaagacttttgggaaattgccagacagctgcaccacagactgagtcacgtggatgtggttaaagttgtctgcaatgatgttgtgaggactttactcactcatttctgtgacctgaaagctgccaatgccagacatgaagaacagccaagaccttttgtgttgcacgcatgcttgaggaactcagatgatgaagtaagatttctacaaacgtgttctcgggttctggtgttttgtctcctcccctcaaaggatgtgcagtctctcagcttacgtataatgcttgcagaaattctcacaacaaaagtcttgaagccggtagtggagttactgagtaatccagattacattaaccaaatgctgcttgcccagctggcgtacagagagcaaatgaatgagcatcacaagagagcctacacctatgccccctcttacgaggacttcatcaagctcattaacag

SEQ ID NO: 298251 - DNA, 649 bp, Homo sapiens
aagcttgcggccgccttcctgctggggatcctgtttgccctcgtctgccggagcccgcgcgcccagccgcccgacttcgccgccgcctggagccggctggccgcgacctcagccgcccgccgcccgccggggagtcctgtgtatggaaactcacatgagtcagctcagtctagaagggtagtaatttctcataatatggataaagctctgaaagaagtgttcgactacagttatagagattacattctgtcctggtatggaaacctcagcagagatgagggacaactttaccatctgctcttggaagacttttgggaaattgccagacagctgcaccacagactgagtcacgtggatgtggttaaagttgtctgcaatgatgttgtgaggactttactcactcatttctgtgacctgaaagctgccaatgccagacatgaagaacagccaagaccttttgtgttgcacgcatgcttgaggaactcagatgatgaatcttgaagccggtagtggagttactgagtaatccagattacattaaccaaatgctgcttgcccagctggcgtacagagagcaaatgaatgagcatcacaagagagcctacacctatgccccctcttacgaggacttcatcaagctcattaacag

SEQ ID NO: 298252 - DNA, 573 bp, Homo sapiens
acctgtactgccgaagactattcctcggcgttcctaaaggctacttcctgctagccaaagcacatttttaaaaagtgagagtcatggttcataatccatatttggcaaaaagcacaggcagtgccaagttgaatttgggtaagcagtttggcataagctatttcaacaatgaaatggccgatgtgatgatcctcagggaatacaaaaagcctcctagccattttatctgaaggctgccaatgccagacatgaagaacagccaagaccttttgtgttgcacgcatgcttgaggaactcagatgatgaagtaagatttctacaaacgtgttctcgggttctggtgttttgtctcctcccctcaaaggatgtgcagtctctcagcttacgtataatgcttgcagaaattctcacaacaaaagtcttgaagccggtagtggagttactgagtaatccagattacattaaccaaatgctgcttgcccagctggcgtacagagagcaaatgaatgagcatcacaagagagcctacacctatgccccctcttacgaggacttcatcaagctcattaacag

SEQ ID NO: 298253 - DNA, 1870 bp, Homo sapiens
cgcgagagcgccgggcggcggcgggaggaggcgcaggcgcgctgctcgcccgtctgcagccccgagccgagcgccgcgtctcgggagttgatggcagcaccactgtgcggccgcccggccgagcgcggagcgcagccactcgccgctgcccagggagcgcccaagatgtggggggaccggggcggcagcggccgtagcagcgccagggacgggggcacgcagcagcctccgctcgcccgcctgtcctgacctgcctcgcttgcccccaaagaatgtcagccaagtccaaggggaacccctcctcgtcctgtccagccgagggaccgccggcagcctccaaaaccaaggtgaaggaacagatcaagatcatcgtggaggatttggaattagtcctgggcgacctgaaggacgtggccaaggaacttaaggagatgaagtcccactctgttgcccaggctagagtgcaatggcacaatctgggctcactgcaacctctgcctcccaggttcaagctattctcctgcctcagcctgcctcagtgcgccactacgcctgggtggttgaccagattgacaccctgacctctgacctacagctggaggatgagatgactgacagctccaaaacggacacgctgaatagtagctcaagtggcacaacagcctccagcctagagaagatcaaagtgcaggctaatgcaccgcttattaaacccccagcacacccatctgctatcctcacggtcctgagaaagccaaaccctccaccacctcctccaaggttgacacctgtgaagtgtgaagaccccaaaagggtggttccaactgccaatcctgtaaaaaccaatggcacccttctacgaaatggaggcttaccaggtggacctaacaaaattccaaatggagatatctgctgcatacccaacagtaacttggacaaggctccagtccagcttctgatgcatagacctgaaaaagacagatgtccccaggcagggcctcgagaacgagttcggtttaatgaaaaagtacagtaccatggctattgtcctgactgtgatacccggtataacataaaaaacagggaggtccacttacacagtgaacctgtccacccaccgggaaagattcctcaccaaggccctcccctccctcctacaccccatctccctcctttcccactagaaaatgggggaatgggaataagccacagtaacagcttcccccctatcagacctgcaactgtgcctcctcccactgcaccaaaaccacagaagacgatcttgaggaagtcaaccactacaaccgtgtgatgtatgccattaaaaaaattgtttttttaattttctatattataaacataaaataagtaatgagcactttctactcaagcaataaaaagcccaaatatattaatcctgcattcagcaaagtggcataaaaatcacctggtaagtatgcagcacattgcttatatcctgggtatgcattattttaaatgttgtatcattaaaaacctcagaatgatgaaaaatatgaatgatgcattgtttttgcaattgacctatgacaaactgtgaacctgcagatttcacctattttgatttactataagagctgggatttgattcattttatttatgcctaagtcatctatgcattaacatgtcatattcttaactttgatctaatgctttttactaggaaattttaatactgaaggactattttattatttttttctaaagatgtttgtcactagtttttcattattaaatgctgaggccaataccaagaagtttattttctatattatacaattatgaattacatgctcagctatatatgtaataaaatactttggtctgtgg

SEQ ID NO: 298254 - DNA, 729 bp, Homo sapiens
cgcgagagcgccgggcggcggcgggaggaggcgcaggcgcgctgctcgcccgtctgcagccccgagccgagcgccgcgtctcgggagttgatggcagcaccactgtgcggccgcccggccgagcgcggagcgcagccactcgccgctgcccagggagcgcccaagatgtggggggaccggggcggcagcggccgtagcagcgccagggacgggggcacgcagcagcctccgctcgcccgcctgtcctgacctgcctcgcttgcccccaaagaatgtcagccaagtccaaggggaacccctcctcgtcctgtccagccgagggaccgccggcagcctccaaaaccaaggtgaaggaacagatcaagatcatcgtggaggatttggaattagtcctgggcgacctgaaggacgtggccaaggaacttaaggaggtgctgctgttttttcaaacgaaggaaaaggaaaaccatacagcgccacaaatgactctggacacagacagatcctggggagttacttacatgttcatctgctgtcttgtgattaaaatcatctctgtagtgaccacgtatattttcaaggactcactcttagaaacaaaaatgtcatactttcatacttcattttgtggttgtcttacattctttttctttttttttttttctctaatttaacctttatggaagctttaaagttttgtcaaaacatgagtgctttgcccatcagtga

SEQ ID NO: 298255 - DNA, 594 bp, Homo sapiens
cgcgagagcgccgggcggcggcgggaggaggcgcaggcgcgctgctcgcccgtctgcagccccgagccgagcgccgcgtctcgggagttgatggcagcaccactgtgcggccgcccggccgagcgcggagcgcagccactcgccgctgcccagggagcgcccaagatgtggggggaccggggcggcagcggccgtagcagcgccagggacgggggcacgcagcagcctccgctcgcccgcctgtcctgacctgcctcgcttgcccccaaagaatgtcagccaagtccaaggggaacccctcctcgtcctgtccagccgagggaccgccggcagcctccaaaaccaaggtgaaggaacagatcaagatcatcgtggaggatttggaattagtcctgggcgacctgaaggacgtggccaaggaacttaaggagagtcccactctgttgcccactgcactccagcccagatgacagagcaagaccttcagaagttgtgtatctaaacatacctaaacatataaaagacacagtgacaatatggtataaccttgtgggaccaccattgtataatatacgtagttccttgttaatggaa

SEQ ID NO: 298256 - DNA, 1817 bp, Homo sapiens
cgcgagagcgccgggcggcggcgggaggaggcgcaggcgcgctgctcgcccgtctgcagccccgagccgagcgccgcgtctcgggagttgatggcagcaccactgtgcggccgcccggccgagcgcggagcgcagccactcgccgctgcccagggagcgcccaagatgtggggggaccggggcggcagcggccgtagcagcgccagggacgggggcacgcagcagcctccgctcgcccgcctgtcctgacctgcctcgcttgcccccaaagaatgtcagccaagtccaaggggaacccctcctcgtcctgtccagccgagggaccgccggcagcctccaaaaccaaggtgaaggaacagatcaagatcatcgtggaggatttggaattagtcctgggcgacctgaaggacgtggccaaggaacttaaggaggtggttgaccagattgacaccctgacctctgacctacagctggaggatgagatgactgacagctccaaaacggacacgctgaatagtagctcaagtggcacaacagcctccagcctagagaagatcaaagtgcaggctaatgcaccgcttattaaacccccagcacacccatctgctatcctcacggtcctgagaaagccaaaccctccaccacctcctccaaggttgacacctgtgaagtgtgaagaccccaaaagggtggttccaactgccaatcctgtaaaaaccaatggcacccttctacgaaatggaggcttaccaggtggacctaacaaaattccaaatggagatatctgctgcatacccaacagtaacttggacaaggctccagtccagcttctgatgcatagacctgaaaaagacagatgtccccaggcagggcctcgagaacgagttcggtttaatgaaaaagtacagtaccatggctattgtcctgactgtgatacccggtataacataaaaaacagggaggtccacttacacagtgaacctgtccacccaccgggaaagattcctcaccaaggccctcccctccctcctacaccccatctccctcctttcccactagaaaatgggggaatgggaataagccacagtaacagcttcccccctatcagacctgcaactgtgcctcctcccactgcaccaaaaccacagaagacgatcttgaggaagtcaaccactacaaccgtgtgatgtatgccattaaaaaaattgtttttttaattttctatattataaacataaaataagtaatgagcactttctactcaagcaataaaaagcccaaatatattaatcctgcattcagcaaagtggcataaaaatcacctggtaagtatgcagcacattgcttatatcctgggtatgcattattttaaatgttgtatcattaaaaacctcagaatgatgaaaaatatgaatgatgcattgtttttgcaattgacctatgacaaactgtgaacctgcagatttcacctattttgatttactataagagctgggatttgattcattttatttatgcctaagtcatctatgcattaacatgtcatattcttaactttgatctaatgctttttactaggaaattttaatactgaaggactattttattatttttttctaaagatgtttgtcactagtttttcattattaaatgctgaggccaataccaagaagtttattttctatattatacaattatgaattacatgctcagctatatatgtaataaaatactttggtctgtggaaatattgttaaatcaataaacaatagtaaataatgacaaaagcaaatgttcctcagaattaaaatgaagta

SEQ ID NO: 298257 - DNA, 1566 bp, Homo sapiens
ggaaacagtgctgcaggcatacagtgacaacaggacatcaggaaatgcccaagaagtttgttaggtgctgtgtcatgaatcaagtcttcattttaatgtgttctaattgttgtaaaacaagagggaatggtatttggaatttagctatatttatcttctcaatcaaattctacttcagaggtggttgaccagattgacaccctgacctctgacctacagctggaggatgagatgactgacagctccaaaacggacacgctgaatagtagctcaagtggcacaacagcctccagcctagagaagatcaaagtgcaggctaatgcaccgcttattaaacccccagcacacccatctgctatcctcacggtcctgagaaagccaaaccctccaccacctcctccaaggttgacacctgtgaagtgtgaagaccccaaaagggtggttccaactgccaatcctgtaaaaaccaatggcacccttctacgaaatggaggcttaccaggtggacctaacaaaattccaaatggagatatctgctgcatacccaacagtaacttggacaaggctccagtccagcttctgatgcatagacctgaaaaagacagatgtccccaggcagggcctcgagaacgagttcggtttaatgaaaaagtacagtaccatggctattgtcctgactgtgatacccggtataacataaaaaacagggaggtccacttacacagtgaacctgtccacccaccgggaaagattcctcaccaaggccctcccctccctcctacaccccatctccctcctttcccactagaaaatgggggaatgggaataagccacagtaacagcttcccccctatcagacctgcaactgtgcctcctcccactgcaccaaaaccacagaagacgatcttgaggaagtcaaccactacaaccgtgtgatgtatgccattaaaaaaattgtttttttaattttctatattataaacataaaataagtaatgagcactttctactcaagcaataaaaagcccaaatatattaatcctgcattcagcaaagtggcataaaaatcacctggtaagtatgcagcacattgcttatatcctgggtatgcattattttaaatgttgtatcattaaaaacctcagaatgatgaaaaatatgaatgatgcattgtttttgcaattgacctatgacaaactgtgaacctgcagatttcacctattttgatttactataagagctgggatttgattcattttatttatgcctaagtcatctatgcattaacatgtcatattcttaactttgatctaatgctttttactaggaaattttaatactgaaggactattttattatttttttctaaagatgtttgtcactagtttttcattattaaatgctgaggccaataccaagaagtttattttctatattatacaattatgaattacatgctcagctatatatgtaataaaatactttggtctgtggaaatattgttaaatcaataaacaatagtaaataatgacaaaagcaaatgttcctcagaattaaaatgaagta

SEQ ID NO: 298258 - DNA, 766 bp, Homo sapiens
cggagcctgtcttccttctctcgtccaactctagcctccggccagctgagcctcgcttctctctagtgtgcctcctcccactgcaccaaaaccacagaagacgatcttgaggaagtcaaccactacaaccgtgtgatgtatgccattaaaaaaattgtttttttaattttctatattataaacataaaataagtaatgagcactttctactcaagcaataaaaagcccaaatatattaatcctgcattcagcaaagtggcataaaaatcacctggtaagtatgcagcacattgcttatatcctgggtatgcattattttaaatgttgtatcattaaaaacctcagaatgatgaaaaatatgaatgatgcattgtttttgcaattgacctatgacaaactgtgaacctgcagatttcacctattttgatttactataagagctgggatttgattcattttatttatgcctaagtcatctatgcattaacatgtcatattcttaactttgatctaatgctttttactaggaaattttaatactgaaggactattttattatttttttctaaagatgtttgtcactagtttttcattattaaatgctgaggccaataccaagaagtttattttctatattatacaattatgaattacatgctcagctatatatgtaataaaatactttggtctgtggaaatattgttaaatcaataaacaatagtaaataatgacaaaagcaaatgttcctcagaattaaaatgaagta

SEQ ID NO: 298259 - DNA, 3285 bp, Homo sapiens
ggcacgaggaaaacatgttcgagttctgggattgggtgggaggacgctactcgctgtggtcggccatcggactctccattgccctgcacgtgggttttgacaacttcgagcagctgctctcgggggctcactggatggaccagcacttccgcacgacgcccctggagaagaacgcccccgtcttgctggccctgctgggtatctggtacatcaactgctttgggtgtgagacacacgccatgctgccctatgaccagtacctgcaccgctttgctgcgtacttccagcagggcgacatggagtccaatgggaaatacatcaccaaatctggaacccgtgtggaccaccagacaggccccattgtgtggggggagccagggaccaatggccagcatgctttttaccagctcatccaccaaggcaccaagatgataccctgtgacttcctcatcccggtccagacccagcaccccatacggaagggtctgcatcacaagatcctcctggccaacttcttggcccagacagaggccctgatgaggggaaaatcgacggaggaggcccgaaaggagctccaggctgcgggcaagagtccagaggaccttgagaggctgctgccacataaggtctttgaaggaaatcgcccaaccaactctattgtgttcaccaagctcacaccattcatgcttggagccttggtcgccatgtatgagcacaagatcttcgttcagggcatcatctgggacatcaacagctttgaccagtggggagtggagctgggaaagcagctggctaagaaaatagagcctgagcttgatggcagtgctcaagtgacctctcacgacgcttctaccaatgggctcatcaacttcatcaagcagcagcgcgaggccagagtccaataaactcgtgctcatctgcagcctcctctgtgactcccctttctcttctcgtccctcctccccggagccggcactgcatgttcctggacaccacccagagcaccctctggttgtgggcttggaccacgagcccttagcagggaaggctggtctcccccagcctaacccccagcccctccatgtctatgctccctctgtgttagaattggctgaagtgtttttgtgcagctgacttttctgacccatgttcacgttgttcacatcccatgtagaaaaataaagatgccacggaggaggttgtaggctcagcctctgattttttttttcctgtgatggtgctttatgtagcagagggcaggagcgctcagcaggacgcaggctgtgcctctgcggacacttaacactaagtggtgagcgggtctagagtggagcaaggtgccctgagaagacaatagtggggtgggggcacaatcagtcaggacggcaacttggcctgtgtcaccaaatcccaagactgttttccactcctcacctctgtgactggagaaattggatactctgttcactcgatggttctaaaaactgcattgagattatgtttgtttcgggtgaattcctggacaagaccgaggatgactgccatctcctggcaagacgctcaggtagttcttttgctttaaaaggcagatattgaaaactggaattttttttttttgagtctcgctctgtcacccagactggagtgcagtggtgcaatctcggctcactgcaacctccgcctcccgggttcaagctattctcctgcctcagcctcccgagtagctgggattacacggcgcacaccaccatacccagctaatttttgtatttttagtagtgaaggggttttaccatgttgggcaggctggtcttgaactcctgacctcaggtgatctgcccgcctcagcctcccacagtgctgggattacaggtatgagccaccacgcccggcccattttttttttttttttgacaacttttttttttttttgagacagggtcttgttccattgcccagactggagtgcagtggcatgatcacagctcactgcagccagtaatcctcttgcctcagcctcccaagtagttgagactacaggttgtaccactatgccctgctagttttttcattttttgtagagagacgggtcttttttttttttgagacggagtctcgctctgtcgcccaagctggagtgcagtagcacggtctcagctcattgcaagctccgcctcccaggttcacgccattctcctgcctcagactcctgtgtagctgggagtacaggcacctgccaccatgcccggctaattttttatatatttttttagcagagacagtgtctcactgtgttagtcaggatggtctcgatctcctgacctcgtgatccgcccgcctcagcctcccaaagtgctgggattacaggcgtgagccaccgcgcccagcaaggcgggtcttgctgtgtttcccagactagactggtcttgaattccagggctcaagagatctcccacctcagcctcccacagtgctgggattacaggcgtgagccgccacacccagcctattcaaaatttttttttcttagagacagggtctttgttgcccaggctggactgcagtgatacaatcatagctgactgaagcctcaaattcccaggctaaggtgatcttctcacctcagccttccaagtagctgggtccgcagatgcatgccagtacacccagctcatttaaaaaaaaatttttttcttttttgagagtcttgctttgttgcccaggctggagtgcagtggtgtgatctcggctcactgcaagctccacctcccggcttcacgccattctcctgcctcagcctcccgagtagctgggactacaggtgcccgccaccacacccggctaattttttgtatttttagtagagacggggtttcaccgtgttagccaggatggtcttgatctcctgacctcatgatccgcctgctttggcctcccaaagtgctgggattacaggcgtgagtcaccgcgcccggctcattttaaaatttttgtagatcagtgtactgttgtaaaaaaaaaaaaataagaaaaataaaaaataaatttttgtagtgataggatcccactgaggccagagaatagggtctggagacaaaggagcattcacttcagcctctgactggtggcaggccaagtctttatttacatagggtgtaaccaaataggaaacctctaaagggtacttaaaccccagattttctacacagggcacttgcttgagcctcatcccgctttctggaatgtacttttgcttcaataaatctgtgcttttgttccttcatt

SEQ ID NO: 298260 - DNA, 3323 bp, Homo sapiens
ggcacgaggaaaacatgttcgagttctgggattgggtgggaggacgctactcgctgtggtcggccatcggactctccattgccctgcacgtgggttttgacaacttcgagcagctgctctcgggggctcactggatggaccagcacttccgcacgacgcccctggagaagaacgcccccgtcttgctggccctgctgggtatctggtacatcaactgctttgggtgtgagacacacgccatgctgccctatgaccagtacctgcaccgctttgctgcgtacttccagcagggcgacatggagtccaatgggaaatacatcaccaaatctggaacccgtgtggaccaccagacaggccccattgtgtggggggagccagggaccaatggccagcatgctttttaccagctcatccaccaaggcaccaagatgataccctgtgacttcctcatcccggtccagacccagcaccccatacggaagggtctgcatcacaagatcctcctggccaacttcttggcccagacagaggccctgatgaggggaaaatcgacggaggaggcccgaaaggagctccaggctgcgggcaagagtccagaggaccttgagaggctgctgccacataaggtctttgaaggaaatcgcccaaccaactctattgtgttcaccaagctcacaccattcatgcttggagccttggtcgccatgtatgagcacaagatcttcgttcagggcatcatctgggacatcaacagctttgaccagtggggagtggagctgggaaagcagctggctaagaaaatagagcctgagcttgatggcagtgctcaagtgacctctcacgacgcttctaccaatgggctcatcaacttcatcaagcagcagcgcgaggccagagtccaataaactcgtgctcatctgcagcctcctctgtgactcccctttctcttctcgtccctcctccccggagccggcactgcatgttcctggacaccacccagagcaccctctggttgtgggcttggaccacgagcccttagcagggaaggctggtctcccccagcctaacccccagcccctccatgtctatgctccctctgtgttagaattggctgaagtgtttttgtgcagctgacttttctgacccatgttcacgttgttcacatcccatgtagaaaaataaagatgccacggaggaggttgtaggctcagcctctgattttttttttcctgtgatggtgctttatgtagcagagggcaggagcgctcagcaggacgcaggctgtgcctctgcggacacttaacactaagtggtgagcgggtctagagtggagcaaggtgccctgagaagacaatagtggggtgggggcacaatcagtcaggacggcaacttggcctgtgtcaccaaatcccaagactgttttccactcctcacctctgtgactggagaaattggatactctgttcactcgatggttctaaaaactgcattgagattatgtttgtttcgggtgaattcctggacaagaccgaggatgactgccatctcctggcaagacgctcaggtagttcttttgctttaaaaggcagatattgaaaactggaattttttttttttgagtctcgctctgtcacccagactggagtgcagtggtgcaatctcggctcactgcaacctccgcctcccgggttcaagctattctcctgcctcagcctcccgagtagctgggattacacggcgcacaccaccatacccagctaatttttgtatttttagtagtgaaggggttttaccatgttgggcaggctggtcttgaactcctgacctcaggtgatctgcccgcctcagcctcccacagtgctgggattacaggtatgagccaccacgcccggcccattttttttttttttttgacaacttttttttttttttgagacagggtcttgttccattgcccagactggagtgcagtggcatgatcacagctcactgcagccagtaatcctcttgcctcagcctcccaagtagttgagactacaggttgtaccactatgccctgctagttttttcattttttgtagagagacgggtcttttttttttttgagacggagtctcgctctgtcgcccaagctggagtgcagtagcacggtctcagctcattgcaagctccgcctcccaggttcacgccattctcctgcctcagactcctgtgtagctgggagtacaggcacctgccaccatgcccggctaattttttatatatttttttagcagagacagtgtctcactgtgttagtcaggatggtctcgatctcctgacctcgtgatccgcccgcctcagcctcccaaagtgctgggattacaggcgtgagccaccgcgcccagcaaggcgggtcttgctgtgtttcccagactagactggtcttgaattccagggctcaagagatctcccacctcagcctcccacagtgctgggattacaggcgtgagccgccacacccagcctattcaaaatttttttttcttagagacagggtctttgttgcccaggctggactgcagtgatacaatcatagctgactgaagcctcaaattcccaggctaaggtgatcttctcacctcagccttccaagtagctgggtccgcagatgcatgccagtacacccagctcatttaaaaaaaaatttttttcttttttgagagtcttgctttgttgcccaggctggagtgcagtggtgtgatctcggctcactgcaagctccacctcccggcttcacgccattctcctgcctcagcctcccgagtagctgggactacaggtgcccgccaccacacccggctaattttttgtatttttagtagagacggggtttcaccgtgttagccaggatggtcttgatctcctgacctcatgatccgcctgctttggcctcccaaagtgctgggattacaggcgtgagtcaccgcgcccggctcattttaaaatttttgtagatcagtgtactgttgtaaaaaaaaaaaaatatagccgggtgtggtggcgggcacctgtagtcccagctactcgggaggctgaggcaggagaatggcgtgaagccgggaggtggagcttgcagtgagccgagatcacaccactgcactccagcctgggcaacaaagcaagactctcaaaaaagaaaaaaatttttttttaaatgagctgggtgtactggcatgcatctgcggacccagctacttggaaggctgaggtgagaagatcaccttagcctgggaatttgaggcttcggtcagctatgattgtatcactgcagtccgtcgacc

SEQ ID NO: 298261 - DNA, 3237 bp, Homo sapiens
ggcacgaggaaaacatgttcgagttctgggattgggtgggaggacgctactcgctgtggtcggccatcggactctccattgccctgcacgtgggttttgacaacttcgagcagctgctctcgggggctcactggatggaccagcacttccgcacgacgcccctggagaagaacgcccccgtcttgctggccctgctgggtatctggtacatcaactgctttgggtgtgagacacacgccatgctgccctatgaccagtacctgcaccgctttgctgcgtacttccagcagggcgacatggagtccaatgggaaatacatcaccaaatctggaacccgtgtggaccaccagacaggccccattgtgtggggggagccagggaccaatggccagcatgctttttaccagctcatccaccaaggcaccaagatgataccctgtgacttcctcatcccggtccagacccagcaccccatacggaagggtctgcatcacaagatcctcctggccaacttcttggcccagacagaggccctgatgaggggaaaatcgacggaggaggcccgaaaggagctccaggctgcgggcaagagtccagaggaccttgagaggctgctgccacataaggtctttgaaggaaatcgcccaaccaactctattgtgttcaccaagctcacaccattcatgcttggagccttggtcgccatgtatgagcacaagatcttcgttcagggcatcatctgggacatcaacagctttgaccagtggggagtggagctgggaaagcagctggctaagaaaatagagcctgagcttgatggcagtgctcaagtgacctctcacgacgcttctaccaatgggctcatcaacttcatcaagcagcagcgcgaggccagagtccaataaactcgtgctcatctgcagcctcctctgtgactcccctttctcttctcgtccctcctccccggagccggcactgcatgttcctggacaccacccagagcaccctctggttgtgggcttggaccacgagcccttagcagggaaggctggtctcccccagcctaacccccagcccctccatgtctatgctccctctgtgttagaattggctgaagtgtttttgtgcagctgacttttctgacccatgttcacgttgttcacatcccatgtagaaaaataaagatgccacggaggaggttgtaggctcagcctctgattttttttttcctgtgatggtgctttatgtagcagagggcaggagcgctcagcaggacgcaggctgtgcctctgcggacacttaacactaagtggtgagcgggtctagagtggagcaaggtgccctgagaagacaatagtggggtgggggcacaatcagtcaggacggcaacttggcctgtgtcaccaaatcccaagactgttttccactcctcacctctgtgactggagaaattggatactctgttcactcgatggttctaaaaactgcattgagattatgtttgtttcgggtgaattcctggacaagaccgaggatgactgccatctcctggcaagacgctcaggtagttcttttgctttaaaaggcagatattgaaaactggaattttttttttttgagtctcgctctgtcacccagactggagtgcagtggtgcaatctcggctcactgcaacctccgcctcccgggttcaagctattctcctgcctcagcctcccgagtagctgggattacacggcgcacaccaccatacccagctaatttttgtatttttagtagtgaaggggttttaccatgttgggcaggctggtcttgaactcctgacctcaggtgatctgcccgcctcagcctcccacagtgctgggattacaggtatgagccaccacgcccggcccattttttttttttttttgacaacttttttttttttttgagacagggtcttgttccattgcccagactggagtgcagtggcatgatcacagctcactgcagccagtaatcctcttgcctcagcctcccaagtagttgagactacaggttgtaccactatgccctgctagttttttcattttttgtagagagacgggtcttttttttttttgagacggagtctcgctctgtcgcccaagctggagtgcagtagcacggtctcagctcattgcaagctccgcctcccaggttcacgccattctcctgcctcagactcctgtgtagctgggagtacaggcacctgccaccatgcccggctaattttttatatatttttttagcagagacagtgtctcactgtgttagtcaggatggtctcgatctcctgacctcgtgatccgcccgcctcagcctcccaaagtgctgggattacaggcgtgagccaccgcgcccagcaaggcgggtcttgctgtgtttcccagactagactggtcttgaattccagggctcaagagatctcccacctcagcctcccacagtgctgggattacaggcgtgagccgccacacccagcctattcaaaatttttttttcttagagacagggtctttgttgcccaggctggactgcagtgatacaatcatagctgactgaagcctcaaattcccaggctaaggtgatcttctcacctcagccttccaagtagctgggtccgcagatgcatgccagtacacccagctcatttaaaaaaaaatttttttcttttttgagagtcttgctttgttgcccaggctggagtgcagtggtgtgatctcggctcactgcaagctccacctcccggcttcacgccattctcctgcctcagcctcccgagtagctgggactacaggtgcccgccaccacacccggctaattttttgtatttttagtagagacggggtttcaccgtgttagccaggatggtcttgatctcctgacctcatgatccgccccggctcattttaaaatttttgtagatcagtgtactgttgtaaaaaaaaaaaaataagaaaaataaaaaataaatttttgtagtgataggatcccactgaggccagagaatagggtctggagacaaaggagcattcacttcagcctctgactggtggcaggccaagtctttatttacatagggtgtaaccaaataggaaacctctaaagggtacttaaaccccagattttctacacagggcacttgcttgagcctcatcccgctttctggaatgtacttttgcttcaataaatctgtgcttttgttccttcatt

SEQ ID NO: 298262 - DNA, 3150 bp, Homo sapiens
ggcacgaggaaaacatgttcgagttctgggattgggtgggaggacgctactcgctgtggtcggccatcggactctccattgccctgcacgtgggttttgacaacttcgagcagctgctctcgggggctcactggatggaccagcacttccgcacgacgcccctggagaagaacgcccccgtcttgctggccctgctgggtatctggtacatcaactgctttgggtgtgagacacacgccatgctgccctatgaccagtacctgcaccgctttgctgcgtacttccagcagggcgacatggagtccaatgggaaatacatcaccaaatctggaacccgtgtggaccaccagacaggccccattgtgtggggggagccagggaccaatggccagcatgctttttaccagctcatccaccaaggcaccaagatgataccctgtgacttcctcatcccggtccagacccagcaccccatacggaagggtctgcatcacaagatcctcctggccaacttcttggcccagacagaggccctgatgaggggaaaatcgacggaggaggcccgaaaggagctccaggctgcgggcaagagtccagaggaccttgagaggctgctgccacataaggtctttgaaggaaatcgcccaaccaactctattgtgttcaccaagctcacaccattcatgcttggagccttggtcgccatgtatgagcacaagatcttcgttcagggcatcatctgggacatcaacagctttgaccagtggggagtggagctgggaaagcagctggctaagaaaatagagcctgagcttgatggcagtgctcaagtgacctctcacgacgcttctaccaatgggctcatcaacttcatcaagcagcagcgcgaggccagagtccaataaactcgtgctcatctgcagcctcctctgtgactcccctttctcttctcgtccctcctccccggagccggcactgcatgttcctggacaccacccagagcaccctctggttgtgggcttggaccacgagcccttagcagggaaggctggtctcccccagcctaacccccagcccctccatgtctatgctccctctgtgttagaattggctgaagtgtttttgtgcagctgacttttctgacccatgttcacgttgttcacatcccatgtagaaaaataaagatgccacggaggaggttgtaggctcagcctctgattttttttttcctgtgatggtgctttatgtagcagagggcaggagcgctcagcaggacgcaggctgtgcctctgcggacacttaacactaagtggtgagcgggtctagagtggagcaaggtgccctgagaagacaatagtggggtgggggcacaatcagtcaggacggcaacttggcctgtgtcaccaaatcccaagactgttttccactcctcacctctgtgactggagaaattggatactctgttcactcgatggttctaaaaactgcattgagattatgtttgtttcgggtgaattcctggacaagaccgaggatgactgccatctcctggcaagacgctcaggtagttcttttgctttaaaaggcagatattgaaaactggaattttttttttttgagtctcgctctgtcacccagactggagtgcagtggtgcaatctcggctcactgcaacctccgcctcccgggttcaagctattctcctgcctcagcctcccgagtagctgggattacacggcgcacaccaccatacccagctaatttttgtatttttagtagtgaaggggttttaccatgttgggcaggctggtcttgaactcctgacctcaggtgatctgcccgcctcagcctcccacagtgctgggattacaggtatgagccaccacgcccggcccattttttttttttttttgacaacttttttttttttttgagacagggtcttgttccattgcccagactggagtgcagtggcatgatcacagctcactgcagccagtaatcctcttgcctcagcctcccaagtagttgagactacaggttgtaccactatgccctgctagttttttcattttttgtagagagacgggtcttttttttttttgagacggagtctcgctctgtcgcccaagctggagtgcagtagcacggtctcagctcattgcaagctccgcctcccaggttcacgccattctcctgcctcagactcctgtgtagctgggagtacaggcacctgccaccatgcccggctaattttttatatatttttttagcagagacagtgtctcactgtgttagtcaggatggtctcgatctcctgacctcgtgatccgcccgcctcagcctcccaaagtgctgggattacaggcgtgagccaccgcgcccagcaaggcgggtcttgctgtgtttcccagactagactggtcttgaattccagggctcaagagatctcccacctcagcctcccacagtgctgggattacaggcgtgagccgccacacccagcctattcaaaatttttttttcttagagacagggtctttgttgcccaggctggactgcagtgatacaatcatagctgactgaagcctcaaattcccaggctaaggtgatcttctcacctcagccttccaagtagctgggtccgcagatgcatgccagtacacccagctcatttaaaaaaaaatttttttcttttttgagagtcttgctttgttgcccaggctggagtgcagtggtgtgatctcggctcactgcaagctccacctcccggcttcacgccattctcctgcctcagcctcccgagtagctgggactacaggtgcccgccaccaccccggctcattttaaaatttttgtagatcagtgtactgttgtaaaaaaaaaaaaataagaaaaataaaaaataaatttttgtagtgataggatcccactgaggccagagaatagggtctggagacaaaggagcattcacttcagcctctgactggtggcaggccaagtctttatttacatagggtgtaaccaaataggaaacctctaaagggtacttaaaccccagattttctacacagggcacttgcttgagcctcatcccgctttctggaatgtacttttgcttcaataaatctgtgcttttgttccttcatt

SEQ ID NO: 298263 - DNA, 1123 bp, Homo sapiens
  misc_feature (27)..(27): n is a, c, g, or t
aatggctattggatcgaggccgttggntgttaaattcggcagagggagtctactcaaaaatattaacttcaggataggacaggttctcagaggagtcagaccaggatgtgtcacgaccctgctgaactctggattccgtgcgacacatgacacctcaaatggtctgtaattccaagcctctgccagcgagcccaccccagcagctcttgcatgctagtataccagacctaagactgggtctatgatgttcctgacctctgaagatctctcacctcatgttgccccacaggtgctgggtattacaagtgtgtaggccgacaggtccaaccttattgccagaatgtcctatctatttgtgacatgactacgaggctgttctgtttggccatggctggactgcagtgatacaatcatagctgactgaagcctcaaattcccaggctaaggtgatcttctcacctcagccttccaagtagctgggtccgcagatgcatgccagtacacccagctcatttaaaaaaaaatttttttcttttttgagagtcttgctttgttgcccaggctggagtgcagtggtgtgatctcggctcactgcaagctccacctcccggcttcacgccattctcctgcctcagcctcccgagtagctgggactacaggtgcccgccaccacacccggctaattttttgtatttttagtagagacggggtttcaccgtgttagccaggatggtcttgatctcctgacctcatgatccgcctgctttggcctcccaaagtgctgggattacaggcgtgagtcaccgcgcccggctcattttaaaatttttgtagatcagtgtactgttgtaaaaaaaaaaaaataagaaaaataaaaaataaatttttgtagtgataggatcccactgaggccagagaatagggtctggagacaaaggagcattcacttcagcctctgactggtggcaggccaagtctttatttacatagggtgtaaccaaataggaaacctctaaagggtacttaaaccccagattttctacacagggcacttgcttgagcctcatcccgctttctggaatgtacttttgcttcaataaatctgtgcttttgttccttcatt

SEQ ID NO: 298264 - DNA, 489 bp, Homo sapiens
tcctaactttagagtctccaatttctcaactttaagtaaataattcaagactaaattctcatcatatgtagggatatttatgcagttgaagtttttattttatgaaaaattgcgttcaagatttcatcattgttttaagttacatttctttttccagggaatgttactgttatggctagtatgaattttgttccttaataacatttatatgtaagaaatagtttttaaatgataagaaaatctgattccagctatcacttgtaagagtcagtgtaagtcattgaatttcccacctactaaatcatgcaaagttccccaggctcttatgtgtctcctaggacagtcctagaggactcttcttgtcttcagtgcacactggtctcttacatgtttagtatcccagcctgtgtgatgcttggaggcatgcagctcttcttgtgtgacaaacattagctggtggtccttgccctgtccacaggtctagagaca

SEQ ID NO: 298265 - DNA, 642 bp, Homo sapiens
ggcattctggagaggtgattggagaaccatgagagcaggcagacatctgggtgagagggcacgaggggtgagtgacggcagagccagacttgctggagaggcagaaagggaaggattcaagtagcataaccaggaaatagaattgataggatttggtccctgctgacctgtggaataagggggaaggcagaggagttgattctagtatttctaagttgggccacttagtgatattggggtaccaggaacaggcttagtggacccacagaagtgaccggacccaggagtctctctgagcgcccaccctggcttctctgtgttggcttaccctttcttggttgggggtcatggggtggtcagcttcagtggtgtggtctgaggtgacaggtgctcaggagtgaggacagggagtagacatcaccaatgtgaatgtggaggtaggcaacaagagttattctagaactgacaaatttaatatattttgctgactgctgagttccatttggacaaatacctaatgcatttggggcttaaaacctagatgacgggttgaagggtacaacaaaccaccgtgatacatgtatacttatgtaacaaacctgcacgttctgcacatttgtcccagaacttaaagtaaaaaaa

SEQ ID NO: 298266 - DNA, 466 bp, Homo sapiens
ctgaagaagcaccgcatcaacagaagagaagaggagggctggactccagccggctcctgcacgtgtcttttcaattgccagccttgggttttcttatgatcctagctgctgcttatatgtttttgttattattttttaaaaactcagccatcttttccttttaaaaaataacagaatgcaaccgggcaccggtggtcacgcctgtaaccccaggactttgggaggccgaggcgggcggatcacgaggtcaggagatcgagaccatcctggctaacacggtgaaaccccgtctctactaaaaatacaaaaaaataaaaattagccgggcatggtggtgggtgcctgtagtcccagctactcgggaggctgaggcaggagaatggcatgaacccgggaggcggagcttgcagtgagccgagattgcgccactgcactccagcctgggcgacagagagagactgtctca

SEQ ID NO: 298267 - DNA, 630 bp, Homo sapiens
cttttccctcttgtaacacactcagaaaatggtggaaggggaagataaatgggaaggtcttgaactaaggagtgaggcagagtagaaggaaaagagaagatggctttcctctccctgaggtctcttgtagaaagagaagcacaatgagataaagcataagactattatagagagagatggggatttgcatgtaggaacaagcattcagtgctgagatagaggagagggctccatggagttccatcaaccttggaggagccatattggaagccagaggaatggtactccatcaattcaggtaacgcctgtcacaccaggtgggaacaagctgatggatataagaagaggtcagtaggccgggcgcggtggctcaacgtttgtaatcccagcactttgggaggctgaggcgggcagatcacgacgtcaggagattgagaccacggtgaaacctcgtctctactaaaaatacaaaaaattagccgggcatggtggtgggtgcctgtggtagtcccagctactgggagaggctgaggcaggagaatggcgtgaacctgggaggcggagcttgcagtgagccgagatcacaccactgcactccagcctgggcgacagagcgagactccatctcca

SEQ ID NO: 298268 - DNA, 4563 bp, Homo sapiens
agctgtcgcgggcagccgcctaacagcgatggcggccgagcagggccggtggcggcggcggctgcggctacggccggagacggcagtgttggcggtagtggtgggtggcaggggcctgtgaccgggagctgcccccggacccgggcaccatgagccaaggcccccccacaggggagagcagcgagcccgaagcaaaagtcctccacactaagcggctttaccgggctgtggtggaggctgtgcatcgacttgacctcatcctttgcaacaaaactgcttatcaagaagtattcaaaccagaaaacattagcctgaggaacaagctgcgtgagctctgcgtcaagcttatgttcctgcacccagtggactatgggagaaaggctgaggagctgctgtggagaaaggtatactatgaagttatccagcttatcaagactaacaaaaagcacatccacagccggagcactttggaatgtgcctacaggacgcacctggttgctggtattggcttctaccagcatctccttctctatatccagtcccactaccagctggaactgcagtgctgcatcgactggacccatgtcactgaccccctcataggatgcaagaagccagtgtctgcctcagggaaggagatggattgggcacagatggcatgtcaccgatgtctggtgtatctgggggatttgtcccgatatcagaatgaattagctggcgtagataccgagctgctagccgagagattttactaccaagccctgtcagtagctcctcagattggaatgcccttcaatcagctgggcaccctggcaggcagcaagtactataatgtggaagccatgtattgctacctgcgctgcatccagtcagaagtgtcctttgagggagcctatgggaacctcaagcggctgtatgacaaggcagccaaaatgtaccaccaactgaagaagtgtgagactcggaaactgtctcctggcaaaaagcgatgtaaagacattaaaaggttgctagtgaactttatgtatctgcaaagcctcctacagcccaaaagcagctccgtggactcagagctgacctcactttgccagtcagtcctggaggacttcaacctctgcctcttctacctgccctcctcacccaacctcagcctggccagtgaggatgaggaggagtatgagagtggatatgctttcctcccggaccttctcatctttcaaatggtcatcatctgccttatgtgtgtgcacagcttggagagagcaggatccaagcagtacagtgcagccattgccttcaccctggccctcttttcccacctcgtcaatcatgtcaacatacggctgcaggctgagctggaagagggcgagaatcccgtcccggcattccagagtgatggcacagatgaaccagagtccaaggaacctgtggagaaagaggaggagccagatcctgagcctcctcctgtaacaccccaagtgggtgagggcagaaagagccgtaagttctctcgcctctcctgtctccgccgtcgccgccacccacccaaagttggtgatgacagtgacctgagtgaaggctttgaatcggactcaagccatgactcagcccgggccagtgagggctcagacagtggctctgacaagagtcttgaaggtgggggaacggcctttgatgctgaaacagactcggaaatgaatagccaggagtcccgatcagacttggaagatatggaggaagaggaggggacacggtcaccaaccctggagccccctcggggcagatcagaggctcccgattccctcaatggcccactgggccccagtgaggctagcattgccagcaatctacaagccatgtccacccagatgttccagactaagcgctgcttccgactggcccccacctttagcaacctgctcctccagcccaccaccaaccctcatacctcggccagccacaggccttgcgtcaatggggatgtagacaagccttcagagccagcctctgaggagggctctgagtcggaggggagtgagtccagtggacgctcctgtcggaatgagcgcagcatccaggagaagcttcaggtcctgatggccgaaggtctgcttcctgctgtgaaagtcttcctggactggcttcggaccaaccccgacctcatcatcgtgtgtgcgcagagctctcaaagtctgtggaaccgcctgtctgtgttgctgaatctgttgcctgctgctggtgaactccaggagtctggcctggccttgtgtcctgaggtccaagatcttcttgaaggttgtgaactgcctgacctcccctctagccttctgctcccagaggacatggctcttcgtaacctgcccccgctccgagctgcccacagacgctttaactttgacacggatcggcccctgctcagcaccttagaggagtcagtggtgcgcatctgctgcatccgcagctttggtcatttcatcgcccgcctgcaaggcagcatcctgcagttcaacccagaggttggcatcttcgtcagcattgcccagtctgagcaggagagcctgctgcagcaggcccaggcacagttccgaatggcacaggaggaagctcgtcggaacaggctcatgagagacatggctcagctacgacttcagctcgaagtgtctcagctggagggcagcctgcagcagcccaaggcccagtcagccatgtctccctacctcgtccctgacacccaggccctctgccaccatctccctgtcatccgccaactggccaccagtggccgcttcattgtcatcatcccaaggacagtgatcgatggcctggatttgctgaagaaggaacacccaggggcccgggatgggattcggtacctggaggcagagtttaaaaaaggaaacaggtacattcgctgccagaaagaggtgggaaagagctttgagcggcataagctgaagaggcaggatgcagatgcctggactctctataagatcctagacagctgcaaacagctgactctggcccagggggcaggtgaggaggatccgagtggcatggtgaccatcatcacaggccttccactggacaaccccagcgtgctttcaggccccatgcaggcagccctgcaggccgctgcccacgccagtgtggacatcaagaatgttctggacttctacaagcagtggaaggaaattggttgatactgacccccaggccctgcagtggggctgactccagatctctcctgccctccctggcagccaggaccagcacctgtagtcaccccaccacacgcagactcatgcacgcacacaggagggaggcctagctgctcagaggctgcagggagggcccaggagccggctgggagggtggggtccctttgttgccaagacgttaggaaagcgaggaaagtgcttggattaggagagtcttgtgggcccctggccagccttcctgcctcagctcccctgctgtctccaggggcaggtggtaggcatgggtacctgcatttcactggagtgggttcttggatctctgaggggaaggaacagcaaaagaggcccttcttcctcacccaagatgcagggtggttggggccaggagtttggaccctctaggtcttgggggaagagctgggtaatacctggtgtctgagtgattctctgcagacccttcccctcctcaaggatcacccatcctcctttcagccccctttatggggaccaggcagctctggagccagccacaggggctgttagagaagcaaggcctggagtggcctgcaccgagtagcagggtcagggttcgtgtgctcctcctcctgctgcaggggctgcacatcccattgccccacttctgctttgtgtctccctctgtctagcttccagggcagggagcaggccccacctagggctgcaggcagtctggcctgtgccagcacggtctcctgtgcccaccagccccacaggtgctgtgctttgtgctcttggctgctgtgctgggacagaatgggatgccaggaagagaagaaagggggtgcagtctgaggccaccaccccccttcctatctaagggagggctgaagacaaggggccggcattcagtgggcagcagaaaggagaggctccttgaagctgctcagtcagaggcccccgtccctccttttgccttccgcaggactgaagacctgaaggggctggcttttggagtgttgaggtgaatatctgggagcagagatcatgaatagctcagggcagtgaatggcgcaccaagagcagggctgtgtgtgggaggctgcagccaggattgcctcagctcctccccctcaggctgggaggatagcacaggctaggggctcggggtggagggtctcagctctgctgcccccaccccagtactagcctagcttcccaagctgtggcttagaggatagttggcttcctgcctctctcctctaaaatagcaagtctgggaaatcctggggtgagtggagtcaccccactcccagttgctggcagagactgagactaaagcatcacttaataaaccccccaagcccaa

SEQ ID NO: 298269 - DNA, 4559 bp, Homo sapiens
aggctggtactggtcctgggatttatgtgatccgagcagggccggtggcggcggcggctgcggctacggccggagacggcagtgttggcggtagtggtgggtggcaggggcctgtgaccgggagctgcccccggacccgggcaccatgagccaaggcccccccacaggggagagcagcgagcccgaagcaaaagtcctccacactaagcggctttaccgggctgtggtggaggctgtgcatcgacttgacctcatcctttgcaacaaaactgcttatcaagaagtattcaaaccagaaaacattagcctgaggaacaagctgcgtgagctctgcgtcaagcttatgttcctgcacccagtggactatgggagaaaggctgaggagctgctgtggagaaaggtatactatgaagttatccagcttatcaagactaacaaaaagcacatccacagccggagcactttggaatgtgcctacaggacgcacctggttgctggtattggcttctaccagcatctccttctctatatccagtcccactaccagctggaactgcagtgctgcatcgactggacccatgtcactgaccccctcataggatgcaagaagccagtgtctgcctcagggaaggagatggattgggcacagatggcatgtcaccgatgtctggtgtatctgggggatttgtcccgatatcagaatgaattagctggcgtagataccgagctgctagccgagagattttactaccaagccctgtcagtagctcctcagattggaatgcccttcaatcagctgggcaccctggcaggcagcaagtactataatgtggaagccatgtattgctacctgcgctgcatccagtcagaagtgtcctttgagggagcctatgggaacctcaagcggctgtatgacaaggcagccaaaatgtaccaccaactgaagaagtgtgagactcggaaactgtctcctggcaaaaagcgatgtaaagacattaaaaggttgctagtgaactttatgtatctgcaaagcctcctacagcccaaaagcagctccgtggactcagagctgacctcactttgccagtcagtcctggaggacttcaacctctgcctcttctacctgccctcctcacccaacctcagcctggccagtgaggatgaggaggagtatgagagtggatatgctttcctcccggaccttctcatctttcaaatggtcatcatctgccttatgtgtgtgcacagcttggagagagcaggatccaagcagtacagtgcagccattgccttcaccctggccctcttttcccacctcgtcaatcatgtcaacatacggctgcaggctgagctggaagagggcgagaatcccgtcccggcattccagagtgatggcacagatgaaccagagtccaaggaacctgtggagaaagaggaggagccagatcctgagcctcctcctgtaacaccccaagtgggtgagggcagaaagagccgtaagttctctcgcctctcctgtctccgccgtcgccgccacccacccaaagttggtgatgacagtgacctgagtgaaggctttgaatcggactcaagccatgactcagcccgggccagtgagggctcagacagtggctctgacaagagtcttgaaggtgggggaacggcctttgatgctgaaacagactcggaaatgaatagccaggagtcccgatcagacttggaagatatggaggaagaggaggggacacggtcaccaaccctggagccccctcggggcagatcagaggctcccgattccctcaatggcccactgggccccagtgaggctagcattgccagcaatctacaagccatgtccacccagatgttccagactaagcgctgcttccgactggcccccacctttagcaacctgctcctccagcccaccaccaaccctcatacctcggccagccacaggccttgcgtcaatggggatgtagacaagccttcagagccagcctctgaggagggctctgagtcggaggggagtgagtccagtggacgctcctgtcggaatgagcgcagcatccaggagaagcttcaggtcctgatggccgaaggtctgcttcctgctgtgaaagtcttcctggactggcttcggaccaaccccgacctcatcatcgtgtgtgcgcagagctctcaaagtctgtggaaccgcctgtctgtgttgctgaatctgttgcctgctgctggtgaactccaggagtctggcctggccttgtgtcctgaggtccaagatcttcttgaaggttgtgaactgcctgacctcccctctagccttctgctcccagaggacatggctcttcgtaacctgcccccgctccgagctgcccacagacgctttaactttgacacggatcggcccctgctcagcaccttagaggagtcagtggtgcgcatctgctgcatccgcagctttggtcatttcatcgcccgcctgcaaggcagcatcctgcagttcaacccagaggttggcatcttcgtcagcattgcccagtctgagcaggagagcctgctgcagcaggcccaggcacagttccgaatggcacaggaggaagctcgtcggaacaggctcatgagagacatggctcagctacgacttcagctcgaagtgtctcagctggagggcagcctgcagcagcccaaggcccagtcagccatgtctccctacctcgtccctgacacccaggccctctgccaccatctccctgtcatccgccaactggccaccagtggccgcttcattgtcatcatcccaaggacagtgatcgatggcctggatttgctgaagaaggaacacccaggggcccgggatgggattcggtacctggaggcagagtttaaaaaaggaaacaggtacattcgctgccagaaagaggtgggaaagagctttgagcggcataagctgaagaggcaggatgcagatgcctggactctctataagatcctagacagctgcaaacagctgactctggcccagggggcaggtgaggaggatccgagtggcatggtgaccatcatcacaggccttccactggacaaccccagcgtgctttcaggccccatgcaggcagccctgcaggccgctgcccacgccagtgtggacatcaagaatgttctggacttctacaagcagtggaaggaaattggttgatactgacccccaggccctgcagtggggctgactccagatctctcctgccctccctggcagccaggaccagcacctgtagtcaccccaccacacgcagactcatgcacgcacacaggagggaggcctagctgctcagaggctgcagggagggcccaggagccggctgggagggtggggtccctttgttgccaagacgttaggaaagcgaggaaagtgcttggattaggagagtcttgtgggcccctggccagccttcctgcctcagctcccctgctgtctccaggggcaggtggtaggcatgggtacctgcatttcactggagtgggttcttggatctctgaggggaaggaacagcaaaagaggcccttcttcctcacccaagatgcagggtggttggggccaggagtttggaccctctaggtcttgggggaagagctgggtaatacctggtgtctgagtgattctctgcagacccttcccctcctcaaggatcacccatcctcctttcagccccctttatggggaccaggcagctctggagccagccacaggggctgttagagaagcaaggcctggagtggcctgcaccgagtagcagggtcagggttcgtgtgctcctcctcctgctgcaggggctgcacatcccattgccccacttctgctttgtgtctccctctgtctagcttccagggcagggagcaggccccacctagggctgcaggcagtctggcctgtgccagcacggtctcctgtgcccaccagccccacaggtgctgtgctttgtgctcttggctgctgtgctgggacagaatgggatgccaggaagagaagaaagggggtgcagtctgaggccaccaccccccttcctatctaagggagggctgaagacaaggggccggcattcagtgggcagcagaaaggagaggctccttgaagctgctcagtcagaggcccccgtccctccttttgccttccgcaggactgaagacctgaaggggctggcttttggagtgttgaggtgaatatctgggagcagagatcatgaatagctcagggcagtgaatggcgcaccaagagcagggctgtgtgtgggaggctgcagccaggattgcctcagctcctccccctcaggctgggaggatagcacaggctaggggctcggggtggagggtctcagctctgctgcccccaccccagtactagcctagcttcccaagctgtggcttagaggatagttggcttcctgcctctctcctctaaaatagcaagtctgggaaatcctggggtgagtggagtcaccccactcccagttgctggcagagactgagactaaagcatcacttaataaaccccccaagcccaa

SEQ ID NO: 298270 - DNA, 4425 bp, Homo sapiens
agctgtcgcgggcagccgcctaacagcgatggcggccgagcagggccggtggcggcggcggctgcggctacggccggagacggcagtgttggcggtagtggtgggtggcaggggcctgtgaccgggagctgcccccggacccgggcaccatgagccaaggcccccccacaggggagagcagcgagcccgaagcaaaagtcctccacactaagcggctttaccgggctgtggtggaggctgtgcatcgacttgacctcatcctttgcaacaaaactgcttatcaagaagtattcaaaccagaaaacattagcctgaggaacaagctgcgtgagctctgcgtcaagcttatgttcctgcacccagtggactatgggagaaaggctgaggagctgctgtggagaaaggtatactatgaagttatccagcttatcaagactaacaaaaagcacatccacagccggagcactttggaatgtgcctacaggacgcacctggttgctggtattggcttctaccagcatctccttctctatatccagtcccactaccagctggaactgcagtgctgcatcgactggacccatgtcactgaccccctcataggatgcaagaagccagtgtctgcctcagggaaggagatggattgggcacagatggcatgtcaccgatgtctggtgtatctgggggatttgtcccgatatcagaatgaattagctggcgtagataccgagctgctagccgagagattttactaccaagccctgtcagtagctcctcagattggaatgcccttcaatcagctgggcaccctggcaggcagcaagtactataatgtggaagccatgtattgctacctgcgctgcatccagtcagaagtgtcctttgagggagcctatgggaacctcaagcggctgtatgacaaggcagccaaaatgtaccaccaactgaagaagtgtgagactcggaaactgtctcctggcaaaaagcgatgtaaagacattaaaaggttgctagtgaactttatgtatctgcaaagcctcctacagcccaaaagcagctccgtggactcagagctgacctcactttgccagtcagtcctggaggacttcaacctctgcctcttctacctgccctcctcacccaacctcagcctggccagtgaggatgaggaggagtatgagagtggatatgctttcctcccggaccttctcatctttcaaatggtcatcatctgccttatgtgtgtgcacagcttggagagagcagatgaaccagagtccaaggaacctgtggagaaagaggaggagccagatcctgagcctcctcctgtaacaccccaagtgggtgagggcagaaagagccgtaagttctctcgcctctcctgtctccgccgtcgccgccacccacccaaagttggtgatgacagtgacctgagtgaaggctttgaatcggactcaagccatgactcagcccgggccagtgagggctcagacagtggctctgacaagagtcttgaaggtgggggaacggcctttgatgctgaaacagactcggaaatgaatagccaggagtcccgatcagacttggaagatatggaggaagaggaggggacacggtcaccaaccctggagccccctcggggcagatcagaggctcccgattccctcaatggcccactgggccccagtgaggctagcattgccagcaatctacaagccatgtccacccagatgttccagactaagcgctgcttccgactggcccccacctttagcaacctgctcctccagcccaccaccaaccctcatacctcggccagccacaggccttgcgtcaatggggatgtagacaagccttcagagccagcctctgaggagggctctgagtcggaggggagtgagtccagtggacgctcctgtcggaatgagcgcagcatccaggagaagcttcaggtcctgatggccgaaggtctgcttcctgctgtgaaagtcttcctggactggcttcggaccaaccccgacctcatcatcgtgtgtgcgcagagctctcaaagtctgtggaaccgcctgtctgtgttgctgaatctgttgcctgctgctggtgaactccaggagtctggcctggccttgtgtcctgaggtccaagatcttcttgaaggttgtgaactgcctgacctcccctctagccttctgctcccagaggacatggctcttcgtaacctgcccccgctccgagctgcccacagacgctttaactttgacacggatcggcccctgctcagcaccttagaggagtcagtggtgcgcatctgctgcatccgcagctttggtcatttcatcgcccgcctgcaaggcagcatcctgcagttcaacccagaggttggcatcttcgtcagcattgcccagtctgagcaggagagcctgctgcagcaggcccaggcacagttccgaatggcacaggaggaagctcgtcggaacaggctcatgagagacatggctcagctacgacttcagctcgaagtgtctcagctggagggcagcctgcagcagcccaaggcccagtcagccatgtctccctacctcgtccctgacacccaggccctctgccaccatctccctgtcatccgccaactggccaccagtggccgcttcattgtcatcatcccaaggacagtgatcgatggcctggatttgctgaagaaggaacacccaggggcccgggatgggattcggtacctggaggcagagtttaaaaaaggaaacaggtacattcgctgccagaaagaggtgggaaagagctttgagcggcataagctgaagaggcaggatgcagatgcctggactctctataagatcctagacagctgcaaacagctgactctggcccagggggcaggtgaggaggatccgagtggcatggtgaccatcatcacaggccttccactggacaaccccagcgtgctttcaggccccatgcaggcagccctgcaggccgctgcccacgccagtgtggacatcaagaatgttctggacttctacaagcagtggaaggaaattggttgatactgacccccaggccctgcagtggggctgactccagatctctcctgccctccctggcagccaggaccagcacctgtagtcaccccaccacacgcagactcatgcacgcacacaggagggaggcctagctgctcagaggctgcagggagggcccaggagccggctgggagggtggggtccctttgttgccaagacgttaggaaagcgaggaaagtgcttggattaggagagtcttgtgggcccctggccagccttcctgcctcagctcccctgctgtctccaggggcaggtggtaggcatgggtacctgcatttcactggagtgggttcttggatctctgaggggaaggaacagcaaaagaggcccttcttcctcacccaagatgcagggtggttggggccaggagtttggaccctctaggtcttgggggaagagctgggtaatacctggtgtctgagtgattctctgcagacccttcccctcctcaaggatcacccatcctcctttcagccccctttatggggaccaggcagctctggagccagccacaggggctgttagagaagcaaggcctggagtggcctgcaccgagtagcagggtcagggttcgtgtgctcctcctcctgctgcaggggctgcacatcccattgccccacttctgctttgtgtctccctctgtctagcttccagggcagggagcaggccccacctagggctgcaggcagtctggcctgtgccagcacggtctcctgtgcccaccagccccacaggtgctgtgctttgtgctcttggctgctgtgctgggacagaatgggatgccaggaagagaagaaagggggtgcagtctgaggccaccaccccccttcctatctaagggagggctgaagacaaggggccggcattcagtgggcagcagaaaggagaggctccttgaagctgctcagtcagaggcccccgtccctccttttgccttccgcaggactgaagacctgaaggggctggcttttggagtgttgaggtgaatatctgggagcagagatcatgaatagctcagggcagtgaatggcgcaccaagagcagggctgtgtgtgggaggctgcagccaggattgcctcagctcctccccctcaggctgggaggatagcacaggctaggggctcggggtggagggtctcagctctgctgcccccaccccagtactagcctagcttcccaagctgtggcttagaggatagttggcttcctgcctctctcctctaaaatagcaagtctgggaaatcctggggtgagtggagtcaccccactcccagttgctggcagagactgagactaaagcatcacttaataaaccccccaagcccaa

SEQ ID NO: 298271 - DNA, 4406 bp, Homo sapiens
taattggcgtcattcacatttcattcttgggcaaattagtttcccatatttacctcaaacctttcacctttatgtgtgtaacttctacccaagacattcatgaccctattcatacttgaagctcatcccttcctcctttttggaagccttcctgtgatgaccttcccgcaaggtgccatcctaggttgagggccctagccctccttttccagttccttcctgtcctatgaatgaatctgcctataagtctctgagtccctgcgtatggccacctgtgatcctctgtgtctctccctgtgtcctggatgagtgtgtctctgccctgaaagacaatgttccaagactggccctggattcttagtctctacatctcggaggggtatttcttcataggtgcgggaaggcagaagaatgggcctacaaatctctttctctttgtctcataggatgcaagaagccagtgtctgcctcagggaaggagatggattgggcacagatggcatgtcaccgatgtctggtgtatctgggggatttgtcccgatatcagaatgaattagctggcgtagataccgagctgctagccgagagattttactaccaagccctgtcagtagctcctcagattggaatgcccttcaatcagctgggcaccctggcaggcagcaagtactataatgtggaagccatgtattgctacctgcgctgcatccagtcagaagtgtcctttgagggagcctatgggaacctcaagcggctgtatgacaaggcagccaaaatgtaccaccaactgaagaagtgtgagactcggaaactgtctcctggcaaaaagcgatgtaaagacattaaaaggttgctagtgaactttatgtatctgcaaagcctcctacagcccaaaagcagctccgtggactcagagctgacctcactttgccagtcagtcctggaggacttcaacctctgcctcttctacctgccctcctcacccaacctcagcctggccagtgaggatgaggaggagtatgagagtggatatgctttcctcccggaccttctcatctttcaaatggtcatcatctgccttatgtgtgtgcacagcttggagagagcaggatccaagcagtacagtgcagccattgccttcaccctggccctcttttcccacctcgtcaatcatgtcaacatacggctgcaggctgagctggaagagggcgagaatcccgtcccggcattccagagtgatggcacagatgaaccagagtccaaggaacctgtggagaaagaggaggagccagatcctgagcctcctcctgtaacaccccaagtgggtgagggcagaaagagccgtaagttctctcgcctctcctgtctccgccgtcgccgccacccacccaaagttggtgatgacagtgacctgagtgaaggctttgaatcggactcaagccatgactcagcccgggccagtgagggctcagacagtggctctgacaagagtcttgaaggtgggggaacggcctttgatgctgaaacagactcggaaatgaatagccaggagtcccgatcagacttggaagatatggaggaagaggaggggacacggtcaccaaccctggagccccctcggggcagatcagaggctcccgattccctcaatggcccactgggccccagtgaggctagcattgccagcaatctacaagccatgtccacccagatgttccagactaagcgctgcttccgactggcccccacctttagcaacctgctcctccagcccaccaccaaccctcatacctcggccagccacaggccttgcgtcaatggggatgtagacaagccttcagagccagcctctgaggagggctctgagtcggaggggagtgagtccagtggacgctcctgtcggaatgagcgcagcatccaggagaagcttcaggtcctgatggccgaaggtctgcttcctgctgtgaaagtcttcctggactggcttcggaccaaccccgacctcatcatcgtgtgtgcgcagagctctcaaagtctgtggaaccgcctgtctgtgttgctgaatctgttgcctgctgctggtgaactccaggagtctggcctggccttgtgtcctgaggtccaagatcttcttgaaggttgtgaactgcctgacctcccctctagccttctgctcccagaggacatggctcttcgtaacctgcccccgctccgagctgcccacagacgctttaactttgacacggatcggcccctgctcagcaccttagaggagtcagtggtgcgcatctgctgcatccgcagctttggtcatttcatcgcccgcctgcaaggcagcatcctgcagttcaacccagaggttggcatcttcgtcagcattgcccagtctgagcaggagagcctgctgcagcaggcccaggcacagttccgaatggcacaggaggaagctcgtcggaacaggctcatgagagacatggctcagctacgacttcagctcgaagtgtctcagctggagggcagcctgcagcagcccaaggcccagtcagccatgtctccctacctcgtccctgacacccaggccctctgccaccatctccctgtcatccgccaactggccaccagtggccgcttcattgtcatcatcccaaggacagtgatcgatggcctggatttgctgaagaaggaacacccaggggcccgggatgggattcggtacctggaggcagagtttaaaaaaggaaacaggtacattcgctgccagaaagaggtgggaaagagctttgagcggcataagctgaagaggcaggatgcagatgcctggactctctataagatcctagacagctgcaaacagctgactctggcccagggggcaggtgaggaggatccgagtggcatggtgaccatcatcacaggccttccactggacaaccccagcgtgctttcaggccccatgcaggcagccctgcaggccgctgcccacgccagtgtggacatcaagaatgttctggacttctacaagcagtggaaggaaattggttgatactgacccccaggccctgcagtggggctgactccagatctctcctgccctccctggcagccaggaccagcacctgtagtcaccccaccacacgcagactcatgcacgcacacaggagggaggcctagctgctcagaggctgcagggagggcccaggagccggctgggagggtggggtccctttgttgccaagacgttaggaaagcgaggaaagtgcttggattaggagagtcttgtgggcccctggccagccttcctgcctcagctcccctgctgtctccaggggcaggtggtaggcatgggtacctgcatttcactggagtgggttcttggatctctgaggggaaggaacagcaaaagaggcccttcttcctcacccaagatgcagggtggttggggccaggagtttggaccctctaggtcttgggggaagagctgggtaatacctggtgtctgagtgattctctgcagacccttcccctcctcaaggatcacccatcctcctttcagccccctttatggggaccaggcagctctggagccagccacaggggctgttagagaagcaaggcctggagtggcctgcaccgagtagcagggtcagggttcgtgtgctcctcctcctgctgcaggggctgcacatcccattgccccacttctgctttgtgtctccctctgtctagcttccagggcagggagcaggccccacctagggctgcaggcagtctggcctgtgccagcacggtctcctgtgcccaccagccccacaggtgctgtgctttgtgctcttggctgctgtgctgggacagaatgggatgccaggaagagaagaaagggggtgcagtctgaggccaccaccccccttcctatctaagggagggctgaagacaaggggccggcattcagtgggcagcagaaaggagaggctccttgaagctgctcagtcagaggcccccgtccctccttttgccttccgcaggactgaagacctgaaggggctggcttttggagtgttgaggtgaatatctgggagcagagatcatgaatagctcagggcagtgaatggcgcaccaagagcagggctgtgtgtgggaggctgcagccaggattgcctcagctcctccccctcaggctgggaggatagcacaggctaggggctcggggtggagggtctcagctctgctgcccccaccccagtactagcctagcttcccaagctgtggcttagaggatagttggcttcctgcctctctcctctaaaatagcaagtctgggaaatcctggggtgagtggagtcaccccactcccagttgctggcagagactgagactaaagcatcacttaataaaccccccaagcccaa

SEQ ID NO: 298272 - DNA, 4101 bp, Homo sapiens
ggtgagtgatcagcaggatctggcctccactggttgctggtattggcttctaccagcatctccttctctatatccagtcccactaccagctggaactgcagtgctgcatcgactggacccatgtcactgaccccctcataggatgcaagaagccagtgtctgcctcagggaaggagatggattgggcacagatggcatgtcaccgatgtctggtgtatctgggggatttgtcccgatatcagaatgaattagctggcgtagataccgagctgctagccgagagattttactaccaagccctgtcagtagctcctcagattggaatgcccttcaatcagctgggcaccctggcaggcagcaagtactataatgtggaagccatgtattgctacctgcgctgcatccagtcagaagtgtcctttgagggagcctatgggaacctcaagcggctgtatgacaaggcagccaaaatgtaccaccaactgaagaagtgtgagactcggaaactgtctcctggcaaaaagcgatgtaaagacattaaaaggttgctagtgaactttatgtatctgcaaagcctcctacagcccaaaagcagctccgtggactcagagctgacctcactttgccagtcagtcctggaggacttcaacctctgcctcttctacctgccctcctcacccaacctcagcctggccagtgaggatgaggaggagtatgagagtggatatgctttcctcccggaccttctcatctttcaaatggtcatcatctgccttatgtgtgtgcacagcttggagagagcaggatccaagcagtacagtgcagccattgccttcaccctggccctcttttcccacctcgtcaatcatgtcaacatacggctgcaggctgagctggaagagggcgagaatcccgtcccggcattccagagtgatggcacagatgaaccagagtccaaggaacctgtggagaaagaggaggagccagatcctgagcctcctcctgtaacaccccaagtgggtgagggcagaaagagccgtaagttctctcgcctctcctgtctccgccgtcgccgccacccacccaaagttggtgatgacagtgacctgagtgaaggctttgaatcggactcaagccatgactcagcccgggccagtgagggctcagacagtggctctgacaagagtcttgaaggtgggggaacggcctttgatgctgaaacagactcggaaatgaatagccaggagtcccgatcagacttggaagatatggaggaagaggaggggacacggtcaccaaccctggagccccctcggggcagatcagaggctcccgattccctcaatggcccactgggccccagtgaggctagcattgccagcaatctacaagccatgtccacccagatgttccagactaagcgctgcttccgactggcccccacctttagcaacctgctcctccagcccaccaccaaccctcatacctcggccagccacaggccttgcgtcaatggggatgtagacaagccttcagagccagcctctgaggagggctctgagtcggaggggagtgagtccagtggacgctcctgtcggaatgagcgcagcatccaggagaagcttcaggtcctgatggccgaaggtctgcttcctgctgtgaaagtcttcctggactggcttcggaccaaccccgacctcatcatcgtgtgtgcgcagagctctcaaagtctgtggaaccgcctgtctgtgttgctgaatctgttgcctgctgctggtgaactccaggagtctggcctggccttgtgtcctgaggtccaagatcttcttgaaggttgtgaactgcctgacctcccctctagccttctgctcccagaggacatggctcttcgtaacctgcccccgctccgagctgcccacagacgctttaactttgacacggatcggcccctgctcagcaccttagaggagtcagtggtgcgcatctgctgcatccgcagctttggtcatttcatcgcccgcctgcaaggcagcatcctgcagttcaacccagaggttggcatcttcgtcagcattgcccagtctgagcaggagagcctgctgcagcaggcccaggcacagttccgaatggcacaggaggaagctcgtcggaacaggctcatgagagacatggctcagctacgacttcagctcgaagtgtctcagctggagggcagcctgcagcagcccaaggcccagtcagccatgtctccctacctcgtccctgacacccaggccctctgccaccatctccctgtcatccgccaactggccaccagtggccgcttcattgtcatcatcccaaggacagtgatcgatggcctggatttgctgaagaaggaacacccaggggcccgggatgggattcggtacctggaggcagagtttaaaaaaggaaacaggtacattcgctgccagaaagaggtgggaaagagctttgagcggcataagctgaagaggcaggatgcagatgcctggactctctataagatcctagacagctgcaaacagctgactctggcccagggggcaggtgaggaggatccgagtggcatggtgaccatcatcacaggccttccactggacaaccccagcgtgctttcaggccccatgcaggcagccctgcaggccgctgcccacgccagtgtggacatcaagaatgttctggacttctacaagcagtggaaggaaattggttgatactgacccccaggccctgcagtggggctgactccagatctctcctgccctccctggcagccaggaccagcacctgtagtcaccccaccacacgcagactcatgcacgcacacaggagggaggcctagctgctcagaggctgcagggagggcccaggagccggctgggagggtggggtccctttgttgccaagacgttaggaaagcgaggaaagtgcttggattaggagagtcttgtgggcccctggccagccttcctgcctcagctcccctgctgtctccaggggcaggtggtaggcatgggtacctgcatttcactggagtgggttcttggatctctgaggggaaggaacagcaaaagaggcccttcttcctcacccaagatgcagggtggttggggccaggagtttggaccctctaggtcttgggggaagagctgggtaatacctggtgtctgagtgattctctgcagacccttcccctcctcaaggatcacccatcctcctttcagccccctttatggggaccaggcagctctggagccagccacaggggctgttagagaagcaaggcctggagtggcctgcaccgagtagcagggtcagggttcgtgtgctcctcctcctgctgcaggggctgcacatcccattgccccacttctgctttgtgtctccctctgtctagcttccagggcagggagcaggccccacctagggctgcaggcagtctggcctgtgccagcacggtctcctgtgcccaccagccccacaggtgctgtgctttgtgctcttggctgctgtgctgggacagaatgggatgccaggaagagaagaaagggggtgcagtctgaggccaccaccccccttcctatctaagggagggctgaagacaaggggccggcattcagtgggcagcagaaaggagaggctccttgaagctgctcagtcagaggcccccgtccctccttttgccttccgcaggactgaagacctgaaggggctggcttttggagtgttgaggtgaatatctgggagcagagatcatgaatagctcagggcagtgaatggcgcaccaagagcagggctgtgtgtgggaggctgcagccaggattgcctcagctcctccccctcaggctgggaggatagcacaggctaggggctcggggtggagggtctcagctctgctgcccccaccccagtactagcctagcttcccaagctgtggcttagaggatagttggcttcctgcctctctcctctaaaatagcaagtctgggaaatcctggggtgagtggagtcaccccactcccagttgctggcagagactgagactaaagcatcacttaataaaccccccaagcccaa

SEQ ID NO: 298273 - DNA, 3960 bp, Homo sapiens
gaagaggtcagtaatcctctagaggaaaaagattaagctgctaatcacctgagacaaccagtgttgcctgcagacccagctgttctccctacaggttctctgatgcttagcattggttgggcctggcagctttgaatgagtattgtggccttagactgcatgaattctctttctccctaggaatgcccttcaatcagctgggcaccctggcaggcagcaagtactataatgtggaagccatgtattgctacctgcgctgcatccagtcagaagtgtcctttgagggagcctatgggaacctcaagcggctgtatgacaaggcagccaaaatgtaccaccaactgaagaagtgtgagactcggaaactgtctcctggcaaaaagcgatgtaaagacattaaaaggttgctagtgaactttatgtatctgcaaagcctcctacagcccaaaagcagctccgtggactcagagctgacctcactttgccagtcagtcctggaggacttcaacctctgcctcttctacctgccctcctcacccaacctcagcctggccagtgaggatgaggaggagtatgagagtggatatgctttcctcccggaccttctcatctttcaaatggtcatcatctgccttatgtgtgtgcacagcttggagagagcaggatccaagcagtacagtgcagccattgccttcaccctggccctcttttcccacctcgtcaatcatgtcaacatacggctgcaggctgagctggaagagggcgagaatcccgtcccggcattccagagtgatggcacagatgaaccagagtccaaggaacctgtggagaaagaggaggagccagatcctgagcctcctcctgtaacaccccaagtgggtgagggcagaaagagccgtaagttctctcgcctctcctgtctccgccgtcgccgccacccacccaaagttggtgatgacagtgacctgagtgaaggctttgaatcggactcaagccatgactcagcccgggccagtgagggctcagacagtggctctgacaagagtcttgaaggtgggggaacggcctttgatgctgaaacagactcggaaatgaatagccaggagtcccgatcagacttggaagatatggaggaagaggaggggacacggtcaccaaccctggagccccctcggggcagatcagaggctcccgattccctcaatggcccactgggccccagtgaggctagcattgccagcaatctacaagccatgtccacccagatgttccagactaagcgctgcttccgactggcccccacctttagcaacctgctcctccagcccaccaccaaccctcatacctcggccagccacaggccttgcgtcaatggggatgtagacaagccttcagagccagcctctgaggagggctctgagtcggaggggagtgagtccagtggacgctcctgtcggaatgagcgcagcatccaggagaagcttcaggtcctgatggccgaaggtctgcttcctgctgtgaaagtcttcctggactggcttcggaccaaccccgacctcatcatcgtgtgtgcgcagagctctcaaagtctgtggaaccgcctgtctgtgttgctgaatctgttgcctgctgctggtgaactccaggagtctggcctggccttgtgtcctgaggtccaagatcttcttgaaggttgtgaactgcctgacctcccctctagccttctgctcccagaggacatggctcttcgtaacctgcccccgctccgagctgcccacagacgctttaactttgacacggatcggcccctgctcagcaccttagaggagtcagtggtgcgcatctgctgcatccgcagctttggtcatttcatcgcccgcctgcaaggcagcatcctgcagttcaacccagaggttggcatcttcgtcagcattgcccagtctgagcaggagagcctgctgcagcaggcccaggcacagttccgaatggcacaggaggaagctcgtcggaacaggctcatgagagacatggctcagctacgacttcagctcgaagtgtctcagctggagggcagcctgcagcagcccaaggcccagtcagccatgtctccctacctcgtccctgacacccaggccctctgccaccatctccctgtcatccgccaactggccaccagtggccgcttcattgtcatcatcccaaggacagtgatcgatggcctggatttgctgaagaaggaacacccaggggcccgggatgggattcggtacctggaggcagagtttaaaaaaggaaacaggtacattcgctgccagaaagaggtgggaaagagctttgagcggcataagctgaagaggcaggatgcagatgcctggactctctataagatcctagacagctgcaaacagctgactctggcccagggggcaggtgaggaggatccgagtggcatggtgaccatcatcacaggccttccactggacaaccccagcgtgctttcaggccccatgcaggcagccctgcaggccgctgcccacgccagtgtggacatcaagaatgttctggacttctacaagcagtggaaggaaattggttgatactgacccccaggccctgcagtggggctgactccagatctctcctgccctccctggcagccaggaccagcacctgtagtcaccccaccacacgcagactcatgcacgcacacaggagggaggcctagctgctcagaggctgcagggagggcccaggagccggctgggagggtggggtccctttgttgccaagacgttaggaaagcgaggaaagtgcttggattaggagagtcttgtgggcccctggccagccttcctgcctcagctcccctgctgtctccaggggcaggtggtaggcatgggtacctgcatttcactggagtgggttcttggatctctgaggggaaggaacagcaaaagaggcccttcttcctcacccaagatgcagggtggttggggccaggagtttggaccctctaggtcttgggggaagagctgggtaatacctggtgtctgagtgattctctgcagacccttcccctcctcaaggatcacccatcctcctttcagccccctttatggggaccaggcagctctggagccagccacaggggctgttagagaagcaaggcctggagtggcctgcaccgagtagcagggtcagggttcgtgtgctcctcctcctgctgcaggggctgcacatcccattgccccacttctgctttgtgtctccctctgtctagcttccagggcagggagcaggccccacctagggctgcaggcagtctggcctgtgccagcacggtctcctgtgcccaccagccccacaggtgctgtgctttgtgctcttggctgctgtgctgggacagaatgggatgccaggaagagaagaaagggggtgcagtctgaggccaccaccccccttcctatctaagggagggctgaagacaaggggccggcattcagtgggcagcagaaaggagaggctccttgaagctgctcagtcagaggcccccgtccctccttttgccttccgcaggactgaagacctgaaggggctggcttttggagtgttgaggtgaatatctgggagcagagatcatgaatagctcagggcagtgaatggcgcaccaagagcagggctgtgtgtgggaggctgcagccaggattgcctcagctcctccccctcaggctgggaggatagcacaggctaggggctcggggtggagggtctcagctctgctgcccccaccccagtactagcctagcttcccaagctgtggcttagaggatagttggcttcctgcctctctcctctaaaatagcaagtctgggaaatcctggggtgagtggagtcaccccactcccagttgctggcagagactgagactaaagcatcacttaataaaccccccaagcccaa

SEQ ID NO: 298274 - DNA, 3926 bp, Homo sapiens
cgtcgacatcccccagatacaccagacatcggtgacatgccatctgtgggatttgtcccgatatcagaatgaattagctggcgtagataccgagctgctagccgagagattttactaccaagccctgtcagtagctcctcagattggaatgcccttcaatcagctgggcaccctggcaggcagcaagtactataatgtggaagccatgtattgctacctgcgctgcatccagtcagaagtgtcctttgagggagcctatgggaacctcaagcggctgtatgacaaggcagccaaaatgtaccaccaactgaagaagtgtgagactcggaaactgtctcctggcaaaaagcgatgtaaagacattaaaaggttgctagtgaactttatgtatctgcaaagcctcctacagcccaaaagcagctccgtggactcagagctgacctcactttgccagtcagtcctggaggacttcaacctctgcctcttctacctgccctcctcacccaacctcagcctggccagtgaggatgaggaggagtatgagagtggatatgctttcctcccggaccttctcatctttcaaatggtcatcatctgccttatgtgtgtgcacagcttggagagagcaggatccaagcagtacagtgcagccattgccttcaccctggccctcttttcccacctcgtcaatcatgtcaacatacggctgcaggctgagctggaagagggcgagaatcccgtcccggcattccagagtgatggcacagatgaaccagagtccaaggaacctgtggagaaagaggaggagccagatcctgagcctcctcctgtaacaccccaagtgggtgagggcagaaagagccgtaagttctctcgcctctcctgtctccgccgtcgccgccacccacccaaagttggtgatgacagtgacctgagtgaaggctttgaatcggactcaagccatgactcagcccgggccagtgagggctcagacagtggctctgacaagagtcttgaaggtgggggaacggcctttgatgctgaaacagactcggaaatgaatagccaggagtcccgatcagacttggaagatatggaggaagaggaggggacacggtcaccaaccctggagccccctcggggcagatcagaggctcccgattccctcaatggcccactgggccccagtgaggctagcattgccagcaatctacaagccatgtccacccagatgttccagactaagcgctgcttccgactggcccccacctttagcaacctgctcctccagcccaccaccaaccctcatacctcggccagccacaggccttgcgtcaatggggatgtagacaagccttcagagccagcctctgaggagggctctgagtcggaggggagtgagtccagtggacgctcctgtcggaatgagcgcagcatccaggagaagcttcaggtcctgatggccgaaggtctgcttcctgctgtgaaagtcttcctggactggcttcggaccaaccccgacctcatcatcgtgtgtgcgcagagctctcaaagtctgtggaaccgcctgtctgtgttgctgaatctgttgcctgctgctggtgaactccaggagtctggcctggccttgtgtcctgaggtccaagatcttcttgaaggttgtgaactgcctgacctcccctctagccttctgctcccagaggacatggctcttcgtaacctgcccccgctccgagctgcccacagacgctttaactttgacacggatcggcccctgctcagcaccttagaggagtcagtggtgcgcatctgctgcatccgcagctttggtcatttcatcgcccgcctgcaaggcagcatcctgcagttcaacccagaggttggcatcttcgtcagcattgcccagtctgagcaggagagcctgctgcagcaggcccaggcacagttccgaatggcacaggaggaagctcgtcggaacaggctcatgagagacatggctcagctacgacttcagctcgaagtgtctcagctggagggcagcctgcagcagcccaaggcccagtcagccatgtctccctacctcgtccctgacacccaggccctctgccaccatctccctgtcatccgccaactggccaccagtggccgcttcattgtcatcatcccaaggacagtgatcgatggcctggatttgctgaagaaggaacacccaggggcccgggatgggattcggtacctggaggcagagtttaaaaaaggaaacaggtacattcgctgccagaaagaggtgggaaagagctttgagcggcataagctgaagaggcaggatgcagatgcctggactctctataagatcctagacagctgcaaacagctgactctggcccagggggcaggtgaggaggatccgagtggcatggtgaccatcatcacaggccttccactggacaaccccagcgtgctttcaggccccatgcaggcagccctgcaggccgctgcccacgccagtgtggacatcaagaatgttctggacttctacaagcagtggaaggaaattggttgatactgacccccaggccctgcagtggggctgactccagatctctcctgccctccctggcagccaggaccagcacctgtagtcaccccaccacacgcagactcatgcacgcacacaggagggaggcctagctgctcagaggctgcagggagggcccaggagccggctgggagggtggggtccctttgttgccaagacgttaggaaagcgaggaaagtgcttggattaggagagtcttgtgggcccctggccagccttcctgcctcagctcccctgctgtctccaggggcaggtggtaggcatgggtacctgcatttcactggagtgggttcttggatctctgaggggaaggaacagcaaaagaggcccttcttcctcacccaagatgcagggtggttggggccaggagtttggaccctctaggtcttgggggaagagctgggtaatacctggtgtctgagtgattctctgcagacccttcccctcctcaaggatcacccatcctcctttcagccccctttatggggaccaggcagctctggagccagccacaggggctgttagagaagcaaggcctggagtggcctgcaccgagtagcagggtcagggttcgtgtgctcctcctcctgctgcaggggctgcacatcccattgccccacttctgctttgtgtctccctctgtctagcttccagggcagggagcaggccccacctagggctgcaggcagtctggcctgtgccagcacggtctcctgtgcccaccagccccacaggtgctgtgctttgtgctcttggctgctgtgctgggacagaatgggatgccaggaagagaagaaagggggtgcagtctgaggccaccaccccccttcctatctaagggagggctgaagacaaggggccggcattcagtgggcagcagaaaggagaggctccttgaagctgctcagtcagaggcccccgtccctccttttgccttccgcaggactgaagacctgaaggggctggcttttggagtgttgaggtgaatatctgggagcagagatcatgaatagctcagggcagtgaatggcgcaccaagagcagggctgtgtgtgggaggctgcagccaggattgcctcagctcctccccctcaggctgggaggatagcacaggctaggggctcggggtggagggtctcagctctgctgcccccaccccagtactagcctagcttcccaagctgtggcttagaggatagttggcttcctgcctctctcctctaaaatagcaagtctgggaaatcctggggtgagtggagtcaccccactcccagttgctggcagagactgagactaaagcatcacttaataaaccccccaagcccaa

SEQ ID NO: 298275 - DNA, 3349 bp, Homo sapiens
ctaagggaacaaagctggaccggccccccctcgaggatcaggcccttaggcggatccaagcagtacagtgcagccattgccttcaccctggccctcttttcccacctcgtcaatcatgtcaacatacggctgcaggctgagctggaagagggcgagaatcccgtcccggcattccagagtgatggcacagatgaaccagagtccaaggaacctgtggagaaagaggaggagccagatcctgagcctcctcctgtaacaccccaagtgggtgagggcagaaagagccgtaagttctctcgcctctcctgtctccgccgtcgccgccacccacccaaagttggtgatgacagtgacctgagtgaaggctttgaatcggactcaagccatgactcagcccgggccagtgagggctcagacagtggctctgacaagagtcttgaaggtgggggaacggcctttgatgctgaaacagactcggaaatgaatagccaggagtcccgatcagacttggaagatatggaggaagaggaggggacacggtcaccaaccctggagccccctcggggcagatcagaggctcccgattccctcaatggcccactgggccccagtgaggctagcattgccagcaatctacaagccatgtccacccagatgttccagactaagcgctgcttccgactggcccccacctttagcaacctgctcctccagcccaccaccaaccctcatacctcggccagccacaggccttgcgtcaatggggatgtagacaagccttcagagccagcctctgaggagggctctgagtcggaggggagtgagtccagtggacgctcctgtcggaatgagcgcagcatccaggagaagcttcaggtcctgatggccgaaggtctgcttcctgctgtgaaagtcttcctggactggcttcggaccaaccccgacctcatcatcgtgtgtgcgcagagctctcaaagtctgtggaaccgcctgtctgtgttgctgaatctgttgcctgctgctggtgaactccaggagtctggcctggccttgtgtcctgaggtccaagatcttcttgaaggttgtgaactgcctgacctcccctctagccttctgctcccagaggacatggctcttcgtaacctgcccccgctccgagctgcccacagacgctttaactttgacacggatcggcccctgctcagcaccttagaggagtcagtggtgcgcatctgctgcatccgcagctttggtcatttcatcgcccgcctgcaaggcagcatcctgcagttcaacccagaggttggcatcttcgtcagcattgcccagtctgagcaggagagcctgctgcagcaggcccaggcacagttccgaatggcacaggaggaagctcgtcggaacaggctcatgagagacatggctcagctacgacttcagctcgaagtgtctcagctggagggcagcctgcagcagcccaaggcccagtcagccatgtctccctacctcgtccctgacacccaggccctctgccaccatctccctgtcatccgccaactggccaccagtggccgcttcattgtcatcatcccaaggacagtgatcgatggcctggatttgctgaagaaggaacacccaggggcccgggatgggattcggtacctggaggcagagtttaaaaaaggaaacaggtacattcgctgccagaaagaggtgggaaagagctttgagcggcataagctgaagaggcaggatgcagatgcctggactctctataagatcctagacagctgcaaacagctgactctggcccagggggcaggtgaggaggatccgagtggcatggtgaccatcatcacaggccttccactggacaaccccagcgtgctttcaggccccatgcaggcagccctgcaggccgctgcccacgccagtgtggacatcaagaatgttctggacttctacaagcagtggaaggaaattggttgatactgacccccaggccctgcagtggggctgactccagatctctcctgccctccctggcagccaggaccagcacctgtagtcaccccaccacacgcagactcatgcacgcacacaggagggaggcctagctgctcagaggctgcagggagggcccaggagccggctgggagggtggggtccctttgttgccaagacgttaggaaagcgaggaaagtgcttggattaggagagtcttgtgggcccctggccagccttcctgcctcagctcccctgctgtctccaggggcaggtggtaggcatgggtacctgcatttcactggagtgggttcttggatctctgaggggaaggaacagcaaaagaggcccttcttcctcacccaagatgcagggtggttggggccaggagtttggaccctctaggtcttgggggaagagctgggtaatacctggtgtctgagtgattctctgcagacccttcccctcctcaaggatcacccatcctcctttcagccccctttatggggaccaggcagctctggagccagccacaggggctgttagagaagcaaggcctggagtggcctgcaccgagtagcagggtcagggttcgtgtgctcctcctcctgctgcaggggctgcacatcccattgccccacttctgctttgtgtctccctctgtctagcttccagggcagggagcaggccccacctagggctgcaggcagtctggcctgtgccagcacggtctcctgtgcccaccagccccacaggtgctgtgctttgtgctcttggctgctgtgctgggacagaatgggatgccaggaagagaagaaagggggtgcagtctgaggccaccaccccccttcctatctaagggagggctgaagacaaggggccggcattcagtgggcagcagaaaggagaggctccttgaagctgctcagtcagaggcccccgtccctccttttgccttccgcaggactgaagacctgaaggggctggcttttggagtgttgaggtgaatatctgggagcagagatcatgaatagctcagggcagtgaatggcgcaccaagagcagggctgtgtgtgggaggctgcagccaggattgcctcagctcctccccctcaggctgggaggatagcacaggctaggggctcggggtggagggtctcagctctgctgcccccaccccagtactagcctagcttcccaagctgtggcttagaggatagttggcttcctgcctctctcctctaaaatagcaagtctgggaaatcctggggtgagtggagtcaccccactcccagttgctggcagagactgagactaaagcatcacttaataaaccccccaagcccaa

SEQ ID NO: 298276 - DNA, 4757 bp, Homo sapiens
agctgtcgcgggcagccgcctaacagcgatggcggccgagcagggccggtggcggcggcggctgcggctacggccggagacggcagtgttggcggtagtggtgggtggcaggggcctgtgaccgggagctgcccccggacccgggcaccatgagccaaggcccccccacaggggagagcagcgagcccgaagcaaaagtcctccacactaagcggctttaccgggctgtggtggaggctgtgcatcgacttgacctcatcctttgcaacaaaactgcttatcaagaagtattcaaaccagaaaacattagcctgaggaacaagctgcgtgagctctgcgtcaagcttatgttcctgcacccagtggactatgggagaaaggctgaggagctgctgtggagaaaggtatactatgaagttatccagcttatcaagactaacaaaaagcacatccacagccggagcactttggaatgtgcctacaggacgcacctggttgctggtattggcttctaccagcatctccttctctatatccagtcccactaccagctggaactgcagtgctgcatcgactggacccatgtcactgaccccctcataggatgcaagaagccagtgtctgcctcagggaaggagatggattgggcacagatggcatgtcaccgatgtctggtgtatctgggggatttgtcccgatatcagaatgaattagctggcgtagataccgagctgctagccgagagattttactaccaagccctgtcagtagctcctcagattggaatgcccttcaatcagctgggcaccctggcaggcagcaagtactataatgtggaagccatgtattgctacctgcgctgcatccagtcagaagtgtcctttgagggagcctatgggaacctcaagcggctgtatgacaaggcagccaaaatgtaccaccaactgaagaagtgtgagactcggaaactgtctcctggcaaaaagcgatgtaaagacattaaaaggttgctagtgaactttatgtatctgcaaagcctcctacagcccaaaagcagctccgtggactcagagctgacctcactttgccagtcagtcctggaggacttcaacctctgcctcttctacctgccctcctcacccaacctcagcctggccagtgaggatgaggaggagtatgagagtggatatgctttcctcccggaccttctcatctttcaaatggtcatcatctgccttatgtgtgtgcacagcttggagagagcaggatccaagcagtacagtgcagccattgccttcaccctggccctcttttcccacctcgtcaatcatgtcaacatacggctgcaggctgagctggaagagggcgagaatcccgtcccggcattccagagtgatggcacagatgaaccagagtccaaggaacctgtggagaaagaggaggagccagatcctgagcctcctcctgtaacaccccaagtgggtgagggcagaaagagccgtaagttctctcgcctctcctgtctccgccgtcgccgccacccacccaaagttggtgatgacagtgacctgagtgaaggctttgaatcggactcaagccatgactcagcccgggccagtgagggctcagacagtggctctgacaagagtcttgaaggtgggggaacggcctttgatgctgaaacagactcggaaatgaatagccaggagtcccgatcagacttggaagatatggaggaagaggaggggacacggtcaccaaccctggagccccctcggggcagatcagaggctcccgattccctcaatggcccactgggccccagtgaggctagcattgccagcaatctacaagccatgtccacccagatgttccagactaagcgctgcttccgactggcccccacctttagcaacctgctcctccagcccaccaccaaccctcatacctcggccagccacaggccttgcgtcaatggggatgtagacaagccttcagagccagcctctgaggagggctctgagtcggaggggagtgagtccagtggacgctcctgtcggaatgagcgcagcatccaggagaagcttcaggtcctgatggccgaaggtctgcttcctgctgtgaaagtcttcctggactggcttcggaccaaccccgacctcatcatcgtgtgtgcgcagagctctcaaagtctgtggaaccgcctgtctgtgttgctgaatctgttgcctgctgctggtgaactccaggagtctggcctggccttgtgtcctgaggtccaagatcttcttgaaggttgtgaactgcctgacctcccctctagccttctgctcccagaggacatggctcttcgtaacctgcccccgctccgagctgcccacagacgctttaactttgacacggatcggcccctgctcagcaccttagaggagtcagtggtgcgcatctgctgcatccgcagctttggtcatttcatcgcccgcctgcaaggcagcatcctgcagttcaacccagaggttggcatcttcgtcagcattgcccagtctgagcaggagagcctgctgcagcaggcccaggcacagttccgaatggcacaggaggaagctcgtcggaacaggctcatgagagacatggctcagctacgacttcagctcgaagtgtctcagctggagggcagcctgcagcagcccaaggcccagtcagccatgtctccctacctcgtccctgacacccaggccctctgccaccatctccctgtcatccgccaactggccaccagtggccgcttcattgtcatcatcccaaggacagtgatcgatggcctggatttgctgaagaaggaacacccaggggcccgggatgggattcggtacctggaggcagagtttaaaaaaggaaacaggtacattcgctgccagaaagaggtgggaaagagctttgagcggcataagctgaagaggcaggatgcagatgcctggactctctataagatcctagacagctgcaaacagctgactctggcccagggggcaggtgaggaggatccgagtggcatggtgaccatcatcacaggccttccactggacaaccccagcgtgctttcaggccccatgcaggcagccctgcaggccgctgcccacgccagtgtggacatcaagaatgttctggacttctacaagcagtggaaggaaattggttgatactgacccccaggccctgcagtggggctgactccagatctctcctgccctccctggcagccaggaccagcacctgtagtcaccccaccacacgcagactcatgcacgcacacaggagggaggcctagctgctcagaggctgcagggagggcccaggagccggctgggagggtggggtccctttgttgccaagacgttaggaaagcgaggaaagtgcttggattaggagagtcttgtgggcccctggccagccttcctgcctcagctcccctgctgtctccaggggcaggtggtaggcatgggtacctgcatttcactggagtgggttcttggatctctgaggggaaggaacagcaaaagaggcccttcttcctcacccaagatgcagggtggttggggccaggagtttggaccctctaggtcttgggggaagagctgggtaatacctggtgtctgagtgattctctgcagacccttcccctcctcaaggatcacccatcctcctttcagccccctttatggggaccaggcagctctggagccagccacaggggctgttagagaagcaaggcctggagtggcctgcaccgagtagcagggtcagggttcgtgtgctcctcctcctgctgcaggggctgcacatcccattgccccacttctgctttgtgtctccctctgtctagcttccagggcagggagcaggccccacctagggctgcaggcagtctggcctgtgccagcacggtctcctgtgcccaccagccccacaggtgctgtgctttgtgctcttggctgctgtgctgggacagaatgggatgccaggaagagaagaaagggggtgcagtctgaggccaccaccccccttcctatctaagggagggctgaagacaaggggccggcattcagtgggcagcagaaaggagaggctccttgaagctgctcagtcagaggcccccgtccctccttttgccttccgcaggactgaagacctgaaggggctggcttttggagtgttgaggtgaatatctgggagcagagatcatgaatagctcagggcagtgaatggcgcaccaagagcagggctgtgtgtgggaggctgcagccaggattgcctcagctcctccccctcaggctgggaggatagcacaggctaggggctcggggtggagggtctcagctctgctgcccccaccccagtactagcctagcttcccaagctgtggcttagaggatagttggcttcctgcctctctcctctaaaatagcaagtctgggaaatcctggggtgagtggagtcaccccactcccagttgctggcagagactgagactaaagcatcacttaataaaccccccaagcccaaaaaaaaaaacacacaaaaaaacggggggggacacaaataaccccgcaaggacacaaatacagcgaacaaatttttggcaaacggaccaacaaggagaggaacaacacacacgagcagcgacaacaaccacgacgggaaaggcacaggacaaggagaaacacacggggaggaacagcacaaccaagaaagacacg

SEQ ID NO: 298277 - DNA, 2233 bp, Homo sapiens
cggcacatggctgtctgcttcccctcccctgcagggcctggaacatcatgacctgcatcgggttggtaatggaagttgttcagagtgcagtggaagaatattttttcttccatgcctctcctcccctcattcagcagcagtgctagagagtgactttgcatgaggtcacactgagaccccaggaaaccctcttggtcttcctgatcactggagaagggaaaatacaccccaactccttacagctcattttttccctcataggcacaggaggaagctcgtcggaacaggctcatgagagacatggctcagctacgacttcagctcgaagtgtctcagctggagggcagcctgcagcagcccaaggcccagtcagccatgtctccctacctcgtccctgacacccaggccctctgccaccatctccctgtcatccgccaactggccaccagtggccgcttcattgtcatcatcccaaggacagtgatcgatggcctggatttgctgaagaaggaacacccaggggcccgggatgggattcggtacctggaggcagagtttaaaaaaggaaacaggtacattcgctgccagaaagaggtgggaaagagctttgagcggcataagctgaagaggcaggatgcagatgcctggactctctataagatcctagacagctgcaaacagctgactctggcccagggggcaggtgaggaggatccgagtggcatggtgaccatcatcacaggccttccactggacaaccccagcgtgctttcaggccccatgcaggcagccctgcaggccgctgcccacgccagtgtggacatcaagaatgttctggacttctacaagcagtggaaggaaattggttgatactgacccccaggccctgcagtggggctgactccagatctctcctgccctccctggcagccaggaccagcacctgtagtcaccccaccacacgcagactcatgcacgcacacaggagggaggcctagctgctcagaggctgcagggagggcccaggagccggctgggagggtggggtccctttgttgccaagacgttaggaaagcgaggaaagtgcttggattaggagagtcttgtgggcccctggccagccttcctgcctcagctcccctgctgtctccaggggcaggtggtaggcatgggtacctgcatttcactggagtgggttcttggatctctgaggggaaggaacagcaaaagaggcccttcttcctcacccaagatgcagggtggttggggccaggagtttggaccctctaggtcttgggggaagagctgggtaatacctggtgtctgagtgattctctgcagacccttcccctcctcaaggatcacccatcctcctttcagccccctttatggggaccaggcagctctggagccagccacaggggctgttagagaagcaaggcctggagtggcctgcaccgagtagcagggtcagggttcgtgtgctcctcctcctgctgcaggggctgcacatcccattgccccacttctgctttgtgtctccctctgtctagcttccagggcagggagcaggccccacctagggctgcaggcagtctggcctgtgccagcacggtctcctgtgcccaccagccccacaggtgctgtgctttgtgctcttggctgctgtgctgggacagaatgggatgccaggaagagaagaaagggggtgcagtctgaggccaccaccccccttcctatctaagggagggctgaagacaaggggccggcattcagtgggcagcagaaaggagaggctccttgaagctgctcagtcagaggcccccgtccctccttttgccttccgcaggactgaagacctgaaggggctggcttttggagtgttgaggtgaatatctgggagcagagatcatgaatagctcagggcagtgaatggcgcaccaagagcagggctgtgtgtgggaggctgcagccaggattgcctcagctcctccccctcaggctgggaggatagcacaggctaggggctcggggtggagggtctcagctctgctgcccccaccccagtactagcctagcttcccaagctgtggcttagaggatagttggcttcctgcctctctcctctaaaatagcaagtctgggaaatcctggggtgagtggagtcaccccactcccagttgctggcagagactgagactaaagcatcacttaataaaccccccaagcccaa

SEQ ID NO: 298278 - DNA, 1960 bp, Homo sapiens
  misc_feature (13)..(13): n is a, c, g, or t
tatcagctcggcncggttactggaccttctgccaagtatattgctggcagaaggtcatgttttcagagaactttgggagccctctagggagccaggtcccttctctgcctgaagagtgtactgaggtgagctcagatacttcctccagagccccttgtcacagcagtctgagcttatctgttttgtctttccctaccttgcccaccagtgatcgatggcctggatttgctgaagaaggaacacccaggggcccgggatgggattcggtacctggaggcagagtttaaaaaaggaaacaggtacattcgctgccagaaagaggtgggaaagagctttgagcggcataagctgaagaggcaggatgcagatgcctggactctctataagatcctagacagctgcaaacagctgactctggcccagggggcaggtgaggaggatccgagtggcatggtgaccatcatcacaggccttccactggacaaccccagcgtgctttcaggccccatgcaggcagccctgcaggccgctgcccacgccagtgtggacatcaagaatgttctggacttctacaagcagtggaaggaaattggttgatactgacccccaggccctgcagtggggctgactccagatctctcctgccctccctggcagccaggaccagcacctgtagtcaccccaccacacgcagactcatgcacgcacacaggagggaggcctagctgctcagaggctgcagggagggcccaggagccggctgggagggtggggtccctttgttgccaagacgttaggaaagcgaggaaagtgcttggattaggagagtcttgtgggcccctggccagccttcctgcctcagctcccctgctgtctccaggggcaggtggtaggcatgggtacctgcatttcactggagtgggttcttggatctctgaggggaaggaacagcaaaagaggcccttcttcctcacccaagatgcagggtggttggggccaggagtttggaccctctaggtcttgggggaagagctgggtaatacctggtgtctgagtgattctctgcagacccttcccctcctcaaggatcacccatcctcctttcagccccctttatggggaccaggcagctctggagccagccacaggggctgttagagaagcaaggcctggagtggcctgcaccgagtagcagggtcagggttcgtgtgctcctcctcctgctgcaggggctgcacatcccattgccccacttctgctttgtgtctccctctgtctagcttccagggcagggagcaggccccacctagggctgcaggcagtctggcctgtgccagcacggtctcctgtgcccaccagccccacaggtgctgtgctttgtgctcttggctgctgtgctgggacagaatgggatgccaggaagagaagaaagggggtgcagtctgaggccaccaccccccttcctatctaagggagggctgaagacaaggggccggcattcagtgggcagcagaaaggagaggctccttgaagctgctcagtcagaggcccccgtccctccttttgccttccgcaggactgaagacctgaaggggctggcttttggagtgttgaggtgaatatctgggagcagagatcatgaatagctcagggcagtgaatggcgcaccaagagcagggctgtgtgtgggaggctgcagccaggattgcctcagctcctccccctcaggctgggaggatagcacaggctaggggctcggggtggagggtctcagctctgctgcccccaccccagtactagcctagcttcccaagctgtggcttagaggatagttggcttcctgcctctctcctctaaaatagcaagtctgggaaatcctggggtgagtggagtcaccccactcccagttgctggcagagactgagactaaagcatcacttaataaaccccccaagcccaa

SEQ ID NO: 298279 - DNA, 4574 bp, Homo sapiens
agctgtcgcgggcagccgcctaacagcgatggcggccgagcagggccggtggcggcggcggctgcggctacggccggagacggcagtgttggcggtagtggtgggtggcaggggcctgtgaccgggagctgcccccggacccgggcaccatgagccaaggcccccccacaggggagagcagcgagcccgaagcaaaagtcctccacactaagcggctttaccgggctgtggtggaggctgtgcatcgacttgacctcatcctttgcaacaaaactgcttatcaagaagtattcaaaccagaaaacattagcctgaggaacaagctgcgtgagctctgcgtcaagcttatgttcctgcacccagtggactatgggagaaaggctgaggagctgctgtggagaaaggtatactatgaagttatccagcttatcaagactaacaaaaagcacatccacagccggagcactttggaatgtgcctacaggacgcacctggttgctggtattggcttctaccagcatctccttctctatatccagtcccactaccagctggaactgcagtgctgcatcgactggacccatgtcactgaccccctcataggatgcaagaagccagtgtctgcctcagggaaggagatggattgggcacagatggcatgtcaccgatgtctggtgtatctgggggatttgtcccgatatcagaatgaattagctggcgtagataccgagctgctagccgagagattttactaccaagccctgtcagtagctcctcagattggaatgcccttcaatcagctgggcaccctggcaggcagcaagtactataatgtggaagccatgtattgctacctgcgctgcatccagtcagaagtgtcctttgagggagcctatgggaacctcaagcggctgtatgacaaggcagccaaaatgtaccaccaactgaagaagtgtgagactcggaaactgtctcctggcaaaaagcgatgtaaagacattaaaaggttgctagtgaactttatgtatctgcaaagcctcctacagcccaaaagcagctccgtggactcagagctgacctcactttgccagtcagtcctggaggacttcaacctctgcctcttctacctgccctcctcacccaacctcagcctggccagtgaggatgaggaggagtatgagagtggatatgctttcctcccggaccttctcatctttcaaatggtcatcatctgccttatgtgtgtgcacagcttggagagagcaggatccaagcagtacagtgcagccattgccttcaccctggccctcttttcccacctcgtcaatcatgtcaacatacggctgcaggctgagctggaagagggcgagaatcccgtcccggcattccagagtgatggcacagatgaaccagagtccaaggaacctgtggagaaagaggaggagccagatcctgagcctcctcctgtaacaccccaagtgggtgagggcagaaagagccgtaagttctctcgcctctcctgtctccgccgtcgccgccacccacccaaagttggtgatgacagtgacctgagtgaaggctttgaatcggactcaagccatgactcagcccgggccagtgagggctcagacagtggctctgacaagagtcttgaaggtgggggaacggcctttgatgctgaaacagactcggaaatgaatagccaggagtcccgatcagacttggaagatatggaggaagaggaggggacacggtcaccaaccctggagccccctcggggcagatcagaggctcccgattccctcaatggcccactgggccccagtgaggctagcattgccagcaatctacaagccatgtccacccagatgttccagactaagcgctgcttccgactggcccccacctttagcaacctgctcctccagcccaccaccaaccctcatacctcggccagccacaggccttgcgtcaatggggatgtagacaagccttcagagccagcctctgaggagggctctgagtcggaggggagtgagtccagtggacgctcctgtcggaatgagcgcagcatccaggagaagcttcaggtcctgatggccgaaggtctgcttcctgctgtgaaagtcttcctggactggcttcggaccaaccccgacctcatcatcgtgtgtgcgcagagctctcaaagtctgtggaaccgcctgtctgtgttgctgaatctgttgcctgctgctggtgaactccaggagtctggcctggccttgtgtcctgaggtccaagatcttcttgaaggttgtgaactgcctgacctcccctctagccttctgctcccagaggacatggctcttcgtaacctgcccccgctccgagctgcccacagacgctttaactttgacacggatcggcccctgctcagcaccttagaggagtcagtggtgcgcatctgctgcatccgcagctttggtcatttcatcgcccgcctgcaaggcagcatcctgcagttcaacccagaggttggcatcttcgtcagcattgcccagtctgagcaggagagcctgctgcagcaggcccaggcacagttccgaatggcacaggaggaagctcgtcggaacaggctcatgagagacatggctcagctacgacttcagctcgaagtgtctcagctggagggcagcctgcagcagcccaaggcccagtcagccatgtctccctacctcgtccctgacacccaggccctctgccaccatctccctgtcatccgccaactggccaccagtggccgcttcattgtcatcatcccaaggacagtgatcgatggcctggatttgctgaagaaggaacacccaggggcccgggatgggattcggtacctggaggcagagtttaaaaaaggaaacaggtacattcgctgccagaaagaggtgggaaagagctttgagcggcataagctgaagaggcaggatgcagatgcctggactctctataagatcctagacagctgcaaacagctgactctggcccagggggcaggtgaggaggatccgagtggcatggtgaccatcatcacaggccttccactggacaaccccagcgtgctttcaggccccatgcaggcagccctgcaggccgctgcccacgccagtgtggacatcaagaatgttctggacttctacaagcagtggaaggaaattggttgatactgacccccaggccctgcagtggggctgactccagatctctcctgccctccctggcagccaggaccagcacctgtagtcaccccaccacacgcagactcatgcacgcacacaggagggaggcctagctgctcagaggctgcagggagggcccaggagccggctgggagggtggggtccctttgttgccaagacgttaggaaagcgaggaaagtgcttggattaggagagtcttgtgggcccctggccagccttcctgcctcagctcccctgctgtctccaggggcaggtggtaggcatgggtacctgcatttcactggagtgggttcttggatctctgaggggaaggaacagcaaaagaggcccttcttcctcacccaagatgcagggtggttggggccaggagtttggaccctctaggtcttgggggaagagctgggtaatacctggtgtctgagtgattctctgcagacccttcccctcctcaaggatcacccatcctcctttcagccccctttatggggaccaggcagctctggagccagccacaggggctgttagagaagcaaggcctggagtggcctgcaccgagtagcagggtcagggttcgtgtgctcctcctcctgctgcaggggctgcacatcccattgccccacttctgctttgtgtctccctctgtctagcttccagggcagggagcaggccccacctagggctgcaggcagtctggcctgtgccagcacggtctcctgtgcccaccagccccacaggtgctgtgctttgtgctcttggctgctgtgctgggacagaatgggatgccaggaagagaagaaagggggtgcagtctgaggccaccaccccccttcctatctaagggagggctgaagacaaggggccggcattcagtgggcagcagaaaggagaggctccttgaagctgctcagtcagaggcccccgtccctccttttgccttccgcaggactgaagacctgaaggggctggcttttggagtgttgaggtgaatatctgggagcagagatcatgaatagctcagggcagtgaatggcgcaccaagagcagggctgtgtgtgggaggctgcagccaggattgcctcagctcctccccctcaggctgggaggatagcacaggctaggggctcggggtggagggtctcagctctgctgcccccaccccagtactagcctagcttcccaagctgtggcttagaggatagttggcttcctgcctctctcctctaaaatagcaagtctgggaaatcctggggtgagtggagtcaccccactcccagttgctggcagagactgagactaacagacatcgtgttgttggggtaagcgagggcaaacaggaga

SEQ ID NO: 298280 - DNA, 1732 bp, Homo sapiens
  misc_feature (24)..(24): n is a, c, g, or t
  misc_feature (26)..(26): n is a, c, g, or t
  misc_feature (33)..(34): n is a, c, g, or t
  misc_feature (45)..(45): n is a, c, g, or t
taggctaggtacgaggccgggtgntnatcggcnnaggggtacctngaggcagagtttaaaaaaggaaacaggtacattcgctgccagaaagaggtgggaaagagctttgagcggcataagctgaagaggcaggatgcagatgcctggactctctataagatcctagacagctgcaaacagctgactctggcccagggggcaggtgaggaggatccgagtggcatggtgaccatcatcacaggccttccactggacaaccccagcgtgctttcaggccccatgcaggcagccctgcaggccgctgcccacgccagtgtggacatcaagaatgttctggacttctacaagcagtggaaggaaattggttgatactgacccccaggccctgcagtggggctgactccagatctctcctgccctccctggcagccaggaccagcacctgtagtcaccccaccacacgcagactcatgcacgcacacaggagggaggcctagctgctcagaggctgcagggagggcccaggagccggctgggagggtggggtccctttgttgccaagacgttaggaaagcgaggaaagtgcttggattaggagagtcttgtgggcccctggccagccttcctgcctcagctcccctgctgtctccaggggcaggtggtaggcatgggtacctgcatttcactggagtgggttcttggatctctgaggggaaggaacagcaaaagaggcccttcttcctcacccaagatgcagggtggttggggccaggagtttggaccctctaggtcttgggggaagagctgggtaatacctggtgtctgagtgattctctgcagacccttcccctcctcaaggatcacccatcctcctttcagccccctttatggggaccaggcagctctggagccagccacaggggctgttagagaagcaaggcctggagtggcctgcaccgagtagcagggtcagggttcgtgtgctcctcctcctgctgcaggggctgcacatcccattgccccacttctgctttgtgtctccctctgtctagcttccagggcagggagcaggccccacctagggctgcaggcagtctggcctgtgccagcacggtctcctgtgcccaccagccccacaggtgctgtgctttgtgctcttggctgctgtgctgggacagaatgggatgccaggaagagaagaaagggggtgcagtctgaggccaccaccccccttcctatctaagggagggctgaagacaaggggccggcattcagtgggcagcagaaaggagaggctccttgaagctgctcagtcagaggcccccgtccctccttttgccttccgcaggactgaagacctgaaggggctggcttttggagtgttgaggtgaatatctgggagcagagatcatgaatagctcagggcagtgaatggcgcaccaagagcagggctgtgtgtgggaggctgcagccaggattgcctcagctcctccccctcaggctgggaggatagcacaggctaggggctcggggtggagggtctcagctctgctgcccccaccccagtactagcctagcttcccaagctgtggcttagaggatagttggcttcctgcctctctcctctaaaatagcaagtctgggaaatcctggggtgagtggagtcaccccactcccagttgctggcagagactgagactaaagcatcacttaataaaccccccaagcccaa

SEQ ID NO: 298281 - DNA, 3865 bp, Homo sapiens
agctgtcgcgggcagccgcctaacagcgatggcggccgagcagggccggtggcggcggcggctgcggctacggccggagacggcagtgttggcggtagtggtgggtggcaggggcctgtgaccgggagctgcccccggacccgggcaccatgagccaaggcccccccacaggggagagcagcgagcccgaagcaaaagtcctccacactaagcggctttaccgggctgtggtggaggctgtgcatcgacttgacctcatcctttgcaacaaaactgcttatcaagaagtattcaaaccagaaaacattagcctgaggaacaagctgcgtgagctctgcgtcaagcttatgttcctgcacccagtggactatgggagaaaggctgaggagctgctgtggagaaaggtatactatgaagttatccagcttatcaagactaacaaaaagcacatccacagccggagcactttggaatgtgcctacaggacgcacctggttgctggtattggcttctaccagcatctccttctctatatccagtcccactaccagctggaactgcagtgctgcatcgactggacccatgtcactgaccccctcataggatgcaagaagccagtgtctgcctcagggaaggagatggattgggcacagatggcatgtcaccgatgtctggtgtatctgggggatttgtcccgatatcagaatgaattagctggcgtagataccgagctgctagccgagagattttactaccaagccctgtcagtagctcctcagattggaatgcccttcaatcagctgggcaccctggcaggcagcaagtactataatgtggaagccatgtattgctacctgcgctgcatccagtcagaagtgtcctttgagggagcctatgggaacctcaagcggctgtatgacaaggcagccaaaatgtaccaccaactgaagaagtgtgagactcggaaactgtctcctggcaaaaagcgatgtaaagacattaaaaggttgctagtgaactttatgtatctgcaaagcctcctacagcccaaaagcagctccgtggactcagagctgacctcactttgccagtcagtcctggaggacttcaacctctgcctcttctacctgccctcctcacccaacctcagcctggccagtgaggatgaggaggagtatgagagtggatatgctttcctcccggaccttctcatctttcaaatggtcatcatctgccttatgtgtgtgcacagcttggagagagcaggatccaagcagtacagtgcagccattgccttcaccctggccctcttttcccacctcgtcaatcatgtcaacatacggctgcaggctgagctggaagagggcgagaatcccgtcccggcattccagagtgatggcacagatgaaccagagtccaaggaacctgtggagaaagaggaggagccagatcctgagcctcctcctgtaacaccccaagtgggtgagggcagaaagagccgtaagttctctcgcctctcctgtctccgccgtcgccgccacccacccaaagttggtgatgacagtgacctgagtgaaggctttgaatcggactcaagccatgactcagcccgggccagtgagggctcagacagtggctctgacaagagtcttgaaggtgggggaacggcctttgatgctgaaacagactcggaaatgaatagccaggagtcccgatcagacttggaagatatggaggaagaggaggggacacggtcaccaaccctggagccccctcggggcagatcagaggctcccgattccctcaatggcccactgggccccagtgaggctagcattgccagcaatctacaagccatgtccacccagatgttccagactaagcgctgcttccgactggcccccacctttagcaacctgctcctccagcccaccaccaaccctcatacctcggccagccacaggccttgcgtcaatggggatgtagacaagccttcagagccagcctctgaggagggctctgagtcggaggggagtgagtccagtggacgctcctgtcggaatgagcgcagcatccaggagaagcttcaggtcctgatggccgaaggtctgcttcctgctgtgaaagtcttcctggactggcttcggaccaaccccgacctcatcatcgtgtgtgcgcagagctctcaaagtctgtggaaccgcctgtctgtgttgctgaatctgttgcctgctgctggtgaactccaggagtctggcctggccttgtgtcctgaggtccaagatcttcttgaaggttgtgaactgcctgacctcccctctagccttctgctcccagaggacatggctcttcgtaacctgcccccgctccgagctgcccacagacgctttaactttgacacggatcggcccctgctcagcaccttagaggagtcagtggtgcgcatctgctgcatccgcagctttggtcatttcatcgcccgcctgcaaggcagcatcctgcagttcaacccagaggttggcatcttcgtcagcattgcccagtctgagcaggagagcctgctgcagcaggcccaggcacagttccgaatggcacaggaggaagctcgtcggaacaggctcatgagagacatggctcagctacgacttcagctcgaagtgtctcagctggagggcagcctgcagcagcccaaggcccagtcagccatgtctccctacctcgtccctgacacccaggccctctgccaccatctccctgtcatccgccaactggccaccagtggccgcttcattgtcatcatcccaaggacagtgatcgatggcctggatttgctgaagaaggaacacccaggggcccgggatgggattcggtacctggaggcagagtttaaaaaaggaaacaggtacattcgctgccagaaagaggtgggaaagagctttgagcggcataagctgaagaggcaggatgcagatgcctggactctctataagatcctagacagctgcaaacagctgactctggcccagggggcaggtgaggaggatccgagtggcatggtgaccatcatcacaggccttccactggacaaccccagcgtgctttcaggccccatgcaggcagccctgcaggccgctgcccacgccagtgtggacatcaagaatgttctggacttctacaagcagtggaaggaaattggttgatactgacccccaggccctgcagtggggctgactccagatctctcctgccctccctggcagccaggaccagcacctgtagtcaccccaccacacgcagactcatgcacgcacacaggagggaggcctagctgctcagaggctgcagggagggcccaggagccggctgggagggtggggtccctttgttgccaagacgttaggaaagcgaggaaagtgcttggattaggagagtcttgtgggcccctggccagccttcctgcctcagctcccctgctgtctccaggggcaggtggtaggcatgggtacctgcatttcactggagtgggttcttggatctctgaggggaaggaacagcaaaagaggcccttcttcctcacccaagatgcagggtggttggggccaggagtttggaccctcagctcctccccctcaggctgggaggatagcacaggctaggggctcggggtggagggtctcagctctgctgcccccaccccagtactagcctagcttcccaagctgtggcttagaggatagttggcttcctgcctctctcctctaaaatagcaagtctgggaaatcctggggtgagtggagtcaccccactcccagttgctggcagagactgagactaaagcatcacttaataaaccccccaagcccaa

SEQ ID NO: 298282 - DNA, 3576 bp, Homo sapiens
agctgtcgcgggcagccgcctaacagcgatggcggccgagcagggccggtggcggcggcggctgcggctacggccggagacggcagtgttggcggtagtggtgggtggcaggggcctgtgaccgggagctgcccccggacccgggcaccatgagccaaggcccccccacaggggagagcagcgagcccgaagcaaaagtcctccacactaagcggctttaccgggctgtggtggaggctgtgcatcgacttgacctcatcctttgcaacaaaactgcttatcaagaagtattcaaaccagaaaacattagcctgaggaacaagctgcgtgagctctgcgtcaagcttatgttcctgcacccagtggactatgggagaaaggctgaggagctgctgtggagaaaggtatactatgaagttatccagcttatcaagactaacaaaaagcacatccacagccggagcactttggaatgtgcctacaggacgcacctggttgctggtattggcttctaccagcatctccttctctatatccagtcccactaccagctggaactgcagtgctgcatcgactggacccatgtcactgaccccctcataggatgcaagaagccagtgtctgcctcagggaaggagatggattgggcacagatggcatgtcaccgatgtctggtgtatctgggggatttgtcccgatatcagaatgaattagctggcgtagataccgagctgctagccgagagattttactaccaagccctgtcagtagctcctcagattggaatgcccttcaatcagctgggcaccctggcaggcagcaagtactataatgtggaagccatgtattgctacctgcgctgcatccagtcagaagtgtcctttgagggagcctatgggaacctcaagcggctgtatgacaaggcagccaaaatgtaccaccaactgaagaagtgtgagactcggaaactgtctcctggcaaaaagcgatgtaaagacattaaaaggttgctagtgaactttatgtatctgcaaagcctcctacagcccaaaagcagctccgtggactcagagctgacctcactttgccagtcagtcctggaggacttcaacctctgcctcttctacctgccctcctcacccaacctcagcctggccagtgaggatgaggaggagtatgagagtggatatgctttcctcccggaccttctcatctttcaaatggtcatcatctgccttatgtgtgtgcacagcttggagagagcaggatccaagcagtacagtgcagccattgccttcaccctggccctcttttcccacctcgtcaatcatgtcaacatacggctgcaggctgagctggaagagggcgagaatcccgtcccggcattccagagtgatggcacagatgaaccagagtccaaggaacctgtggagaaagaggaggagccagatcctgagcctcctcctgtaacaccccaagtgggtgagggcagaaagagccgtaagttctctcgcctctcctgtctccgccgtcgccgccacccacccaaagttggtgatgacagtgacctgagtgaaggctttgaatcggactcaagccatgactcagcccgggccagtgagggctcagacagtggctctgacaagagtcttgaaggtgggggaacggcctttgatgctgaaacagactcggaaatgaatagccaggagtcccgatcagacttggaagatatggaggaagaggaggggacacggtcaccaaccctggagccccctcggggcagatcagaggctcccgattccctcaatggcccactgggccccagtgaggctagcattgccagcaatctacaagccatgtccacccagatgttccagactaagcgctgcttccgactggcccccacctttagcaacctgctcctccagcccaccaccaaccctcatacctcggccagccacaggccttgcgtcaatggggatgtagacaagccttcagagccagcctctgaggagggctctgagtcggaggggagtgagtccagtggacgctcctgtcggaatgagcgcagcatccaggagaagcttcaggtcctgatggccgaaggtctgcttcctgctgtgaaagtcttcctggactggcttcggaccaaccccgacctcatcatcgtgtgtgcgcagagctctcaaagtctgtggaaccgcctgtctgtgttgctgaatctgttgcctgctgctggtgaactccaggagtctggcctggccttgtgtcctgaggtccaagatcttcttgaaggttgtgaactgcctgacctcccctctagccttctgctcccagaggacatggctcttcgtaacctgcccccgctccgagctgcccacagacgctttaactttgacacggatcggcccctgctcagcaccttagaggagtcagtggtgcgcatctgctgcatccgcagctttggtcatttcatcgcccgcctgcaaggcagcatcctgcagttcaacccagaggttggcatcttcgtcagcattgcccagtctgagcaggagagcctgctgcagcaggcccaggcacagttccgaatggcacaggaggaagctcgtcggaacaggctcatgagagacatggctcagctacgacttcagctcgaagtgtctcagctggagggcagcctgcagcagcccaaggcccagtcagccatgtctccctacctcgtccctgacacccaggccctctgccaccatctccctgtcatccgccaactggccaccagtggccgcttcattgtcatcatcccaaggacagtgatcgatggcctggatttgctgaagaaggaacacccaggggcccgggatgggattcggtacctggaggcagagtttaaaaaaggaaacaggtacattcgctgccagaaagaggtgggaaagagctttgagcggcataagctgaagaggcaggatgcagatgcctggactctctataagatcctagacagctgcaaacagctgactctggcccagggggcaggtgaggaggatccgagtggcatggtgaccatcatcacaggccttccactggacaaccccagcgtgctttcaggccccatgcaggcagccctgcaggccgctgcccacgccagtgtggacatcaagaatgttctggacttctacaagcagtggaaggaaattggttgatactgacccccaggccctgcagtggggctgactccagatctctcctgccctccctggcagccaggaccagcacctgtagtcaccccaccacacgcagactcatgcacgcacacaggagggaggcctagctgctcagaggctgcagggagggcccaggagccggctgggagggtggggtccctttgttgccaagacgttaggaaagcgaggaaagtgcttggattaggagagtcttgtgggcccctggccagccttcctgcctcagctcccctgctgtctccaggggcaggtggtaggcatgggtacctgcatttcactggagtgagaacacatggacacatggcggggaacaacacacacaggggcatgtgggatg

SEQ ID NO: 298283 - DNA, 3301 bp, Homo sapiens
agctgtcgcgggcagccgcctaacagcgatggcggccgagcagggccggtggcggcggcggctgcggctacggccggagacggcagtgttggcggtagtggtgggtggcaggggcctgtgaccgggagctgcccccggacccgggcaccatgagccaaggcccccccacaggggagagcagcgagcccgaagcaaaagtcctccacactaagcggctttaccgggctgtggtggaggctgtgcatcgacttgacctcatcctttgcaacaaaactgcttatcaagaagtattcaaaccagaaaacattagcctgaggaacaagctgcgtgagctctgcgtcaagcttatgttcctgcacccagtggactatgggagaaaggctgaggagctgctgtggagaaaggtatactatgaagttatccagcttatcaagactaacaaaaagcacatccacagccggagcactttggaatgtgcctacaggacgcacctggttgctggtattggcttctaccagcatctccttctctatatccagtcccactaccagctggaactgcagtgctgcatcgactggacccatgtcactgaccccctcataggatgcaagaagccagtgtctgcctcagggaaggagatggattgggcacagatggcatgtcaccgatgtctggtgtatctgggggatttgtcccgatatcagaatgaattagctggcgtagataccgagctgctagccgagagattttactaccaagccctgtcagtagctcctcagattggaatgcccttcaatcagctgggcaccctggcaggcagcaagtactataatgtggaagccatgtattgctacctgcgctgcatccagtcagaagtgtcctttgagggagcctatgggaacctcaagcggctgtatgacaaggcagccaaaatgtaccaccaactgaagaagtgtgagactcggaaactgtctcctggcaaaaagcgatgtaaagacattaaaaggttgctagtgaactttatgtatctgcaaagcctcctacagcccaaaagcagctccgtggactcagagctgacctcactttgccagtcagtcctggaggacttcaacctctgcctcttctacctgccctcctcacccaacctcagcctggccagtgaggatgaggaggagtatgagagtggatatgctttcctcccggaccttctcatctttcaaatggtcatcatctgccttatgtgtgtgcacagcttggagagagcaggatccaagcagtacagtgcagccattgccttcaccctggccctcttttcccacctcgtcaatcatgtcaacatacggctgcaggctgagctggaagagggcgagaatcccgtcccggcattccagagtgatggcacagatgaaccagagtccaaggaacctgtggagaaagaggaggagccagatcctgagcctcctcctgtaacaccccaagtgggtgagggcagaaagagccgtaagttctctcgcctctcctgtctccgccgtcgccgccacccacccaaagttggtgatgacagtgacctgagtgaaggctttgaatcggactcaagccatgactcagcccgggccagtgagggctcagacagtggctctgacaagagtcttgaaggtgggggaacggcctttgatgctgaaacagactcggaaatgaatagccaggagtcccgatcagacttggaagatatggaggaagaggaggggacacggtcaccaaccctggagccccctcggggcagatcagaggctcccgattccctcaatggcccactgggccccagtgaggctagcattgccagcaatctacaagccatgtccacccagatgttccagactaagcgctgcttccgactggcccccacctttagcaacctgctcctccagcccaccaccaaccctcatacctcggccagccacaggccttgcgtcaatggggatgtagacaagccttcagagccagcctctgaggagggctctgagtcggaggggagtgagtccagtggacgctcctgtcggaatgagcgcagcatccaggagaagcttcaggtcctgatggccgaaggtctgcttcctgctgtgaaagtcttcctggactggcttcggaccaaccccgacctcatcatcgtgtgtgcgcagagctctcaaagtctgtggaaccgcctgtctgtgttgctgaatctgttgcctgctgctggtgaactccaggagtctggcctggccttgtgtcctgaggtccaagatcttcttgaaggttgtgaactgcctgacctcccctctagccttctgctcccagaggacatggctcttcgtaacctgcccccgctccgagctgcccacagacgctttaactttgacacggatcggcccctgctcagcaccttagaggagtcagtggtgcgcatctgctgcatccgcagctttggtcatttcatcgcccgcctgcaaggcagcatcctgcagttcaacccagaggttggcatcttcgtcagcattgcccagtctgagcaggagagcctgctgcagcaggcccaggcacagttccgaatggcacaggaggaagctcgtcggaacaggctcatgagagacatggctcagctacgacttcagctcgaagtgtctcagctggagggcagcctgcagcagcccaaggcccagtcagccatgtctccctacctcgtccctgacacccaggccctctgccaccatctccctgtcatccgccaactggccaccagtggccgcttcattgtcatcatcccaaggacagtgatcgatggcctggatttgctgaagaaggaacacccaggggcccgggatgggattcggtacctggaggcagagtttaaaaaaggaaacaggtacattcgctgccagaaagaggtgggaaagagctttgagcggcataagctgaagaggcaggatgcagatgcctggtaacattttagccctcacccctagaacctcaggccacctgccttgctcctccacgagcattcctagggagaacgggtagggctggataattctgaggctccacacgtagcctgccagggccctcctgcaggcctcaccttgcgaggagtacgaagttgccgcagcacctgagcttttcctctgcagatgggtcagcctctttgggccttgcgatgctcaggcttggtgttttccctcaatgcacctttgcctgctccccatatgtctccagggccagcttccagggcccactgctgctcactgccctcccagcccccagctgc

SEQ ID NO: 298284 - DNA, 621 bp, Homo sapiens
ttctgtcccagcacagcagccaagagcacgaagcacagcacctgtggggctggtgggcacaggacagaatgggatgccaggaagagaagaaagggggtgcagtctgaggccaccaccccccttcctatctaagggagggctgaagacaaggggccggcattcagtgggcagcagaaaggagaggctccttgaagctgctcagtcagaggcccccgtccctccttttgccttccgcaggactgaagacctgaaggggctggcttttggagtgttgaggtgaatatctgggagcagagatcatgaatagctcagggcagtgaatggcgcaccaagagcagggctgtgtgtgggaggctgcagccaggattgcctcagctcctccccctcaggctgggaggatagcacaggctaggggctcggggtggagggtctcagctctgctgcccccaccccagtactagcctagcttcccaagctgtggcttagaggatagttggcttcctgcctctctcctctaaaatagcaagtctgggaaatcctggggtgagtggagtcaccccactcccagttgctggcagagactgagactaaagcatcacttaataaaccccccaagcccaa

SEQ ID NO: 298285 - DNA, 2376 bp, Homo sapiens
agctgtcgcgggcagccgcctaacagcgatggcggccgagcagggccggtggcggcggcggctgcggctacggccggagacggcagtgttggcggtagtggtgggtggcaggggcctgtgaccgggagctgcccccggacccgggcaccatgagccaaggcccccccacaggggagagcagcgagcccgaagcaaaagtcctccacactaagcggctttaccgggctgtggtggaggctgtgcatcgacttgacctcatcctttgcaacaaaactgcttatcaagaagtattcaaaccagaaaacattagcctgaggaacaagctgcgtgagctctgcgtcaagcttatgttcctgcacccagtggactatgggagaaaggctgaggagctgctgtggagaaaggtatactatgaagttatccagcttatcaagactaacaaaaagcacatccacagccggagcactttggaatgtgcctacaggacgcacctggttgctggtattggcttctaccagcatctccttctctatatccagtcccactaccagctggaactgcagtgctgcatcgactggacccatgtcactgaccccctcataggatgcaagaagccagtgtctgcctcagggaaggagatggattgggcacagatggcatgtcaccgatgtctggtgtatctgggggatttgtcccgatatcagaatgaattagctggcgtagataccgagctgctagccgagagattttactaccaagccctgtcagtagctcctcagattggaatgcccttcaatcagctgggcaccctggcaggcagcaagtactataatgtggaagccatgtattgctacctgcgctgcatccagtcagaagtgtcctttgagggagcctatgggaacctcaagcggctgtatgacaaggcagccaaaatgtaccaccaactgaagaagtgtgagactcggaaactgtctcctggcaaaaagcgatgtaaagacattaaaaggttgctagtgaactttatgtatctgcaaagcctcctacagcccaaaagcagctccgtggactcagagctgacctcactttgccagtcagtcctggaggacttcaacctctgcctcttctacctgccctcctcacccaacctcagcctggccagtgaggatgaggaggagtatgagagtggatatgctttcctcccggaccttctcatctttcaaatggtcatcatctgccttatgtgtgtgcacagcttggagagagcaggatccaagcagtacagtgcagccattgccttcaccctggccctcttttcccacctcgtcaatcatgtcaacatacggctgcaggctgagctggaagagggcgagaatcccgtcccggcattccagagtgatggcacagatgaaccagagtccaaggaacctgtggagaaagaggaggagccagatcctgagcctcctcctgtaacaccccaagtgggtgagggcagaaagagccgtaagttctctcgcctctcctgtctccgccgtcgccgccacccacccaaagttggtgatgacagtgacctgagtgaaggctttgaatcggactcaagccatgactcagcccgggccagtgagggctcagacagtggctctgacaagagtcttgaaggtgggggaacggcctttgatgctgaaacagactcggaaatgaatagccaggagtcccgatcagacttggaagatatggaggaagaggaggggacacggtcaccaaccctggagccccctcggggcagatcagaggctcccgattccctcaatggcccactgggccccagtgaggctagcattgccagcaatctacaagccatgtccacccagatgttccagactaagcgctgcttccgactggcccccacctttagcaacctgctcctccagcccaccaccaaccctcatacctcggccagccacaggccttgcgtcaatggggatgtagacaagccttcagagccagcctctgaggagggctctgagtcggaggggagtgagtccagtggacgctcctgtcggaatgagcgcagcatccaggagaagcttcaggtcctgatggccgaaggtctgcttcctgctgtgaaagtcttcctggactggcttcggaccaaccccgacctcatcatcgtgtgtgcgcaggcctggccttgtgtcctgaggtccaagatcttcttgaaggttgtgaactgcctgacctcccctctagccttctgctcccagaggacatggctcttcgtaacctgcccccgctccgagctgcccacagacgctttaactttgacacggatcggcccctgctcagcaccttagaggaggtaaggatagcatttcttat

SEQ ID NO: 298286 - DNA, 1034 bp, Homo sapiens
  misc_feature (24)..(24): n is a, c, g, or t
  misc_feature (26)..(26): n is a, c, g, or t
  misc_feature (33)..(34): n is a, c, g, or t
  misc_feature (45)..(45): n is a, c, g, or t
taggctaggtacgaggccgggtgntnatcggcnnaggggtacctngaggcagagtttaaaaaaggaaacaggtacattcgctgccagaaagaggtgggaaagagctttgagcggcataagctgaagaggcaggatgcagatgcctggactctctataagatcctagacagctgcaaacagctgactctggcccagggggcaggtgaggaggatccgagtggcatggtgaccatcatcacaggccttccactggacaaccccagcgtgctttcaggccccatgcaggcagccctgcaggccgctgcccacgccagtgtggacatcaagaatgttctggacttctacaagcagtggaaggaaattggttgatactgacccccaggccctgcagtggggctgactccagatctctcctgccctccctggcagccaggaccagcacctgtagtcaccccaccacacgcagactcatgcacgcacacaggagggaggcctagctgctcagaggctgcagggagggcccaggagccggctgggagggtggggtccctttgttgccaagacgttaggaaagcgaggaaagtgcttggattaggagagtcttgtgggcccctggccagccttcctgcctcagctcccctgctgtctccaggggcaggtggtaggcatgggtacctgcatttcactggagtgggttcttggatctctgaggggaaggaacagcaaaagaggcccttcttcctcacccaagatgcagggtggttggggccaggagtttggaccctcagctcctccccctcaggctgggaggatagcacaggctaggggctcggggtggagggtctcagctctgctgcccccaccccagtactagcctagcttcccaagctgtggcttagaggatagttggcttcctgcctctctcctctaaaatagcaagtctgggaaatcctggggtgagtggagtcaccccactcccagttgctggcagagactgagactaaagcatcacttaataaaccccccaagcccaa

SEQ ID NO: 298287 - DNA, 1869 bp, Homo sapiens
agctgtcgcgggcagccgcctaacagcgatggcggccgagcagggccggtggcggcggcggctgcggctacggccggagacggcagtgttggcggtagtggtgggtggcaggggcctgtgaccgggagctgcccccggacccgggcaccatgagccaaggcccccccacaggggagagcagcgagcccgaagcaaaagtcctccacactaagcggctttaccgggctgtggtggaggctgtgcatcgacttgacctcatcctttgcaacaaaactgcttatcaagaagtattcaaaccagaaaacattagcctgaggaacaagctgcgtgagctctgcgtcaagcttatgttcctgcacccagtggactatgggagaaaggctgaggagctgctgtggagaaaggtatactatgaagttatccagcttatcaagactaacaaaaagcacatccacagccggagcactttggaatgtgcctacaggacgcacctggttgctggtattggcttctaccagcatctccttctctatatccagtcccactaccagctggaactgcagtgctgcatcgactggacccatgtcactgaccccctcataggatgcaagaagccagtgtctgcctcagggaaggagatggattgggcacagatggcatgtcaccgatgtctggtgtatctgggggatttgtcccgatatcagaatgaattagctggcgtagataccgagctgctagccgagagattttactaccaagccctgtcagtagctcctcagattggaatgcccttcaatcagctgggcaccctggcaggcagcaagtactataatgtggaagccatgtattgctacctgcgctgcatccagtcagaagtgtcctttgagggagcctatgggaacctcaagcggctgtatgacaaggcagccaaaatgtaccaccaactgaagaagtgtgagactcggaaactgtctcctggcaaaaagcgatgtaaagacattaaaaggttgctagtgaactttatgtatctgcaaagcctcctacagcccaaaagcagctccgtggactcagagctgacctcactttgccagtcagtcctggaggacttcaacctctgcctcttctacctgccctcctcacccaacctcagcctggccagtgaggatgaggaggagtatgagagtggatatgctttcctcccggaccttctcatctttcaaatggtcatcatctgccttatgtgtgtgcacagcttggagagagcaggatccaagcagtacagtgcagccattgccttcaccctggccctcttttcccacctcgtcaatcatgtcaacatacggctgcaggctgagctggaagagggcgagaatcccgtcccggcattccagagtgatggcacagatgaaccagagtccaaggaacctgtggagaaagaggaggagccagatcctgagcctcctcctgtaacaccccaagtgggtgagggcagaaagagccgtaagttctctcgcctctcctgtctccgccgtcgccgccacccacccaaagttggtgatgacagtgacctgagtgaaggctttgaatcggactcaagccatgactcagcccgggccagtgagggctcagacagtggctctgacaagagtcttgaaggtgggggaacggcctttgatgctgaaacagactcggaaatgaatagccaggagtcccgatcagacttggaagatatggaggatagttggcttcctgcctctctcctctaaaatagcaagtctgggaaatcctggggtgagtggagtcaccccactcccagttgctggcagagactgagactaaagcatcacttaataaaccccccaagcccaa

SEQ ID NO: 298288 - DNA, 923 bp, Homo sapiens
agctgtcgcgggcagccgcctaacagcgatggcggccgagcagggccggtggcggcggcggctgcggctacggccggagacggcagtgttggcggtagtggtgggtggcaggggcctgtgaccgggagctgcccccggacccgggcaccatgagccaaggcccccccacaggggagagcagcgagcccgaagcaaaagtcctccacactaagcggctttaccgggctgtggtggaggctgtgcatcgacttgacctcatcctttgcaacaaaactgcttatcaagaagtattcaaaccagaaaacattagcctgaggaacaagctgcgtgagctctgcgtcaagcttatgttcctgcacccagtggactatgggagaaaggctgaggagctgctgtggagaaaggtatactatgaagttatccagcttatcaagactaacaaaaagcacatccacagccggagcactttggaatgtgcctacaggacgcacctggttgctggtattggcttctaccagcatctccttctctatatccagtcccactaccagctggaactgcagtgctgcatcgactggacccatgtcactgaccccctcataggatgcaagaagccagtgtctgcctcagggaaggagatggattgggcacagatggcatgtcaccgatgtctggtgtatctgggggatttgtcccgatatcagaatgaattagctggcgtagataccgagctgctagccgagagattttactaccaagccctgtcagtagctcctcagattggaatgcccttcaatcagctgggcaccctggcaggcagcaagtactataatgtggaagccatgtattgctacctgcgctggtgagtatttgccagctcttttcagcttgagggagggatctctagagtcgcctcagcatca

SEQ ID NO: 298289 - DNA, 698 bp, Homo sapiens
  misc_feature (13)..(13): n is a, c, g, or t
tatcagctcggcncggttactggaccttctgccaagtatattgctggcagaaggtcatgttttcagagaactttgggagccctctagggagccaggtcccttctctgcctgaagagtgtactgaggtgagctcagatacttcctccagagccccttgtcacagcagtctgagcttatctgttttgtctttccctaccttgcccaccagtgatcgatggcctggatttgctgaagaaggaacacccaggggcccgggatgggattcggtacctggaggcagagtttaaaaaaggaaacaggtacattcgctgccagaaagaggtgggaaagagctttgagcggcataagctgaagaggcaggatgcagatgcctggtaacattttagccctcacccctagaacctcaggccacctgccttgctcctccacgagcattcctagggagaacgggtagggctggataattctgaggctccacacgtagcctgccagggccctcctgcaggcctcaccttgcgaggagtacgaagttgccgcagcacctgagcttttcctctgcagatgggtcagcctctttgggccttgcgatgctcaggcttggtgttttccctcaatgcacctttgcctgctccccatatgtctccagggccagcttccagggcccactgctgctcactgccctcccagcccccagctgc

SEQ ID NO: 298290 - DNA, 274 bp, Homo sapiens
gcagagtaacatatcctccccctgccaagactcagtagctcacctctatctcttacagcatccagtcagaagtgtcctttgagggagcctatgggaacctcaagcggctgtatgacaaggcagccaaaatgtaccaccaactgaagaagtgtgagactcggaaactgtctcctggcaaaaagcggtgagtggggcctgtgaggaggacgggttttttctgcagttggtgcagtaggaccatagggactgcgggaccattcagcatttactttgg

SEQ ID NO: 298291 - DNA, 348 bp, Homo sapiens
cccagatgtgggggagggttttctgaaacttaaaatcatcgagtttcccttcgttttctctcttgtgcagcccgatatcagaatgaattagctggcgtagataccgagctgctagccgagagattttactaccaagccctgtcagtagctcctcagattggtaagttgtccccaacttgggcctctgaatccagtagggttttcctagggaagacgatgttgttgagatggcaggcagttcatactcattttccccagctcctcttcattctcagctctctcgtacttcaccttgtttataccttttccctcttgtaacacactcagaaaatggtggaaggggaagat

SEQ ID NO: 298292 - DNA, 508 bp, Homo sapiens
tcagatgtaattaggattagggaaggaggaagagagtcagatgtaattaggattagagaaggaggggagcctggtcccagatggaaagatcagagagttagagctaagagtatgacagtaacttgtgagtgagagtagatgtagatgaagttccagagccaagtgagatgaacagggtaagggagggtgagtgcgactctgagtttattgcttaaccagccccttccctttcgcaatctgtagcacatccacagccggagcactttggaatgtgcctacaggacgcacctggttgctggtattggcttctaccagcatctccttctctatatccagtcccactaccagctggaactgcagtgctgcatcgactggacccatgtcactgaccccctcataggtcagtggaacctgaaaggtggacttgagcaggttctcatgcttctacctctggccttatccctcagggttcatgtagcttgcgacccagccaggcagagagagttct

SEQ ID NO: 298293 - DNA, 230 bp, Homo sapiens
gcctgggcaacaagagtgaaattccatctcaaaaacaaaacaaaatgaaaacagcaaggtccactccttagaggcctttgtgagccactacagactcaggacttcagcctaagggacatcaaaaggttttaggcaagggagtgacaatcagatgtgcattttagacaaatacaactaatcaatcaacaatagttacagagcaccaattggagcaaggcagtatagtaggc

SEQ ID NO: 298294 - DNA, 301 bp, Homo sapiens
aatcctcagctgcattttgcattatttccagagttcttggttgtaatcagtggagagacaggctgtggaagacttaccccatttcgatcaacaccaggtgaaaagggctgagttcagagcacttctcgacagatgaacatatggaggttgacaggaagggaacaaaaactcatccatgtaccaacagtggaggactccacctccacagggacaaaatctcctgtgctcaggacccttccaagtcttgccctatgtatctctttatctgtttgtatcctttgaaataaaccagtaaaccaaa

SEQ ID NO: 298295 - DNA, 2751 bp, Homo sapiens
gtagcgggcgtcccgcctgccgccgccgagacgccctgcgccttcgccttctccgcccccgggccggggcccgcgccgccgcccccgctgcccgccttccccgaggcgcccggctccgagcccgcctgctgtccgctggccttcagggtggacccgttcaccgactacggctcctcgctcaccgtcacgctgccgcccgagctgcaggcgcaccagcccttccaggtcatcctgcggtacacctcgaccgacgcccccgccatctggtggctggacccagagctgacctatggctgcgccaagcccttcgtcttcacccagggccactccgtgtgcaaccgctccttcttcccgtgcttcgacacacctgccgtgaagtgcacctactctgccgtcgtcaaggcgccatcgggggtgcaggtgctgatgagtgccacccggagtgcatacatggaggaagaaggcgtcttccacttccacatggagcaccccgtgcccgcctacctcgtggccctggtggccggagacctcaagccggcagacatcgggcccaggagccgcgtgtgggccgagccatgcctcctgcccacggccaccagcaagctgtcgggcgcagtggagcagtggctgagtgcagctgagcggctgtatgggccctacatgtggggcaggtacgacattgtcttcctgccaccctccttccccatcgtggccatggagaacccctgcctcaccttcatcatctcctccatcctggagagcgatgagttcctggtcatcgatgtcatccacgaggtggcccacagttggttcggcaacgctgtcaccaacgccacgtgggaagagatgtggctgagcgagggcctggccacctatgcccagcgccgtatcaccaccgagacctacggtgctgccttcacctgcctggagactgccttccgcctggacgccctgcaccggcagatgaagcttctgggagaggacagcccggtcagcaaactgcaggtcaagctggagccaggagtgaatcccagccacctgatgaacctgttcacctacgagaagggctactgcttcgtgtactacctgtcccagctctgcggagacccacagcgctttgatgactttctccgagcctatgtggagaagtacaagttcaccagcgtggtggcccaggacctgctggactccttcctgagcttcttcccggagctgaaggagcagagcgtggactgccgggcagggctggaattcgagcgctggctcaatgccacaggcccgccgctggctgagccggacctgtctcagggatccagcctgacccggcccgtggaggcccttttccagctgtggaccgcagaacctctggaccaggcagctgcctcggccagcgccattgacatctccaagtggaggaccttccagacagcactcttcctggaccggctcctggatgggtccccgctgccgcaggaggtggtgatgagcctgtccaagtgctactcctccctgctggactcgatgaacgctgagatccgcatccgctggctgcagattgtggtccgcaacgactactatcctgacctccacagggtgcggcgcttcctggagagccagatgtcacgcatgtacaccatcccgctgtacgaggacctctgcaccggtgccctcaagtccttcgcgctggaggtcttctaccagacgcagggccggctgcaccccaacctgcgcagagccatccagcagatcctgtcccagggcctgggctccagcacagagcccgcctcagagcccagcacggagctgggcaaggctgaagcagacacagactcggacgcacaggccctgctgcttggggacgaggcccccagcagtgccatctctctcagggacgtcaatgtgtctgcctagccctgttggcgggctgaccctcgacctcccagacaccacaattgtgccttctgtgggccaggcctgccatgactgcgtctcggctctggccatgagctctgcccaggcccacaagcccctcccctgggctctcccaggcagggagaatggggagagggacctccttgtgtctggcagagacctgtggacctggcctccccactcccagctctcttgcactgcaggccctggggccagcccgcacacaccatgcctcctgtctcaacactgacagctgtgcctagccccggatgccagcacctgccaggtgccgccccggggcaagggccccagcagccctatggtgaccgccacactgtgccttaatgtctgccgggggcccaggctgtgctgtccctgcagcacgcctccttgcagggatctgagccaccctccccgcacagccctgcaccccgcccctagggttggcagcctcagttggcccctggcagaggaacaaggacacagacattccctcagtgtggggggcaggggacacagggagaggatggttgtccctggggagggccctctggccccaggcaaccttagcccctcagaacagggagtcccaggacccagggagagtgtggggacaggacagcctgtctcttgtagcttcctggggtgggaggcacaggggcaaagcaataccccagggaaagtgggaggtggtgctggtgctctctccaggcccaccatgctgggagaggcggccagagcctggggcctccagcctgggactgctgtgatggggtatcacggtgatggtcccattaaacttccactctgcaaacctga

SEQ ID NO: 298296 - DNA, 2588 bp, Homo sapiens
  misc_feature (85)..(85): n is a, c, g, or t
  misc_feature (93)..(93): n is a, c, g, or t
  misc_feature (96)..(96): n is a, c, g, or t
tcctcctccccccaccaccccctcaccacccctcactcccaaactacggctaggtgcgaggctgggttggctgcggtcactcgancgacgccncgntcatctggtggctggacccagagctgacctatggctgcgccaagcccttcgtcttcacccagggccactccgtgtgcaaccgctccttcttcccgtgcttcgacacacctgccgtgaagtgcacctactctgccgtcgtcaaggcgccatcgggggtgcaggtgctgatgagtgccacccggagtgcatacatggaggaagaaggcgtcttccacttccacatggagcaccccgtgcccgcctacctcgtggccctggtggccggagacctcaagccggcagacatcgggcccaggagccgcgtgtgggccgagccatgcctcctgcccacggccaccagcaagctgtcgggcgcagtggagcagtggctgagtgcagctgagcggctgtatgggccctacatgtggggcaggtacgacattgtcttcctgccaccctccttccccatcgtggccatggagaacccctgcctcaccttcatcatctcctccatcctggagagcgatgagttcctggtcatcgatgtcatccacgaggtggcccacagttggttcggcaacgctgtcaccaacgccacgtgggaagagatgtggctgagcgagggcctggccacctatgcccagcgccgtatcaccaccgagacctacggtgctgccttcacctgcctggagactgccttccgcctggacgccctgcaccggcagatgaagcttctgggagaggacagcccggtcagcaaactgcaggtcaagctggagccaggagtgaatcccagccacctgatgaacctgttcacctacgagaagggctactgcttcgtgtactacctgtcccagctctgcggagacccacagcgctttgatgactttctccgagcctatgtggagaagtacaagttcaccagcgtggtggcccaggacctgctggactccttcctgagcttcttcccggagctgaaggagcagagcgtggactgccgggcagggctggaattcgagcgctggctcaatgccacaggcccgccgctggctgagccggacctgtctcagggatccagcctgacccggcccgtggaggcccttttccagctgtggaccgcagaacctctggaccaggcagctgcctcggccagcgccattgacatctccaagtggaggaccttccagacagcactcttcctggaccggctcctggatgggtccccgctgccgcaggaggtggtgatgagcctgtccaagtgctactcctccctgctggactcgatgaacgctgagatccgcatccgctggctgcagattgtggtccgcaacgactactatcctgacctccacagggtgcggcgcttcctggagagccagatgtcacgcatgtacaccatcccgctgtacgaggacctctgcaccggtgccctcaagtccttcgcgctggaggtcttctaccagacgcagggccggctgcaccccaacctgcgcagagccatccagcagatcctgtcccagggcctgggctccagcacagagcccgcctcagagcccagcacggagctgggcaaggctgaagcagacacagactcggacgcacaggccctgctgcttggggacgaggcccccagcagtgccatctctctcagggacgtcaatgtgtctgcctagccctgttggcgggctgaccctcgacctcccagacaccacaattgtgccttctgtgggccaggcctgccatgactgcgtctcggctctggccatgagctctgcccaggcccacaagcccctcccctgggctctcccaggcagggagaatggggagagggacctccttgtgtctggcagagacctgtggacctggcctccccactcccagctctcttgcactgcaggccctggggccagcccgcacacaccatgcctcctgtctcaacactgacagctgtgcctagccccggatgccagcacctgccaggtgccgccccggggcaagggccccagcagccctatggtgaccgccacactgtgccttaatgtctgccgggggcccaggctgtgctgtccctgcagcacgcctccttgcagggatctgagccaccctccccgcacagccctgcaccccgcccctagggttggcagcctcagttggcccctggcagaggaacaaggacacagacattccctcagtgtggggggcaggggacacagggagaggatggttgtccctggggagggccctctggccccaggcaaccttagcccctcagaacagggagtcccaggacccagggagagtgtggggacaggacagcctgtctcttgtagcttcctggggtgggaggcacaggggcaaagcaataccccagggaaagtgggaggtggtgctggtgctctctccaggcccaccatgctgggagaggcggccagagcctggggcctccagcctgggactgctgtgatggggtatcacggtgatggtcccattaaacttccactctgcaaacctga

SEQ ID NO: 298297 - DNA, 3110 bp, Homo sapiens
gtagcgggcgtcccgcctgccgccgccgagacgccctgcgccttcgccttctccgcccccgggccggggcccgcgccgccgcccccgctgcccgccttccccgaggcgcccggctccgagcccgcctgctgtccgctggccttcagggtggacccgttcaccgactacggctcctcgctcaccgtcacgctgccgcccgagctgcaggcgcaccagcccttccaggtcatcctgcggtacacctcgaccgacgcccccgccatctggtggctggacccagagctgacctatggctgcgccaagcccttcgtcttcacccagggccactccgtgtgcaaccgctccttcttcccgtgcttcgacacacctgccgtgaagtgcacctactctgccgtcgtcaaggcgccatcgggggtgcaggtgctgatgagtgccacccggagtgcatacatggaggaagaaggcgtcttccacttccacatggagcaccccgtgcccgcctacctcgtggccctggtggccggagacctcaagccggcagacatcgggcccaggagccgcgtgtgggccgagccatgcctcctgcccacggccaccagcaagctgtcgggcgcagtggagcagtggctgagtgcagctgagcggctgtatgggccctacatgtggggcaggtacgacattgtcttcctgccaccctccttccccatcgtggccatggagaacccctgcctcaccttcatcatctcctccatcctggagagcgatgagttcctggtcatcgatgtcatccacgaggtggcccacagttggttcggcaacgctgtcaccaacgccacgtgggaagagatgtggctgagcgagggcctggccacctatgcccagcgccgtatcaccaccgagacctacggtgctgccttcacctgcctggagactgccttccgcctggacgccctgcaccggcagatgaagcttctgggagaggacagcccggtcagcaaactgcaggtcaagctggagccaggagtgaatcccagccacctgatgaacctgttcacctacgagaagggctactgcttcgtgtactacctgtcccagctctgcggagacccacagcgctttgatgactttctccgagtgagcagccccctgcccgggacggccctgctgccatctgcccccagcccctccccggctcacagggctgcctgctcttgcggcagttggggtggaactggcaggggcctgtgagcctggctgggacctagtctgcctttctttgtggggagtgcctgggttgccacctccccttctgccaccctgtttgctcccttggcagggcctgcgtgccaagtgctggctccgcagtgcccactagctgcccctgtgcccagcacgtaccttggcgcacgccctgcagtgccctgcaggcctctggtggggctgcctgtgccccacccttccaggcctgctgaggccccacctctgccacacaggcctatgtggagaagtacaagttcaccagcgtggtggcccaggacctgctggactccttcctgagcttcttcccggagctgaaggagcagagcgtggactgccgggcagggctggaattcgagcgctggctcaatgccacaggcccgccgctggctgagccggacctgtctcagggatccagcctgacccggcccgtggaggcccttttccagctgtggaccgcagaacctctggaccaggcagctgcctcggccagcgccattgacatctccaagtggaggaccttccagacagcactcttcctggaccggctcctggatgggtccccgctgccgcaggaggtggtgatgagcctgtccaagtgctactcctccctgctggactcgatgaacgctgagatccgcatccgctggctgcagattgtggtccgcaacgactactatcctgacctccacagggtgcggcgcttcctggagagccagatgtcacgcatgtacaccatcccgctgtacgaggacctctgcaccggtgccctcaagtccttcgcgctggaggtcttctaccagacgcagggccggctgcaccccaacctgcgcagagccatccagcagatcctgtcccagggcctgggctccagcacagagcccgcctcagagcccagcacggagctgggcaaggctgaagcagacacagactcggacgcacaggccctgctgcttggggacgaggcccccagcagtgccatctctctcagggacgtcaatgtgtctgcctagccctgttggcgggctgaccctcgacctcccagacaccacaattgtgccttctgtgggccaggcctgccatgactgcgtctcggctctggccatgagctctgcccaggcccacaagcccctcccctgggctctcccaggcagggagaatggggagagggacctccttgtgtctggcagagacctgtggacctggcctccccactcccagctctcttgcactgcaggccctggggccagcccgcacacaccatgcctcctgtctcaacactgacagctgtgcctagccccggatgccagcacctgccaggtgccgccccggggcaagggccccagcagccctatggtgaccgccacactgtgccttaatgtctgccgggggcccaggctgtgctgtccctgcagcacgcctccttgcagggatctgagccaccctccccgcacagccctgcaccccgcccctagggttggcagcctcagttggcccctggcagaggaacaaggacacagacattccctcagtgtggggggcaggggacacagggagaggatggttgtccctggggagggccctctggccccaggcaaccttagcccctcagaacagggagtcccaggacccagggagagtgtggggacaggacagcctgtctcttgtagcttcctggggtgggaggcacaggggcaaagcaataccccagggaaagtgggaggtggtgctggtgctctctccaggcccaccatgctgggagaggcggccagagcctggggcctccagcctgggactgctgtgatggggtatcacggtgatggtcccattaaacttccactctgcaaacctga

SEQ ID NO: 298298 - DNA, 1941 bp, Homo sapiens
ggctctgagcagcagtcacagtggtgtgtgagtcctcagtcttccccgaggccctgccgctgcacgcccagggcatcagtacacatctggacatgtgagggacagtggcgcttggcccttgctgctcctcggagcctgaccactgcccctccctattccacgggacactggtggtttcggacgccagcccaggtgggtgttcaccttgcaggagtgaatcccagccacctgatgaacctgttcacctacgagaagggctactgcttcgtgtactacctgtcccagctctgcggagacccacagcgctttgatgactttctccgagcctatgtggagaagtacaagttcaccagcgtggtggcccaggacctgctggactccttcctgagcttcttcccggagctgaaggagcagagcgtggactgccgggcagggctggaattcgagcgctggctcaatgccacaggcccgccgctggctgagccggacctgtctcagggatccagcctgacccggcccgtggaggcccttttccagctgtggaccgcagaacctctggaccaggcagctgcctcggccagcgccattgacatctccaagtggaggaccttccagacagcactcttcctggaccggctcctggatgggtccccgctgccgcaggaggtggtgatgagcctgtccaagtgctactcctccctgctggactcgatgaacgctgagatccgcatccgctggctgcagattgtggtccgcaacgactactatcctgacctccacagggtgcggcgcttcctggagagccagatgtcacgcatgtacaccatcccgctgtacgaggacctctgcaccggtgccctcaagtccttcgcgctggaggtcttctaccagacgcagggccggctgcaccccaacctgcgcagagccatccagcagatcctgtcccagggcctgggctccagcacagagcccgcctcagagcccagcacggagctgggcaaggctgaagcagacacagactcggacgcacaggccctgctgcttggggacgaggcccccagcagtgccatctctctcagggacgtcaatgtgtctgcctagccctgttggcgggctgaccctcgacctcccagacaccacaattgtgccttctgtgggccaggcctgccatgactgcgtctcggctctggccatgagctctgcccaggcccacaagcccctcccctgggctctcccaggcagggagaatggggagagggacctccttgtgtctggcagagacctgtggacctggcctccccactcccagctctcttgcactgcaggccctggggccagcccgcacacaccatgcctcctgtctcaacactgacagctgtgcctagccccggatgccagcacctgccaggtgccgccccggggcaagggccccagcagccctatggtgaccgccacactgtgccttaatgtctgccgggggcccaggctgtgctgtccctgcagcacgcctccttgcagggatctgagccaccctccccgcacagccctgcaccccgcccctagggttggcagcctcagttggcccctggcagaggaacaaggacacagacattccctcagtgtggggggcaggggacacagggagaggatggttgtccctggggagggccctctggccccaggcaaccttagcccctcagaacagggagtcccaggacccagggagagtgtggggacaggacagcctgtctcttgtagcttcctggggtgggaggcacaggggcaaagcaataccccagggaaagtgggaggtggtgctggtgctctctccaggcccaccatgctgggagaggcggccagagcctggggcctccagcctgggactgctgtgatggggtatcacggtgatggtcccattaaacttccactctgcaaacctga

SEQ ID NO: 298299 - DNA, 3795 bp, Homo sapiens
  misc_feature (3271)..(3271): n is a, c, g, or t
gtagcgggcgtcccgcctgccgccgccgagacgccctgcgccttcgccttctccgcccccgggccggggcccgcgccgccgcccccgctgcccgccttccccgaggcgcccggctccgagcccgcctgctgtccgctggccttcagggtggacccgttcaccgactacggctcctcgctcaccgtcacgctgccgcccgagctgcaggcgcaccagcccttccaggtcatcctgcggtacacctcgaccgacgcccccgccatctggtggctggacccagagctgacctatggctgcgccaagcccttcgtcttcacccagggccactccgtgtgcaaccgctccttcttcccgtgcttcgacacacctgccgtgaagtgcacctactctgccgtcgtcaaggcgccatcgggggtgcaggtgctgatgagtgccacccggagtgcatacatggaggaagaaggcgtcttccacttccacatggagcaccccgtgcccgcctacctcgtggccctggtggccggagacctcaagccggcagacatcgggcccaggagccgcgtgtgggccgagccatgcctcctgcccacggccaccagcaagctgtcgggcgcagtggagcagtggctgagtgcagctgagcggctgtatgggccctacatgtggggcaggtacgacattgtcttcctgccaccctccttccccatcgtggccatggagaacccctgcctcaccttcatcatctcctccatcctggagagcgatgagttcctggtcatcgatgtcatccacgaggtggcccacagttggttcggcaacgctgtcaccaacgccacgtgggaagagatgtggctgagcgagggcctggccacctatgcccagcgccgtatcaccaccgagacctacggtgctgccttcacctgcctggagactgccttccgcctggacgccctgcaccggcagatgaagcttctgggagaggacagcccggtcagcaaactgcaggtcaagctggagccaggagtgaatcccagccacctgatgaacctgttcacctacgagaagggctactgcttcgtgtactacctgtcccagctctgcggagacccacagcgctttgatgactttctccgagcctatgtggagaagtacaagttcaccagcgtggtggcccaggacctgctggactccttcctgagcttcttcccggagctgaaggagcagagcgtggactgccgggcagggctggaattcgagcgctggctcaatgccacaggcccgccgctggctgagccggacctgtctcagggatccagcctgacccggcccgtggaggcccttttccagctgtggaccgcagaacctctggaccaggcagctgcctcggccagcgccattgacatctccaagtggaggaccttccagacagcactcttcctggaccggctcctggatgggtccccgctgccgcaggaggtggtgatgagcctgtccaagtgctactcctccctgctggactcgatgaacgctgagatccgcatccgctggctgcagattgtggtccgcaacgactactatcctgacctccacagggtgcggcgcttcctggagagccagatgtcacgcatgtacaccatcccgctgtacgaggacctctgcaccggtgccctcaagtccttcgcgctggaggtcttctaccagacgcagggccggctgcaccccaacctgcgcagagccatccagcagatcctgtcccagggcctgggctccagcacagagcccgcctcagagcccagcacggagctgggcaaggctgaagcagacacagactcggacgcacaggccctgctgcttggggacgaggcccccagcagtgccatctctctcagggacgtcaatgtgtctgcctagccctgttggcgggctgaccctcgacctcccagacaccacaattgtgccttctgtgggccaggcctgccatgactgcgtctcggctctggccatgagctctgcccaggcccacaagcccctcccctgggctctcccaggcagggagaatggggagagggacctccttgtgtctggcagagacctgtggacctggcctccccactcccagctctcttgcactgcaggccctggggccagcccgcacacaccatgcctcctgtctcaacactgacagctgtgcctagccccggatgccagcacctgccaggtgccgccccggggcaagggccccagcagccctatggtgaccgccacactgtgccttaatgtctgccgggggcccaggctgtgctgtccctgcagcacgcctccttgcagggatctgagccaccctccccgcacagccctgcaccccgcccctagggttggcagcctcagttggcccctggcagaggaacaaggacacagacattccctcagtgtggggggcaggggacacagggagaggatggttgtccctggggagggccctctggccccaggcaaccttagcccctcagaacagggagtcccaggacccagggagagtgtggggacaggacagcctgtctcttgtagcttcctggggtgggaggcacaggggcaaagcaataccccagggaaagtgggaggtggtgctggtgctctctccaggcccaccatgctgggagaggcggccagagcctggggcctccagcctgggactgctgtgatggggtatcacggtgatggtcccattaaacttccactctgcaaacctgaaaaaaaaaaaaaaaaaaaaaaaaaaagaaaaaaaagaaataaagaagaaaaacaaaaaaaagaaacaaaaaaaaaaaaaaggagggggcgcggcgccataagaaaaatctcccgcgagcggcgaccgacgatatcgacggagctcaccgcgtttttgtgggtaaaagagggcgccccaatggagggccgtctcattaatacgagacgagggagcgagacggcagataacacaccgggcacgcggacgggaaccaactgagcgccgaggaactatggagaggacgcaccccatacgcgctggggaggggcggcaactacgtggcgaacaaccacttcatcgagagagtttaagactcctgacgaggagaaatataacaagtgatacgaggttgttagttggctggtacacccacgaggcagaattaattcctgaggagagaaagaacgttcgtgctacgaacgggagaaattagttctacagagacaaatttttcccgcgagacttagtattaaaattacncacgagagtaagagtaaaacagtgaagagagagagacagcgagagagcagaaaacgagaagagaacagaagagagcaaacagagggagaagagaggacagacggatggtgacgacgagaagcgacacaagcacagcgaacagaagcagaggagcgagagagaagaacagagcacagggcggaagagcgcaaagcaacaaccgacaagaccaccaagaaaacagcgcaagacacaagacaacacgagcagcgagagacgcaagacgagtagcacaaagacaaagagcagagaagaagcacacgcgaacgccacggagaggcagagagagtcagcgacacgcagacgacaggaagcaagagaggaataatagccagcagccacagcgcagtgagacagtagaacggaacacagacggagcgacgaagacagagcgcgaagacgtagagcaacagaagagaaggatagcagagtaaaagatccaggcagagcagcagaccagagcagagagcacagcgtgcagagtc

SEQ ID NO: 298300 - DNA, 2718 bp, Homo sapiens
gtagcgggcgtcccgcctgccgccgccgagacgccctgcgccttcgccttctccgcccccgggccggggcccgcgccgccgcccccgctgcccgccttccccgaggcgcccggctccgagcccgcctgctgtccgctggccttcagggtggacccgttcaccgactacggctcctcgctcaccgtcacgctgccgcccgagctgcaggcgcaccagcccttccaggtcatcctgcggtacacctcgaccgacgcccccgccatctggtggctggacccagagctgacctatggctgcgccaagcccttcgtcttcacccagggccactccgtgtgcaaccgctccttcttcccgtgcttcgacacacctgccgtgaagtgcacctactctgccgtcgtcaaggcgccatcgggggtgcaggtgctgatgagtgccacccggagtgcatacatggaggaagaaggcgtcttccacttccacatggagcaccccgtgcccgcctacctcgtggccctggtggccggagacctcaagccggcagacatcgggcccaggagccgcgtgtgggccgagccatgcctcctgcccacggccaccagcaagctgtcgggcgcagtggagcagtggctgagtgcagctgagcggctgtatgggccctacatgtggggcaggtacgacattgtcttcctgccaccctccttccccatcgtggccatggagaacccctgcctcaccttcatcatctcctccatcctggagagcgatgagttcctggtcatcgatgtcatccacgaggtggcccacagttggttcggcaacgctgtcaccaacgccacgtgggaagagatgtggctgagcgagggcctggccacctatgcccagcgccgtatcaccaccgagacctacggtgctgccttcacctgcctggagactgccttccgcctggacgccctgcaccggcagatgaagcttctgggagaggacagcccggtcagcaaactgcaggtcaagctggagccaggagtgaatcccagccacctgatgaacctgttcacctacgagaagggctactgcttcgtgtactacctgtcccagctctgcggagacccacagcgctttgatgactttctccgagcctatgtggagaagtacaagttcaccagcgtggtggcccaggacctgctggactccttcctgagcttcttcccggagctgaaggagcagagcgtggactgccgggcaggcccgccgctggctgagccggacctgtctcagggatccagcctgacccggcccgtggaggcccttttccagctgtggaccgcagaacctctggaccaggcagctgcctcggccagcgccattgacatctccaagtggaggaccttccagacagcactcttcctggaccggctcctggatgggtccccgctgccgcaggaggtggtgatgagcctgtccaagtgctactcctccctgctggactcgatgaacgctgagatccgcatccgctggctgcagattgtggtccgcaacgactactatcctgacctccacagggtgcggcgcttcctggagagccagatgtcacgcatgtacaccatcccgctgtacgaggacctctgcaccggtgccctcaagtccttcgcgctggaggtcttctaccagacgcagggccggctgcaccccaacctgcgcagagccatccagcagatcctgtcccagggcctgggctccagcacagagcccgcctcagagcccagcacggagctgggcaaggctgaagcagacacagactcggacgcacaggccctgctgcttggggacgaggcccccagcagtgccatctctctcagggacgtcaatgtgtctgcctagccctgttggcgggctgaccctcgacctcccagacaccacaattgtgccttctgtgggccaggcctgccatgactgcgtctcggctctggccatgagctctgcccaggcccacaagcccctcccctgggctctcccaggcagggagaatggggagagggacctccttgtgtctggcagagacctgtggacctggcctccccactcccagctctcttgcactgcaggccctggggccagcccgcacacaccatgcctcctgtctcaacactgacagctgtgcctagccccggatgccagcacctgccaggtgccgccccggggcaagggccccagcagccctatggtgaccgccacactgtgccttaatgtctgccgggggcccaggctgtgctgtccctgcagcacgcctccttgcagggatctgagccaccctccccgcacagccctgcaccccgcccctagggttggcagcctcagttggcccctggcagaggaacaaggacacagacattccctcagtgtggggggcaggggacacagggagaggatggttgtccctggggagggccctctggccccaggcaaccttagcccctcagaacagggagtcccaggacccagggagagtgtggggacaggacagcctgtctcttgtagcttcctggggtgggaggcacaggggcaaagcaataccccagggaaagtgggaggtggtgctggtgctctctccaggcccaccatgctgggagaggcggccagagcctggggcctccagcctgggactgctgtgatggggtatcacggtgatggtcccattaaacttccactctgcaaacctga

SEQ ID NO: 298301 - DNA, 2017 bp, Homo sapiens
gtagcgggcgtcccgcctgccgccgccgagacgccctgcgccttcgccttctccgcccccgggccggggcccgcgccgccgcccccgctgcccgccttccccgaggcgcccggctccgagcccgcctgctgtccgctggccttcagggtggacccgttcaccgactacggctcctcgctcaccgtcacgctgccgcccgagctgcaggcgcaccagcccttccaggtcatcctgcggtacacctcgaccgacgcccccgccatctggtggctggacccagagctgacctatggctgcgccaagcccttcgtcttcacccagggccactccgtgtgcaaccgctccttcttcccgtgcttcgacacacctgccgtgaagtgcacctactctgccgtcgtcaaggcgccatcgggggtgcaggtgctgatgagtgccacccggagtgcatacatggaggaagaaggcgtcttccacttccacatggagcaccccgtgcccgcctacctcgtggccctggtggccggagacctcaagccggcagacatcgggcccaggagccgcgtgtgggccgagccatgcctcctgcccacggccaccagcaagctgtcgggcgcagtggagcagtggctgagtgcagctgagcggctgtatgggccctacatgtggggcaggtacgacattgtcttcctgccaccctccttccccatcgtggccatggagaacccctgcctcaccttcatcatctcctccatcctggagagcgatgagttcctggtcatcgatgtcatccacgaggtggcccacagttggttcggcaacgctgtcaccaacgccacgtgggaagagatgtggctgagcgagggcctggccacctatgcccagcgccgtatcaccaccgagacctacggtgctgccttcacctgcctggagactgccttccgcctggacgccctgcaccggcagatgaagcttctgggagaggacagcccggtcagcaaactgcaggtcaagctggagccaggagtgaatcccagccacctgatgaacctgttcacctacgagaagggctactgcttcgtgtactacctgtcccagctctgcggagacccacagcgctttgatgactttctccgagcctatgtggagaagtacaagttcaccagcgtggtggcccaggacctgctggactccttcctgagcttcttcccggagctgaaggagcagagcgtggactgccgggcagggctggaattcgagcgctggctcaatgccacaggcccgccgctggctgagccggacctgtctcagggatccagcctgacccggcccgtggaggcccttttccagctgtggaccgcagaacctctggaccaggcagctgcctcggccagcgccattgacatctccaagtggaggaccttccagacagcactcttcctggaccggctcctggatgggtccccgctgccgcaggaggtggtgatgagcctgtccaagtgctactcctccctgctggactcgatgaacgctgagatccgcatccgctggctgcagattgtggtccgcaacgactactatcctgacctccacagggtgcggcgcttcctggagagccagatgtcacgcatgtacaccatcccgctgtacgaggacctctgcaccggtgccctcaagtccttcgcgctggaggtcttctaccagacgcagggggacacagggagaggatggttgtccctggggagggccctctggccccaggcaaccttagcccctcagaacagggagtcccaggacccagggagagtgtggggacaggacagcctgtctcttgtagcttcctggggtgggaggcacaggggcaaagcaataccccagggaaagtgggaggtggtgctggtgctctctccaggcccaccatgctgggagaggcggccagagcctggggcctccagcctgggactgctgtgatggggtatcacggtgatggtcccattaaacttccactctgcaaacctga

SEQ ID NO: 298302 - DNA, 1409 bp, Homo sapiens
gtagcgggcgtcccgcctgccgccgccgagacgccctgcgccttcgccttctccgcccccgggccggggcccgcgccgccgcccccgctgcccgccttccccgaggcgcccggctccgagcccgcctgctgtccgctggccttcagggtggacccgttcaccgactacggctcctcgctcaccgtcacgctgccgcccgagctgcaggcgcaccagcccttccaggtcatcctgcggtacacctcgaccgacgcccccgccatctggtggctggacccagagctgacctatggctgcgccaagcccttcgtcttcacccagggccactccgtgtgcaaccgctccttcttcccgtgcttcgacacacctgccgtgaagtgcacctactctgccgtcgtcaaggcgccatcgggggtgcaggtgctgatgagtgccacccggagtgcatacatggaggaagaaggcgtcttccacttccacatggagcaccccgtgcccgcctacctcgtggccctggtggccggagacctcaagccggcagacatcgggcccaggagccgcgtgtgggccgagccatgcctcctgcccacggccaccagcaagctgtcgggcgcagtggagcagtggctgagtgcagctgagcggctgtatgggccctacatgtggggcaggtacgacattgtcttcctgccaccctccttccccatcgtggccatggagaacccctgcctcaccttcatcatctcctccatcctggagagcgatgagttcctggtcatcgatgtcatccacgaggtggcccacagttggttcggcaacgctgtcaccaacgccacgtgggaagagatgtggctgagcgagggcctggccacctatgcccagcgccgtatcaccaccgagacctacggtgctgccttcacctgcctggagactgccttccgcctggacgccctgcaccggcagatgaagcttctgggagaggacagcccggtcagcaaactgcaggtcaagctggagccaggagtgaatcccagccacctgatgaacctgttcacctacgagaagggctactgcttcgtgtactacctgtcccagctctgcggagacccacagcgctttgatgactttctccgagcctatgtggagaagtacaagttcaccagcgtggtggcccaggacctgctggactccttcctgagcttcttcccggagctgaaggagcagagcgtggactgccgggcaggtgaggctgacccccaaccctgcagccagggagccgtgggtatgatggcaggcggggcctctgctgcctgaggggccactccacctggaggaaagccctgtcagttcactgtctgtccttcagccaacccttgctggaccatgtgggccccaggctggtatgctat

SEQ ID NO: 298303 - DNA, 1334 bp, Homo sapiens
gtagcgggcgtcccgcctgccgccgccgagacgccctgcgccttcgccttctccgcccccgggccggggcccgcgccgccgcccccgctgcccgccttccccgaggcgcccggctccgagcccgcctgctgtccgctggccttcagggtggacccgttcaccgactacggctcctcgctcaccgtcacgctgccgcccgagctgcaggcgcaccagcccttccaggtcatcctgcggtacacctcgaccgacgcccccgccatctggtggctggacccagagctgacctatggctgcgccaagcccttcgtcttcacccagggccactccgtgtgcaaccgctccttcttcccgtgcttcgacacacctgccgtgaagtgcacctactctgccgtcgtcaaggcgccatcgggggtgcaggtgctgatgagtgccacccggagtgcatacatggaggaagaaggcgtcttccacttccacatggagcaccccgtgcccgcctacctcgtggccctggtggccggagacctcaagccggcagacatcgggcccaggagccgcgtgtgggccgagccatgcctcctgcccacggccaccagcaagctgtcgggcgcagtggagcagtggctgagtgcagctgagcggctgtatgggccctacatgtggggcaggtacgacattgtcttcctgccaccctccttccccatcgtggccatggagaacccctgcctcaccttcatcatctcctccatcctggagagcgatgagttcctggtcatcgatgtcatccacgaggtggcccacagttggttcggcaacgctgtcaccaacgccacgtgggaagagatgtggctgagcgagggcctggccacctatgcccagcgccgtatcaccaccgagacctacggtgctgccttcacctgcctggagactgccttccgcctggacgccctgcaccggcagatgaagcttctgggagaggacagcccggtcagcaaactgcaggtcaagctggagccaggagtgaatcccagccacctgatgaacctgttcacctacgagaagggctactgcttcgtgtactacctgtcccagctctgcggagacccacagcgctttgatgactttctccgagcctatgtggagaagtacaagttcaccagcgtggtggcccaggacctgctggactccttcctgagcttcttcccggagctgaaggagcagagcgtggactgccgggcaggctggaattcgagcgctggctcaatgccacgggccgggtcaggctggatccctgagacaggtccggctcagccagcggcgggcgtcgacgc

SEQ ID NO: 298304 - DNA, 798 bp, Homo sapiens
ccgggcaggccgggagtggcgtgctgggcgtgcgcggctgcggtacggcgtgttggtcccagcggttcagctgaggtagggacgtgctgtaggccggaatgttaccggctgttggatctgcggatgaggaggaggatcctgcggaggaggattgtcctgaattggttcccatggagacgacgcaaagcgaggaggaggaaaagtctggcctcggcgccaagatcccagtcacaattatcaccgggtatttaggtgctgggaagacaacacttctgaactatattttgacagagcaacatagtaaaagagtagcggtcattttaaatgaatttggggaaggaagtgcgctggagaaatccttagctgtcagccaaggtggagagctctatgaagagtggctggaacttagaaacggttgcctctgctgttcagtgaaagtgaggaatgtgtttactgtgtacatggtttactagaaatgtttattgattatatttccagctttaattttcttgagtaatttaactgaatttacacagtttgcttcattgtattttcaaacaaatagaaaataaacttattaggaagcattttcttaaagtgtttcttgctgtcttttctatctgctctaatgttttggtccttttattgagtttttattgcttttgatgtcagggcttatttaatctctagtgcatgaaagtctcatatgtaaaaaatgattattctgaatttaatctgtcattggtcatatttctaagtgttcaaccttataaaaaaaataaatgactatcaaaaaag

SEQ ID NO: 298305 - DNA, 598 bp, Homo sapiens
agaggggggttaattttttcccccacaaaaaaaaaaaaaaaaggtttttttttggggaaatagttgatctctctaatgtattagatcttcatgcctttgatagtctctctggaataagtttgcagaaaaaacttcagcatgtgccaggaacacaacctcaccttgatcagagtattgttacaatcacatttgaagtaccaggaaatgcaaaggaagaacatcttaatatgtttattcagaatctcctgtgggaaaagaatgtgagaaacaaggacaatcactgcatggaggtcataaggctgaagggattggtgtcaatcaaagacaaatcacaacaagtgattgtccagggtgtccatgagctctatgatctggaggagactccagtgagctggaaggatgacactgagagaacaaatcgattggtcctccttggcagaaatttagataaggatatccttaaacagctgtttatagctactgtgacagaaacagaaaagcagtggacaacacatttcaaagaagatcaagtttgtacataacactagaggcatttcttatcaaaaggattggataataaaaataagtttctactggg

SEQ ID NO: 298306 - DNA, 365 bp, Homo sapiens
  misc_feature (1)..(1): n is a, c, g, or t
ntacaggatccccttattcgtgttgcacggcggtacggcgtgttggtcccagcggttcagctgaggtagggacgtgctgtaggccggaatgttaccggctgttggatctgcggatgaggaggaggatcctgcggaggaggattgtcctgaattggttcccatggagacgacgcaaagcgaggaggaggaaaagtctggcctcggcgccaagatcccagtcacaattatcaccgggtatttagttattcagaggctgctctgctgagaagatgaacaaatttcttgtccaaaacaatgtatttcaaacgtgccgctcgggcctttcccgtattgctcactggtgcaacacgaataagatcactgga

SEQ ID NO: 298307 - DNA, 1915 bp, Homo sapiens
ccgggcaggccgggagtggcgtgctgggcgtgcgcggctgcggtacggcgtgttggtcccagcggttcagctgaggtagggacgtgctgtaggccggaatgttaccggctgttggatctgcggatgaggaggaggatcctgcggaggaggattgtcctgaattggttcccatggagacgacgcaaagcgaggaggaggaaaagtctggcctcggcgccaagatcccagtcacaattatcaccgggtatttaggtgctgggaagacaacacttctgaactatattttgacagagcaacatagtaaaagagtagcggtcattttaaatgaatttggggaaggaagtgcgctggagaaatccttagctgtcagccaaggtggagagctctatgaagagtggctggaacttagaaacggttgcctctgctgttcagtgaaggacaatggccttagagctattgagaatttgatgcaaaagaaggggaaatttgattacatactgttagagaccactggattggcagacccaggtgcagtggcttctatgttttgggttgatgctgaattagggagtgatatttaccttgatggtatcataactatagtggattcaaaatatggattaaaacatttagcagaagagaaacctgatggccttatcaatgaagctactaggcaagttgctttggcagatgccattctcattaataaaacagacttggttccagaagaagatgtaaagaaattaagagcgacaattagatccataaatggactaggacaaatcttagaaacacaaagatcaagagttgatctctctaatgtattagatcttcatgcctttgatagtctctctggaataagtttgcagaaaaaacttcagcatgtgccaggaacacaacctcaccttgatcagagtattgttacaatcacatttgaagtaccaggaaatgcaaaggaagaacatcttaatatgtttattcagaatctcctgtgggaaaagaatgtgagaaacaaggacaatcactgcatggaggtcataaggctgaagggattggtgtcaatcaaagacaaatcacaacaagtgattgtccagggtgtccatgagctctatgatctggaggagactccagtgagctggaaggatgacactgagagaacaaatcgattggtcctccttggcagaaatttagataaggatatccttaaacagctgtttatagctactgtgacagaaacagaaaagcagtggacaacacatttcaaagaagatcaagtttgtacataacactagaggcatttcttatcaaaaggattggataataaaaataagtttctactgggtatatttcaagcatttatttattactttagttacgaattccaatatactttaaaatggtatttgttttacagcatacataaaatgtagcaaatcggtactgtaaaacatttaacattcatacagttatatataatatccttttttttaaagaatggtatttcacaaaaatgtcttttgaaattggctttggagtttacatatactgaacatgaaagtttataataatgatgatacaactttcaacattgtcattttttcttagaacttcagctgattgcagagatataatgattacattgttattaaatttttttaacacaagtaagtgtcaccattttatgacatgaaataaaaggttatgactgttattgatgttgatgttgacgacctgatcacctggctgaaggagtgtttgtcaggtttctccattgtaaagttactcttttcccccatttcatactgtgctctttggaaggaaatcactatgcacagcccacactaaaggaatggggagttgtagtgtacttttttgggagtggtctacataattaattgaaattcttctgcaaagg

SEQ ID NO: 298308 - DNA, 1785 bp, Homo sapiens
ccgggcaggccgggagtggcgtgctgggcgtgcgcggctgcggtacggcgtgttggtcccagcggttcagctgaggtagggacgtgctgtaggccggaatgttaccggctgttggatctgcggatgaggaggaggatcctgcggaggaggattgtcctgaattggttcccatggagacgacgcaaagcgaggaggaggaaaagtctggcctcggcgccaagatcccagtcacaattatcaccgggtatttaggtgctgggaagacaacacttctgaactatattttgacagagcaacatagtaaaagagtagcggtcattttaaatgaatttggggaaggaagtgcgctggagaaatccttagctgtcagccaaggtggagagctctatgaagagtggctggaacttagaaacggttgcctctgctgttcagtgaaggacaatggccttagagctattgagaatttgatgcaaaagaaggggaaatttgattacatactgttagagaccactggattggcagacccaggtgcagtggcttctatgttttgggttgatgctgaattagggagtgatatttaccttgatggtatcataactatagtggattcaaaatatggattaaaacatttagcagaagagaaacctgatggccttatcaatgaagctactaggcaagttgctttggcagatgccattctcattaataaaacagacttggttccagaagaagatgtaaagaaattaagagcgacaattagatccataaatggactaggacaaatcttagaaacacaaagatcaagagttgatctctctaatgtattagatcttcatgcctttgatagtctctctggaataagtttgcagaaaaaacttcagcatgtgccaggaacacaacctcaccttgatcagagtattgttacaatcacatttgaagtaccaggaaatgcaaaggaagaacatcttaatatgtttattcagaatctcctgtgggaaaagaatgtgagaaacaaggacaatcactgcatggaggtcataaggctgaaggcagaaatttagataaggatatccttaaacagctgtttatagctactgtgacagaaacagaaaagcagtggacaacacatttcaaagaagatcaagtttgtacataacactagaggcatttcttatcaaaaggattggataataaaaataagtttctactgggtatatttcaagcatttatttattactttagttacgaattccaatatactttaaaatggtatttgttttacagcatacataaaatgtagcaaatcggtactgtaaaacatttaacattcatacagttatatataatatccttttttttaaagaatggtatttcacaaaaatgtcttttgaaattggctttggagtttacatatactgaacatgaaagtttataataatgatgatacaactttcaacattgtcattttttcttagaacttcagctgattgcagagatataatgattacattgttattaaatttttttaacacaagtaagtgtcaccattttatgacatgaaataaaaggttatgactgttattgatgttgatgttgacgacctgatcacctggctgaaggagtgtttgtcaggtttctccattgtaaagttactcttttcccccatttcatactgtgctctttggaaggaaatcactatgcacagcccacactaaaggaatggggagttgtagtgtacttttttgggagtggtctacataattaattgaaattcttctgcaaagg

SEQ ID NO: 298309 - DNA, 1342 bp, Homo sapiens
ccgggcaggccgggagtggcgtgctgggcgtgcgcggctgcggtacggcgtgttggtcccagcggttcagctgaggtagggacgtgctgtaggccggaatgttaccggctgttggatctgcggatgaggaggaggatcctgcggaggaggattgtcctgaattggttcccatggagacgacgcaaagcgaggaggaggaaaagtctggcctcggcgccaagatcccagtcacaattatcaccgggtatttaggtgctgggaagacaacacttctgaactatattttgacagagcaacatagtaaaagagtagcggtcattttaaatgaatttggggaaggaagtgcgctggagaaatccttagctgtcagccaaggtggagagctctatgaagagtggctggaacttagaaacggttgcctctgctgttcagtgaaggacaatggccttagagctattgagaatttgatgcaaaagaaggggaaatttgattacatactgttagagaccactggattggcagacccaggtgcagtggcttctatgttttgggttgatgctgaattagggagtgatatttaccttgatggtatcataactatagtggattcaaaatatggattaaaacatttagcagaagagaaacctgatggccttatcaatgaagctactaggcaagttgctttggcagatgccattctcattaataaaacagacttggttccagaagaagatgtaaagaaattaagagcgacaattagatccataaatggactaggacaaatcttagaaacacaaagatcaagagttgatctctctaatgtattagatcttcatgcctttgatagtctctctggaataagtttgcagaaaaaacttcagcatgtgccaggaacacaacctcaccttgatcagagtattgttacaatcacatttgaagtaccaggaaatgcaaaggaagaacatcttaatatgtttattcagaatctcctgtgggaaaagaatgtgagaaacaaggacaatcactgcatggaggtcataaggctgaagggattggtgtcaatcaaagacaaatcacaacaagtgattgtccagggtgtccatgagctctatgatctggaggagactccagtgagctggaaggatgacactgagagaacaaatcgattggtcctccttggcagaaatttagataaggatatccttaaacagctgtttatagctactgtgacagaaacagaaaagcagtggacaacacatttcaaagaagatcaagtttgtacataacactagaggcatttcttatcaaaaggattggataataaaaataagtttctactggg

SEQ ID NO: 298310 - DNA, 1415 bp, Homo sapiens
ccgggcaggccgggagtggcgtgctgggcgtgcgcggctgcggtacggcgtgttggtcccagcggttcagctgaggtagggacgtgctgtaggccggaatgttaccggctgttggatctgcggatgaggaggaggatcctgcggaggaggattgtcctgaattggttcccatggagacgacgcaaagcgaggaggaggaaaagtctggcctcggcgccaagatcccagtcacaattatcaccgggtatttaggtgctgggaagacaacacttctgaactatattttgacagagcaacatagtaaaagagtagcggtcattttaaatgaatttggggaaggaagtgcgctggagaaatccttagctgtcagccaaggtggagagctctatgaagagtggctggaacttagaaacggttgcctctgctgttcagtgaaggacaatggccttagagctattgagaatttgatgcaaaagaaggggaaatttgattacatactgttagagaccactggattggcagacccaggtgcagtggcttctatgttttgggttgatgctgaattagggagtgatatttaccttgatggtatcataactatagtggattcaaaatatggattaaaacatttagcagaagagaaacctgatggccttatcaatgaagctactaggcaagttgctttggcagatgccattctcattaataaaacagacttggttccagaagaagatgtaaagaaattaagagcgacaattagatccataaatggactaggacaaatcttagaaacacaaagatcaagagttgatctctctaatgtattagatcttcatgcctttgatagtctctctggaataagtttgcagaaaaaacttcagcatgtgccaggaacacaacctcaccttgatcagagtattgttacaatcacatttgaagtaccaggaaatgcaaaggaagaacatcttaatatgtttattcagaatctcctgtgggaaaagaatgtgagaaacaaggacaatcactgcatggaggtcataaggctgaagggattggtgtcaatcaaagacaaatcacaacaagtgattgtccagggtgtccatgagctctatgatctggaggagactccagtgagctggaaggatgacactgagagaacaaatcgattggtcctccttggcagaaatttagataaggatatccttaaacagctgtttatagctactgtgacagaaacagaaaagcagtggacaacacatttcaaagaagatcaagtttgtacataacactagaggcatttcttatcaaaaggattggataataaaaataagtttctactgggacacacaacacaaaaaaaaagggccgaagcattcaacagaacccctcaaggggccgagtttccgcgtacccag

SEQ ID NO: 298311 - DNA, 1729 bp, Homo sapiens
ccgggcaggccgggagtggcgtgctgggcgtgcgcggctgcggtacggcgtgttggtcccagcggttcagctgaggtagggacgtgctgtaggccggaatgttaccggctgttggatctgcggatgaggaggaggatcctgcggaggaggattgtcctgaattggttcccatggagacgacgcaaagcgaggaggaggaaaagtctggcctcggcgccaagatcccagtcacaattatcaccgggtatttaggtgctgggaagacaacacttctgaactatattttgacagagcaacatagtaaaagagtagcggtcattttaaatgaatttggggaaggaagtgcgctggagaaatccttagctgtcagccaaggtggagagctctatgaagagtggctggaacttagaaacggttgcctctgctgttcagtgaaggacaatggccttagagctattgagaatttgatgcaaaagaaggggaaatttgattacatactgttagagaccactggattggcagacccaggtgcagtggcttctatgttttgggttgatgctgaattagggagtgatatttaccttgatggtatcataactatagtggattcaaaatatggattaaaacatttagcagaagagaaacctgatggccttatcaatgaagctactaggcaagttgctttggcagatgccattctcattaataaaacagacttggttccagaagaagatgtaaagaaattaagagcgacaattagatccataaatggactaggacaaatcttagaaacacaaagatcaagagttgatctctctaatgtattagatcttcatgcctttgatagtctctctggaataagtttgcagaaaaaacttcagcatgtgccaggaacacaacctcaccttgatcagagtattgttacaatcacatttgaagtaccaggaaatgcaaaggaagaacatcttaatatgtttattcagaatctcctgtgggaaaagaatgtgagaaacaaggacaatcactgcatggaggtcataaggctgaagggattggtgtcaatcaaagacaaatcacaacaagtgattgtccagggtgtccatgagctctatgatctggaggagactccagtgagctggaaggatgacactgagagaacaaatcgattggtcctccttggtaagtctgaaaggattcacagttttaaaacaaagtgaaaaatatatttgaaagggatatcatgtgccactcaaacagattaaccattcaggtcctcttttaaaactaaataagcttgtggtcaatgtttcatctttatcacgttacaacgttcgtaaaagcttgttaggacttttgttcttcttcagttttagaaaagtggttaatccaaggaccaatgtgactttgatgtactgacctggaaagttaaagatggaatcactcaattactattctttttgtaaatttctaaacaccataaagcatttaatgaactggaattgataggtgaactgtgtcattttaataagcataatgtaatcacgtcatattttgttttgtttgcaggcagaaatttagataaggatatccttaaacagctgtttatagctactgtgacagaaacagaaaagcagtggacaacacatttcaaagaagatcaagtttgtacataacactagaggcatttcttatcaaaaggattggataataaaaataagtttctactggg

SEQ ID NO: 298312 - DNA, 2139 bp, Homo sapiens
ccgggcaggccgggagtggcgtgctgggcgtgcgcggctgcggtacggcgtgttggtcccagcggttcagctgaggtagggacgtgctgtaggccggaatgttaccggctgttggatctgcggatgaggaggaggatcctgcggaggaggattgtcctgaattggttcccatggagacgacgcaaagcgaggaggaggaaaagtctggcctcggcgccaagatcccagtcacaattatcaccgggtatttaggtgctgggaagacaacacttctgaactatattttgacagagcaacatagtaaaagagtagcggtcattttaaatgaatttggggaaggaagtgcgctggagaaatccttagctgtcagccaaggtggagagctctatgaagagtggctggaacttagaaacggttgcctctgctgttcagtgaaggacaatggccttagagctattgagaatttgatgcaaaagaaggggaaatttgattacatactgttagagaccactggattggcagacccaggtgcagtggcttctatgttttgggttgatgctgaattagggagtgatatttaccttgatggtatcataactatagtggattcaaaatatggattaaaagcaaagaattggacaacttaaaatgacagctctctattctgaggacttgacacccaggctactgacattgttcttttcggttctacaaatgtgacagcatttaatgcaatagaagcaatgaatgaagttacccagagaagcatttagcagaagagaaacctgatggccttatcaatgaagctactaggcaagttgctttggcagatgccattctcattaataaaacagacttggttccagaagaagatgtaaagaaattaagagcgacaattagatccataaatggactaggacaaatcttagaaacacaaagatcaagaacaataaacatgcagtgattgatttttcttacttcaagtggatgagtgagcaagtgactaaaatcttccgtgaattcttcagtagttgatctctctaatgtattagatcttcatgcctttgatagtctctctggaataagtttgcagaaaaaacttcagcatgtgccaggaacacaacctcaccttgatcagagtattgttacaatcacatttgaagtaccaggaaatgcaaaggaagaacatcttaatatgtttattcagaatctcctgtgggaaaagaatgtgagaaacaaggacaatcactgcatggaggtcataaggctgaagggattggtgtcaatcaaagacaaatcacaacaagtgattgtccagggtgtccatgagctctatgatctggaggagactccagtgagctggaaggatgacactgagagaacaaatcgattggtcctccttggcagaaatttagataaggatatccttaaacagctgtttatagctactgtgacagaaacagaaaagcagtggacaacacatttcaaagaagatcaagtttgtacataacactagaggcatttcttatcaaaaggattggataataaaaataagtttctactgggtatatttcaagcatttatttattactttagttacgaattccaatatactttaaaatggtatttgttttacagcatacataaaatgtagcaaatcggtactgtaaaacatttaacattcatacagttatatataatatccttttttttaaagaatggtatttcacaaaaatgtcttttgaaattggctttggagtttacatatactgaacatgaaagtttataataatgatgatacaactttcaacattgtcattttttcttagaacttcagctgattgcagagatataatgattacattgttattaaatttttttaacacaagtaagtgtcaccattttatgacatgaaataaaaggttatgactgttattgatgttgatgttgacgacctgatcacctggctgaaggagtgtttgtcaggtttctccattgtaaagttactcttttcccccatttcatactgtgctctttggaaggaaatcactatgcacagcccacactaaaggaatggggagttgtagtgtacttttttgggagtggtctacataattaattgaaattcttctgcaaagg

SEQ ID NO: 298313 - DNA, 2013 bp, Homo sapiens
ccgggcaggccgggagtggcgtgctgggcgtgcgcggctgcggtacggcgtgttggtcccagcggttcagctgaggtagggacgtgctgtaggccggaatgttaccggctgttggatctgcggatgaggaggaggatcctgcggaggaggattgtcctgaattggttcccatggagacgacgcaaagcgaggaggaggaaaagtctggcctcggcgccaagatcccagtcacaattatcaccgggtatttagttattcagaggctgctctgctgagaagatgaacaaatttcttgtccaaaacaatgtatttcaaacgtgccgctcgggcctttcccgtattgctcactggtgctgggaagacaacacttctgaactatattttgacagagcaacatagtaaaagagtagcggtcattttaaatgaatttggggaaggaagtgcgctggagaaatccttagctgtcagccaaggtggagagctctatgaagagtggctggaacttagaaacggttgcctctgctgttcagtgaaggacaatggccttagagctattgagaatttgatgcaaaagaaggggaaatttgattacatactgttagagaccactggattggcagacccaggtgcagtggcttctatgttttgggttgatgctgaattagggagtgatatttaccttgatggtatcataactatagtggattcaaaatatggattaaaacatttagcagaagagaaacctgatggccttatcaatgaagctactaggcaagttgctttggcagatgccattctcattaataaaacagacttggttccagaagaagatgtaaagaaattaagagcgacaattagatccataaatggactaggacaaatcttagaaacacaaagatcaagagttgatctctctaatgtattagatcttcatgcctttgatagtctctctggaataagtttgcagaaaaaacttcagcatgtgccaggaacacaacctcaccttgatcagagtattgttacaatcacatttgaagtaccaggaaatgcaaaggaagaacatcttaatatgtttattcagaatctcctgtgggaaaagaatgtgagaaacaaggacaatcactgcatggaggtcataaggctgaagggattggtgtcaatcaaagacaaatcacaacaagtgattgtccagggtgtccatgagctctatgatctggaggagactccagtgagctggaaggatgacactgagagaacaaatcgattggtcctccttggcagaaatttagataaggatatccttaaacagctgtttatagctactgtgacagaaacagaaaagcagtggacaacacatttcaaagaagatcaagtttgtacataacactagaggcatttcttatcaaaaggattggataataaaaataagtttctactgggtatatttcaagcatttatttattactttagttacgaattccaatatactttaaaatggtatttgttttacagcatacataaaatgtagcaaatcggtactgtaaaacatttaacattcatacagttatatataatatccttttttttaaagaatggtatttcacaaaaatgtcttttgaaattggctttggagtttacatatactgaacatgaaagtttataataatgatgatacaactttcaacattgtcattttttcttagaacttcagctgattgcagagatataatgattacattgttattaaatttttttaacacaagtaagtgtcaccattttatgacatgaaataaaaggttatgactgttattgatgttgatgttgacgacctgatcacctggctgaaggagtgtttgtcaggtttctccattgtaaagttactcttttcccccatttcatactgtgctctttggaaggaaatcactatgcacagcccacactaaaggaatggggagttgtagtgtacttttttgggagtggtctacataattaattgaaattcttctgcaaagg

SEQ ID NO: 298314 - DNA, 2237 bp, Homo sapiens
ccgggcaggccgggagtggcgtgctgggcgtgcgcggctgcggtacggcgtgttggtcccagcggttcagctgaggtagggacgtgctgtaggccggaatgttaccggctgttggatctgcggatgaggaggaggatcctgcggaggaggattgtcctgaattggttcccatggagacgacgcaaagcgaggaggaggaaaagtctggcctcggcgccaagatcccagtcacaattatcaccgggtatttagttattcagaggctgctctgctgagaagatgaacaaatttcttgtccaaaacaatgtatttcaaacgtgccgctcgggcctttcccgtattgctcactggtgctgggaagacaacacttctgaactatattttgacagagcaacatagtaaaagagtagcggtcattttaaatgaatttggggaaggaagtgcgctggagaaatccttagctgtcagccaaggtggagagctctatgaagagtggctggaacttagaaacggttgcctctgctgttcagtgaaggacaatggccttagagctattgagaatttgatgcaaaagaaggggaaatttgattacatactgttagagaccactggattggcagacccaggtgcagtggcttctatgttttgggttgatgctgaattagggagtgatatttaccttgatggtatcataactatagtggattcaaaatatggattaaaagcaaagaattggacaacttaaaatgacagctctctattctgaggacttgacacccaggctactgacattgttcttttcggttctacaaatgtgacagcatttaatgcaatagaagcaatgaatgaagttacccagagaagcatttagcagaagagaaacctgatggccttatcaatgaagctactaggcaagttgctttggcagatgccattctcattaataaaacagacttggttccagaagaagatgtaaagaaattaagagcgacaattagatccataaatggactaggacaaatcttagaaacacaaagatcaagaacaataaacatgcagtgattgatttttcttacttcaagtggatgagtgagcaagtgactaaaatcttccgtgaattcttcagtagttgatctctctaatgtattagatcttcatgcctttgatagtctctctggaataagtttgcagaaaaaacttcagcatgtgccaggaacacaacctcaccttgatcagagtattgttacaatcacatttgaagtaccaggaaatgcaaaggaagaacatcttaatatgtttattcagaatctcctgtgggaaaagaatgtgagaaacaaggacaatcactgcatggaggtcataaggctgaagggattggtgtcaatcaaagacaaatcacaacaagtgattgtccagggtgtccatgagctctatgatctggaggagactccagtgagctggaaggatgacactgagagaacaaatcgattggtcctccttggcagaaatttagataaggatatccttaaacagctgtttatagctactgtgacagaaacagaaaagcagtggacaacacatttcaaagaagatcaagtttgtacataacactagaggcatttcttatcaaaaggattggataataaaaataagtttctactgggtatatttcaagcatttatttattactttagttacgaattccaatatactttaaaatggtatttgttttacagcatacataaaatgtagcaaatcggtactgtaaaacatttaacattcatacagttatatataatatccttttttttaaagaatggtatttcacaaaaatgtcttttgaaattggctttggagtttacatatactgaacatgaaagtttataataatgatgatacaactttcaacattgtcattttttcttagaacttcagctgattgcagagatataatgattacattgttattaaatttttttaacacaagtaagtgtcaccattttatgacatgaaataaaaggttatgactgttattgatgttgatgttgacgacctgatcacctggctgaaggagtgtttgtcaggtttctccattgtaaagttactcttttcccccatttcatactgtgctctttggaaggaaatcactatgcacagcccacactaaaggaatggggagttgtagtgtacttttttgggagtggtctacataattaattgaaattcttctgcaaagg

SEQ ID NO: 298315 - DNA, 1899 bp, Homo sapiens
ccgggcaggccgggagtggcgtgctgggcgtgcgcggctgcggtacggcgtgttggtcccagcggttcagctgaggtagggacgtgctgtaggccggaatgttaccggctgttggatctgcggatgaggaggaggatcctgcggaggaggattgtcctgaattggttcccatggagacgacgcaaagcgaggaggaggaaaagtctggcctcggcgccaagatcccagtcacaattatcaccgggtatttaggtgctgggaagacaacacttctgaactatattttgacagagcaacatagtaaaagagtagcggtcattttaaatgaatttggggaaggaagtgcgctggagaaatccttagctgtcagccaaggtggagagctctatgaagagtggctggaacttagaaacggttgcctctgctgttcagtgaagacaatggccttgagagctgaattgagaatgttgattactatgactgtgtagagaccactgtgatgggagacccaggtgcagtggcttctatgttttgggttgatgctgaattagggagtgatatttaccttgatggtatcataactatagtggattcaaaatatggattaaaacatttagcagaagagaaacctgatggccttatcaatgaagctactaggcaagttgctttggcagatgccattctcattaataaaacagacttggttccagaagaagatgtaaagaaattaagagcgacaattagatccataaatggactaggacaaatcttagaaacacaaagatcaagagttgatctctctaatgtattagatcttcatgcctttgatagtctctctggaataagtttgcagaaaaaacttcagcatgtgccaggaacacaacctcaccttgatcagagtattgttacaatcacatttgaagtaccaggaaatgcaaaggaagaacatcttaatatgtttattcagaatctcctgtgggaaaagaatgtgagaaacaaggacaatcactgcatggaggtcataaggctgaagggattggtgtcaatcaaagacaaatcacaacaagtgattgtccagggtgtccatgagctctatgatctggaggagactccagtgagctggaaggatgacactgagagaacaaatcgattggtcctccttggcagaaatttagataaggatatccttaaacagctgtttatagctactgtgacagaaacagaaaagcagtggacaacacatttcaaagaagatcaagtttgtacataacactagaggcatttcttatcaaaaggattggataataaaaataagtttctactgggtatatttcaagcatttatttattactttagttacgaattccaatatactttaaaatggtatttgttttacagcatacataaaatgtagcaaatcggtactgtaaaacatttaacattcatacagttatatataatatccttttttttaaagaatggtatttcacaaaaatgtcttttgaaattggctttggagtttacatatactgaacatgaaagtttataataatgatgatacaactttcaacattgtcattttttcttagaacttcagctgattgcagagatataatgattacattgttattaaatttttttaacacaagtaagtgtcaccattttatgacatgaaataaaaggttatgactgttattgatgttgatgttgacgacctgatcacctggctgaaggagtgtttgtcaggtttctccattgtaaagttactcttttcccccatttcatactgtgctctttggaaggaaatcactatgcacagcccacactaaaggaatggggagttgtagtgtacttttttgggagtggtctacataattaattgaaattcttctgcaaagg

SEQ ID NO: 298316 - DNA, 1150 bp, Homo sapiens
ggctgcaggaattcggcacgagagaaacacaaagatcaagagttgatctctctaatgtattagatcttcatgcctttgatagtctctctggaataagtttgcagaaaaaacttcagcatgtgccaggaacacaacctcaccttgatcagagtattgttacaatcacatttgaagtaccaggaaatgcaaaggaagaacatcttaatatgtttattcagaatctcctgtgggaaaagaatgtgagaaacaaggacaatcactgcatggaggtcataaggctgaagggattggtgtcaatcaaagacaaatcacaacaagtgattgtccagggtgtccatgagctctatgatctggaggagactccagtgagctggaaggatgacactgagagaacaaatcgattggtcctccttggcagaaatttagataaggatatccttaaacagctgtttatagctactgtgacagaaacagaaaagcagtggacaacacatttcaaagaagatcaagtttgtacataacactagaggcatttcttatcaaaaggattggataataaaaataagtttctactgggtatatttcaagcatttatttattactttagttacgaattccaatatactttaaaatggtatttgttttacagcatacataaaatgtagcaaatcggtactgtaaaacatttaacattcatacagttatatataatatccttttttttaaagaatggtatttcacaaaaatgtcttttgaaattggctttggagtttacatatactgaacatgaaagtttataataatgatgatacaactttcaacattgtcattttttcttagaacttcagctgattgcagagatataatgattacattgttattaaatttttttaacacaagtaagtgtcaccattttatgacatgaaataaaaggttatgactgttattgatgttgatgttgacgacctgatcacctggctgaaggagtgtttgtcaggtttctccattgtaaagttactcttttcccccatttcatactgtgctctttggaaggaaatcactatgcacagcccacactaaaggaatggggagttgtagtgtacttttttgggagtggtctacataattaattgaaattcttctgcaaagg

SEQ ID NO: 298317 - DNA, 1759 bp, Homo sapiens
tacgaagtatgtggtagggtggggggcatccatatagtcactccaggtttatggagggttcttctactattaggacttttcgcttcgaagcgaaggcttctcaaatcatgaaaattattaatattactgctgttagagaaatgaatgggtgcagtggcttctatgttttgggttgatgctgaattagggagtgatatttaccttgatggtatcataactatagtggattcaaaatatggattaaaagcaaagaattggacaacttaaaatgacagctctctattctgaggacttgacacccaggctactgacattgttcttttcggttctacaaatgtgacagcatttaatgcaatagaagcaatgaatgaagttacccagagaagcatttagcagaagagaaacctgatggccttatcaatgaagctactaggcaagttgctttggcagatgccattctcattaataaaacagacttggttccagaagaagatgtaaagaaattaagagcgacaattagatccataaatggactaggacaaatcttagaaacacaaagatcaagaacaataaacatgcagtgattgatttttcttacttcaagtggatgagtgagcaagtgactaaaatcttccgtgaattcttcagtagttgatctctctaatgtattagatcttcatgcctttgatagtctctctggaataagtttgcagaaaaaacttcagcatgtgccaggaacacaacctcaccttgatcagagtattgttacaatcacatttgaagtaccaggaaatgcaaaggaagaacatcttaatatgtttattcagaatctcctgtgggaaaagaatgtgagaaacaaggacaatcactgcatggaggtcataaggctgaagggattggtgtcaatcaaagacaaatcacaacaagtgattgtccagggtgtccatgagctctatgatctggaggagactccagtgagctggaaggatgacactgagagaacaaatcgattggtcctccttggcagaaatttagataaggatatccttaaacagctgtttatagctactgtgacagaaacagaaaagcagtggacaacacatttcaaagaagatcaagtttgtacataacactagaggcatttcttatcaaaaggattggataataaaaataagtttctactgggtatatttcaagcatttatttattactttagttacgaattccaatatactttaaaatggtatttgttttacagcatacataaaatgtagcaaatcggtactgtaaaacatttaacattcatacagttatatataatatccttttttttaaagaatggtatttcacaaaaatgtcttttgaaattggctttggagtttacatatactgaacatgaaagtttataataatgatgatacaactttcaacattgtcattttttcttagaacttcagctgattgcagagatataatgattacattgttattaaatttttttaacacaagtaagtgtcaccattttatgacatgaaataaaaggttatgactgttattgatgttgatgttgacgacctgatcacctggctgaaggagtgtttgtcaggtttctccattgtaaagttactcttttcccccatttcatactgtgctctttggaaggaaatcactatgcacagcccacactaaaggaatggggagttgtagtgtacttttttgggagtggtctacataattaattgaaattcttctgcaaagg

SEQ ID NO: 298318 - DNA, 923 bp, Homo sapiens
ccgggcaggccgggagtggcgtgctgggcgtgcgcggctgcggtacggcgtgttggtcccagcggttcagctgaggtagggacgtgctgtaggccggaatgttaccggctgttggatctgcggatgaggaggaggatcctgcggaggaggattgtcctgaattggttcccatggagacgacgcaaagcgaggaggaggaaaagtctggcctcggcgccaagatcccagtcacaattatcaccgggtatttaggtgctgggaagacaacacttctgaactatattttgacagagcaacatagtaaaagagtagcggtcattttaaatgaatttggggaaggaagtgcgctggagaaatccttagctgtcagccaaggtggagagctctatgaagagtggctggaacttagaaacggttgcctctgctgttcagtgaaggacaatggccttagagctattgagaatttgatgcaaaagaaggggaaatttgattacatactgttagagaccactggattggcagacccaggtgcagtggcttctatgttttgggttgatgctgaattagggagtgatatttaccttgatggtatcataactatagtggattcaaaatatggattaaaacatttagcagaagagaaacctgatggccttatcaatgaagctactaggcaagttgctttggcagatggctcgtcgttgtatcacaggagggatcgtggaagaataccaattgccatattacaacatggtaccgagtgatccgtcatacgaagatatgcgtgaggttgtgtgtgtcaaacgtttgcggccaattgtgtctaatcggtggaacagtgatgaatgtctacgagcagttttgaagctaatgtcagaatgctgggcccacaactccagcctccagactcacagctttgacga

SEQ ID NO: 298319 - DNA, 1681 bp, Homo sapiens
catttctaaaacaaattatttaatataatcaaactcctttaacttctcaacttttcccactaaaactgtgaaacattatataaaatctttaatcaataggatatgatacatatttcatcattttgtttcaggttttggttgtgataaataacactgaaaaaccatcctaatatatgtattaactttatcattagaaaaggggattgttcaaaaaaaaaatcaatacacagaaaccttttttgaaaattaaaaacattaagaaacttcttgtaattcacaaataattggaattaagtaattttctcagcttaagagtttgtattttttaagtgaatatcagtaattaatccattaacattgatgctctatttctgcttttaagtttgaactgaggctgattaatgttcagtcaattctcctttgagcagggattggtgtcaatcaaagacaaatcacaacaagtgattgtccagggtgtccatgagctctatgatctggaggagactccagtgagctggaaggatgacactgagagaacaaatcgattggtcctccttggtaagtctgaaaggattcacagttttaaaacaaagtgaaaaatatatttgaaagggatatcatgtgccactcaaacagattaaccattcaggtcctcttttaaaactaaataagcttgtggtcaatgtttcatctttatcacgttacaacgttcgtaaaagcttgttaggacttttgttcttcttcagttttagaaaagtggttaatccaaggaccaatgtgactttgatgtactgacctggaaagttaaagatggaatcactcaattactattctttttgtaaatttctaaacaccataaagcatttaatgaactggaattgataggtgaactgtgtcattttaataagcataatgtaatcacgtcatattttgttttgtttgcaggcagaaatttagataaggatatccttaaacagctgtttatagctactgtgacagaaacagaaaagcagtggacaacacatttcaaagaagatcaagtttgtacataacactagaggcatttcttatcaaaaggattggataataaaaataagtttctactgggtatatttcaagcatttatttattactttagttacgaattccaatatactttaaaatggtatttgttttacagcatacataaaatgtagcaaatcggtactgtaaaacatttaacattcatacagttatatataatatccttttttttaaagaatggtatttcacaaaaatgtcttttgaaattggctttggagtttacatatactgaacatgaaagtttataataatgatgatacaactttcaacattgtcattttttcttagaacttcagctgattgcagagatataatgattacattgttattaaatttttttaacacaagtaagtgtcaccattttatgacatgaaataaaaggttatgactgttattgatgttgatgttgacgacctgatcacctggctgaaggagtgtttgtcaggtttctccattgtaaagttactcttttcccccatttcatactgtgctctttggaaggaaatcactatgcacagcccacactaaaggaatggggagttgtagtgtacttttttgggagtggtctacataattaattgaaattcttctgcaaagg

SEQ ID NO: 298320 - DNA, 653 bp, Homo sapiens
  misc_feature (441)..(441): n is a, c, g, or t
  misc_feature (499)..(499): n is a, c, g, or t
  misc_feature (508)..(508): n is a, c, g, or t
  misc_feature (532)..(532): n is a, c, g, or t
  misc_feature (561)..(561): n is a, c, g, or t
ccgggcaggccgggagtggcgtgctgggcgtgcgcggctgcggtacggcgtgttggtcccagcggttcagctgaggtagggacgtgctgtaggccggaatgttaccggctgttggatctgcggatgaggaggaggatcctgcggaggaggattgtcctgaattggttcccatggagacgacgcaaagcgaggaggaggaaaagtctggcctcggcgccaagatcccagtcacaattatcaccgggtatttaggtgctgggaagacaacacttctgaactatattttgacagagcaacatagtaaaagagtagcggtcattttaaatgaatttggggaaggaagtgcgctggagaaatccttagctgtcagccaaggtggagagctctatgaagagtggctggaacttagaaacggttgcctctgctgttcagtgaactaanacccagtggacttacagctccttgacatttgctgtcgagtagtactcccgtaagttancctctttcnaataatatgtacttcacaagacgncttgcactcatgtactagtcccacaaaantgctaaattcagatgcaattcccggactgctaaaccaaaccactttcaccgtcacactaacgggggtatactacgggcaatgctctgaactc

SEQ ID NO: 298321 - DNA, 443 bp, Homo sapiens
ccgggcaggccgggagtggcgtgctgggcgtgcgcggctgcggtacggcgtgttggtcccagcggttcagctgaggtagggacgtgctgtaggccggaatgttaccggctgttggatctgcggatgaggaggaggatcctgcggaggaggattgtcctgaattggttcccatggagacgacgcaaagcgaggaggaggaaaagtctggcctcggcgccaagatcccagtcacaattatcaccgggtatttaggtgctgggaagacaacacttctgaactatattttgacagagcaacatagtaaaagagtagcggtcattttaaatgaatttggggaagaacatcgctggacaaatcctgagccgtcttacatggatgcgtgctttattatgagcgggtcgatcttagggacagttgcctctgatgtgcattgaatggcttat

SEQ ID NO: 298322 - DNA, 1116 bp, Homo sapiens
agtagtagagaggcccacactggctaggcaggcagcacagtcccgcggacggctgagcgtgtggctgcaggagcttctgtgggagtacggtcatgagccttttgctgtactatgccctccctgccctgggcagctatgccatgctctccatcttcttcctgcgccggcctcatctgctgcacacgcccagggctcccaccttccgcatccgcctgggggcccaccgaggaggatctggagagctgctggagaacaccatggaggccatggagaactccatggcccagcgctcggacctcctggagctcgactgtcagctgacacgggacagagtggtggtggtgtcacatgatgagaacctgtgccgccagtcgggcctaaacagggatgtgggcagcctggacttcgaggacctgcccctctacaaggagaagctggaggtttacttctctccaggccactttgctcacgggtcagaccggcgcatggttcgtctggaggacctgttccagaggtttccaaggacacccatgagcgtagagatcaaagggaagaacgaagagctcatccgtgagatagcaggcttggtgagacgctatgaccgtaatgaaatcaccatctgggcctcggagaagagctcggtcatgaagaaatgcaaggctgccaaccccgagatgcccctgtccttcacaataagccgaggattctgggtgctgctttcctactacctggggctgctgcccttcatcccaatccctgagaagttcttcttctgcttcctgcccaacatcatcaacaggacctatttcccattttcctgctcttgcctgaaccagttattggctgtggtttcgaaatggctgatcatgaggaagagtctgatccgacacttggaggagcgaggggtgcaggtggtcttttggtgccttaatgaagagtcggattttgaagcagccttcagcgtgggagccactggcgtcataacggattatcccacagccctgcggcactacctggacaaccatggaccagctgcccggacctcctaagtccagaagcctcgaggtctcctgtttctcttcctgaaaaataaatatttgcctttcgatcaaaaaa

SEQ ID NO: 298323 - DNA, 1344 bp, Homo sapiens
agtagtagagaggcccacactggctaggcaggcagcacagtcccgcggacggctgagcgtgtggctgcaggagcttctgtgggagtacggtcatgagccttttgctgtactatgccctccctgccctgggcagctatgccatgctctccatcttcttcctgcgccggcctcatctgctgcacacgcccagggctcccaccttccgcatccgcctgggggcccaccgaggaggatctggagagctgctggagaacaccatggaggccatggagaagtgagtgtatctgcccctgcccaggctgccatgtgagggtgtgcaggtcgtggactgcatcacagcaagggacgccattcacttcctagctgggtgactggcgccccctggaggtggcctgcacatcccgccacgaactccgctctcacattcccggccacctcccagccaccatgcccctcatcccagtcccctgcccctgccccccgctgaccttcacccccacagctccatggcccagcgctcggacctcctggagctcgactgtcagctgacacgggacagagtggtggtggtgtcacatgatgagaacctgtgccgccagtcgggcctaaacagggatgtgggcagcctggacttcgaggacctgcccctctacaaggagaagctggaggtttacttctctccaggccactttgctcacgggtcagaccggcgcatggttcgtctggaggacctgttccagaggtttccaaggacacccatgagcgtagagatcaaagggaagaacgaagagctcatccgtgagatagcaggcttggtgagacgctatgaccgtaatgaaatcaccatctgggcctcggagaagagctcggtcatgaagaaatgcaaggctgccaaccccgagatgcccctgtccttcacaataagccgaggattctgggtgctgctttcctactacctggggctgctgcccttcatcccaatccctgagaagttcttcttctgcttcctgcccaacatcatcaacaggacctatttcccattttcctgctcttgcctgaaccagttattggctgtggtttcgaaatggctgatcatgaggaagagtctgatccgacacttggaggagcgaggggtgcaggtggtcttttggtgccttaatgaagagtcggattttgaagcagccttcagcgtgggagccactggcgtcataacggattatcccacagccctgcggcactacctggacaaccatggaccagctgcccggacctcctaagtccagaagcctcgaggtctcctgtttctcttcctgaaaaataaatatttgcctttcgatcaaaaaa

SEQ ID NO: 298324 - DNA, 606 bp, Homo sapiens
agtagtagagaggcccacactggctaggcaggcagcacagtcccgcggacggctgagcgtgtggctgcaggagcttctgtgggagtacggtcatgagccttttgctgtactatgccctccctgccctgggcagctatgccatgctctccatcttcttcctgcgccggcctcatctgctgcacacgcccagggctcccaccttccgcatccgcctgggggcccaccgaggaggatctggagagctgctggagaacaccatggaggccatggagaactccatggcccagcgctcggacctcctggagctcgactgtcagctgacacgggacagagtggtggtggtgtcacatgatgagaacctgtgccgccagtcgggcctaaacagggatgtgggcagcctggacttcgaggacctgcccctctacaaggagaagctggaggtttacttctctccaggccactttgctcacggatcagtccgttcgcatgttaacatgcgaacggactgatcccaacaccttttcaaggaacctctcatgttcgtcacaaatactggattactacctggggacactgcagaactcacgatcagtccgttcgctggga

SEQ ID NO: 298325 - DNA, 504 bp, Homo sapiens
attccagaactgccagagactgggacgctggggaaggtaagggcgcagcagcaccagcgggagattgaactggggccacctgaggtcccgaggccccgtggggagggcgggtggggaggagaagggttctggctgccccaatccctgagaagttcttcttctgcttcctgcccaacatcatcaacaggacctatttcccattttcctgctcttgcctgaaccagttattggctgtggtttcgaaatggctgatcatgaggaagagtctgatccgacacttggaggagcgaggggtgcaggtggtcttttggtgccttaatgaagagtcggattttgaagcagccttcagcgtgggagccactggcgtcataacggattatcccacagccctgcggcactacctggacaaccatggaccagctgcccggacctcctaagtccagaagcctcgaggtctcctgtttctcttcctgaaaaataaatatttgcctttcgatcaaaaaa

SEQ ID NO: 298326 - DNA, 499 bp, Homo sapiens
ggcactaccagcccaccccacctctgggacaggggagaccctaggagctaacccccacttccttctctctgcaggacctatttcccattttcctgctcttgcctgaaccagttattggctgtggtttcgaaatggtgaggtgggcaagatggctgggtggcgtgtccccatagagacctactgctgcccttctcccaggtcccctctcatcatcacctcccacgtccccaccccacccccaggctgatcatgaggaagagtctgatccgacacttggaggagcgaggggtgcaggtggtcttttggtgccttaatgaagagtcggattttgaagcagccttcagcgtgggagccactggcgtcataacggattatcccacagccctgcggcactacctggacaaccatggaccagctgcccggacctcctaagtccagaagcctcgaggtctcctgtttctcttcctgaaaaataaatatttgcctttcgatcaaaaaa

SEQ ID NO: 298327 - DNA, 1286 bp, Homo sapiens
agcgaagtggcagggcagggtgtggacgaggaagaagatgctggcgcagcctgggctggctggggaggtgaggccagagggaggatggagcccagagagggaatgtgggtgatgaggttgggccaggcccctagaccccaagccccagaggcccactccagtgccccccacaggatctggagagctgctggagaacaccatggaggccatggagaagtgagtgtatctgcccctgcccaggctgccatgtgagggtgtgcaggtcgtggactgcatcacagcaagggacgccattcacttcctagctgggtgactggcgccccctggaggtggcctgcacatcccgccacgaactccgctctcacattcccggccacctcccagccaccatgcccctcatcccagtcccctgcccctgccccccgctgaccttcacccccacagctccatggcccagcgctcggacctcctggagctcgactgtcagctgacacgggacagagtggtggtggtgtcacatgatgagaacctgtgccgccagtcgggcctaaacagggatgtgggcagcctggacttcgaggacctgcccctctacaaggagaagctggaggtttacttctctccaggccactttgctcacgggtcagaccggcgcatggttcgtctggaggacctgttccagaggtttccaaggacacccatgagcgtagagatcaaagggaagaacgaagagctcatccgtgagatagcaggcttggtgagacgctatgaccgtaatgaaatcaccatctgggcctcggagaagagctcggtcatgaagaaatgcaaggctgccaaccccgagatgcccctgtccttcacaataagccgaggattctgggtgctgctttcctactacctggggctgctgcccttcatcccaatccctgagaagttcttcttctgcttcctgcccaacatcatcaacaggacctatttcccattttcctgctcttgcctgaaccagttattggctgtggtttcgaaatggctgatcatgaggaagagtctgatccgacacttggaggagcgaggggtgcaggtggtcttttggtgccttaatgaagagtcggattttgaagcagccttcagcgtgggagccactggcgtcataacggattatcccacagccctgcggcactacctggacaaccatggaccagctgcccggacctcctaagtccagaagcctcgaggtctcctgtttctcttcctgaaaaataaatatttgcctttcgatcaaaaaa

SEQ ID NO: 298328 - DNA, 1208 bp, Homo sapiens
agtagtagagaggcccacactggctaggcaggcagcacagtcccgcggacggctgagcgtgtggctgcaggagcttctgtgggagtacggtcatgagccttttgctgtactatgccctccctgccctgggcagctatgccatgctctccatcttcttcctgcgccggcctcatctgctgcacacgcccagggctcccaccttccgcatccgcctgggggcccaccgaggaggatctggagagctgctggagaacaccatggaggccatggagaactccatggcccagcgctcggacctcctggagctcgactgtcagctgacacgggacagagtggtggtggtgtcacatgatgagaacctgtgccgccagtcgggcctaaacagggatgtgggcagcctggacttcgaggacctgcccctctacaaggagaagctggaggtttacttctctccaggccactttgctcacgggtcagaccggcgcatggttcgtctggaggacctgttccagaggtttccaaggacacccatgagcgtagagatcaaagggaagaacgaagagctcatccgtgagatagcaggcttggtgagacgctatgaccgtaatgaaatcaccatctgggcctcggagaagagctcggtcatgaagaaatgcaaggctgccaaccccgagatgcccctgtccttcacaataagccgaggattctgggtgctgctttcctactacctggggctgctgcccttcatcccaatccctgagaagttcttcttctgcttcctgcccaacatcatcaacaggacctatttcccattttcctgctcttgcctgaaccagttattggctgtggtttcgaaatggctgatcatgaggaagagtctgatccgacacttggaggagcgaggggtgcaggtgaggccgtgaccaccacttccaccgcacacagacctggcagcagggttccggtcccactctgctgccaactagctgcatcactcgggcaggtggtcttttggtgccttaatgaagagtcggattttgaagcagccttcagcgtgggagccactggcgtcataacggattatcccacagccctgcggcactacctggacaaccatggaccagctgcccggacctcctaagtccagaagcctcgaggtctcctgtttctcttcctgaaaaataaatatttgcctttcgatcaaaaaa

SEQ ID NO: 298329 - DNA, 1224 bp, Homo sapiens
agtagtagagaggcccacactggctaggcaggcagcacagtcccgcggacggctgagcgtgtggctgcaggagcttctgtgggagtacggtcatgagccttttgctgtactatgccctccctgccctgggcagctatgccatgctctccatcttcttcctgcgccggcctcatctgctgcacacgcccagggctcccaccttccgcatccgcctgggggcccaccgaggaggatctggagagctgctggagaacaccatggaggccatggagaactccatggcccagcgctcggacctcctggagctcgactgtcagctgacacgggacagagtggtggtggtgtcacatgatgagaacctgtgccgccagtcgggcctaaacagggatgtgggcagcctggacttcgaggacctgcccctctacaaggagaagctggaggtttacttctctccaggccactttgctcacgggtcagaccggcgcatggttcgtctggaggacctgttccagaggtttccaaggacacccatgagcgtagagatcaaagggaagaacgaagagctcatccgtgagatagcaggcttggtgagacgctatgaccgtaatgaaatcaccatctgggcctcggagaagagctcggtcatgaagaaatgcaaggctgccaaccccgagatgcccctgtccttcacaataagccgaggattctgggtgctgctttcctactacctggggctgctgcccttcatcccaatccctgagaagttcttcttctgcttcctgcccaacatcatcaacaggacctatttcccattttcctgctcttgcctgaaccagttattggctgtggtttcgaaatggtgaggtgggcaagatggctgggtggcgtgtccccatagagacctactgctgcccttctcccaggtcccctctcatcatcacctcccacgtccccaccccacccccaggctgatcatgaggaagagtctgatccgacacttggaggagcgaggggtgcaggtggtcttttggtgccttaatgaagagtcggattttgaagcagccttcagcgtgggagccactggcgtcataacggattatcccacagccctgcggcactacctggacaaccatggaccagctgcccggacctcctaagtccagaagcctcgaggtctcctgtttctcttcctgaaaaataaatatttgcctttcgatcaaaaaa

SEQ ID NO: 298330 - DNA, 1064 bp, Homo sapiens
agtagtagagaggcccacactggctaggcaggcagcacagtcccgcggacggctgagcgtgtggctgcaggagcttctgtgggagtacggtcatgagccttttgctgtactatgccctccctgccctgggcagctatgccatgctctccatcttcttcctgcgccggcctcatctgctgcacacgcccagggctcccaccttccgcatccgcctgggggcccaccgaggaggatctggagagctgctggagaacaccatggaggccatggagaactccatggcccagcgctcggacctcctggagctcgactgtcagctgacacgggacagagtggtggtggtgtcacatgatgagaacctgtgccgccagtcgggcctaaacagggatgtgggcagcctggacttcgaggacctgcccctctacaaggagaagctggaggtttacttctctccaggccactttgctcacgggtcagaccggcgcatggttcgtctggaggacctgttccagaggtttccaaggacacccatgagcgtagagatcaaagggaagaacgaagagctcatccgtgagatagcaggcttggtgagacgctatgaccgtaatgaaatcaccatctgggcctcggagaagagctcggtcatgaagaaatgcaaggctgccaaccccgagatgcccctgtccttcacaataagccgaggattctgggtgctgctttcctactacctggggctgctgcccttcatcccaatccctgagaagttcttcttctgcttcctgcccaacatcatcaacaggacctatttcccattttcctgctcttgcctgaaccagttattggctgtggtttcgaaatggtggtcttttggtgccttaatgaagagtcggattttgaagcagccttcagcgtgggagccactggcgtcataacggattatcccacagccctgcggcactacctggacaaccatggaccagctgcccggacctcctaagtccagaagcctcgaggtctcctgtttctcttcctgaaaaataaatatttgcctttcgatcaaaaaa

SEQ ID NO: 298331 - DNA, 702 bp, Homo sapiens
acacaggaatagttaggtctgtcatttgagggagcccaggggacctggaacgggtcacacgggcagtgctcagttctggtgcctcttcatatgcagggccaggtggtcagagcgcgagaagctgcggttgcacaccccgcactggaagggcttggcgcctgtgtgcttccggtagtggcgggtcagctcatccgatcgcgcgaacctccagtcgcagccttcagataaaatgattttatctgaaggctgccaaccccgagatgcccctgtccttcacaataagccgaggattctgggtgctgctttcctactacctggggctgctgcccttcatcccaatccctgagaagttcttcttctgcttcctgcccaacatcatcaacaggacctatttcccattttcctgctcttgcctgaaccagttattggctgtggtttcgaaatggctgatcatgaggaagagtctgatccgacacttggaggagcgaggggtgcaggtggtcttttggtgccttaatgaagagtcggattttgaagcagccttcagcgtgggagccactggcgtcataacggattatcccacagccctgcggcactacctggacaaccatggaccagctgcccggacctcctaagtccagaagcctcgaggtctcctgtttctcttcctgaaaaataaatatttgcctttcgatcaaaaaa

SEQ ID NO: 298332 - DNA, 268 bp, Homo sapiens
gagaatggccagaacccaggaggtggagcttgcagtgagccgagatcgcaccactgcactccagcctgggcgacagagcgagactccatttcaaataaataagtaaaaataaaaataaaaaaaagtaactcttacttgaatttattaagaatacacagatgatgttgccaaagtggcaatcaaattgctttgtcattttttactttttatgtatgtttgtatgtatgtatatatttgagagagagtcttgttctgtcactcaggctgg

SEQ ID NO: 298333 - DNA, 824 bp, Homo sapiens
cttgctgtttggaaacttgtgaagacctgcatccctttgtatctcaaataaagacagaggtgtttccagacctaagaataacaggaacatggaggagtggcatctccagtgtagccacccaccaaagcctcatcctgaacactatggcctagtgggtcacttacagggatgtagctggcattgatgtagtcagagcaaggatcatcatctacattggagagcttcactcgcgtggcatcatctggaaggagagatttgctgctgagtcttggagtgacttttctacagtttatgtgatgtgtgtgatgtgccttagctctgatccccacaacagccacagatgggaagtgatcttatctccattttgcagatgaggctcaggcaggataactaacttgccccatgttgcataggtggcctataaccagtcagacacaggagacaacatgaagccccatctgtgcttccctttctgacattaccacatttgcctgatggagtggccagctccctttcactgctggaatgaatacaatccagaaaacctaccttctattgctttacctaatggggtaaggaaatttaagtagaaattgctaaccgaagactttgctaagcaaacccaggtctgcttgatgtcagagcccttgctgttaaccccatttactgcttagcctccaaagagaagcaatagcatcacatggggaaatgtcaacagcataagaggactttcataatcagaatttaaactggctattatccctctggagggaagtgcaggaatatacaagctatttcttattaaaggcattcagagcttgaga

SEQ ID NO: 298334 - DNA, 654 bp, Homo sapiens
gaaggcccttgccctaacctcattcttacactttctttttttgtttctcagtttctccttagactctcagtctcttttccttctttctcttgctcttttgttcttcctgatttgtctctcaacctctagtttcactagtcatgctctcgagtgtcgtgttttcctcagtgtcttctgcccatcgtgcgtttctttctccaccttattctgtgtttctgtttcagttgctctgcttctctccctctctttctgttgctgtttctctgtgtctctgtcactgttggtctttccctgttactttgggaatctctctgtctgtctttctgtatctatgcctctgtttctcattccatctccactcccgggagtggagagagaatgcagaaccactgaaatgtgccagtgagcgatgggatgggtgttgtctgagctgttctctgagcggctcgggcacttccagtcttcgttcacctcccttgatcacgtctctaccgatgacgatccagcacatgtgacttgaggatcccgcgcacaagctcacactatatccccaccagctgtgtgtcacattcgtcagacccagggagtcctttacttacaccgccttctccagtccccttcattctctcgcactcccgggtatactctaggaga

SEQ ID NO: 298335 - DNA, 404 bp, Homo sapiens
ctgtagcgcccatgaccgcagggtgcctgcagaagcacttgcccaaaattcgagaccggagcaccagtgggggcaagatgaaggtcaatggggcgccccgggaggatgcccggcctgtgccccagggctcctgccagagcgagctgcaccgggcgctggagcggctggccgcttcacagagccgcacccacgaggacctacattcatccccatccccaactgcgaccagcctgagcaatatagccagacccccgtctctacaaaaaaaaaaaaaaaaaaaataggcaactgcagtggctcatgcctgtagtcccaggtatttgggagtctgagatgagaagttcaaggttacaatgagctatgatcacgtgattgcactccagcctgggcgactctatttcgta

SEQ ID NO: 298336 - DNA, 1323 bp, Homo sapiens
gaaggcccttgccctaacctcattcttacactttctttttttgtttctcagtttctccttagactctcagtctcttttccttctttctcttgctcttttgttcttcctgatttgtctctcaacctctagtttcactagtcatgctctcgagtgtcgtgttttcctcagtgtcttctgcccatcgtgcgtttctttctccaccttattctgtgtttctgtttcagttgctctgcttctctccctctctttctgttgctgtttctctgtgtctctgtcactgttggtctttccctgttactttgggaatctctctgtctgtctttctgtatctatgcctctgtttctcattccatctccgaccctgttttgctctcctgtgcctctgtctgtctctgtctcttttcctggtgcttgaagcttccattgttgcagtccggatgctgggactccagccccaagcttcctgtcctgggacccaaaccctccacttcctcaatcctctgcagcttgtcagccgaggagagcaggatgcagggaaaacaggaaggaggtggactccaggggtctgggcctcgggcctctctgcccttcctgcccctgggtagggagagatgggtcagcagaaaacattctaggagaaatgccagcctggcacccagcatatctgggaaggggggtcctgggggagaaagtcgctaatcttggggcagagatgccagtggcaatggtagaggaggggtactgagactgggagggagcaagggccgagcccttgggttcgcggggtacaacagagtcacgttccctttgaatctccatcctccaccagccagagggtatctggcaccagataaggatggctggtagcctcctcctctctcagcactttgaatgcaagacagaagagccctcaaagggctgggtaggaatacctcatcctctggttgggtaggaatactccatcctgtagtggaggaaaataagatcccctaggggtttggggagggcatggcatgagaattttgtggttgtcctctggatataatgcaaactggcctccaggaatatctaggggctgggtgtggaggttcatgcttgtaatcccagcactttgggaggattgcttgaggccaggagttcgagaccagcctgagcaatatagccagacccccgtctctacaaaaaaaaaaaaaaaaaaaataggcaactgcagtggctcatgcctgtagtcccaggtatttgggagtctgagatgagaagttcaaggttacaatgagctatgatcacgtgattgcactccagcctgggcgactctatttcgta

SEQ ID NO: 298337 - DNA, 1042 bp, Homo sapiens
tagactgggttgggcaggcctactgactgctgcctgaaggttgctgtaaagggactaagtaaatcaattaactccacagttttcacaaaggtctcttgatatcaaaacttctttccttgcatgcttctctgatcctgtggagatgaaaattgacatccatagtcatattctaccaaaagaatggccagatctaaaaaaggtaatggtaattaatttgctgaattatttctgaaacttctccagggtttctcaatgcctttctcttctttgtggaattagatgtctagtttatctgctttggtggggggcgagggggttaaatcatttggtagttctgattttctagcttttaaaaatgacttttatatttattttgaaataacattggattaaagaaataagtgctttctcagaaacccttttttccctcaaatgaaccattctttaaaatatctggacaatttaaataaggcagatttaccttttcaaaaatcacatattcagctgctgggaagatacatgccaactacagaatttaaagttacaattttaagtagaagaccattaaaaatggaatgtgatcggtttcaaggacttctaaaatatatctcctttccaaaatgtttaaaataagttttagaagcaccaagagatagctttgtgaatttttttagtctattttaggacactgcctgaaacctttactgtttgatgttctttattctataaatctttgtcctgaagaactaggaagtaggtacatcaaaaaacccgagaataaatgacatgaagcttttgcacagtgacatctcctaagagagtattctttgtgtttctctaaagatggaaatttccttttgtcattaagaacttttgaatgaatataaaaagaggaaggtgaggaacatgaaagaaatgtaaaattggctagaggtttgttcaggcttaatatcaggttttacccaatcttcagcattctgccagtactttcacaccaccgataatgtttcaacttttttatcccaagtgagggaaaatgaat

SEQ ID NO: 298338 - DNA, 1710 bp, Homo sapiens
tagactgggttgggcaggcctactgactgctgcctgaaggttgctgtaaagggactaagtaaatcaattaactccacagttttcacaaaggtctcttgatatcaaaacttctttccttgcatgcttctctgatcctgtggagatgaaaattgacatccatagtcatattctaccaaaagaatggccagatctaaaaaagaggtttggctacggaggctgggtgcagctccaacaccacagcaagggagaagcaaagttgttgaaagatgggaaagtcttcagagtggtgcgagagaattgctgggatccagaagttcgtattagagaaatggaccaaaaaggagtaacagtgcaagccctttccacagttcctgtcatgtttagctactgggccaaacctgaggacactttaaacctgtgccagcttttaaacaacgaccttgccagcaccgttgtgagctaccccaggaggttcgtgggtctggggacgttgcccatgcaggcccctgagctggcggtcaaggagatggagcgctgtgtgaaagagctgggctttcccggggtccaaattggcacccacgtcaacgagtgggacctgaacgcgcaggagctctttcctgtctatgcggcagccgaaaggctgaagtgttccctgttcgtgcatccctgggacatgcagatggatggacgaatggccaaatactggctcccttggcttgtaggaatgccagcagagaccaccatagccatttgctccatgatcatgggtggagtatttgagaagtttcccaaactgaaagtgtgtttcgcacatggtggtggtgccttccccttcacagtgggaagaatctcccatggattcagcatgcgcccagatctgtgtgcccaggacaaccccatgaacccgaagaaataccttggttccttttacacagatgctttggttcatgatcctctgtccctcaagctgttaacagatgtcataggaaaggataaagtcattttgggaaccgattacccctttccactaggtgagctggaacctgggaaactaatagagtccatggaagaatttgatgaagaaacaaagaataaactcaaagccggcaatgccctggcatttttgggtcttgagagaaaacaatttgaatgactgaatttactacaaaggcaaactttcaaaaggatatctcatttttgtttctaaatatgtatcaacaggtatcaacaaaatcctattttgaactattttactcagaaatgaatgtcccaaatatcctaaattattcataataaaaatgatttgtaagtgttttcattctgaaaaaaaaaaaaaaaaaaaaaaaaaagagatataaaaaaaaaaataacacaaaacagaaaaaaaaaaaaaaaaaagagggggggcgccagcaaagatatacacagagcggggacacaagtaacgacaccagcatgtaagaagaaaggccccccaaagagccattaaagaagaacgagcagggcgcggaacaacacagcagaggtagaaaaacatgaaaaaatagatgataaatgagaaagcaacaaacaatacgacgagagagcaaaatgagggcatatacaagaagaaattacacagcagaggtagaactaatagttcgtgatgattagttatacaacatcatatattgtgggacatagtgtgctcagatgaaatgaaaaaaatcg

SEQ ID NO: 298339 - DNA, 1770 bp, Homo sapiens
tagactgggttgggcaggcctactgactgctgcctgaaggttgctgtaaagggactaagtaaatcaattaactccacagttttcacaaaggtctcttgatatcaaaacttctttccttgcatgcttctctgatcctgtggagatgaaaattgacatccatagtcatattctaccaaaagaatggccagatctaaaaaagcagaccctgagacaaggattcagatgcaagtagtttgctttggaggtgatcccaggaaacaccagtagagtgaggaagtgagacagggaaaacagggcagccagtgaaagaggtttggctacggaggctgggtgcagctccaacaccacagcaagggagaagcaaagttgttgaaagatgggaaagtcttcagagtggtgcgagagaattgctgggatccagaagttcgtattagagaaatggaccaaaaaggccaaacctgaggacactttaaacctgtgccagcttttaaacaacgaccttgccagcaccgttgtgagctaccccaggaggttcgtgggtctggggacgttgcccatgcaggcccctgagctggcggtcaaggagatggagcgctgtgtgaaagagctgggctttcccggggtccaaattggcacccacgtcaacgagtgggacctgaacgcgcaggagctctttcctgtctatgcggcagccgaaaggctgaagtgttccctgttcgtgcatccctgggacatgcagatggatggacgaatggccaaatactggctcccttggcttgtaggaatgccagcagagaccaccatagccatttgctccatgatcatgggtggagtatttgagaagtttcccaaactgaaagtgtgtttcgcacatggtggtggtgccttccccttcacagtgggaagaatctcccatggattcagcatgcgcccagatctgtgtgcccaggacaaccccatgaacccgaagaaataccttggttccttttacacagatgctttggttcatgatcctctgtccctcaagctgttaacagatgtcataggaaaggataaagtcattttgggaaccgattacccctttccactaggtgagctggaacctgggaaactaatagagtccatggaagaatttgatgaagaaacaaagaataaactcaaagccggcaatgccctggcatttttgggtcttgagagaaaacaatttgaatgactgaatttactacaaaggcaaactttcaaaaggatatctcatttttgtttctaaatatgtatcaacaggtatcaacaaaatcctattttgaactattttactcagaaatgaatgtcccaaatatcctaaattattcataataaaaatgatttgtaagtgttttcattctgaaaaaaaaaaaaaaaaaaaaaaaaaagagatataaaaaaaaaaataacacaaaacagaaaaaaaaaaaaaaaaaagagggggggcgccagcaaagatatacacagagcggggacacaagtaacgacaccagcatgtaagaagaaaggccccccaaagagccattaaagaagaacgagcagggcgcggaacaacacagcagaggtagaaaaacatgaaaaaatagatgataaatgagaaagcaacaaacaatacgacgagagagcaaaatgagggcatatacaagaagaaattacacagcagaggtagaactaatagttcgtgatgattagttatacaacatcatatattgtgggacatagtgtgctcagatgaaatgaaaaaaatcg

SEQ ID NO: 298340 - DNA, 1368 bp, Homo sapiens
tagactgggttgggcaggcctactgactgctgcctgaaggttgctgtaaagggactaagtaaatcaattaactccacagttttcacaaaggtctcttgatatcaaaacttctttccttgcatgcttctctgatcctgtggagatgaaaattgacatccatagtcatattctaccaaaagaatggccagatctaaaaaagaggtttggctacggaggctgggtgcagctccaacaccacagcaagggagaagcaaagttgttgaaagatgggaaagtcttcagagtggtgcgagagaattgctgggatccagaagttcgtattagagaaatggaccaaaaaggagtaacagtgcaagccctttccacagttcctgtcatgtttagctactgggccaaacctgaggacactttaaacctgtgccagcttttaaacaacgaccttgccagcaccgttgtgagctaccccaggaggttcgtgggtctggggacgttgcccatgcaggcccctgagctggcggtcaaggagatggagcgctgtgtgaaagagctgggctttcccggggtccaaattggcacccacgtcaacgagtgggacctgaacgcgcaggagctctttcctgtctatgcggcagccgaaaggctgaagtgttccctgttcgtgcatccctgggacatgcagatggatggacgaatggccaaatactggctcccttggcttgtaggaatgccagcagagaccaccatagccatttgctccatgatcatgggtggagtatttgagaagtttcccaaactgaaagtgtgtttcgcacatggtggtggtgccttccccttcacagtgggaagaatctcccatggattcagcatgcgcccagatctgtgtgcccaggacaaccccatgaacccgaagaaataccttggttccttttacacagatgctttggttcatgatcctctgtccctcaagctgttaacagatgtcataggaaaggataaagtcattttgggaaccgattacccctttccactaggtgagctggaacctgggaaactaatagagtccatggaagaatttgatgaagaaacaaagaataaactcaaagccggcaatgccctggcatttttgggtcttgagagaaaacaatttgaatgactgaatttactacaaaggcaaactttcaaaaggatatctcatttttgtttctaaatatgtatcaacaggtatcaacaaaatcctattttgaactattttactcagaaatgaatgtcccaaatatcctaaattattcataataaaaatgatttgtaagtgttttcattctgaaaagcagtacattatttcatgtgcaaataaaaaatgattttccc

SEQ ID NO: 298341 - DNA, 1017 bp, Homo sapiens
tagactgggttgggcaggcctactgactgctgcctgaaggttgctgtaaagggactaagtaaatcaattaactccacagttttcacaaaggtctcttgatatcaaaacttctttccttgcatgcttctctgatcctgtggagatgaaaattgacatccatagtcatattctaccaaaagaatggccagatctaaaaaagcagaccctgagacaaggattcagatgcaagtagtttgctttggaggtgatcccaggaaacaccagtagagtgaggaagtgagacagggaaaacagggcagccagtgaaagaggtttggctacggaggctgggtgcagctccaacaccacagcaagggagaagcaaagttgttgaaagatgggaaagtcttcagagtggtgcgagagaattgctgggatccagaagttcgtattagagaaatggaccaaaaaggccaaacctgaggacactttaaacctgtgccagcttttaaacaacgaccttgccagcaccgttgtgagctaccccaggaggttcgtgggtctggggacgttgcccatgcaggcccctgagctggcggtcaaggagatggagcgctgtgtgaaagagctgggctttcccggggtccaaattggcacccacgtcaacgagtgggacctgaacgcgcaggagctctttcctgtctatgcggcagccgaaaggctgaagtgttccctgttcgtgcatccctgggacatgcagatggatggacgaatggccaaatactggctcccttggcttgtaggtttgtgtctgtgtggggtctggaacagaggaccaactcttgggtttttccaatcatctatggaaacctattatgtcaaatagggaaagtatgaataattaacaggattatgagtaatagcagctatcacttactgagctcttacttggattaatgctatatatatatatataacctcatttaattttaaacatatccaataccatcataaataaatcatatatttaatctatga

SEQ ID NO: 298342 - DNA, 1054 bp, Homo sapiens
tagactgggttgggcaggcctactgactgctgcctgaaggttgctgtaaagggactaagtaaatcaattaactccacagttttcacaaaggtctcttgatatcaaaacttctttccttgcatgcttctctgatcctgtggagatgaaaattgacatccatagtcatattctaccaaaagaatggccagatctaaaaaagcagaccctgagacaaggattcagatgcaagtagtttgctttggaggtgatcccaggaaacaccagtagagtgaggaagtgagacagggaaaacagggcagccagtgaaagaggtttggctacggaggctgggtgcagctccaacaccacagcaagggagaagcaaagttgttgaaagatgggaaagtcttcagagtggtgcgagagaattgctgggatccagaagttcgtattagagaaatggaccaaaaaggtacgatgagaagtgctaccaatgttagcatctgatgtaaaagcaatgtctgcccttaaagtttgctgacaactttatgtgatggtaacttctgacccccttttctctgccaggacaggctgttccagcttcactgtgggagggacagggccttccactacaatgcttttagagtgtggattcaaaatgtttcatatgagttataccctgttttaaaatagaatgctatatcatgaaaaagataaaaatggcattttattatttttaaaaattagttcaaatgtatagtatttacttattataaaatcaattaaaatagtaaaaactggaaatcacaaaactaagaatgacaattgcctgcttaataacacttaagatccaatttctttctgtagtttgtctcggtgcatcatacacagaacattcccactgacacatcagggttggaaatggaagcagttaaaaatagttaattgtgtaatctcagaatacactacaataaaatcaatccagaaatttgaaagaagagaattaggaagtgttcgtttcaaagctgaattgctaaaaagctataagaacatcttgcactttttaccttatatc

SEQ ID NO: 298343 - DNA, 546 bp, Homo sapiens
taatgggatggctgggtcaaatggtatttctagttctagatccctgaggaatcgccacactgacttccacaatggttgaactagtttacactcccaccaacagtgtaaaagtgttcctatttctccacatcctctccagcacctgttgtttcctgactttttaatgatagccattctaactggtgtgagatggtatctcattgtggttttgatttgcatttctctgatggccagtgatggtgagcattttttcatgtgtcttttggctgcataaatatcttcttttgagaagtgtctgttcctatcgtttgcccactttttgatggggttgtttgtttttttcttgtaaatttgtttgagttctttgtagattctggatattagccctttgtcagatgagtaggatgtgaaaattttctcccattttgtaggttgcctgttcactctgatggtagtttcttttgctgtgcagaagctcttgagtttaattagatcccattggtcaattttggcttttgttgccattgcttttggtgttttagacat

SEQ ID NO: 298344 - DNA, 192 bp, Homo sapiens
ttaacttgggtgttttctacattaccaggaactggtcagcgttctaatttggtgttccatgttcggggtttgtgtctggtggaccctgatacatcagcaaatctggtgatttacttcctttagaatgttgtgaaattacagaagagtgagatggtagccctgctgatctcaaagcttctgatactgaaatta

SEQ ID NO: 298345 - DNA, 604 bp, Homo sapiens
gacactacctgctgctgttgttttgatttctgaccaaaagacatgttaatatgttaaagcagtgactttatggcagtctagcagttgtaccgcaaagcaagaaaaaagaagatagaaatcatgacaagcctgaataaaaatggaaaaattacagaacagtatatagatattttgataccactcagggcctttagtgctcacacatctggattgtttaccttatttttttcagttttcagcaggatgtttggcattatggaggtcaaggaacaagtatttttttaaaaatgagcatcatcggctgggcgcagtggctcatgcctgtgatcccagcactttgggaggctgaggcgggtggatcatgaggtcaggagtttgcgaccagcctggccaccatggtgaaaccctgtctctattaaaaatacaaaaattagctggacgtggtggcgggcgcctgttaaattccccccaaaaagcctttaaaacctttcccggggggggaaaagccttgaggcaggagaatcgcttgaaactgcgacagggggccaaggaagaattgcagtgagctgcagaattccatgccattgtactccagcctgggcaa

SEQ ID NO: 298346 - DNA, 355 bp, Homo sapiens
gcctaagcgttactcagaagcttagaaaagagaggccatgtctttgtcagcttgggctgccataacaagactggcgacttaaacgacatttattttctcacagccctggaggccagaagtttgagatcaggatgacagcatggttggtttctggtgagatcctgctttctggcatgcagatggccttcttcttgctgtatgctcacgtggcctttcctggcatgtgcatacagagagaggcaatctcactctcttcctcttcttataaggcccctgtattatctggttaggaccccacccttatgagctcatgtaaccttaattacctcctaaaagtcttgtgtccaaatatagt

SEQ ID NO: 298347 - DNA, 281 bp, Homo sapiens
aatcccaactactcgggaagctgaggcaggagaatcgcttgaaactggaaggcagagattgcagtgagctgagatcatgccattgtactccagcctgggcaacaagagcgaaactccatctaaaaaacaaaaaaagaaagaaaaaagaaaggagaaaaaaaaaaaaagagcatcaccagaaaggcctaagcgttactcagaagcttagaaaagagaggccatgtctttgtcagcttgggctgccataacaagactggcgacttaaacgacatttattttct

SEQ ID NO: 298348 - DNA, 465 bp, Homo sapiens
aaaattgtacatttgtacccaaattgccttaagttatggacttaaaataataattacaatataagtccagataattgagcatttactgcagatgtatacagacatacatgtatatacatatataaattgcatatatagagatatttagtattttactgttgaaagaattcttatagagtacctttttattcctctttttattaagaactctcggctttagagtcagacagggatgggctcaaattcctgctgtgctactgtataacctggacaaactgcttcaccttttttatcttcagttttcacagctatagaagtaatacaaaccattaagtgtttttataggacacggtgagatgatgaatgtaagtgtatattatttaacggaaactgaaaaaatcggttactaaaaataatatacatagagctcctataaataaatagaaatatagaaaacacacgctg

SEQ ID NO: 298349 - DNA, 1420 bp, Homo sapiens
gcggccgcggcggcagcggctgcggggagctccagcagcggcggcggcggcggcggcggcagcggcagcggcagcagcagcagcgacacgtccagcaccggcgaggaggaaaggatgcggcgcctcttccagacgtgcgacggcgacggggacggatacatcagcaggtacgcggggaggtacgaggaaaccgacaggagcgagatcagtccctccgcgcgcccttgacccctgctctgccccctcgccccaacttgcggcaagttgctcagaagctcgcgggaaaagttggccgcgactccgagagcgcgtagccggctcggccacgaaggccgaggggactgctctgttcgccttgcgggggtgccagttggtccaacttttcccagcgctgtctttgtctaggcgttgggagacatctccttaggatgcgcactcttccgggggctcggagtgttcttccctgtgggaaaaggagttctggccgcttgtcccaggtaggaggggctgccccacagcctcggggtcctgggcatcaagatgccgcagcacggggcagcgatctgcccggcggcttggtggacaccccagggccgcaccgggaggagatgagctaagcgacagcctcggacagggaaataacctgtgaagaaactttcttgtgccgcagaacccatgaattccaaacttcagagcccaaagaatgggtatcgtttgccacccagtattgatttaaacgcagtagcctgagaggaacgaagcgctcaggagcaaactagggctagacccgactcctacccggctctgtgcgctgaccaggtgagcttcggcgtggctccgggcgcctccgctccactcacaaacaaactttggggtgtttgcttcggatcccccgcacttcctacagaggcggtatttaagcttcctgcgtcccggcttggccaaataattacttctgcccaaatttgtgtcacttagactcttgtggtgaagaaggcaatcgcaacattttctggtatgcttctattgaatggttgacaccggccattgaagacttggtatccgtggaaatttgaattgccttggatgaaggagcagcctaagttgtgcattacatgtttctttagtctatgtcttggtgatgctaaagatcgtttctgaaaatccggggctgcttcctaattgtccctgcctacctaaaaaaaaaaaaaagaaaacaaagtgcggaatttttcccttaaaataaaaaaaattatttatttgggactcaacgcaattttgatcattcttaagtgaatttttattactttcctaaagttttactgagaaacattaggaagatatcagaaaacttgatggagtaattctgttcggaaatgaaaataatatgtaattctgattgactccatgcaaatttcta

SEQ ID NO: 298350 - DNA, 1182 bp, Homo sapiens
gcggccgcggcggcagcggctgcggggagctccagcagcggcggcggcggcggcggcggcagcggcagcggcagcagcagcagcgacacgtccagcaccggcgaggaggaaaggatgcggcgcctcttccagacgtgcgacggcgacggggacggatacatcagcaggcgttgggagacatctccttaggatgcgcactcttccgggggctcggagtgttcttccctgtgggaaaaggagttctggccgcttgtcccaggtaggaggggctgccccacagcctcggggtcctgggcatcaagatgccgcagcacggggcagcgatctgcccggcggcttggtggacaccccagggccgcaccgggaggagatgagctaagcgacagcctcggacagggaaataacctgtgaagaaactttcttgtgccgcagaacccatgaattccaaacttcagagcccaaagaatgggtatcgtttgccacccagtattgatttaaacgcagtagcctgagaggaacgaagcgctcaggagcaaactagggctagacccgactcctacccggctctgtgcgctgaccaggtgagcttcggcgtggctccgggcgcctccgctccactcacaaacaaactttggggtgtttgcttcggatcccccgcacttcctacagaggcggtatttaagcttcctgcgtcccggcttggccaaataattacttctgcccaaatttgtgtcacttagactcttgtggtgaagaaggcaatcgcaacattttctggtatgcttctattgaatggttgacaccggccattgaagacttggtatccgtggaaatttgaattgccttggatgaaggagcagcctaagttgtgcattacatgtttctttagtctatgtcttggtgatgctaaagatcgtttctgaaaatccggggctgcttcctaattgtccctgcctacctaaaaaaaaaaaaaagaaaacaaagtgcggaatttttcccttaaaataaaaaaaattatttatttgggactcaacgcaattttgatcattcttaagtgaatttttattactttcctaaagttttactgagaaacattaggaagatatcagaaaacttgatggagtaattctgttcggaaatgaaaataatatgtaattctgattgactccatgcaaatttcta

SEQ ID NO: 298351 - DNA, 1649 bp, Homo sapiens
  misc_feature (5)..(5): n is a, c, g, or t
cgganctgcgctctgtcgcccaggttggagtgcagtggtgtgatctcgggtcgctgcaacctccgcctcccgggttccagcagttctcctgcctcagcctcccgagtagctgtaatcccagctacccaggaagctgaggcagaattgcttgaacccaggagttggaggttgcaatgagaagattgtgccactgcactccagcctgggtgacagaaaaaccaaacaagcaaataaacatcaaaacaaaaacctgttaaagcaggttgtgctgtgagaagaacttttctgcctggcttctgctttatagcctataagatagactggaggcctatttaagacttttgttaaaattcatgatacgagttgagttattaatctgcccatttaaaccgggcagtgtatttttaatggttattggatgcaggagccagattactgaggaaatggtaggattccttgactggacagctttaagaacaagtagtctagtgaaaccagggcagataccacccattcccagcaatcttttttgtttgcaatttcaattcattttccaaattgtggatagttttatgaatttctttgagaaaaagttgaaattatttcataatgaagacgagtcagagagaaaaggattagcctagcatttgtcctctttatataaaggacttcttatagcctgattcctaatgcagagttcagtgaaagtgacatttatttggtaacagcttttgagaaatgttactttatttctaaataattatatacttggcagtttattcttccagttaagtttactaatagttactgatttgttaatataagtttgtaagttgtttttgaaagttaaaatgaagctgggtgtggtggctcacacctgtaatcccagcgctttgggaggccaaggcgggcagatcaaggagtcaggagatggagaccagcctggccaacatagggaaaccctatctctactaaaaacacaaaaattagctgggtgtgatggcgtgcacctgtaagctgagctactcaggaggctaaggcaggagaatcgcttgaatccgggaggcggaggttgcagtgagctgagatcaggtgccactgtactccagcctgagctacagagcaagactccatctcaaaaaaaaaaaaatagttaaaatcatagtgacaactttgtagctaggagttagagacagctaagaggactgtttttagcttagatgtttccatgaagaaatttgtgcagactgagatttcctctgagataaaaagaaagaagggcagacaacaaaggaggttaggtatttgtgacacctttgataataaaaagcaaagcttcttttaaaataaatctgatgttggccgggcgcggtggctcacacctgtaatcccagcactttgggaggctgaggcgggcagatcactagaggtcaggagtttgagaccagcctggccaacatgggaaaaccccatctctattaaaaatacaaaaattagccaggcaaggtggtgcatgcctgtaatcccagctgctcaggaggctgaggcaggagaatcacttgaacccaggaggtggaggttgcagtgagcctagatcgcaccattacactccagcctgggtgacagaatgagactcctccttcttaaaa

SEQ ID NO: 298352 - DNA, 842 bp, Homo sapiens
tagaatatgtttgagtctttgcagataaagaccacattgacttcagaatgcagcatataggcatgctgcatttaaaagaagggaaattattatttcaatttaatatgagcagtcgctatcttctttttaagggatttgttctaatagcagttacggtttaagaagataatggaagtgttgctttaacttcataggggtctgtaagagtattctcccatactcaaggggaaggaagcagaactgttgttctttctataggcggaggttgcagtgagctgagatcaggtgccactgtactccagcctgagctacagagcaagactccatctcaaaaaaaaaaaaatagttaaaatcatagtgacaactttgtagctaggagttagagacagctaagaggactgtttttagcttagatgtttccatgaagaaatttgtgcagactgagatttcctctgagataaaaagaaagaagggcagacaacaaaggaggttaggtatttgtgacacctttgataataaaaagcaaagcttcttttaaaataaatctgatgttggccgggcgcggtggctcacacctgtaatcccagcactttgggaggctgaggcgggcagatcactagaggtcaggagtttgagaccagcctggccaacatgggaaaaccccatctctattaaaaatacaaaaattagccaggcaaggtggtgcatgcctgtaatcccagctgctcaggaggctgaggcaggagaatcacttgaacccaggaggtggaggttgcagtgagcctagatcgcaccattacactccagcctgggtgacagaatgagactcctccttcttaaaa

SEQ ID NO: 298353 - DNA, 2002 bp, Homo sapiens
tactggctatatagaagtgcattttgtgaagcactatgggtgatatgttttgccacattgtgtacatgtatataataacccttttcctgattaaaagaatagtacatggttattgtggttattcacagtgtgtaaaatacaactctattttaacacagaaagacaattcttaaccagcttgtattggttacactataacactttcttagtgttttagttagttccctccttttaatttttggccatttccttcaaccaacagcagggtcatcttgataataaagaatagtttaaacaagcaggccgggtgcagtggctcatgcctgtaatcccagcactttgcgaggctgaggcgggtggatcacttgaggtcaggagttcgaggccagcctggccaatgtggtgaaaccccgtctctactaaaataaaatacaaaagttagccaggtgcgatggcgggtgcctgtaatcccagctacccaggaagctgaggcagaattgcttgaacccaggagttggaggttgcaatgagaagattgtgccactgcactccagcctgggtgacagaaaaaccaaacaagcaaataaacatcaaaacaaaaacctgttaaagcaggttgtgctgtgagaagaacttttctgcctggcttctgctttatagcctataagatagactggaggcctatttaagacttttgttaaaattcatgatacgagttgagttattaatctgcccatttaaaccgggcagtgtatttttaatggttattggatgcaggagccagattactgaggaaatggtaggattccttgactggacagctttaagaacaagtagtctagtgaaaccagggcagataccacccattcccagcaatcttttttgtttgcaatttcaattcattttccaaattgtggatagttttatgaatttctttgagaaaaagttgaaattatttcataatgaagacgagtcagagagaaaaggattagcctagcatttgtcctctttatataaaggacttcttatagcctgattcctaatgcagagttcagtgaaagtgacatttatttggtaacagcttttgagaaatgttactttatttctaaataattatatacttggcagtttattcttccagttaagtttactaatagttactgatttgttaatataagtttgtaagttgtttttgaaagttaaaatgaagctgggtgtggtggctcacacctgtaatcccagcgctttgggaggccaaggcgggcagatcaaggagtcaggagatggagaccagcctggccaacatagggaaaccctatctctactaaaaacacaaaaattagctgggtgtgatggcgtgcacctgtaagctgagctactcaggaggctaaggcaggagaatcgcttgaatccgggaggcggaggttgcagtgagctgagatcaggtgccactgtactccagcctgagctacagagcaagactccatctcaaaaaaaaaaaaatagttaaaatcatagtgacaactttgtagctaggagttagagacagctaagaggactgtttttagcttagatgtttccatgaagaaatttgtgcagactgagatttcctctgagataaaaagaaagaagggcagacaacaaaggaggttaggtatttgtgacacctttgataataaaaagcaaagcttcttttaaaataaatctgatgttggccgggcgcggtggctcacacctgtaatcccagcactttgggaggctgaggcgggcagatcactagaggtcaggagtttgagaccagcctggccaacatgggaaaaccccatctctattaaaaatacaaaaattagccaggcaaggtggtgcatgcctgtaatcccagctgctcaggaggctgaggcaggagaatcacttgaacccaggaggtggaggttgcagtgagcctagatcgcaccattacactccagcctgggtgacagaatgagactcctccttcttaaaa

SEQ ID NO: 298354 - DNA, 1040 bp, Homo sapiens
ttcacctcatctgctgatgacatacgtggcattcagtccctgtatggagacccaaaagagaaccaacgcttgccaaatcctgacaattcagaaccagctctctgtgaccccaatttgagttttgatgctgtcactaccgtgggaaataagatctttttcttcaaagacaggttcttctggctgaaggtttctgagagaccaaagaccagtgttaatttaatttcttccttatggccaaccttgccatctggcattgaagctgcttatgaaattgaagccagaaatcaagtttttctttttaaagatgacaaatactggttaattagcaatttaagaccagagccaaattatcccaagagcatacattcttttggttttcctaactttgtgaaaaaaattgatgcagctgtttttaacccacgtttttataggacctacttctttgtagataaccagtattggaggtatgatgaaaggagacagatgatggaccctggttatcccaaactgattaccaagaacttccaaggaatcgggcctaaaattgatgcagtcttctactctaaaaacaaatactactatttcttccaaggatctaaccaatttgaatatgacttcctactccaacgtatcaccaaaacactgaaaagcaatagctggtttggttgttagaaatggtgtaattaatggtttttgttagttcacttcagcttaataagtatttattgcatatttgctatgtcctcagtgtaccactacttagagatatgtatcataaaaataaaatctgtaaaccataggtaatgattatataaaatacataatatttttcaattttgaaaactctaattgtccattcttgcttgactctactattaagtttgaaaatagttaccttcaaaggccaagagaattctatttgaagcatgctctgtaagttgcttcctaacatccttggactgagaaattatacttacttctggcataactaaaattaagtatatatattttggctcaaataaaattgaaaaaaaaatcat

SEQ ID NO: 298355 - DNA, 385 bp, Homo sapiens
agatagatcgagccggtaccctgaaatgggcacagaaattgatgcagtcttctactctaaaaacaaatactactatttcttccaaggatctaaccaatttgaatatgacttcctactccaacgtatcaccaaaacactgaaaagcaatagctggtttggttgttagaaatggtgtaattaatggtttttgttagttcacttcagcttaataagtatttattgcatatttgctatgtcctcagtgtaccactacttagagatatgtatcataaaaataatttctgtgcccatttcaactatctttggatgactttggagagaagactcctctctcctcgtctgcggcgtgaacttgatcatggactggtgcctttgcattcagaag

SEQ ID NO: 298356 - DNA, 534 bp, Homo sapiens
agatagatcgagccggtaccctgaaatgggcacagaaattgatgcagtcttctactctaaaaacaaatactactatttcttccaaggatctaaccaatttgaatatgacttcctactccaacgtatcaccaaaacactgaaaagcaatagctggtttggttgttagaaatggtgtaattaatggtttttgttagttcacttcagcttaataagtatttattgcatatttgctatgtcctcagtgtaccactacttagagatatgtatcataaaaataaaatctgtaaaccataggtaatgattatataaaatacataatatttttcaattttgaaaactctaattgtccattcttgcttgactctactattaagtttgaaaatagttaccttcaaaggccaagagaattctatttgaagcatgctctgtaagttgcttcctaacatccttggactgagaaattatacttacttctggcataactaaaattaagtatatatattttggctcaaataaaattgaaaaaaaaatcat

SEQ ID NO: 298357 - DNA, 903 bp, Homo sapiens
ggcggccgcggatataaagcgcggcggcggctgccgggcggagcggctgcacggacaagagcggaggcctgggtgagcgcggcccgacggcacgggctaggacagacggacgcagacggcccgacgacctgggcgttcggcggaggggcgctggggcctgactcgcggaaggggaaactgaagcagaaagaggttacttaatgggctcaaggtcacctacctgacctaccagcagctcaatggccttcccaaagaagaaacttcagggtcttgtggctgcaaccatcacgccaatgactgagaatggttttaagaaagactggcatcagctgtttctcaatgcatcagtcacttgttcgcagatcaaacagaagacatgtgattgcatgaatcggcaggatttacttcctgttaacagagtgagatcctttctgtaatctcctaacactgcatctggtccatactactttaaccttttaataagacccctcttatcctggaagtggcttcttaaaacagtcttgtttgttcatcagggacccacggacaatgtcagtgtgttcttcctccctgttttgccgttttcctggaaggccagatcccatgatagagataactaaaatgactttttctggatctttttccgtttcccaaaaatctgtggtcctgctgcatccattttactattttctcatcaattctgcgtttttcttctaggaaccttactttcctaaggtgtgaaatcaaaaaaaaaaaaaaaaaaaagaatgcattatgtgtaggctctttaagaaataaatagtgtaggtcagtgtatagcacagagtaggcatgtgagccatgttagttcccttttctcccaccacctgcttcatcaaacattcctgtaggtataaagtagct

SEQ ID NO: 298358 - DNA, 827 bp, Homo sapiens
ctcaagtctaccctctcctgtcttaaagtttcctcctcaatagaattaagcactaaaattttaccatcttgtacttgctctgtgtgtttgtgtacttgtaagcacattttacagttctaaactagaaatggactttgcctgggagttttatcattgacattccttgaagaaagagagaaattacattgtatgttttccagacctaccagcagctcaatggccttcccaaagaagaaacttcagggtcttgtggctgcaaccatcacgccaatgactgagaatgggtaactatcatttggggccttgaggggatcagttctcattcaaccaaaaaggagagaagttctttgtaacaacagtcacttaagaccctgcacctctgtagaactgttgccaaaaggcagcttctgtctgtcatccctctgcactgtctctgatccccaagtctgaggaggcattatatctctgaccccaaagtcagagaagcactatatcaccttgcagaaagggagaaggtgagaaatggcagcttgcctttctcccagtgtctgtagcaccacagagcaaattctccttggatttcaccacagccttggcctttctaaacagggccagtagcattggatgagaatcccattttagcataattggatatcaagcactgacctaggccctctcaggatgctgtctctggacgtcagcatgattccacttcaggctgttcatagacttgataaaaatgtcctaccctgaggaaagtgggaggttatctgcaagatggactcttttttcctgtttacagcctcatttcaacattgactagatgt

SEQ ID NO: 298359 - DNA, 613 bp, Homo sapiens
ggcggccgcggatataaagcgcggcggcggctgccgggcggagcggctgcacggacaagagcggaggcctggaaggggaaactgaagcagaaagaggttacttaatgggctcaaggtcacctacctgacctaccagcagctcaatggccttcccaaagaagaaacttcagggtcttgtggctgcaaccatcacgccaatgactgagaatggagaaatcaacttttcagtaattggtcagtatgtggattatcttgtgaaagaacagggagtgaagaacatttttgtgaatggcacaacaggagaaggcctgtccctgagcgtctcagagcgtcgccaggttgcagaggagtgggtgacaaaagggaaggacaagtcaaaccatcataagttggggaccatccgcacaacccaaagtagacggagtagctttagaagacagctgaaggcctggcacagtggctcacacctgtaatcccagcactttgggaggccaagtggtagctgtgcctagcagcccaggagaaagaggaagagcaaatggatgattggcttcacctaaaccaagagaaaggggtagtgaagggaggggtcgtgcaataaaactgctggtga

SEQ ID NO: 298360 - DNA, 397 bp, Homo sapiens
gagataattcatacaacagtgcttggcacagggtcaatacgcacttaggtcaaaaagtttgaactgcctttatgtcataaggcagaggcaaaaggaagatgtatttagtacaccttttacaagggactttctttttggtcttctgttgctgaatttataaacgttcatcttacccttttaaaggagatgaaatttctcatgtcttttagtattctccttcaaagttggccattttgcagttctaccttagagactctccaatgagtccaagacttctggcttctaagatccatgaaaaatcacgtccttactaggtctaaataagattcttgctgatacggcatttagattactcagctggttaataataattttttttctgttacttcccctttcc

SEQ ID NO: 298361 - DNA, 2590 bp, Homo sapiens
ggcggccgcggatataaagcgcggcggcggctgccgggcggagcggctgcacggacaagagcggaggcctggaaggggaaactgaagcagaaagaggttacttaatgggctcaaggtcacctacctgacctaccagcagctcaatggccttcccaaagaagaaacttcagggtcttgtggctgcaaccatcacgccaatgactgagaatggagaaatcaacttttcagtaattggtcagtatgtggattatcttgtgaaagaacagggagtgaagaacatttttgtgaatggcacaacaggagaaggcctgtccctgagcgtctcagagcgtcgccaggttgcagaggagtgggtgacaaaagggaaggacaagctggatcaggtgataattcacgtaggagcactgagcttgaaggagtcacaggaactggcccaacatgcagcagaaataggagctgatggcatcgctgtcattgcaccgttcttcctcaagccatggaccaaagatatcctgattaatttcctaaaggaagtggctgctgccgcccctgccctgccattttattactatcacattcctgccttgacaggggtaaagattcgtgctgaggagttgttggatgggattctggataagatccccaccttccaagggctgaaattcagtgatacagatctcttagacttcgggcaatgtgttgatcagaatcgccagcaacagtttgctttcctttttggggtggatgagcaactgttgagtgctctggtgatgggagcaactggagcagtgggcagtacctataactacctgggaaaaaagacaaaccagatgttggaggcttttgaacaaaaggacttctctttagccctgaactatcagttttgtatccagagatttatcaactttgttgtcaaactaggttttggagtgtcacagaccaaagccatcatgactctggtctctgggattccaatgggcccaccccggcttccactgcagaaagcctccagggagtttactgatagtgctgaagctaaactgaagagcctggatttcctttctttcactgatttaaaggatggaaacttggaagctggtagctagtgcctctctatcaaatcagggtttgcaccttgagacataatctaccttaaatagtgcatttttttctcagggaattttagatgaacttgaataaactctcctagcaaatgaaatctcacaataagcattgaggtaccttttgtgagccttaaaaagtcttattttgtgaaggggcaaaaactctaggagtcacaactctcagtcattcatttcacagatttttttgtggagaaatttctgtttatatggatgaaatggaatcaagaggaaaattgtaattgattaattccatctgtctttaggagctctcattatctcggtctctggttcctaatcctattttaaagttgtctaattttaaaccactataatatgtcttcattttaataaatattcatttggaatctaggaaaactctgagctactgcatttaggcaggcactttaataccaaactgtaacatgtctcaactgtatacaactcaaaatacaccagctcatttggctgctcagtctaactctagaatggatgcttttgaattcatttcgatgtcaccacttttcgctctttaaaaacactgggtcaggtgaggacttgtttcagttcctataactaagtaaagggcggctttctcataacaaaggaaaaagtcttccccaaagatgaatttaagtctccacttttttctatacagaaaactcaaaactcaaagtttcaaagaaccaaaggactcttcctctgggcaccacaaacttccccttcctccactgagaagactgtctctcccgcaggaccctgaattattgaaatcgaaggctgacttcctttctgcagtgagcccaggggctaatgttattatcctgtcacacttgcaactagtgacttttgtttagtgatagaagatttggggaggacccaaaggactcagaactttctctccatacctccttttactcttttctttctgtgtaatgtatcaacaactgtttaatctcccttctaacaaaccttgatataagctttctgatatcaaagtatattgacagttaacccttactgattttaaacttgactatccagtctgttaattacctaagattttgttttcatttcatctctaattgttttgatcattggcagagaaagagtatttgaaattcatatcagttttgctccttattttaatctctttgaattaaaaataaaactttttcaaaatggaaatttgaaattataagtagacttcaattatctttgctaatcctctctttaattagtcagctagttaaaagttgttatattcatatatcctcaaccctctttttgcctttgtagcttttaatttcctgaaagaagaaaatgagttgttcgtttttggttctgaggatgtgatatccgtacttactgatactaaagccaaatttaaattctaaaattaattcttgggtatccaataaacaaagaactatttttctaaatttgct

SEQ ID NO: 298362 - DNA, 2686 bp, Homo sapiens
ggcggccgcggatataaagcgcggcggcggctgccgggcggagcggctgcacggacaagagcggaggcctgggtgagcgcggcccgacggcacgggctaggacagacggacgcagacggcccgacgacctgggcgttcggcggaggggcgctggggcctgactcgcggaaggggaaactgaagcagaaagaggttacttaatgggctcaaggtcacctacctgacctaccagcagctcaatggccttcccaaagaagaaacttcagggtcttgtggctgcaaccatcacgccaatgactgagaatggagaaatcaacttttcagtaattggtcagtatgtggattatcttgtgaaagaacagggagtgaagaacatttttgtgaatggcacaacaggagaaggcctgtccctgagcgtctcagagcgtcgccaggttgcagaggagtgggtgacaaaagggaaggacaagctggatcaggtgataattcacgtaggagcactgagcttgaaggagtcacaggaactggcccaacatgcagcagaaataggagctgatggcatcgctgtcattgcaccgttcttcctcaagccatggaccaaagatatcctgattaatttcctaaaggaagtggctgctgccgcccctgccctgccattttattactatcacattcctgccttgacaggggtaaagattcgtgctgaggagttgttggatgggattctggataagatccccaccttccaagggctgaaattcagtgatacagatctcttagacttcgggcaatgtgttgatcagaatcgccagcaacagtttgctttcctttttggggtggatgagcaactgttgagtgctctggtgatgggagcaactggagcagtgggcagtacctataactacctgggaaaaaagacaaaccagatgttggaggcttttgaacaaaaggacttctctttagccctgaactatcagttttgtatccagagatttatcaactttgttgtcaaactaggttttggagtgtcacagaccaaagccatcatgactctggtctctgggattccaatgggcccaccccggcttccactgcagaaagcctccagggagtttactgatagtgctgaagctaaactgaagagcctggatttcctttctttcactgatttaaaggatggaaacttggaagctggtagctagtgcctctctatcaaatcagggtttgcaccttgagacataatctaccttaaatagtgcatttttttctcagggaattttagatgaacttgaataaactctcctagcaaatgaaatctcacaataagcattgaggtaccttttgtgagccttaaaaagtcttattttgtgaaggggcaaaaactctaggagtcacaactctcagtcattcatttcacagatttttttgtggagaaatttctgtttatatggatgaaatggaatcaagaggaaaattgtaattgattaattccatctgtctttaggagctctcattatctcggtctctggttcctaatcctattttaaagttgtctaattttaaaccactataatatgtcttcattttaataaatattcatttggaatctaggaaaactctgagctactgcatttaggcaggcactttaataccaaactgtaacatgtctcaactgtatacaactcaaaatacaccagctcatttggctgctcagtctaactctagaatggatgcttttgaattcatttcgatgtcaccacttttcgctctttaaaaacactgggtcaggtgaggacttgtttcagttcctataactaagtaaagggcggctttctcataacaaaggaaaaagtcttccccaaagatgaatttaagtctccacttttttctatacagaaaactcaaaactcaaagtttcaaagaaccaaaggactcttcctctgggcaccacaaacttccccttcctccactgagaagactgtctctcccgcaggaccctgaattattgaaatcgaaggctgacttcctttctgcagtgagcccaggggctaatgttattatcctgtcacacttgcaactagtgacttttgtttagtgatagaagatttggggaggacccaaaggactcagaactttctctccatacctccttttactcttttctttctgtgtaatgtatcaacaactgtttaatctcccttctaacaaaccttgatataagctttctgatatcaaagtatattgacagttaacccttactgattttaaacttgactatccagtctgttaattacctaagattttgttttcatttcatctctaattgttttgatcattggcagagaaagagtatttgaaattcatatcagttttgctccttattttaatctctttgaattaaaaataaaactttttcaaaatggaaatttgaaattataagtagacttcaattatctttgctaatcctctctttaattagtcagctagttaaaagttgttatattcatatatcctcaaccctctttttgcctttgtagcttttaatttcctgaaagaagaaaatgagttgttcgtttttggttctgaggatgtgatatccgtacttactgatactaaagccaaatttaaattctaaaattaattcttgggtatccaataaacaaagaactatttttctaaatttgct

SEQ ID NO: 298363 - DNA, 2649 bp, Homo sapiens
caagacttcatggagagcactgaacacgtactcactatgtgcctagcattgttgttaatcactttacatgaattagttcatttaattctctcaaccctatgaaatataattactattatcctcatttacagaaggggaaactgaagcagaaagaggttacttaatgggctcaaggtcacctacctgacctaccagcagctcaatggccttcccaaagaagaaacttcagggtcttgtggctgcaaccatcacgccaatgactgagaatggagaaatcaacttttcagtaattggtcagtatgtggattatcttgtgaaagaacagggagtgaagaacatttttgtgaatggcacaacaggagaaggcctgtccctgagcgtctcagagcgtcgccaggttgcagaggagtgggtgacaaaagggaaggacaagctggatcaggtgataattcacgtaggagcactgagcttgaaggagtcacaggaactggcccaacatgcagcagaaataggagctgatggcatcgctgtcattgcaccgttcttcctcaagccatggaccaaagatatcctgattaatttcctaaaggaagtggctgctgccgcccctgccctgccattttattactatcacattcctgccttgacaggggtaaagattcgtgctgaggagttgttggatgggattctggataagatccccaccttccaagggctgaaattcagtgatacagatctcttagacttcgggcaatgtgttgatcagaatcgccagcaacagtttgctttcctttttggggtggatgagcaactgttgagtgctctggtgatgggagcaactggagcagtgggcagtacctataactacctgggaaaaaagacaaaccagatgttggaggcttttgaacaaaaggacttctctttagccctgaactatcagttttgtatccagagatttatcaactttgttgtcaaactaggttttggagtgtcacagaccaaagccatcatgactctggtctctgggattccaatgggcccaccccggcttccactgcagaaagcctccagggagtttactgatagtgctgaagctaaactgaagagcctggatttcctttctttcactgatttaaaggatggaaacttggaagctggtagctagtgcctctctatcaaatcagggtttgcaccttgagacataatctaccttaaatagtgcatttttttctcagggaattttagatgaacttgaataaactctcctagcaaatgaaatctcacaataagcattgaggtaccttttgtgagccttaaaaagtcttattttgtgaaggggcaaaaactctaggagtcacaactctcagtcattcatttcacagatttttttgtggagaaatttctgtttatatggatgaaatggaatcaagaggaaaattgtaattgattaattccatctgtctttaggagctctcattatctcggtctctggttcctaatcctattttaaagttgtctaattttaaaccactataatatgtcttcattttaataaatattcatttggaatctaggaaaactctgagctactgcatttaggcaggcactttaataccaaactgtaacatgtctcaactgtatacaactcaaaatacaccagctcatttggctgctcagtctaactctagaatggatgcttttgaattcatttcgatgtcaccacttttcgctctttaaaaacactgggtcaggtgaggacttgtttcagttcctataactaagtaaagggcggctttctcataacaaaggaaaaagtcttccccaaagatgaatttaagtctccacttttttctatacagaaaactcaaaactcaaagtttcaaagaaccaaaggactcttcctctgggcaccacaaacttccccttcctccactgagaagactgtctctcccgcaggaccctgaattattgaaatcgaaggctgacttcctttctgcagtgagcccaggggctaatgttattatcctgtcacacttgcaactagtgacttttgtttagtgatagaagatttggggaggacccaaaggactcagaactttctctccatacctccttttactcttttctttctgtgtaatgtatcaacaactgtttaatctcccttctaacaaaccttgatataagctttctgatatcaaagtatattgacagttaacccttactgattttaaacttgactatccagtctgttaattacctaagattttgttttcatttcatctctaattgttttgatcattggcagagaaagagtatttgaaattcatatcagttttgctccttattttaatctctttgaattaaaaataaaactttttcaaaatggaaatttgaaattataagtagacttcaattatctttgctaatcctctctttaattagtcagctagttaaaagttgttatattcatatatcctcaaccctctttttgcctttgtagcttttaatttcctgaaagaagaaaatgagttgttcgtttttggttctgaggatgtgatatccgtacttactgatactaaagccaaatttaaattctaaaattaattcttgggtatccaataaacaaagaactatttttctaaatttgct

SEQ ID NO: 298364 - DNA, 2328 bp, Homo sapiens
ggcggccgcggatataaagcgcggcggcggctgccgggcggagcggctgcacggacaagagcggaggcctggaaggggaaactgaagcagaaagaggttacttaatgggctcaaggtcacctacctgacctaccagcagctcaatggccttcccaaagaagaaacttcagggtcttgtggctgcaaccatcacgccaatgactgagaatggagaaatcaacttttcagtaattggtcagtatgtggattatcttgtgaaagaacagggagtgaagaacatttttgtgaatggcacaacaggagaaggcctgtccctgagcgtctcagagcgtcgccaggttgcagaggagtgggtgacaaaagggaaggacaagctggatcaggtgataattcacgtaggagcactgagcttgaaggagtcacaggaactggcccaacatgcagcagaaataggagctgatggcatcgctgtcattgcaccgttcttcctcaagccatggaccaaagatatcctgattaatttcctaaaggaagtggctgctgccgcccctgccctgccattttattactatcacattcctgccttgacaggggtaaagattcgtgctgaggagttgttggatgggattctggataagatccccaccttccaagggctgaaattcagtgatacagatctcttagacttcgggcaatgtgttgatcagaatcgccagcaacagtttgctttcctttttggggtggatgagcaactgttgagtgctctggtgatgggagcaactggagcagtgggcagtacctataactacctgggaaaaaagacaaaccagatgttggaggcttttgaacaaaaggacttctctttagccctgaactatcagttttgtatccagagatttatcaactttgttgtcaaactaggttttggagtgtcacagaccaaagccatcatgactctggtctctgggattccaatgggcccaccccggcttccactgcagaaagcctccagggagtttactgatagtgctgaagctaaactgaagagcctggatttcctttctttcactgatttaaaggatggaaacttggaagctggtagctagtgcctctctatcaaatcagggtttgcaccttgagacataatctaccttaaatagtgcatttttttctcagggaattttagatgaacttgaataaactctcctagcaaatgaaatctcacaataagcattgaggtaccttttgtgagccttaaaaagtcttattttgtgaaggggcaaaaactctaggagtcacaactctcagtcattcatttcacagatttttttgtggagaaatttctgtttatatggatgaaatggaatcaagaggaaaattgtaattgattaattccatctgtctttaggagctctcattatctcggtctctggttcctaatcctattttaaagttgtctaattttaaaccactataatatgtcttcattttaataaatattcatttggaatctaggaaaactctgagctactgcatttaggcaggcactttaataccaaactgtaacatgtctcaactgtatacaactcaaaatacaccagctcatttggctgctcagtctaactctagaatggatgcttttgaattcatttcgatgtcaccacttttcgctctttaaaaacactgggtcaggtgaggacttgtttcagttcctataactaagtaaagggcggctttctcataacaaaggaaaaagtcttccccaaagatgaatttaagtctccacttttttctatacagaaaactcaaaactcaaagtttcaaagaaccaaaggactcttcctctgggcaccacaaacttccccttcctccactgagaagactgtctctcccgcaggaccctgaattattgaaatcgaaggctgacttcctttctgcagtgagcccaggggctaatgttattatcctgtcacacttgcaactagtgacttttgtttagtgatagaagatttggggaggacccaaaggactcagaactttctctccatacctccttttactcttttctttctgtgtaatgtatcaacaactgtttaatctcccttctaacaaaccttgatataagctttctgatatcaaagtatattgacagttaacccttactgattttaaacttgactatccagtctgttaattacctaagattttgttttcatttcatctctaattgttttgatcattggcagagaaagagtatttgaaattcatatcagttttgctccttattttaatctctttgaattaaaaataaaactttttcaaaatgga

SEQ ID NO: 298365 - DNA, 2505 bp, Homo sapiens
ggcggccgcggatataaagcgcggcggcggctgccgggcggagcggctgcacggacaagagcggaggcctggaaggggaaactgaagcagaaagaggttacttaatgggctcaaggtcacctacctgacctaccagcagctcaatggccttcccaaagaagaaacttcagggtcttgtggctgcaaccatcacgccaatgactgagaatggagaaatcaacttttcagtaattggtcagtatgtggattatcttgtgaaagaacagggagtgaagaacatttttgtgaatggcacaacaggagaaggcctgtccctgagcgtctcagagcgtcgccaggttgcagaggagtgggtgacaaaagggaaggacaagctggatcaggtgataattcacgtaggagcactgagcttgaaggagtcacaggaactggcccaacatgcagcagaaataggagctgatggcatcgctgtcattgcaccgttcttcctcaagccatggaccaaagatatcctgattaatttcctaaaggaagtggctgctgccgcccctgccctgccattttattactatcacattcctgccttgacaggggtaaagattcgtgctgaggagttgttggatgggattctggataagatccccaccttccaagggctgaaattcagtgatacagatctcttagacttcgggcaatgtgttgatcagaatcgccagcaacagtttgctttcctttttggggtggatgagcaactgttgagtgctctggtgatgggagcaactggagcagtgggcagttttgtatccagagatttatcaactttgttgtcaaactaggttttggagtgtcacagaccaaagccatcatgactctggtctctgggattccaatgggcccaccccggcttccactgcagaaagcctccagggagtttactgatagtgctgaagctaaactgaagagcctggatttcctttctttcactgatttaaaggatggaaacttggaagctggtagctagtgcctctctatcaaatcagggtttgcaccttgagacataatctaccttaaatagtgcatttttttctcagggaattttagatgaacttgaataaactctcctagcaaatgaaatctcacaataagcattgaggtaccttttgtgagccttaaaaagtcttattttgtgaaggggcaaaaactctaggagtcacaactctcagtcattcatttcacagatttttttgtggagaaatttctgtttatatggatgaaatggaatcaagaggaaaattgtaattgattaattccatctgtctttaggagctctcattatctcggtctctggttcctaatcctattttaaagttgtctaattttaaaccactataatatgtcttcattttaataaatattcatttggaatctaggaaaactctgagctactgcatttaggcaggcactttaataccaaactgtaacatgtctcaactgtatacaactcaaaatacaccagctcatttggctgctcagtctaactctagaatggatgcttttgaattcatttcgatgtcaccacttttcgctctttaaaaacactgggtcaggtgaggacttgtttcagttcctataactaagtaaagggcggctttctcataacaaaggaaaaagtcttccccaaagatgaatttaagtctccacttttttctatacagaaaactcaaaactcaaagtttcaaagaaccaaaggactcttcctctgggcaccacaaacttccccttcctccactgagaagactgtctctcccgcaggaccctgaattattgaaatcgaaggctgacttcctttctgcagtgagcccaggggctaatgttattatcctgtcacacttgcaactagtgacttttgtttagtgatagaagatttggggaggacccaaaggactcagaactttctctccatacctccttttactcttttctttctgtgtaatgtatcaacaactgtttaatctcccttctaacaaaccttgatataagctttctgatatcaaagtatattgacagttaacccttactgattttaaacttgactatccagtctgttaattacctaagattttgttttcatttcatctctaattgttttgatcattggcagagaaagagtatttgaaattcatatcagttttgctccttattttaatctctttgaattaaaaataaaactttttcaaaatggaaatttgaaattataagtagacttcaattatctttgctaatcctctctttaattagtcagctagttaaaagttgttatattcatatatcctcaaccctctttttgcctttgtagcttttaatttcctgaaagaagaaaatgagttgttcgtttttggttctgaggatgtgatatccgtacttactgatactaaagccaaatttaaattctaaaattaattcttgggtatccaataaacaaagaactatttttctaaatttgct

SEQ ID NO: 298366 - DNA, 2663 bp, Homo sapiens
ctcaagtctaccctctcctgtcttaaagtttcctcctcaatagaattaagcactaaaattttaccatcttgtacttgctctgtgtgtttgtgtacttgtaagcacattttacagttctaaactagaaatggactttgcctgggagttttatcattgacattccttgaagaaagagagaaattacattgtatgttttccagacctaccagcagctcaatggccttcccaaagaagaaacttcagggtcttgtggctgcaaccatcacgccaatgactgagaatggagaaatcaacttttcagtaattggtcagtatgtggattatcttgtgaaagaacagggagtgaagaacatttttgtgaatggcacaacaggagaaggcctgtccctgagcgtctcagagcgtcgccaggttgcagaggagtgggtgacaaaagggaaggacaagctggatcaggtgataattcacgtaggagcactgagcttgaaggagtcacaggaactggcccaacatgcagcagaaataggagctgatggcatcgctgtcattgcaccgttcttcctcaagccatggaccaaagatatcctgattaatttcctaaaggaagtggctgctgccgcccctgccctgccattttattactatcacattcctgccttgacaggggtaaagattcgtgctgaggagttgttggatgggattctggataagatccccaccttccaagggctgaaattcagtgatacagatctcttagacttcgggcaatgtgttgatcagaatcgccagcaacagtttgctttcctttttggggtggatgagcaactgttgagtgctctggtgatgggagcaactggagcagtgggcagtacctataactacctgggaaaaaagacaaaccagatgttggaggcttttgaacaaaaggacttctctttagccctgaactatcagttttgtatccagagatttatcaactttgttgtcaaactaggttttggagtgtcacagaccaaagccatcatgactctggtctctgggattccaatgggcccaccccggcttccactgcagaaagcctccagggagtttactgatagtgctgaagctaaactgaagagcctggatttcctttctttcactgatttaaaggatggaaacttggaagctggtagctagtgcctctctatcaaatcagggtttgcaccttgagacataatctaccttaaatagtgcatttttttctcagggaattttagatgaacttgaataaactctcctagcaaatgaaatctcacaataagcattgaggtaccttttgtgagccttaaaaagtcttattttgtgaaggggcaaaaactctaggagtcacaactctcagtcattcatttcacagatttttttgtggagaaatttctgtttatatggatgaaatggaatcaagaggaaaattgtaattgattaattccatctgtctttaggagctctcattatctcggtctctggttcctaatcctattttaaagttgtctaattttaaaccactataatatgtcttcattttaataaatattcatttggaatctaggaaaactctgagctactgcatttaggcaggcactttaataccaaactgtaacatgtctcaactgtatacaactcaaaatacaccagctcatttggctgctcagtctaactctagaatggatgcttttgaattcatttcgatgtcaccacttttcgctctttaaaaacactgggtcaggtgaggacttgtttcagttcctataactaagtaaagggcggctttctcataacaaaggaaaaagtcttccccaaagatgaatttaagtctccacttttttctatacagaaaactcaaaactcaaagtttcaaagaaccaaaggactcttcctctgggcaccacaaacttccccttcctccactgagaagactgtctctcccgcaggaccctgaattattgaaatcgaaggctgacttcctttctgcagtgagcccaggggctaatgttattatcctgtcacacttgcaactagtgacttttgtttagtgatagaagatttggggaggacccaaaggactcagaactttctctccatacctccttttactcttttctttctgtgtaatgtatcaacaactgtttaatctcccttctaacaaaccttgatataagctttctgatatcaaagtatattgacagttaacccttactgattttaaacttgactatccagtctgttaattacctaagattttgttttcatttcatctctaattgttttgatcattggcagagaaagagtatttgaaattcatatcagttttgctccttattttaatctctttgaattaaaaataaaactttttcaaaatggaaatttgaaattataagtagacttcaattatctttgctaatcctctctttaattagtcagctagttaaaagttgttatattcatatatcctcaaccctctttttgcctttgtagcttttaatttcctgaaagaagaaaatgagttgttcgtttttggttctgaggatgtgatatccgtacttactgatactaaagccaaatttaaattctaaaattaattcttgggtatccaataaacaaagaactatttttctaaatttgct

SEQ ID NO: 298367 - DNA, 2404 bp, Homo sapiens
cagctggtgggaagatgagcagggcccccgggatcctggcttcttggagaagagccccctccctttctgtgcagaagggcagccaaactgctagacacacctgccacccagaggttccgctgggaaactgcttcttacctgtctacaaggccagtcccctcacagttacccgtctttgggctgaaaggctggatcaggtgataattcacgtaggagcactgagcttgaaggagtcacaggaactggcccaacatgcagcagaaataggagctgatggcatcgctgtcattgcaccgttcttcctcaagccatggaccaaagatatcctgattaatttcctaaaggaagtggctgctgccgcccctgccctgccattttattactatcacattcctgccttgacaggggtaaagattcgtgctgaggagttgttggatgggattctggataagatccccaccttccaagggctgaaattcagtgatacagatctcttagacttcgggcaatgtgttgatcagaatcgccagcaacagtttgctttcctttttggggtggatgagcaactgttgagtgctctggtgatgggagcaactggagcagtgggcagtacctataactacctgggaaaaaagacaaaccagatgttggaggcttttgaacaaaaggacttctctttagccctgaactatcagttttgtatccagagatttatcaactttgttgtcaaactaggttttggagtgtcacagaccaaagccatcatgactctggtctctgggattccaatgggcccaccccggcttccactgcagaaagcctccagggagtttactgatagtgctgaagctaaactgaagagcctggatttcctttctttcactgatttaaaggatggaaacttggaagctggtagctagtgcctctctatcaaatcagggtttgcaccttgagacataatctaccttaaatagtgcatttttttctcagggaattttagatgaacttgaataaactctcctagcaaatgaaatctcacaataagcattgaggtaccttttgtgagccttaaaaagtcttattttgtgaaggggcaaaaactctaggagtcacaactctcagtcattcatttcacagatttttttgtggagaaatttctgtttatatggatgaaatggaatcaagaggaaaattgtaattgattaattccatctgtctttaggagctctcattatctcggtctctggttcctaatcctattttaaagttgtctaattttaaaccactataatatgtcttcattttaataaatattcatttggaatctaggaaaactctgagctactgcatttaggcaggcactttaataccaaactgtaacatgtctcaactgtatacaactcaaaatacaccagctcatttggctgctcagtctaactctagaatggatgcttttgaattcatttcgatgtcaccacttttcgctctttaaaaacactgggtcaggtgaggacttgtttcagttcctataactaagtaaagggcggctttctcataacaaaggaaaaagtcttccccaaagatgaatttaagtctccacttttttctatacagaaaactcaaaactcaaagtttcaaagaaccaaaggactcttcctctgggcaccacaaacttccccttcctccactgagaagactgtctctcccgcaggaccctgaattattgaaatcgaaggctgacttcctttctgcagtgagcccaggggctaatgttattatcctgtcacacttgcaactagtgacttttgtttagtgatagaagatttggggaggacccaaaggactcagaactttctctccatacctccttttactcttttctttctgtgtaatgtatcaacaactgtttaatctcccttctaacaaaccttgatataagctttctgatatcaaagtatattgacagttaacccttactgattttaaacttgactatccagtctgttaattacctaagattttgttttcatttcatctctaattgttttgatcattggcagagaaagagtatttgaaattcatatcagttttgctccttattttaatctctttgaattaaaaataaaactttttcaaaatggaaatttgaaattataagtagacttcaattatctttgctaatcctctctttaattagtcagctagttaaaagttgttatattcatatatcctcaaccctctttttgcctttgtagcttttaatttcctgaaagaagaaaatgagttgttcgtttttggttctgaggatgtgatatccgtacttactgatactaaagccaaatttaaattctaaaattaattcttgggtatccaataaacaaagaactatttttctaaatttgct

SEQ ID NO: 298368 - DNA, 1806 bp, Homo sapiens
ctagaaatgttcccatcttttgttttaatcttaccctgttgtagtagttgctgttagcatatgatctccttctttgggatttttgtggagagatagacggtaccagtcatgtttcctcatttgtttttcccgtctaggttttggagtgtcacagaccaaagccatcatgactctggtctctgggattccaatgggcccaccccggcttccactgcagaaagcctccagggagtttactgatagtgctgaagctaaactgaagagcctggatttcctttctttcactgatttaaaggatggaaacttggaagctggtagctagtgcctctctatcaaatcagggtttgcaccttgagacataatctaccttaaatagtgcatttttttctcagggaattttagatgaacttgaataaactctcctagcaaatgaaatctcacaataagcattgaggtaccttttgtgagccttaaaaagtcttattttgtgaaggggcaaaaactctaggagtcacaactctcagtcattcatttcacagatttttttgtggagaaatttctgtttatatggatgaaatggaatcaagaggaaaattgtaattgattaattccatctgtctttaggagctctcattatctcggtctctggttcctaatcctattttaaagttgtctaattttaaaccactataatatgtcttcattttaataaatattcatttggaatctaggaaaactctgagctactgcatttaggcaggcactttaataccaaactgtaacatgtctcaactgtatacaactcaaaatacaccagctcatttggctgctcagtctaactctagaatggatgcttttgaattcatttcgatgtcaccacttttcgctctttaaaaacactgggtcaggtgaggacttgtttcagttcctataactaagtaaagggcggctttctcataacaaaggaaaaagtcttccccaaagatgaatttaagtctccacttttttctatacagaaaactcaaaactcaaagtttcaaagaaccaaaggactcttcctctgggcaccacaaacttccccttcctccactgagaagactgtctctcccgcaggaccctgaattattgaaatcgaaggctgacttcctttctgcagtgagcccaggggctaatgttattatcctgtcacacttgcaactagtgacttttgtttagtgatagaagatttggggaggacccaaaggactcagaactttctctccatacctccttttactcttttctttctgtgtaatgtatcaacaactgtttaatctcccttctaacaaaccttgatataagctttctgatatcaaagtatattgacagttaacccttactgattttaaacttgactatccagtctgttaattacctaagattttgttttcatttcatctctaattgttttgatcattggcagagaaagagtatttgaaattcatatcagttttgctccttattttaatctctttgaattaaaaataaaactttttcaaaatggaaatttgaaattataagtagacttcaattatctttgctaatcctctctttaattagtcagctagttaaaagttgttatattcatatatcctcaaccctctttttgcctttgtagcttttaatttcctgaaagaagaaaatgagttgttcgtttttggttctgaggatgtgatatccgtacttactgatactaaagccaaatttaaattctaaaattaattcttgggtatccaataaacaaagaactatttttctaaatttgct

SEQ ID NO: 298369 - DNA, 2205 bp, Homo sapiens
ggcggccgcggatataaagcgcggcggcggctgccgggcggagcggctgcacggacaagagcggaggcctgggtgagcgcggcccgacggcacgggctaggacagacggacgcagacggcccgacgacctgggcgttcggcggaggggcgctggggcctgactcgcggaaggggaaactgaagcagaaagaggttacttaatgggctcaaggtcacctacctgacctaccagcagctcaatggccttcccaaagaagaaacttcagggtcttgtggctgcaaccatcacgccaatgactgagaatggagaaatcaacttttcagtaattggtcagtatgtggattatcttgtgaaagaacagggagtgaagaacatttttgtgaatggcacaacaggagaaggcctgtccctgagcgtctcagagcgtcgccaggttgcagaggagtgggtgacaaaagggaaggacaagacttctctttagccctgaactatcagttttgtatccagagatttatcaactttgttgtcaaactaggttttggagtgtcacagaccaaagccatcatgactctggtctctgggattccaatgggcccaccccggcttccactgcagaaagcctccagggagtttactgatagtgctgaagctaaactgaagagcctggatttcctttctttcactgatttaaaggatggaaacttggaagctggtagctagtgcctctctatcaaatcagggtttgcaccttgagacataatctaccttaaatagtgcatttttttctcagggaattttagatgaacttgaataaactctcctagcaaatgaaatctcacaataagcattgaggtaccttttgtgagccttaaaaagtcttattttgtgaaggggcaaaaactctaggagtcacaactctcagtcattcatttcacagatttttttgtggagaaatttctgtttatatggatgaaatggaatcaagaggaaaattgtaattgattaattccatctgtctttaggagctctcattatctcggtctctggttcctaatcctattttaaagttgtctaattttaaaccactataatatgtcttcattttaataaatattcatttggaatctaggaaaactctgagctactgcatttaggcaggcactttaataccaaactgtaacatgtctcaactgtatacaactcaaaatacaccagctcatttggctgctcagtctaactctagaatggatgcttttgaattcatttcgatgtcaccacttttcgctctttaaaaacactgggtcaggtgaggacttgtttcagttcctataactaagtaaagggcggctttctcataacaaaggaaaaagtcttccccaaagatgaatttaagtctccacttttttctatacagaaaactcaaaactcaaagtttcaaagaaccaaaggactcttcctctgggcaccacaaacttccccttcctccactgagaagactgtctctcccgcaggaccctgaattattgaaatcgaaggctgacttcctttctgcagtgagcccaggggctaatgttattatcctgtcacacttgcaactagtgacttttgtttagtgatagaagatttggggaggacccaaaggactcagaactttctctccatacctccttttactcttttctttctgtgtaatgtatcaacaactgtttaatctcccttctaacaaaccttgatataagctttctgatatcaaagtatattgacagttaacccttactgattttaaacttgactatccagtctgttaattacctaagattttgttttcatttcatctctaattgttttgatcattggcagagaaagagtatttgaaattcatatcagttttgctccttattttaatctctttgaattaaaaataaaactttttcaaaatggaaatttgaaattataagtagacttcaattatctttgctaatcctctctttaattagtcagctagttaaaagttgttatattcatatatcctcaaccctctttttgcctttgtagcttttaatttcctgaaagaagaaaatgagttgttcgtttttggttctgaggatgtgatatccgtacttactgatactaaagccaaatttaaattctaaaattaattcttgggtatccaataaacaaagaactatttttctaaatttgct

SEQ ID NO: 298370 - DNA, 2443 bp, Homo sapiens
atcacagaatgctttaatgattttcagctgaaacctgagtagcagtgtagaaaggaaatcattgaaaaacctctgatttttgagaggacttattacctattaattagaagaatcactgtccctctctttatcaataccaatactgatattttgatttgtatcccaaggcagtgatatagaaggctgtctttattttttttcaaaagtagaaaagactgtgcaaggggaaacagaaaagaacaacctgcacctccatttcatgcagattcttatgctgatcaattttagaaaacagcacttatggaagttgaggatctagaaattgattcccataaatcttagccttagccatgtgctccttaggcatcctggaaggtgccccagagcttatatgcacctgagtttgaaaaccactgcactagctgataagtttacctatgtaagccagatggataaggggtgtgattcccatctttactctcttgtagaattccatcattgaagcttcttttctgcacgggcccattttgtaaagcctacatgtatgaaaagatcttaccttagcctggatggatcccagccatcttcacttggctatttttctccactctgacagaccttcagtaaatgaaggtgtgcagactttttagggtttctgtaatttgacttctacattatttacattgtttacacagttcaataatactaactatagatatgttgttcttttctagttttgtatccagagatttatcaactttgttgtcaaactaggttttggagtgtcacagaccaaagccatcatgactctggtctctgggattccaatgggcccaccccggcttccactgcagaaagcctccagggagtttactgatagtgctgaagctaaactgaagagcctggatttcctttctttcactgatttaaaggatggaaacttggaagctggtagctagtgcctctctatcaaatcagggtttgcaccttgagacataatctaccttaaatagtgcatttttttctcagggaattttagatgaacttgaataaactctcctagcaaatgaaatctcacaataagcattgaggtaccttttgtgagccttaaaaagtcttattttgtgaaggggcaaaaactctaggagtcacaactctcagtcattcatttcacagatttttttgtggagaaatttctgtttatatggatgaaatggaatcaagaggaaaattgtaattgattaattccatctgtctttaggagctctcattatctcggtctctggttcctaatcctattttaaagttgtctaattttaaaccactataatatgtcttcattttaataaatattcatttggaatctaggaaaactctgagctactgcatttaggcaggcactttaataccaaactgtaacatgtctcaactgtatacaactcaaaatacaccagctcatttggctgctcagtctaactctagaatggatgcttttgaattcatttcgatgtcaccacttttcgctctttaaaaacactgggtcaggtgaggacttgtttcagttcctataactaagtaaagggcggctttctcataacaaaggaaaaagtcttccccaaagatgaatttaagtctccacttttttctatacagaaaactcaaaactcaaagtttcaaagaaccaaaggactcttcctctgggcaccacaaacttccccttcctccactgagaagactgtctctcccgcaggaccctgaattattgaaatcgaaggctgacttcctttctgcagtgagcccaggggctaatgttattatcctgtcacacttgcaactagtgacttttgtttagtgatagaagatttggggaggacccaaaggactcagaactttctctccatacctccttttactcttttctttctgtgtaatgtatcaacaactgtttaatctcccttctaacaaaccttgatataagctttctgatatcaaagtatattgacagttaacccttactgattttaaacttgactatccagtctgttaattacctaagattttgttttcatttcatctctaattgttttgatcattggcagagaaagagtatttgaaattcatatcagttttgctccttattttaatctctttgaattaaaaataaaactttttcaaaatggaaatttgaaattataagtagacttcaattatctttgctaatcctctctttaattagtcagctagttaaaagttgttatattcatatatcctcaaccctctttttgcctttgtagcttttaatttcctgaaagaagaaaatgagttgttcgtttttggttctgaggatgtgatatccgtacttactgatactaaagccaaatttaaattctaaaattaattcttgggtatccaataaacaaagaactatttttctaaatttgct

SEQ ID NO: 298371 - DNA, 1711 bp, Homo sapiens
ggcggccgcggatataaagcgcggcggcggctgccgggcggagcggctgcacggacaagagcggaggcctggaaggggaaactgaagcagaaagaggttacttaatgggctcaaggtcacctacctgacctaccagcagctcaatggccttcccaaagaagaaacttcagggtcttgtggctgcaaccatcacgccaatgactgagaatggagaaatcaacttttcagtaattggtcagtatgtggattatcttgtgaaagaacagggagtgaagaacatttttgtgaatggcacaacaggagaaggcctgtccctgagcgtctcagagcgtcgccaggttgcagaggagtgggtgacaaaagggaaggacaagctggatcaggtgataattcacgtaggagcactgagcttgaaggagtcacaggaactggcccaacatgcagcagaaataggagctgatggcatcgctgtcattgcaccgttcttcctcaagccatggaccaaagatatcctgattaatttcctaaaggaagtggctgctgccgcccctgccctgccattttattactatcacattcctgccttgacaggggtaaagattcgtgctgaggagttgttggatgggattctggataagatccccaccttccaagggctgaaattcagtgatacagatctcttagacttcgggcaatgtgttgatcagaatcgccagcaacagtttgctttcctttttggggtggatgagcaactgttgagtgctctggtgatgggagcaactggagcagtgggcagtacctataactacctgggaaaaaagacaaaccagatgttggaggcttttgaacaaaaggacttctctttagccctgaactatcagttttgtatccagagatttatcaactttgttgtcaaactagaaaactcaaaactcaaagtttcaaagaaccaaaggactcttcctctgggcaccacaaacttccccttcctccactgagaagactgtctctcccgcaggaccctgaattattgaaatcgaaggctgacttcctttctgcagtgagcccaggggctaatgttattatcctgtcacacttgcaactagtgacttttgtttagtgatagaagatttggggaggacccaaaggactcagaactttctctccatacctccttttactcttttctttctgtgtaatgtatcaacaactgtttaatctcccttctaacaaaccttgatataagctttctgatatcaaagtatattgacagttaacccttactgattttaaacttgactatccagtctgttaattacctaagattttgttttcatttcatctctaattgttttgatcattggcagagaaagagtatttgaaattcatatcagttttgctccttattttaatctctttgaattaaaaataaaactttttcaaaatggaaatttgaaattataagtagacttcaattatctttgctaatcctctctttaattagtcagctagttaaaagttgttatattcatatatcctcaaccctctttttgcctttgtagcttttaatttcctgaaagaagaaaatgagttgttcgtttttggttctgaggatgtgatatccgtacttactgatactaaagccaaatttaaattctaaaattaattcttgggtatccaataaacaaagaactatttttctaaatttgct

SEQ ID NO: 298372 - DNA, 1488 bp, Homo sapiens
attagcgggatccggaggaaagagctatgtgagggagccataggtatctctgtcctggcagttgaagaaacggagatcctaaaggctagcccagctgccccaagccacacagctagaaagagaaatcaacttttcagtaattggtcagtatgtggattatcttgtgaaagaacagggagtgaagaacatttttgtgaatggcacaacaggagaaggcctgtccctgagcgtctcagagcgtcgccaggttgcagaggagtgggtgacaaaagggaaggacaagctggatcaggtgataattcacgtaggagcactgagcttgaaggagtcacaggaactggcccaacatgcagcagaaataggagctgatggcatcgctgtcattgcaccgttcttcctcaagccatggaccaaagatatcctgattaatttcctaaaggaagtggctgctgccgcccctgccctgccattttattactatcacattcctgccttgacaggggtaaagattcgtgctgaggagttgttggatgggattctggataagatccccaccttccaagggctgaaattcagtgatacagatctcttagacttcgggcaatgtgttgatcagaatcgccagcaacagtttgctttcctttttggggtggatgagttttgtatccagagatttatcaactttgttgtcaaactagaaaactcaaaactcaaagtttcaaagaaccaaaggactcttcctctgggcaccacaaacttccccttcctccactgagaagactgtctctcccgcaggaccctgaattattgaaatcgaaggctgacttcctttctgcagtgagcccaggggctaatgttattatcctgtcacacttgcaactagtgacttttgtttagtgatagaagatttggggaggacccaaaggactcagaactttctctccatacctccttttactcttttctttctgtgtaatgtatcaacaactgtttaatctcccttctaacaaaccttgatataagctttctgatatcaaagtatattgacagttaacccttactgattttaaacttgactatccagtctgttaattacctaagattttgttttcatttcatctctaattgttttgatcattggcagagaaagagtatttgaaattcatatcagttttgctccttattttaatctctttgaattaaaaataaaactttttcaaaatggaaatttgaaattataagtagacttcaattatctttgctaatcctctctttaattagtcagctagttaaaagttgttatattcatatatcctcaaccctctttttgcctttgtagcttttaatttcctgaaagaagaaaatgagttgttcgtttttggttctgaggatgtgatatccgtacttactgatactaaagccaaatttaaattctaaaattaattcttgggtatccaataaacaaagaactatttttctaaatttgct

SEQ ID NO: 298373 - DNA, 1657 bp, Homo sapiens
ggcggccgcggatataaagcgcggcggcggctgccgggcggagcggctgcacggacaagagcggaggcctggaaggggaaactgaagcagaaagaggttacttaatgggctcaaggtcacctacctgacctaccagcagctcaatggccttcccaaagaagaaacttcagggtcttgtggctgcaaccatcacgccaatgactgagaatggagaaatcaacttttcagtaattggtcagtatgtggattatcttgtgaaagaacagggagtgaagaacatttttgtgaatggcacaacaggagaaggcctgtccctgagcgtctcagagcgtcgccaggttgcagaggagtgggtgacaaaagggaaggacaagctggatcaggtgataattcacgtaggagcactgagcttgaaggagtcacaggaactggcccaacatgcagcagaaataggagctgatggcatcgctgtcattgcaccgttcttcctcaagccatggaccaaagatatcctgattaatttcctaaaggaagtggctgctgccgcccctgccctgccattttattactatcacattcctgccttgacaggggtaaagattcgtgctgaggagttgttggatgggattctggataagatccccaccttccaagggctgaaattcagtgatacagatctcttagacttcgggcaatgtgttgatcagaatcgccagcaacagtttgctttcctttttggggtggatgagcaactgttgagtgctctggtgatgggagcaactggagcagtgggcagtacctataactacctgggaaaaaagacaaaccagatgttggaggcttttgaacaaaaggacttctctttagccctgaactatcagttttgtatccagagatttatcaactttgttgtcaaactagaaaactcaaaactcaaagtttcaaagaaccaaaggactcttcctctgggcaccacaaacttccccttcctccactgagaagactgtctctcccgcaggaccctgaattattgaaatcgaaggctgacttcctttctgcagtgagcccaggggctaatgttattatcctgtcacacttgcaactagtgacttttgtttagtgatagaagatttggggaggacccaaaggactcaaactgtttaatctcccttctaacaaaccttgatataagctttctgatatcaaagtatattgacagttaacccttactgattttaaacttgactatccagtctgttaattacctaagattttgttttcatttcatctctaattgttttgatcattggcagagaaagagtatttgaaattcatatcagttttgctccttattttaatctctttgaattaaaaataaaactttttcaaaatggaaatttgaaattataagtagacttcaattatctttgctaatcctctctttaattagtcagctagttaaaagttgttatattcatatatcctcaaccctctttttgcctttgtagcttttaatttcctgaaagaagaaaatgagttgttcgtttttggttctgaggatgtgatatccgtacttactgatactaaagccaaatttaaattctaaaattaattcttgggtatccaataaacaaagaactatttttctaaatttgct

SEQ ID NO: 298374 - DNA, 1089 bp, Homo sapiens
ggcggccgcggatataaagcgcggcggcggctgccgggcggagcggctgcacggacaagagcggaggcctggaaggggaaactgaagcagaaagaggttacttaatgggctcaaggtcacctacctgacctaccagcagctcaatggccttcccaaagaagaaacttcagggtcttgtggctgcaaccatcacgccaatgactgagaatggagaaatcaacttttcagtaattggtcagtatgtggattatcttgtgaaagaacagggagtgaagaacatttttgtgaatggcacaacaggagaaggcctgtccctgagcgtctcagagcgtcgccaggttgcagaggagtgggtgacaaaagggaaggacaagctggatcaggtgataattcacgtaggagcactgagcttgaaggagtcacaggaactggcccaacatgcagcagaaataggagctgatggcatcgctgtcattgcaccgttcttcctcaagccatggaccaaagatatcctgattaatttcctaaaggaagtggctgctgccgcccctgccctgccattttattactatcacattcctgccttgacaggggtaaagattcgtgctgaggagttgttggatgggattctggataagatccccaccttccaagggctgaaattcagtgatacagatctcttagacttcgggcaatgtgttgatcagaatcgccagcaacagtttgctttcctttttggggtggatgagcaactgttgagtgctctggtgatgggagcaactggagcagtgggcagtacctataactacctgggaaaaaagacaaaccagatgttggaggcttttgaacaaaaggacttctctttagccctgaactatcagttttgtatccagagatttatcaactttgttgtcaaactaggtaagtgccacccatcttctgctttgtctgctgctggagactgtaaagaaaatggaataccatcactttctctgagggttcaacaagaacactttttaatggtctgttgcaagcagagttctgtttcccttattaaccctcggggccaaccatataaaactgtgaagt

SEQ ID NO: 298375 - DNA, 381 bp, Homo sapiens
ggcggccgcggatataaagcgcggcggcggctgccgggcggagcggctgcacggacaagagcggaggcctgggtgagcgcggcccgacggcacgggctaggacagacggacgcagacggcccgacgacctgggcgttcggcggaggggcgctggggcctgactcgcgggtgggtgagacgttgacggacccggagaaagagggaaggcagatacgctgggaaacggatctggggaaggtgtgaatgcgaaaagtgtagggacagacgggggcagaagaacttactcccccggattgtttgcagacagcatatctgccgggtctccaaaggtcctttcctcaaaatagagttagcaattgagcagaagagagcttaaagtta

SEQ ID NO: 298376 - DNA, 2116 bp, Homo sapiens
gccatgttggagagcaaaacttaataataattcttttttaaaatctgctgaagcagccccatccggcgaagttcttggcattggctactccatttgtcctagcagagtgtgactaaactggaaatgtatggagctgcattttttttttttgatggaagtcaacagctgccttactattttaccatctgacgtttttagtagggagctggggaaacgactgcccgaggaatgcggtcggaggattgtgttgctgtggacgtggttccaacattcactcctatctcattagaagaaataggtagcagcatcactcaccagtcttatgccatgacctgctgctttaacatctcctggaatgttctgggagagaacgtttcgtttgcttgtgcacgactctgttcatttttgctgtttatttaaatctgacgtatagtcatctaccacctgcggtcctggccggacgaaacacacgtgttgcatctcaaggaaaagaaacaacaaaatgctagtgaaaatgtgcttattttgatagcaatataccatcttttatgtcatttattcttcctatacttgtaaaaggttatttatctttaaaatttagcaatttgaagacactatgccttcctaagaactaatttaattctaaatatttttaacattactgaggtgaattatttatgcacttaggaagtgctaaattttaaaagctgaaacacaacagaattctaagaaatatagtccaaacgttgcatggattgcagtaatcagtgtttaaaggattcagtttctttgctgacgtactttacaaccaaataaaatcttgtcggtggctgtgttaattcccatgaaagttaagcaagatgctattaataaactgctctgctctttcttgttttctttttccaacttaaatttctgttgaatacattcaggtagaacataaagccttgttcaatcactgcctctcagttttctgcctttcctgtttttcaaagtccttttgtaatttcatttcacattttaaaggcttagacatttttattttaaatatgtgtcttttacagtcttttgtcattctgacatttctggatttttgctgttttataatttaccctttgttattcagaagcatgcttacttatagaaactaaatggtctttataaaagtaattacttaaaaagaaatcaggggaagaaagatatctatctaatctattaaatctttataaaacattacattgcagagggggagctactcctaaatattttcatgatttgcatggtttaatcagatttttttttttttttacaccatattagctaccttttcaatggagaagagacagttcacacaattccctggttagcacagatgtggactgagtgctttgtcacctgcagggtagtaacccagtgatgtttcttacagaagcacaatatgttgaaaatcctgggtgtgaccaatatggaataaagaagaaggcagaaagagagcaaatgaaaaatttcacactgtgtatattcattttttacattttgctttgacttttaaatttaggaagtccgtttttacctgagaacaaatgtttaaagttcctgcgtcactctcagtactctcactgcccctcccaaaccctatagctccttacgctgggaaagctggttttttaaaaaaataataataaaatatttaatcttattaagtgttcatttaaaatgcgtaatgctttggaaataatgggtaacagatagcgagaggatatgtttataaagtgagcatgttggtcccatttataaatatatgtatgatttataagcttttttaaaacaaagctcaaattgttggtatttttctaaaatgtgcacagctgtattttacatgaaggctctttctaatgggttgttatactgtactcaacattttggacagcacatgaagtctgccaatgtacttaataaaacatgactttgtttatttaaagtttcttgctgtgaaaaagaactccctacctgtgagttcctttatttataattcttgaaaccaaaatgtataatgtacagttttcacaactgtatctgctctaataaaaaaaagttggttattaaaaaaaaaaaa

SEQ ID NO: 298377 - DNA, 736 bp, Homo sapiens
  misc_feature (56)..(56): n is a, c, g, or t
cggacgcgtgggtccggacgcgtgggtccggacgcgtgggtcgacccacgcgtcgntgtgtcttacgtgccaccacggcgttgtacctgtaggactctcattcgggatgattggaatagcttctggaatttgttcaagttttgggtatgtttaatctgttatgtactagtgttctgtttgttattgttttgttaattacaccataatgctaatttaaagagactccaaatctcaatgaagccagctcacagtgctgtgtgccccggtcacctagcaagctgccgaaccaaaagaatttgcaccccgctgcgggcccacgtggttggggccctgccctggcagggtcatcctgtgctcggaggccatctcgggcacaggcccaccccgccccacccctccagaacacggctcacgcttacctcaaccatcctggctgcggcgtctgtctgaaccacgcgggggccttgagggacgctttgtctgtcgtgatggggcaagggcacaagtcctggatgttgtgtgtatcgagaggccaaaggctggtggcaagtgcacggggcacagcggagtctgtcctgtgacgcgcaagtctgagggtctgggcggcgggcggctgggtctgtgcatttctggttgcaccgcggcgcttcccagcaccaacatgtaaccggcatgtttccagcagaagacaaaaagacaaacatgaaagtctagaaataaaactggtaaaacccca

SEQ ID NO: 298378 - DNA, 4342 bp, Homo sapiens
  misc_feature (56)..(56): n is a, c, g, or t
cggacgcgtgggtccggacgcgtgggtccggacgcgtgggtcgacccacgcgtcgnggactacaggggagttttgttgaagttgcaaagtcctggagcctccagagggctgtcggcgcagtagcagcgagcagcagagtccgcacgctccggcgaggggcagaagagcgcgagggagcgcggggcagcagaagcgagagccgagcgcggacccagccaggacccacagccctccccagctgcccaggaagagccccagccatggaacaccagctcctgtgctgcgaagtggaaaccatccgccgcgcgtaccccgatgccaacctcctcaacgaccgggtgctgcgggccatgctgaaggcggaggagacctgcgcgccctcggtgtcctacttcaaatgtgtgcagaaggaggtcctgccgtccatgcggaagatcgtcgccacctggatgctggaggtctgcgaggaacagaagtgcgaggaggaggtcttcccgctggccatgaactacctggaccgcttcctgtcgctggagcccgtgaaaaagagccgcctgcagctgctgggggccacttgcatgttcgtggcctctaagatgaaggagaccatccccctgacggccgagaagctgtgcatctacaccgacaactccatccggcccgaggagctgctgcaaatggagctgctcctggtgaacaagctcaagtggaacctggccgcaatgaccccgcacgatttcattgaacacttcctctccaaaatgccagaggcggaggagaacaaacagatcatccgcaaacacgcgcagaccttcgttgccctctgtgccacagatgtgaagttcatttccaatccgccctccatggtggcagcggggagcgtggtggccgcagtgcaaggcctgaacctgaggagccccaacaacttcctgtcctactaccgcctcacacgcttcctctccagagtgatcaagtgtgacccggactgcctccgggcctgccaggagcagatcgaagccctgctggagtcaagcctgcgccaggcccagcagaacatggaccccaaggccgccgaggaggaggaagaggaggaggaggaggtggacctggcttgcacacccaccgacgtgcgggacgtggacatctgagggcgccaggcaggcgggcgccaccgccacccgcagcgagggcggagccggccccaggtgctccactgacagtccctcctctccggagcattttgataccagaagggaaagcttcattctccttgttgttggttgttttttcctttgctctttcccccttccatctctgacttaagcaaaagaaaaagattacccaaaaactgtctttaaaagagagagagagaaaaaaaaaatagtatttgcataaccctgagcggtgggggaggagggttgtgctacagatgatagaggattttataccccaataatcaactcgtttttatattaatgtacttgtttctctgttgtaagaataggcattaacacaaaggaggcgtctcgggagaggattaggttccatcctttacgtgtttaaaaaaaagcataaaaacattttaaaaacatagaaaaattcagcaaaccatttttaaagtagaagagggttttaggtagaaaaacatattcttgtgcttttcctgataaagcacagctgtagtggggttctaggcatctctgtactttgcttgctcatatgcatgtagtcactttataagtcattgtatgttattatattccgtaggtagatgtgtaacctcttcaccttattcatggctgaagtcacctcttggttacagtagcgtagcgtggccgtgtgcatgtcctttgcgcctgtgaccaccaccccaacaaaccatccagtgacaaaccatccagtggaggtttgtcgggcaccagccagcgtagcagggtcgggaaaggccacctgtcccactcctacgatacgctactataaagagaagacgaaatagtgacataatatattctatttttatactcttcctatttttgtagtgacctgtttatgagatgctggttttctacccaacggccctgcagccagctcacgtccaggttcaacccacagctacttggtttgtgttcttcttcatattctaaaaccattccatttccaagcactttcagtccaataggtgtaggaaatagcgctgtttttgttgtgtgtgcagggagggcagttttctaatggaatggtttgggaatatccatgtacttgtttgcaagcaggactttgaggcaagtgtgggccactgtggtggcagtggaggtggggtgtttgggaggctgcgtgccagtcaagaagaaaaaggtttgcattctcacattgccaggatgataagttcctttccttttctttaaagaagttgaagtttaggaatcctttggtgccaactggtgtttgaaagtagggacctcagaggtttacctagagaacaggtggtttttaagggttatcttagatgtttcacaccggaaggtttttaaacactaaaatatataatttatagttaaggctaaaaagtatatttattgcagaggatgttcataaggccagtatgatttataaatgcaatctccccttgatttaaacacacagatacacacacacacacacacacacacacaaaccttctgcctttgatgttacagatttaatacagtttatttttaaagatagatccttttataggtgagaaaaaaacaatctggaagaaaaaaaccacacaaagacattgattcagcctgtttggcgtttcccagagtcatctgattggacaggcatgggtgcaaggaaaattagggtactcaacctaagttcggttccgatgaattcttatcccctgccccttcctttaaaaaacttagtgacaaaatagacaatttgcacatcttggctatgtaattcttgtaatttttatttaggaagtgttgaagggaggtggcaagagtgtggaggctgacgtgtgagggaggacaggcgggaggaggtgtgaggaggaggctcccgaggggaaggggcggtgcccacaccggggacaggccgcagctccattttcttattgcgctgctaccgttgacttccaggcacggtttggaaatattcacatcgcttctgtgtatctctttcacattgtttgctgctattggaggatcagttttttgttttacaatgtcatatactgccatgtactagttttagttttctcttagaacattgtattacagatgccttttttgtagttttttttttttttatgtgatcaatttggacttaatgtgattactgctctattccaaaaaggttgctgtttcacaatacctcatgcttcacttagccatggtggacccagcgggcaggttctgcctgctttggcgggcagacacgcgggcgcgatcccacacaggctggcgggggccggccccgaggccgcgtgcgtgagaaccgcgccggtgtccccagagaccaggctgtgtccctcttctcttccctgcgcctgtgatgctgggcacttcatctgatcgggggcgtagcatcatagtagtttttacagctgtgttattctttgcgtgtagctatggaagttgcataattattattattattattataacaagtgtgtcttacgtgccaccacggcgttgtacctgtaggactctcattcgggatgattggaatagcttctggaatttgttcaagttttgggtatgtttaatctgttatgtactagtgttctgtttgttattgttttgttaattacaccataatgctaatttaaagagactccaaatctcaatgaagccagctcacagtgctgtgtgccccggtcacctagcaagctgccgaaccaaaagaatttgcaccccgctgcgggcccacgtggttggggccctgccctggcagggtcatcctgtgctcggaggccatctcgggcacaggcccaccccgccccacccctccagaacacggctcacgcttacctcaaccatcctggctgcggcgtctgtctgaaccacgcgggggccttgagggacgctttgtctgtcgtgatggggcaagggcacaagtcctggatgttgtgtgtatcgagaggccaaaggctggtggcaagtgcacggggcacagcggagtctgtcctgtgacgcgcaagtctgagggtctgggcggcgggcggctgggtctgtgcatttctggttgcaccgcggcgcttcccagcaccaacatgtaaccggcatgtttccagcagaagacaaaaagacaaacatgaaagtctagaaataaaactggtaaaacccca

SEQ ID NO: 298379 - DNA, 4380 bp, Homo sapiens
  misc_feature (56)..(56): n is a, c, g, or t
cggacgcgtgggtccggacgcgtgggtccggacgcgtgggtcgacccacgcgtcgnggactacaggggagttttgttgaagttgcaaagtcctggagcctccagagggctgtcggcgcagtagcagcgagcagcagagtccgcacgctccggcgaggggcagaagagcgcgagggagcgcggggcagcagaagcgagagccgagcgcggacccagccaggacccacagccctccccagctgcccaggaagagccccagccatggaacaccagctcctgtgctgcgaagtggaaaccatccgccgcgcgtaccccgatgccaacctcctcaacgaccgggtgctgcgggccatgctgaaggcggaggagacctgcgcgccctcggtgtcctacttcaaatgtgtgcagaaggaggtcctgccgtccatgcggaagatcgtcgccacctggatgctggaggtctgcgaggaacagaagtgcgaggaggaggtcttcccgctggccatgaactacctggaccgcttcctgtcgctggagcccgtgaaaaagagccgcctgcagctgctgggggccacttgcatgttcgtggcctctaagatgaaggagaccatccccctgacggccgagaagctgtgcatctacaccgacaactccatccggcccgaggagctgctgcaaatggagctgctcctggtgaacaagctcaagtggaacctggccgcaatgaccccgcacgatttcattgaacacttcctctccaaaatgccagaggcggaggagaacaaacagatcatccgcaaacacgcgcagaccttcgttgccctctgtgccacagatgtgaagttcatttccaatccgccctccatggtggcagcggggagcgtggtggccgcagtgcaaggcctgaacctgaggagccccaacaacttcctgtcctactaccgcctcacacgcttcctctccagagtgatcaagtgtgacccggactgcctccgggcctgccaggagcagatcgaagccctgctggagtcaagcctgcgccaggcccagcagaacatggaccccaaggccgccgaggaggaggaagaggaggaggaggaggtggacctggcttgcacacccaccgacgtgcgggacgtggacatctgagggcgccaggcaggcgggcgccaccgccacccgcagcgagggcggagccggccccaggtgctccactgacagtccctcctctccggagcattttgataccagaagggaaagcttcattctccttgttgttggttgttttttcctttgctctttcccccttccatctctgacttaagcaaaagaaaaagattacccaaaaactgtctttaaaagagagagagagaaaaaaaaaatagtatttgcataaccctgagcggtgggggaggagggttgtgctacagatgatagaggattttataccccaataatcaactcgtttttatattaatgtacttgtttctctgttgtaagaataggcattaacacaaaggaggcgtctcgggagaggattaggttccatcctttacgtgtttaaaaaaaagcataaaaacattttaaaaacatagaaaaattcagcaaaccatttttaaagtagaagagggttttaggtagaaaaacatattcttgtgcttttcctgataaagcacagctgtagtggggttctaggcatctctgtactttgcttgctcatatgcatgtagtcactttataagtcattgtatgttattatattccgtaggtagatgtgtaacctcttcaccttattcatggctgaagtcacctcttggttacagtagcgtagcgtggccgtgtgcatgtcctttgcgcctgtgaccaccaccccaacaaaccatccagtgacaaaccatccagtggaggtttgtcgggcaccagccagcgtagcagggtcgggaaaggccacctgtcccactcctacgatacgctactataaagagaagacgaaatagtgacataatatattctatttttatactcttcctatttttgtagtgacctgtttatgagatgctggttttctacccaacggccctgcagccagctcacgtccaggttcaacccacagctacttggtttgtgttcttcttcatattctaaaaccattccatttccaagcactttcagtccaataggtgtaggaaatagcgctgtttttgttgtgtgtgcagggagggcagttttctaatggaatggtttgggaatatccatgtacttgtttgcaagcaggactttgaggcaagtgtgggccactgtggtggcagtggaggtggggtgtttgggaggctgcgtgccagtcaagaagaaaaaggtttgcattctcacattgccaggatgataagttcctttccttttctttaaagaagttgaagtttaggaatcctttggtgccaactggtgtttgaaagtagggacctcagaggtttacctagagaacaggtggtttttaagggttatcttagatgtttcacaccggaaggtttttaaacactaaaatatataatttatagttaaggctaaaaagtatatttattgcagaggatgttcataaggccagtatgatttataaatgcaatctccccttgatttaaacacacagatacacacacacacacacacacacacacaaaccttctgcctttgatgttacagatttaatacagtttatttttaaagatagatccttttataggtgagaaaaaaacaatctggaagaaaaaaaccacacaaagacattgattcagcctgtttggcgtttcccagagtcatctgattggacaggcatgggtgcaaggaaaattagggtactcaacctaagttcggttccgatgaattcttatcccctgccccttcctttaaaaaacttagtgacaaaatagacaatttgcacatcttggctatgtaattcttgtaatttttatttaggaagtgttgaagggaggtggcaagagtgtggaggctgacgtgtgagggaggacaggcgggaggaggtgtgaggaggaggctcccgaggggaaggggcggtgcccacaccggggacaggccgcagctccattttcttattgcgctgctaccgttgacttccaggcacggtttggaaatattcacatcgcttctgtgtatctctttcacattgtttgctgctattggaggatcagttttttgttttacaatgtcatatactgccatgtactagttttagttttctcttagaacattgtattacagatgccttttttgtagttttttttttttttatgtgatcaatttggacttaatgtgattactgctctattccaaaaaggttgctgtttcacaatacctcatgcttcacttagccatggtggacccagcgggcaggttctgcctgctttggcgggcagacacgcgggcgcgatcccacacaggctggcgggggccggccccgaggccgcgtgcgtgagaaccgcgccggtgtccccagagaccaggctgtgtccctcttctcttccctgcgcctgtgatgctgggcacttcatctgatcgggggcgtagcatcatagtagtttttacagctgtgttattctttgcgtgtagctatggaagttgcataattattattattattattataacaagtgtgtcttacgtgccaccacggcgttgtacctgtaggactctcattcgggatgattggaatagcttctggaatttgttcaagttttgggtatgtttaatctgttatgtactagtgttctgtttgttattgttttgttaattacaccataatgctaatttaaagagactccaaatctcaatgaagccagctcacagtgctgtgtgccccggtcacctagcaagctgccgaaccaaaagaatttgcaccccgctgcgggcccacgtggttggggccctgccctggcagggtcatcctgtgctcggaggccatctcgggcacaggcccaccccgccccacccctccagaacacggctcacgcttacctcaaccatcctggctgcggcgtctgtctgaaccacgcgggggccttgagggacgctttgtctgtcgtgatggggcaagggcacaagtcctggatgttgtgtgtatcgagaggccaaaggctggtggcaagtgcacggggcacagcggagtctgtcctgtgacgcgcaagtctgagggtctgggcggcgggcggctgggtctgtgcatttctggttgcaccgcggcgcttcccagcaccaacatgtaaccggcatgtttccagcagaagacaaaaagacaaacatgaaagtctagaaataaaactggtaaaaccccaaaaaaaaaaaagaaaaactcgggctctttcggggggac

SEQ ID NO: 298380 - DNA, 4498 bp, Homo sapiens
  misc_feature (56)..(56): n is a, c, g, or t
cggacgcgtgggtccggacgcgtgggtccggacgcgtgggtcgacccacgcgtcgnggactacaggggagttttgttgaagttgcaaagtcctggagcctccagagggctgtcggcgcagtagcagcgagcagcagagtccgcacgctccggcgaggggcagaagagcgcgagggagcgcggggcagcagaagcgagagccgagcgcggacccagccaggacccacagccctccccagctgcccaggaagagccccagccatggaacaccagctcctgtgctgcgaagtggaaaccatccgccgcgcgtaccccgatgccaacctcctcaacgaccgggtgctgcgggccatgctgaaggcggaggagacctgcgcgccctcggtgtcctacttcaaatgtgtgcagaaggaggtcctgccgtccatgcggaagatcgtcgccacctggatgctggaggtctgcgaggaacagaagtgcgaggaggaggtcttcccgctggccatgaactacctggaccgcttcctgtcgctggagcccgtgaaaaagagccgcctgcagctgctgggggccacttgcatgttcgtggcctctaagatgaaggagaccatccccctgacggccgagaagctgtgcatctacaccgacaactccatccggcccgaggagctgctgcaaatggagctgctcctggtgaacaagctcaagtggaacctggccgcaatgaccccgcacgatttcattgaacacttcctctccaaaatgccagaggcggaggagaacaaacagatcatccgcaaacacgcgcagaccttcgttgccctctgtgccacagatgtgaagttcatttccaatccgccctccatggtggcagcggggagcgtggtggccgcagtgcaaggcctgaacctgaggagccccaacaacttcctgtcctactaccgcctcacacgcttcctctccagagtgatcaagtgtgacccggactgcctccgggcctgccaggagcagatcgaagccctgctggagtcaagcctgcgccaggcccagcagaacatggaccccaaggccgccgaggaggaggaagaggaggaggaggaggtggacctggcttgcacacccaccgacgtgcgggacgtggacatctgagggcgccaggcaggcgggcgccaccgccacccgcagcgagggcggagccggccccaggtgctccactgacagtccctcctctccggagcattttgataccagaagggaaagcttcattctccttgttgttggttgttttttcctttgctctttcccccttccatctctgacttaagcaaaagaaaaagattacccaaaaactgtctttaaaagagagagagagaaaaaaaaaatagtatttgcataaccctgagcggtgggggaggagggttgtgctacagatgatagaggattttataccccaataatcaactcgtttttatattaatgtacttgtttctctgttgtaagaataggcattaacacaaaggaggcgtctcgggagaggattaggttccatcctttacgtgtttaaaaaaaagcataaaaacattttaaaaacatagaaaaattcagcaaaccatttttaaagtagaagagggttttaggtagaaaaacatattcttgtgcttttcctgataaagcacagctgtagtggggttctaggcatctctgtactttgcttgctcatatgcatgtagtcactttataagtcattgtatgttattatattccgtaggtagatgtgtaacctcttcaccttattcatggctgaagtcacctcttggttacagtagcgtagcgtggccgtgtgcatgtcctttgcgcctgtgaccaccaccccaacaaaccatccagtgacaaaccatccagtggaggtttgtcgggcaccagccagcgtagcagggtcgggaaaggccacctgtcccactcctacgatacgctactataaagagaagacgaaatagtgacataatatattctatttttatactcttcctatttttgtagtgacctgtttatgagatgctggttttctacccaacggccctgcagccagctcacgtccaggttcaacccacagctacttggtttgtgttcttcttcatattctaaaaccattccatttccaagcactttcagtccaataggtgtaggaaatagcgctgtttttgttgtgtgtgcagggagggcagttttctaatggaatggtttgggaatatccatgtacttgtttgcaagcaggactttgaggcaagtgtgggccactgtggtggcagtggaggtggggtgtttgggaggctgcgtgccagtcaagaagaaaaaggtttgcattctcacattgccaggatgataagttcctttccttttctttaaagaagttgaagtttaggaatcctttggtgccaactggtgtttgaaagtagggacctcagaggtttacctagagaacaggtggtttttaagggttatcttagatgtttcacaccggaaggtttttaaacactaaaatatataatttatagttaaggctaaaaagtatatttattgcagaggatgttcataaggccagtatgatttataaatgcaatctccccttgatttaaacacacagatacacacacacacacacacacacacacaaaccttctgcctttgatgttacagatttaatacagtttatttttaaagatagatccttttataggtgagaaaaaaacaatctggaagaaaaaaaccacacaaagacattgattcagcctgtttggcgtttcccagagtcatctgattggacaggcatgggtgcaaggaaaattagggtactcaacctaagttcggttccgatgaattcttatcccctgccccttcctttaaaaaacttagtgacaaaatagacaatttgcacatcttggctatgtaattcttgtaatttttatttaggaagtgttgaagggaggtggcaagagtgtggaggctgacgtgtgagggaggacaggcgggaggaggtgtgaggaggaggctcccgaggggaaggggcggtgcccacaccggggacaggccgcagctccattttcttattgcgctgctaccgttgacttccaggcacggtttggaaatattcacatcgcttctgtgtatctctttcacattgtttgctgctattggaggatcagttttttgttttacaatgtcatatactgccatgtactagttttagttttctcttagaacattgtattacagatgccttttttgtagttttttttttttttatgtgatcaatttggacttaatgtgattactgctctattccaaaaaggttgctgtttcacaatacctcatgcttcacttagccatggtggacccagcgggcaggttctgcctgctttggcgggcagacacgcgggcgcgatcccacacaggctggcgggggccggccccgaggccgcgtgcgtgagaaccgcgccggtgtccccagagaccaggctgtgtccctcttctcttccctgcgcctgtgatgctgggcacttcatctgatcgggggcgtagcatcatagtagtttttacagctgtgttattctttgcgtgtagctatggaagttgcataattattattattattattataacaagtgtgtcttacgtgccaccacggcgttgtacctgtaggactctcattcgggatgattggaatagcttctggaatttgttcaagttttgggtatgtttaatctgttatgtactagtgttctgtttgttattgttttgttaattacaccataatgctaatttaaagagactccaaatctcaatgaagccagctcacagtgctgtgtgccccggtcacctagcaagctgccgaaccaaaagaatttgcaccccgctgcgggcccacgtggttggggccctgccctggcagggtcatcctgtgctcggaggccatctcgggcacaggcccaccccgccccacccctccagaacacggctcacgcttacctcaaccatcctggctgcggcgtctgtctgaaccacgcgggggccttgagggacgctttgtctgtcgtgatggggcaagggcacaagtcctggatgttgtgtgtatcgagaggccaaaggctggtggcaagtgcacggggcacagcggagtctgtcctgtgacgcgcaagtctgagggtctgggcggcgggcggctgggtctgtgcatttctggttgcaccgcggcgcttcccagcaccaacatgtaaccggcatgtttccagcagaagacaaaaagacaaacatgaaagtctagaaataaaactggtaaaaccccaaaaaaaaaaaaaaaaaaaaaaaaaaaactcggatatatttatgttttctcttttggaggtgtttttcttactttcaaaactctaacttttgcagattttcttgaaaagtgccacggactaggaatccactcaaagggagaaatagaaaaccacccc

SEQ ID NO: 298381 - DNA, 4620 bp, Homo sapiens
  misc_feature (56)..(56): n is a, c, g, or t
cggacgcgtgggtccggacgcgtgggtccggacgcgtgggtcgacccacgcgtcgnggactacaggggagttttgttgaagttgcaaagtcctggagcctccagagggctgtcggcgcagtagcagcgagcagcagagtccgcacgctccggcgaggggcagaagagcgcgagggagcgcggggcagcagaagcgagagccgagcgcggacccagccaggacccacagccctccccagctgcccaggaagagccccagccatggaacaccagctcctgtgctgcgaagtggaaaccatccgccgcgcgtaccccgatgccaacctcctcaacgaccgggtgctgcgggccatgctgaaggcggaggagacctgcgcgccctcggtgtcctacttcaaatgtgtgcagaaggaggtcctgccgtccatgcggaagatcgtcgccacctggatgctggaggtctgcgaggaacagaagtgcgaggaggaggtcttcccgctggccatgaactacctggaccgcttcctgtcgctggagcccgtgaaaaagagccgcctgcagctgctgggggccacttgcatgttcgtggcctctaagatgaaggagaccatccccctgacggccgagaagctgtgcatctacaccgacaactccatccggcccgaggagctgctgcaaatggagctgctcctggtgaacaagctcaagtggaacctggccgcaatgaccccgcacgatttcattgaacacttcctctccaaaatgccagaggcggaggagaacaaacagatcatccgcaaacacgcgcagaccttcgttgccctctgtgccacagatgtgaagttcatttccaatccgccctccatggtggcagcggggagcgtggtggccgcagtgcaaggcctgaacctgaggagccccaacaacttcctgtcctactaccgcctcacacgcttcctctccagagtgatcaagtgtgacccggactgcctccgggcctgccaggagcagatcgaagccctgctggagtcaagcctgcgccaggcccagcagaacatggaccccaaggccgccgaggaggaggaagaggaggaggaggaggtggacctggcttgcacacccaccgacgtgcgggacgtggacatctgagggcgccaggcaggcgggcgccaccgccacccgcagcgagggcggagccggccccaggtgctccactgacagtccctcctctccggagcattttgataccagaagggaaagcttcattctccttgttgttggttgttttttcctttgctctttcccccttccatctctgacttaagcaaaagaaaaagattacccaaaaactgtctttaaaagagagagagagaaaaaaaaaatagtatttgcataaccctgagcggtgggggaggagggttgtgctacagatgatagaggattttataccccaataatcaactcgtttttatattaatgtacttgtttctctgttgtaagaataggcattaacacaaaggaggcgtctcgggagaggattaggttccatcctttacgtgtttaaaaaaaagcataaaaacattttaaaaacatagaaaaattcagcaaaccatttttaaagtagaagagggttttaggtagaaaaacatattcttgtgcttttcctgataaagcacagctgtagtggggttctaggcatctctgtactttgcttgctcatatgcatgtagtcactttataagtcattgtatgttattatattccgtaggtagatgtgtaacctcttcaccttattcatggctgaagtcacctcttggttacagtagcgtagcgtggccgtgtgcatgtcctttgcgcctgtgaccaccaccccaacaaaccatccagtgacaaaccatccagtggaggtttgtcgggcaccagccagcgtagcagggtcgggaaaggccacctgtcccactcctacgatacgctactataaagagaagacgaaatagtgacataatatattctatttttatactcttcctatttttgtagtgacctgtttatgagatgctggttttctacccaacggccctgcagccagctcacgtccaggttcaacccacagctacttggtttgtgttcttcttcatattctaaaaccattccatttccaagcactttcagtccaataggtgtaggaaatagcgctgtttttgttgtgtgtgcagggagggcagttttctaatggaatggtttgggaatatccatgtacttgtttgcaagcaggactttgaggcaagtgtgggccactgtggtggcagtggaggtggggtgtttgggaggctgcgtgccagtcaagaagaaaaaggtttgcattctcacattgccaggatgataagttcctttccttttctttaaagaagttgaagtttaggaatcctttggtgccaactggtgtttgaaagtagggacctcagaggtttacctagagaacaggtggtttttaagggttatcttagatgtttcacaccggaaggtttttaaacactaaaatatataatttatagttaaggctaaaaagtatatttattgcagaggatgttcataaggccagtatgatttataaatgcaatctccccttgatttaaacacacagatacacacacacacacacacacacacacaaaccttctgcctttgatgttacagatttaatacagtttatttttaaagatagatccttttataggtgagaaaaaaacaatctggaagaaaaaaaccacacaaagacattgattcagcctgtttggcgtttcccagagtcatctgattggacaggcatgggtgcaaggaaaattagggtactcaacctaagttcggttccgatgaattcttatcccctgccccttcctttaaaaaacttagtgacaaaatagacaatttgcacatcttggctatgtaattcttgtaatttttatttaggaagtgttgaagggaggtggcaagagtgtggaggctgacgtgtgagggaggacaggcgggaggaggtgtgaggaggaggctcccgaggggaaggggcggtgcccacaccggggacaggccgcagctccattttcttattgcgctgctaccgttgacttccaggcacggtttggaaatattcacatcgcttctgtgtatctctttcacattgtttgctgctattggaggatcagttttttgttttacaatgtcatatactgccatgtactagttttagttttctcttagaacattgtattacagatgccttttttgtagttttttttttttttatgtgatcaatttggacttaatgtgattactgctctattccaaaaaggttgctgtttcacaatacctcatgcttcacttagccatggtggacccagcgggcaggttctgcctgctttggcgggcagacacgcgggcgcgatcccacacaggctggcgggggccggccccgaggccgcgtgcgtgagaaccgcgccggtgtccccagagaccaggctgtgtccctcttctcttccctgcgcctgtgatgctgggcacttcatctgatcgggggcgtagcatcatagtagtttttacagctgtgttattctttgcgtgtagctatggaagttgcataattattattattattattataacaagtgtgtcttacgtgccaccacggcgttgtacctgtaggactctcattcgggatgattggaatagcttctggaatttgttcaagttttgggtatgtttaatctgttatgtactagtgttctgtttgttattgttttgttaattacaccataatgctaatttaaagagactccaaatctcaatgaagccagctcacagtgctgtgtgccccggtcacctagcaagctgccgaaccaaaagaatttgcaccccgctgcgggcccacgtggttggggccctgccctggcagggtcatcctgtgctcggaggccatctcgggcacaggcccaccccgccccacccctccagaacacggctcacgcttacctcaaccatcctggctgcggcgtctgtctgaaccacgcgggggccttgagggacgctttgtctgtcgtgatggggcaagggcacaagtcctggatgttgtgtgtatcgagaggccaaaggctggtggcaagtgcacggggcacagcggagtctgtcctgtgacgcgcaagtctgagggtctgggcggcgggcggctgggtctgtgcatttctggttgcaccgcggcgcttcccagcaccaacatgtaaccggcatgtttccagcagaagacaaaaagacaaacatgaaagtctagaaataaaactggtaaaaccccataaaaaaaaaaacatgaagggagacatgactttattagaaaaataaaaaccaactgaggtgatgggttggtcttcagcggatgccttggtggatgaggctgcttttggctgcactggccttctcaccgcaaccgcacgccgcgcagggtccaactcaaaacagcgccatagcctcagggtctcatctgctgctgcggatgccactgtggccccatctgggctcatggtcagactcaggacccgggatgtgtgacctttgagttcagccaccttggcca

SEQ ID NO: 298382 - DNA, 4375 bp, Homo sapiens
  misc_feature (56)..(56): n is a, c, g, or t
cggacgcgtgggtccggacgcgtgggtccggacgcgtgggtcgacccacgcgtcgnggactacaggggagttttgttgaagttgcaaagtcctggagcctccagagggctgtcggcgcagtagcagcgagcagcagagtccgcacgctccggcgaggggcagaagagcgcgagggagcgcggggcagcagaagcgagagccgagcgcggacccagccaggacccacagccctccccagctgcccaggaagagccccagccatggaacaccagctcctgtgctgcgaagtggaaaccatccgccgcgcgtaccccgatgccaacctcctcaacgaccgggtgctgcgggccatgctgaaggcggaggagacctgcgcgccctcggtgtcctacttcaaatgtgtgcagaaggaggtcctgccgtccatgcggaagatcgtcgccacctggatgctggaggtctgcgaggaacagaagtgcgaggaggaggtcttcccgctggccatgaactacctggaccgcttcctgtcgctggagcccgtgaaaaagagccgcctgcagctgctgggggccacttgcatgttcgtggcctctaagatgaaggagaccatccccctgacggccgagaagctgtgcatctacaccgacaactccatccggcccgaggagctgctgcaaatggagctgctcctggtgaacaagctcaagtggaacctggccgcaatgaccccgcacgatttcattgaacacttcctctccaaaatgccagaggcggaggagaacaaacagatcatccgcaaacacgcgcagaccttcgttgccctctgtgccacagatgtgaagttcatttccaatccgccctccatggtggcagcggggagcgtggtggccgcagtgcaaggcctgaacctgaggagccccaacaacttcctgtcctactaccgcctcacacgcttcctctccagagtgatcaagtgtgacccggactgcctccgggcctgccaggagcagatcgaagccctgctggagtcaagcctgcgccaggcccagcagaacatggaccccaaggccgccgaggaggaggaagaggaggaggaggaggtggacctggcttgcacacccaccgacgtgcgggacgtggacatctgagggcgccaggcaggcgggcgccaccgccacccgcagcgagggcggagccggccccaggtgctccactgacagtccctcctctccggagcattttgataccagaagggaaagcttcattctccttgttgttggttgttttttcctttgctctttcccccttccatctctgacttaagcaaaagaaaaagattacccaaaaactgtctttaaaagagagagagagaaaaaaaaaatagtatttgcataaccctgagcggtgggggaggagggttgtgctacagatgatagaggattttataccccaataatcaactcgtttttatattaatgtacttgtttctctgttgtaagaataggcattaacacaaaggaggcgtctcgggagaggattaggttccatcctttacgtgtttaaaaaaaagcataaaaacattttaaaaacatagaaaaattcagcaaaccatttttaaagtagaagagggttttaggtagaaaaacatattcttgtgcttttcctgataaagcacagctgtagtggggttctaggcatctctgtactttgcttgctcatatgcatgtagtcactttataagtcattgtatgttattatattccgtaggtagatgtgtaacctcttcaccttattcatggctgaagtcacctcttggttacagtagcgtagcgtggccgtgtgcatgtcctttgcgcctgtgaccaccaccccaacaaaccatccagtgacaaaccatccagtggaggtttgtcgggcaccagccagcgtagcagggtcgggaaaggccacctgtcccactcctacgatacgctactataaagagaagacgaaatagtgacataatatattctatttttatactcttcctatttttgtagtgacctgtttatgagatgctggttttctacccaacggccctgcagccagctcacgtccaggttcaacccacagctacttggtttgtgttcttcttcatattctaaaaccattccatttccaagcactttcagtccaataggtgtaggaaatagcgctgtttttgttgtgtgtgcagggagggcagttttctaatggaatggtttgggaatatccatgtacttgtttgcaagcaggactttgaggcaagtgtgggccactgtggtggcagtggaggtggggtgtttgggaggctgcgtgccagtcaagaagaaaaaggtttgcattctcacattgccaggatgataagttcctttccttttctttaaagaagttgaagtttaggaatcctttggtgccaactggtgtttgaaagtagggacctcagaggtttacctagagaacaggtggtttttaagggttatcttagatgtttcacaccggaaggtttttaaacactaaaatatataatttatagttaaggctaaaaagtatatttattgcagaggatgttcataaggccagtatgatttataaatgcaatctccccttgatttaaacacacagatacacacacacacacacacacacacacaaaccttctgcctttgatgttacagatttaatacagtttatttttaaagatagatccttttataggtgagaaaaaaacaatctggaagaaaaaaaccacacaaagacattgattcagcctgtttggcgtttcccagagtcatctgattggacaggcatgggtgcaaggaaaattagggtactcaacctaagttcggttccgatgaattcttatcccctgccccttcctttaaaaaacttagtgacaaaatagacaatttgcacatcttggctatgtaattcttgtaatttttatttaggaagtgttgaagggaggtggcaagagtgtggaggctgacgtgtgagggaggacaggcgggaggaggtgtgaggaggaggctcccgaggggaaggggcggtgcccacaccggggacaggccgcagctccattttcttattgcgctgctaccgttgacttccaggcacggtttggaaatattcacatcgcttctgtgtatctctttcacattgtttgctgctattggaggatcagttttttgttttacaatgtcatatactgccatgtactagttttagttttctcttagaacattgtattacagatgccttttttgtagttttttttttttttatgtgatcaatttggacttaatgtgattactgctctattccaaaaaggttgctgtttcacaatacctcatgcttcacttagccatggtggacccagcgggcaggttctgcctgctttggcgggcagacacgcgggcgcgatcccacacaggctggcgggggccggccccgaggccgcgtgcgtgagaaccgcgccggtgtccccagagaccaggctgtgtccctcttctcttccctgcgcctgtgatgctgggcacttcatctgatcgggggcgtagcatcatagtagtttttacagctgtgttattctttgcgtgtagctatggaagttgcataattattattattattattataacaagtgtgtcttacgtgccaccacggcgttgtacctgtaggactctcattcgggatgattggaatagcttctggaatttgttcaagttttgggtatgtttaatctgttatgtactagtgttctgtttgttattgttttgttaattacaccataatgctaatttaaagagactccaaatctcaatgaagccagctcacagtgctgtgtgccccggtcacctagcaagctgccgaaccaaaagaatttgcaccccgctgcgggcccacgtggttggggccctgccctggcagggtcatcctgtgctcggaggccatctcgggcacaggcccaccccgccccacccctccagaacacggctcacgcttacctcaaccatcctggctgcggcgtctgtctgaaccacgcgggggccttgagggacgctttgtctgtcgtgatggggcaagggcacaagtcctggatgttgtgtgtatcgagaggccaaaggctggtggcaagtgcacggggccaccgccccaagattagctaagccagggtcggagggtcagcctatggtcagagtggcgttcgaggctttgtgcctgtgagcggctgttttgcatcctgtacatgcaccaggtacgtttttgtctacgcagcactatgcctgatgaaggagttggacgtctgacttctgagtggacaccggaaagtcattaaaggggacttgagagctgt

SEQ ID NO: 298383 - DNA, 4243 bp, Homo sapiens
  misc_feature (56)..(56): n is a, c, g, or t
cggacgcgtgggtccggacgcgtgggtccggacgcgtgggtcgacccacgcgtcgnggactacaggggagttttgttgaagttgcaaagtcctggagcctccagagggctgtcggcgcagtagcagcgagcagcagagtccgcacgctccggcgaggggcagaagagcaccagctcctgtgctgcgaagtggaaaccatccgccgcgcgtaccccgatgccaacctcctcaacgaccgggtgctgcgggccatgctgaaggcggaggagacctgcgcgccctcggtgtcctacttcaaatgtgtgcagaaggaggtcctgccgtccatgcggaagatcgtcgccacctggatgctggaggtctgcgaggaacagaagtgcgaggaggaggtcttcccgctggccatgaactacctggaccgcttcctgtcgctggagcccgtgaaaaagagccgcctgcagctgctgggggccacttgcatgttcgtggcctctaagatgaaggagaccatccccctgacggccgagaagctgtgcatctacaccgacaactccatccggcccgaggagctgctgcaaatggagctgctcctggtgaacaagctcaagtggaacctggccgcaatgaccccgcacgatttcattgaacacttcctctccaaaatgccagaggcggaggagaacaaacagatcatccgcaaacacgcgcagaccttcgttgccctctgtgccacagatgtgaagttcatttccaatccgccctccatggtggcagcggggagcgtggtggccgcagtgcaaggcctgaacctgaggagccccaacaacttcctgtcctactaccgcctcacacgcttcctctccagagtgatcaagtgtgacccggactgcctccgggcctgccaggagcagatcgaagccctgctggagtcaagcctgcgccaggcccagcagaacatggaccccaaggccgccgaggaggaggaagaggaggaggaggaggtggacctggcttgcacacccaccgacgtgcgggacgtggacatctgagggcgccaggcaggcgggcgccaccgccacccgcagcgagggcggagccggccccaggtgctccactgacagtccctcctctccggagcattttgataccagaagggaaagcttcattctccttgttgttggttgttttttcctttgctctttcccccttccatctctgacttaagcaaaagaaaaagattacccaaaaactgtctttaaaagagagagagagaaaaaaaaaatagtatttgcataaccctgagcggtgggggaggagggttgtgctacagatgatagaggattttataccccaataatcaactcgtttttatattaatgtacttgtttctctgttgtaagaataggcattaacacaaaggaggcgtctcgggagaggattaggttccatcctttacgtgtttaaaaaaaagcataaaaacattttaaaaacatagaaaaattcagcaaaccatttttaaagtagaagagggttttaggtagaaaaacatattcttgtgcttttcctgataaagcacagctgtagtggggttctaggcatctctgtactttgcttgctcatatgcatgtagtcactttataagtcattgtatgttattatattccgtaggtagatgtgtaacctcttcaccttattcatggctgaagtcacctcttggttacagtagcgtagcgtggccgtgtgcatgtcctttgcgcctgtgaccaccaccccaacaaaccatccagtgacaaaccatccagtggaggtttgtcgggcaccagccagcgtagcagggtcgggaaaggccacctgtcccactcctacgatacgctactataaagagaagacgaaatagtgacataatatattctatttttatactcttcctatttttgtagtgacctgtttatgagatgctggttttctacccaacggccctgcagccagctcacgtccaggttcaacccacagctacttggtttgtgttcttcttcatattctaaaaccattccatttccaagcactttcagtccaataggtgtaggaaatagcgctgtttttgttgtgtgtgcagggagggcagttttctaatggaatggtttgggaatatccatgtacttgtttgcaagcaggactttgaggcaagtgtgggccactgtggtggcagtggaggtggggtgtttgggaggctgcgtgccagtcaagaagaaaaaggtttgcattctcacattgccaggatgataagttcctttccttttctttaaagaagttgaagtttaggaatcctttggtgccaactggtgtttgaaagtagggacctcagaggtttacctagagaacaggtggtttttaagggttatcttagatgtttcacaccggaaggtttttaaacactaaaatatataatttatagttaaggctaaaaagtatatttattgcagaggatgttcataaggccagtatgatttataaatgcaatctccccttgatttaaacacacagatacacacacacacacacacacacacacaaaccttctgcctttgatgttacagatttaatacagtttatttttaaagatagatccttttataggtgagaaaaaaacaatctggaagaaaaaaaccacacaaagacattgattcagcctgtttggcgtttcccagagtcatctgattggacaggcatgggtgcaaggaaaattagggtactcaacctaagttcggttccgatgaattcttatcccctgccccttcctttaaaaaacttagtgacaaaatagacaatttgcacatcttggctatgtaattcttgtaatttttatttaggaagtgttgaagggaggtggcaagagtgtggaggctgacgtgtgagggaggacaggcgggaggaggtgtgaggaggaggctcccgaggggaaggggcggtgcccacaccggggacaggccgcagctccattttcttattgcgctgctaccgttgacttccaggcacggtttggaaatattcacatcgcttctgtgtatctctttcacattgtttgctgctattggaggatcagttttttgttttacaatgtcatatactgccatgtactagttttagttttctcttagaacattgtattacagatgccttttttgtagttttttttttttttatgtgatcaatttggacttaatgtgattactgctctattccaaaaaggttgctgtttcacaatacctcatgcttcacttagccatggtggacccagcgggcaggttctgcctgctttggcgggcagacacgcgggcgcgatcccacacaggctggcgggggccggccccgaggccgcgtgcgtgagaaccgcgccggtgtccccagagaccaggctgtgtccctcttctcttccctgcgcctgtgatgctgggcacttcatctgatcgggggcgtagcatcatagtagtttttacagctgtgttattctttgcgtgtagctatggaagttgcataattattattattattattataacaagtgtgtcttacgtgccaccacggcgttgtacctgtaggactctcattcgggatgattggaatagcttctggaatttgttcaagttttgggtatgtttaatctgttatgtactagtgttctgtttgttattgttttgttaattacaccataatgctaatttaaagagactccaaatctcaatgaagccagctcacagtgctgtgtgccccggtcacctagcaagctgccgaaccaaaagaatttgcaccccgctgcgggcccacgtggttggggccctgccctggcagggtcatcctgtgctcggaggccatctcgggcacaggcccaccccgccccacccctccagaacacggctcacgcttacctcaaccatcctggctgcggcgtctgtctgaaccacgcgggggccttgagggacgctttgtctgtcgtgatggggcaagggcacaagtcctggatgttgtgtgtatcgagaggccaaaggctggtggcaagtgcacggggcacagcggagtctgtcctgtgacgcgcaagtctgagggtctgggcggcgggcggctgggtctgtgcatttctggttgcaccgcggcgcttcccagcaccaacatgtaaccggcatgtttccagcagaagacaaaaagacaaacatgaaagtctagaaataaaactggtaaaacccca

SEQ ID NO: 298384 - DNA, 4370 bp, Homo sapiens
  misc_feature (56)..(56): n is a, c, g, or t
cggacgcgtgggtccggacgcgtgggtccggacgcgtgggtcgacccacgcgtcgnggactacaggggagttttgttgaagttgcaaagtcctggagcctccagagggctgtcggcgcagtagcagcgagcagcagagtccgcacgctccggcgaggggcagaagagcgcgagggagcgcggggcagcagaagcgagagccgagcgcggacccagccaggacccacagccctccccagctgcccaggaagagccccagccatggaacaccagctcctgtgctgcgaagtggaaaccatccgccgcgcgtaccccgatgccaacctcctcaacgaccgggtgctgcgggccatgctgaaggcggaggagacctgcgcgccctcggtgtcctacttcaaatgtgtgcagaaggaggtcctgccgtccatgcggaagatcgtcgccacctggatgctggaggtctgcgaggaacagaagtgcgaggaggaggtcttcccgctggccatgaactacctggaccgcttcctgtcgctggagcccgtgaaaaagagccgcctgcagctgctgggggccacttgcatgttcgtggcctctaagatgaaggagaccatccccctgacggccgagaagctgtgcatctacaccgacaactccatccggcccgaggagctgctgcaaatggagctgctcctggtgaacaagctcaagtggaacctggccgcaatgaccccgcacgatttcattgaacacttcctctccaaaatgccagaggcggaggagaacaaacagatcatccgcaaacacgcgcagaccttcgttgccctctgtgccacagatgtgaagttcatttccaatccgccctccatggtggcagcggggagcgtggtggccgcagtgcaaggcctgaacctgaggagccccaacaacttcctgtcctactaccgcctcacacgcttcctctccagagtgatcaagtgtgacccggactgcctccgggcctgccaggagcagatcgaagccctgctggagtcaagcctgcgccaggcccagcagaacatggaccccaaggccgccgaggaggaggaagaggaggaggaggaggtggacctggcttgcacacccaccgacgtgcgggacgtggacatctgagggcgccaggcaggcgggcgccaccgccacccgcagcgagggcggagccggccccaggtgctccactgacagtccctcctctccggagcattttgataccagaagggaaagcttcattctccttgttgttggttgttttttcctttgctctttcccccttccatctctgacttaagcaaaagaaaaagattacccaaaaactgtctttaaaagagagagagagaaaaaaaaaatagtatttgcataaccctgagcggtgggggaggagggttgtgctacagatgatagaggattttataccccaataatcaactcgtttttatattaatgtacttgtttctctgttgtaagaataggcattaacacaaaggaggcgtctcgggagaggattaggttccatcctttacgtgtttaaaaaaaagcataaaaacattttaaaaacatagaaaaattcagcaaaccatttttaaagtagaagagggttttaggtagaaaaacatattcttgtgcttttcctgataaagcacagctgtagtggggttctaggcatctctgtactttgcttgctcatatgcatgtagtcactttataagtcattgtatgttattatattccgtaggtagatgtgtaacctcttcaccttattcatggctgaagtcacctcttggttacagtagcgtagcgtggccgtgtgcatgtcctttgcgcctgtgaccaccaccccaacaaaccatccagtgacaaaccatccagtggaggtttgtcgggcaccagccagcgtagcagggtcgggaaaggccacctgtcccactcctacgatacgctactataaagagaagacgaaatagtgacataatatattctatttttatactcttcctatttttgtagtgacctgtttatgagatgctggttttctacccaacggccctgcagccagctcacgtccaggttcaacccacagctacttggtttgtgttcttcttcatattctaaaaccattccatttccaagcactttcagtccaataggtgtaggaaatagcgctgtttttgttgtgtgtgcagggagggcagttttctaatggaatggtttgggaatatccatgtacttgtttgcaagcaggactttgaggcaagtgtgggccactgtggtggcagtggaggtggggtgtttgggaggctgcgtgccagtcaagaagaaaaaggtttgcattctcacattgccaggatgataagttcctttccttttctttaaagaagttgaagtttaggaatcctttggtgccaactggtgtttgaaagtagggacctcagaggtttacctagagaacaggtggtttttaagggttatcttagatgtttcacaccggaaggtttttaaacactaaaatatataatttatagttaaggctaaaaagtatatttattgcagaggatgttcataaggccagtatgatttataaatgcaatctccccttgatttaaacacacagatacacacacacacacacacacacacacaaaccttctgcctttgatgttacagatttaatacagtttatttttaaagatagatccttttataggtgagaaaaaaacaatctggaagaaaaaaaccacacaaagacattgattcagcctgtttggcgtttcccagagtcatctgattggacaggcatgggtgcaaggaaaattagggtactcaacctaagttcggttccgatgaattcttatcccctgccccttcctttaaaaaacttagtgacaaaatagacaatttgcacatcttggctatgtaattcttgtaatttttatttaggaagtgttgaagggaggtggcaagagtgtggaggctgacgtgtgagggaggacaggcgggaggaggtgtgaggaggaggctcccgaggggaaggggcggtgcccacaccggggacaggccgcagctccattttcttattgcgctgctaccgttgacttccaggcacggtttggaaatattcacatcgcttctgtgtatctctttcacattgtttgctgctattggaggatcagttttttgttttacaatgtcatatactgccatgtactagttttagttttctcttagaacattgtattacagatgccttttttgtagttttttttttttttatgtgatcaatttggacttaatgtgattactgctctattccaaaaaggttgctgtttcacaatacctcatgcttcacttagccatggtggacccagcgggcaggttctgcctgctttggcgggcagacacgcgggcgcgatcccacacaggctggcgggggccggccccgaggccgcgtgcgtgagaaccgcgccggtgtccccagagaccaggctgtgtccctcttctcttccctgcgcctgtgatgctgggcacttcatctgatcgggggcgtagcatcatagtagtttttacagctgtgttattctttgcgtgtagctatggaagttgcataattattattattattattataacaagtgtgtcttacgtgccaccacggcgttgtacctgtaggactctcattcgggatgattggaatagcttctggaatttgttcaagttttgggtatgtttaatctgttatgtactagtgttctgtttgttattgttttgttaattacaccataatgctaatttaaagagactccaaatctcaatgaagccagctcacagtgctgtgtgccccggtcacctagcaagctgccgaaccaaaagaatttgcaccccgctgcgggcccacgtggttggggccctgccctggcagggtcatcctgtgctcggaggccatctcgggcacaggcccaccccgccccacccctcgagaggccaaaggctggtggcaagtgcacggggcacagcggagtctgtcctgtgacgcgcaagtctgagggtctgggcggcgggcggctgggtctgtgcatttctggttgcaccgcggcgcttcccagcaccaacatgtaaccggcatgtttccagcagaagacaaaaagacaaacatgaaagtctagaaataaaactggtaaaaccccaaaaaaaaaaaaaaaaaaaaaaaaaaaactcggatatatttatgttttctcttttggaggtgtttttcttactttcaaaactctaacttttgcagattttcttgaaaagtgccacggactaggaatccactcaaagggagaaatagaaaaccacccc

SEQ ID NO: 298385 - DNA, 4147 bp, Homo sapiens
gcggctgccgggagcccgcgggaggggcgcagggacgcggcatgggtagttttggggggaccccgctagggaagggggggcctttgttcaagcagcgagtcccggggcgccccgaacgggcagcctgggccggagagcacggcgagctgcaaggtcgcgtggcccccaagacgccagggcttgatccccgtctgcagggatatcggcttggaggaccttctccgagcgagccgggggcctgggagcacattttcagaccttcggtctgcgaggaacagaagtgcgaggaggaggtcttcccgctggccatgaactacctggaccgcttcctgtcgctggagcccgtgaaaaagagccgcctgcagctgctgggggccacttgcatgttcgtggcctctaagatgaaggagaccatccccctgacggccgagaagctgtgcatctacaccgacaactccatccggcccgaggagctgctgcaaatggagctgctcctggtgaacaagctcaagtggaacctggccgcaatgaccccgcacgatttcattgaacacttcctctccaaaatgccagaggcggaggagaacaaacagatcatccgcaaacacgcgcagaccttcgttgccctctgtgccacagatgtgaagttcatttccaatccgccctccatggtggcagcggggagcgtggtggccgcagtgcaaggcctgaacctgaggagccccaacaacttcctgtcctactaccgcctcacacgcttcctctccagagtgatcaagtgtgacccggactgcctccgggcctgccaggagcagatcgaagccctgctggagtcaagcctgcgccaggcccagcagaacatggaccccaaggccgccgaggaggaggaagaggaggaggaggaggtggacctggcttgcacacccaccgacgtgcgggacgtggacatctgagggcgccaggcaggcgggcgccaccgccacccgcagcgagggcggagccggccccaggtgctccactgacagtccctcctctccggagcattttgataccagaagggaaagcttcattctccttgttgttggttgttttttcctttgctctttcccccttccatctctgacttaagcaaaagaaaaagattacccaaaaactgtctttaaaagagagagagagaaaaaaaaaatagtatttgcataaccctgagcggtgggggaggagggttgtgctacagatgatagaggattttataccccaataatcaactcgtttttatattaatgtacttgtttctctgttgtaagaataggcattaacacaaaggaggcgtctcgggagaggattaggttccatcctttacgtgtttaaaaaaaagcataaaaacattttaaaaacatagaaaaattcagcaaaccatttttaaagtagaagagggttttaggtagaaaaacatattcttgtgcttttcctgataaagcacagctgtagtggggttctaggcatctctgtactttgcttgctcatatgcatgtagtcactttataagtcattgtatgttattatattccgtaggtagatgtgtaacctcttcaccttattcatggctgaagtcacctcttggttacagtagcgtagcgtggccgtgtgcatgtcctttgcgcctgtgaccaccaccccaacaaaccatccagtgacaaaccatccagtggaggtttgtcgggcaccagccagcgtagcagggtcgggaaaggccacctgtcccactcctacgatacgctactataaagagaagacgaaatagtgacataatatattctatttttatactcttcctatttttgtagtgacctgtttatgagatgctggttttctacccaacggccctgcagccagctcacgtccaggttcaacccacagctacttggtttgtgttcttcttcatattctaaaaccattccatttccaagcactttcagtccaataggtgtaggaaatagcgctgtttttgttgtgtgtgcagggagggcagttttctaatggaatggtttgggaatatccatgtacttgtttgcaagcaggactttgaggcaagtgtgggccactgtggtggcagtggaggtggggtgtttgggaggctgcgtgccagtcaagaagaaaaaggtttgcattctcacattgccaggatgataagttcctttccttttctttaaagaagttgaagtttaggaatcctttggtgccaactggtgtttgaaagtagggacctcagaggtttacctagagaacaggtggtttttaagggttatcttagatgtttcacaccggaaggtttttaaacactaaaatatataatttatagttaaggctaaaaagtatatttattgcagaggatgttcataaggccagtatgatttataaatgcaatctccccttgatttaaacacacagatacacacacacacacacacacacacacaaaccttctgcctttgatgttacagatttaatacagtttatttttaaagatagatccttttataggtgagaaaaaaacaatctggaagaaaaaaaccacacaaagacattgattcagcctgtttggcgtttcccagagtcatctgattggacaggcatgggtgcaaggaaaattagggtactcaacctaagttcggttccgatgaattcttatcccctgccccttcctttaaaaaacttagtgacaaaatagacaatttgcacatcttggctatgtaattcttgtaatttttatttaggaagtgttgaagggaggtggcaagagtgtggaggctgacgtgtgagggaggacaggcgggaggaggtgtgaggaggaggctcccgaggggaaggggcggtgcccacaccggggacaggccgcagctccattttcttattgcgctgctaccgttgacttccaggcacggtttggaaatattcacatcgcttctgtgtatctctttcacattgtttgctgctattggaggatcagttttttgttttacaatgtcatatactgccatgtactagttttagttttctcttagaacattgtattacagatgccttttttgtagttttttttttttttatgtgatcaatttggacttaatgtgattactgctctattccaaaaaggttgctgtttcacaatacctcatgcttcacttagccatggtggacccagcgggcaggttctgcctgctttggcgggcagacacgcgggcgcgatcccacacaggctggcgggggccggccccgaggccgcgtgcgtgagaaccgcgccggtgtccccagagaccaggctgtgtccctcttctcttccctgcgcctgtgatgctgggcacttcatctgatcgggggcgtagcatcatagtagtttttacagctgtgttattctttgcgtgtagctatggaagttgcataattattattattattattataacaagtgtgtcttacgtgccaccacggcgttgtacctgtaggactctcattcgggatgattggaatagcttctggaatttgttcaagttttgggtatgtttaatctgttatgtactagtgttctgtttgttattgttttgttaattacaccataatgctaatttaaagagactccaaatctcaatgaagccagctcacagtgctgtgtgccccggtcacctagcaagctgccgaaccaaaagaatttgcaccccgctgcgggcccacgtggttggggccctgccctggcagggtcatcctgtgctcggaggccatctcgggcacaggcccaccccgccccacccctccagaacacggctcacgcttacctcaaccatcctggctgcggcgtctgtctgaaccacgcgggggccttgagggacgctttgtctgtcgtgatggggcaagggcacaagtcctggatgttgtgtgtatcgagaggccaaaggctggtggcaagtgcacggggcacagcggagtctgtcctgtgacgcgcaagtctgagggtctgggcggcgggcggctgggtctgtgcatttctggttgcaccgcggcgcttcccagcaccaacatgtaaccggcatgtttccagcagaagacaaaaagacaaacatgaaagtctagaaataaaactggtaaaacccca

SEQ ID NO: 298386 - DNA, 4225 bp, Homo sapiens
  misc_feature (56)..(56): n is a, c, g, or t
cggacgcgtgggtccggacgcgtgggtccggacgcgtgggtcgacccacgcgtcgnggactacaggggagttttgttgaagttgcaaagtcctggagcctccagagggctgtcggcgcagtagcagcgagcagcagagtccgcacgctccggcgaggggcagaagagcgcgagggagcgcggggcagcagaagcgagagccgagcgcggacccagccaggacccacagccctccccagctgcccaggaagagccccagccatggaacaccagctcctgtgctgcgaagtggaaaccatccgccgcgcgtaccccgatgccaacctcctcaacgaccgggtgctgcgggccatgctgaaggcggaggagacctgcgcgccctcggtgtcctacttcaaatgtgtgcagaaggaggtcctgccgtccatgcggaagatcgtcgccacctggatgctggaggtctgcgaggaacagaagtgcgaggaggaggtcttcccgctggccatgaactacctggaccgcttcctgtcgctggagcccgtgaaaaagagccgcctgcagctgctgggggccacttgcatgttcgtggcctctaagatgaaggagaccatccccctgacggccgagaagctgtgcatctacaccgacaactccatccggcccgaggagctgctgcaaatggagctgctcctggtgaacaagctcaagtggaacctggccgcaatgaccccgcacgatttcattgaacacttcctctccaaaatgccagaggcggaggagaacaaacagatcatccgcaaacacgcgcagaccttcgttgccctctgtgccacagatgtgaagttcatttccaatccgccctccatggtggcagcggggagcgtggtggccgcagtgcaaggcctgaacctgaggagccccaacaacttcctgtcctactaccgcctcacacgcttcctctccagagtgatcaagtgtgacccggactgcctccgggcctgccaggagcagatcgaagccctgctggagtcaagcctgcgccagggcgggcgccaccgccacccgcagcgagggcggagccggccccaggtgctccactgacagtccctcctctccggagcattttgataccagaagggaaagcttcattctccttgttgttggttgttttttcctttgctctttcccccttccatctctgacttaagcaaaagaaaaagattacccaaaaactgtctttaaaagagagagagagaaaaaaaaaatagtatttgcataaccctgagcggtgggggaggagggttgtgctacagatgatagaggattttataccccaataatcaactcgtttttatattaatgtacttgtttctctgttgtaagaataggcattaacacaaaggaggcgtctcgggagaggattaggttccatcctttacgtgtttaaaaaaaagcataaaaacattttaaaaacatagaaaaattcagcaaaccatttttaaagtagaagagggttttaggtagaaaaacatattcttgtgcttttcctgataaagcacagctgtagtggggttctaggcatctctgtactttgcttgctcatatgcatgtagtcactttataagtcattgtatgttattatattccgtaggtagatgtgtaacctcttcaccttattcatggctgaagtcacctcttggttacagtagcgtagcgtggccgtgtgcatgtcctttgcgcctgtgaccaccaccccaacaaaccatccagtgacaaaccatccagtggaggtttgtcgggcaccagccagcgtagcagggtcgggaaaggccacctgtcccactcctacgatacgctactataaagagaagacgaaatagtgacataatatattctatttttatactcttcctatttttgtagtgacctgtttatgagatgctggttttctacccaacggccctgcagccagctcacgtccaggttcaacccacagctacttggtttgtgttcttcttcatattctaaaaccattccatttccaagcactttcagtccaataggtgtaggaaatagcgctgtttttgttgtgtgtgcagggagggcagttttctaatggaatggtttgggaatatccatgtacttgtttgcaagcaggactttgaggcaagtgtgggccactgtggtggcagtggaggtggggtgtttgggaggctgcgtgccagtcaagaagaaaaaggtttgcattctcacattgccaggatgataagttcctttccttttctttaaagaagttgaagtttaggaatcctttggtgccaactggtgtttgaaagtagggacctcagaggtttacctagagaacaggtggtttttaagggttatcttagatgtttcacaccggaaggtttttaaacactaaaatatataatttatagttaaggctaaaaagtatatttattgcagaggatgttcataaggccagtatgatttataaatgcaatctccccttgatttaaacacacagatacacacacacacacacacacacacacaaaccttctgcctttgatgttacagatttaatacagtttatttttaaagatagatccttttataggtgagaaaaaaacaatctggaagaaaaaaaccacacaaagacattgattcagcctgtttggcgtttcccagagtcatctgattggacaggcatgggtgcaaggaaaattagggtactcaacctaagttcggttccgatgaattcttatcccctgccccttcctttaaaaaacttagtgacaaaatagacaatttgcacatcttggctatgtaattcttgtaatttttatttaggaagtgttgaagggaggtggcaagagtgtggaggctgacgtgtgagggaggacaggcgggaggaggtgtgaggaggaggctcccgaggggaaggggcggtgcccacaccggggacaggccgcagctccattttcttattgcgctgctaccgttgacttccaggcacggtttggaaatattcacatcgcttctgtgtatctctttcacattgtttgctgctattggaggatcagttttttgttttacaatgtcatatactgccatgtactagttttagttttctcttagaacattgtattacagatgccttttttgtagttttttttttttttatgtgatcaatttggacttaatgtgattactgctctattccaaaaaggttgctgtttcacaatacctcatgcttcacttagccatggtggacccagcgggcaggttctgcctgctttggcgggcagacacgcgggcgcgatcccacacaggctggcgggggccggccccgaggccgcgtgcgtgagaaccgcgccggtgtccccagagaccaggctgtgtccctcttctcttccctgcgcctgtgatgctgggcacttcatctgatcgggggcgtagcatcatagtagtttttacagctgtgttattctttgcgtgtagctatggaagttgcataattattattattattattataacaagtgtgtcttacgtgccaccacggcgttgtacctgtaggactctcattcgggatgattggaatagcttctggaatttgttcaagttttgggtatgtttaatctgttatgtactagtgttctgtttgttattgttttgttaattacaccataatgctaatttaaagagactccaaatctcaatgaagccagctcacagtgctgtgtgccccggtcacctagcaagctgccgaaccaaaagaatttgcaccccgctgcgggcccacgtggttggggccctgccctggcagggtcatcctgtgctcggaggccatctcgggcacaggcccaccccgccccacccctccagaacacggctcacgcttacctcaaccatcctggctgcggcgtctgtctgaaccacgcgggggccttgagggacgctttgtctgtcgtgatggggcaagggcacaagtcctggatgttgtgtgtatcgagaggccaaaggctggtggcaagtgcacggggcacagcggagtctgtcctgtgacgcgcaagtctgagggtctgggcggcgggcggctgggtctgtgcatttctggttgcaccgcggcgcttcccagcaccaacatgtaaccggcatgtttccagcagaagacaaaaagacaaacatgaaagtctagaaataaaactggtaaaacccca

SEQ ID NO: 298387 - DNA, 4296 bp, Homo sapiens
  misc_feature (56)..(56): n is a, c, g, or t
cggacgcgtgggtccggacgcgtgggtccggacgcgtgggtcgacccacgcgtcgnggactacaggggagttttgttgaagttgcaaagtcctggagcctccagagggctgtcggcgcagtagcagcgagcagcagagtccgcacgctccggcgaggggcagaagagcgcgagggagcgcggggcagcagaagcgagagccgagcgcggacccagccaggacccacagccctccccagctgcccaggaagagccccagccatggaacaccagctcctgtgctgcgaagtggaaaccatccgccgcgcgtaccccgatgccaacctcctcaacgaccgggtgctgcgggccatgctgaaggcggaggagacctgcgcgccctcggtgtcctacttcaaatgtgtgcagaaggaggtcctgccgtccatgcggaagatcgtcgccacctggatgctggaggtctgcgaggaacagaagtgcgaggaggaggtcttcccgctggccatgaactacctggaccgcttcctgtcgctggagcccgtgaaaaagagccgcctgcagctgctgggggccacttgcatgttcgtggcctctaagatgaaggagaccatccccctgacggccgagaagctgtgcatctacaccgacaactccatccggcccgaggagctgctgcaaatggagctgctcctggtgaacaagctcaagtggaacctggccgcaatgaccccgcacgatttcattgaacacttcctctccaaaatgccagaggcggaggagaacaaacagatcatccgcaaacacgcgcagaccttcgttgccctctgtgccacagatgtgaagttcatttccaatccgccctccatggtggcagcggggagcgtggtggccgcagtgcaaggcctgaacctgaggagccccaacaacttcctgtcctagactgcctccgggcctgccaggagcagatcgaagccctgctggagtcaagcctgcgccaggcccagcagaacatggaccccaaggccgccgaggaggaggaagaggaggaggaggaggtggacctggcttgcacacccaccgacgtgcgggacgtggacatctgagggcgccaggcaggcgggcgccaccgccacccgcagcgagggcggagccggccccaggtgctccactgacagtccctcctctccggagcattttgataccagaagggaaagcttcattctccttgttgttggttgttttttcctttgctctttcccccttccatctctgacttaagcaaaagaaaaagattacccaaaaactgtctttaaaagagagagagagaaaaaaaaaatagtatttgcataaccctgagcggtgggggaggagggttgtgctacagatgatagaggattttataccccaataatcaactcgtttttatattaatgtacttgtttctctgttgtaagaataggcattaacacaaaggaggcgtctcgggagaggattaggttccatcctttacgtgtttaaaaaaaagcataaaaacattttaaaaacatagaaaaattcagcaaaccatttttaaagtagaagagggttttaggtagaaaaacatattcttgtgcttttcctgataaagcacagctgtagtggggttctaggcatctctgtactttgcttgctcatatgcatgtagtcactttataagtcattgtatgttattatattccgtaggtagatgtgtaacctcttcaccttattcatggctgaagtcacctcttggttacagtagcgtagcgtggccgtgtgcatgtcctttgcgcctgtgaccaccaccccaacaaaccatccagtgacaaaccatccagtggaggtttgtcgggcaccagccagcgtagcagggtcgggaaaggccacctgtcccactcctacgatacgctactataaagagaagacgaaatagtgacataatatattctatttttatactcttcctatttttgtagtgacctgtttatgagatgctggttttctacccaacggccctgcagccagctcacgtccaggttcaacccacagctacttggtttgtgttcttcttcatattctaaaaccattccatttccaagcactttcagtccaataggtgtaggaaatagcgctgtttttgttgtgtgtgcagggagggcagttttctaatggaatggtttgggaatatccatgtacttgtttgcaagcaggactttgaggcaagtgtgggccactgtggtggcagtggaggtggggtgtttgggaggctgcgtgccagtcaagaagaaaaaggtttgcattctcacattgccaggatgataagttcctttccttttctttaaagaagttgaagtttaggaatcctttggtgccaactggtgtttgaaagtagggacctcagaggtttacctagagaacaggtggtttttaagggttatcttagatgtttcacaccggaaggtttttaaacactaaaatatataatttatagttaaggctaaaaagtatatttattgcagaggatgttcataaggccagtatgatttataaatgcaatctccccttgatttaaacacacagatacacacacacacacacacacacacacaaaccttctgcctttgatgttacagatttaatacagtttatttttaaagatagatccttttataggtgagaaaaaaacaatctggaagaaaaaaaccacacaaagacattgattcagcctgtttggcgtttcccagagtcatctgattggacaggcatgggtgcaaggaaaattagggtactcaacctaagttcggttccgatgaattcttatcccctgccccttcctttaaaaaacttagtgacaaaatagacaatttgcacatcttggctatgtaattcttgtaatttttatttaggaagtgttgaagggaggtggcaagagtgtggaggctgacgtgtgagggaggacaggcgggaggaggtgtgaggaggaggctcccgaggggaaggggcggtgcccacaccggggacaggccgcagctccattttcttattgcgctgctaccgttgacttccaggcacggtttggaaatattcacatcgcttctgtgtatctctttcacattgtttgctgctattggaggatcagttttttgttttacaatgtcatatactgccatgtactagttttagttttctcttagaacattgtattacagatgccttttttgtagttttttttttttttatgtgatcaatttggacttaatgtgattactgctctattccaaaaaggttgctgtttcacaatacctcatgcttcacttagccatggtggacccagcgggcaggttctgcctgctttggcgggcagacacgcgggcgcgatcccacacaggctggcgggggccggccccgaggccgcgtgcgtgagaaccgcgccggtgtccccagagaccaggctgtgtccctcttctcttccctgcgcctgtgatgctgggcacttcatctgatcgggggcgtagcatcatagtagtttttacagctgtgttattctttgcgtgtagctatggaagttgcataattattattattattattataacaagtgtgtcttacgtgccaccacggcgttgtacctgtaggactctcattcgggatgattggaatagcttctggaatttgttcaagttttgggtatgtttaatctgttatgtactagtgttctgtttgttattgttttgttaattacaccataatgctaatttaaagagactccaaatctcaatgaagccagctcacagtgctgtgtgccccggtcacctagcaagctgccgaaccaaaagaatttgcaccccgctgcgggcccacgtggttggggccctgccctggcagggtcatcctgtgctcggaggccatctcgggcacaggcccaccccgccccacccctccagaacacggctcacgcttacctcaaccatcctggctgcggcgtctgtctgaaccacgcgggggccttgagggacgctttgtctgtcgtgatggggcaagggcacaagtcctggatgttgtgtgtatcgagaggccaaaggctggtggcaagtgcacggggcacagcggagtctgtcctgtgacgcgcaagtctgagggtctgggcggcgggcggctgggtctgtgcatttctggttgcaccgcggcgcttcccagcaccaacatgtaaccggcatgtttccagcagaagacaaaaagacaaacatgaaagtctagaaataaaactggtaaaacccca

SEQ ID NO: 298388 - DNA, 4032 bp, Homo sapiens
  misc_feature (56)..(56): n is a, c, g, or t
cggacgcgtgggtccggacgcgtgggtccggacgcgtgggtcgacccacgcgtcgnggactacaggggagttttgttgaagttgcaaagtcctggagcctccagagggctgtcggcgcagtagcagcgagcagcagagtccgcacgctccggcgaggggcagaagagcgcgagggagcgcggggcagcagaagcgagagccgagcgcggacccagccaggacccacagccctccccagctgcccaggaagagccccagccatggaacaccagctcctgtgctgcgaagtggaaaccatccgccgcgcgtaccccgatgccaacctcctcaacgaccgggtgctgcgggccatgctgaaggcggaggagacctgcgcgccctcggtgtcctacttcaaatgtgtgcagaaggaggtcctgccgtccatgcggaagatcgtcgccacctggatgctggaggtctgcgaggaacagaagtgcgaggaggaggtcttcccgctggccatgaactacctggaccgcttcctgtcgctggagcccgtgaaaaagagccgcctgcagctgctgggggccacttgcatgttcgtggcctctaagatgaaggagaccatccccctgacggccgagaagctgtgcatctacaccgacaactccatccggcccgaggagctgctgcaaatggagctgctcctggtgaacaagctcaagtggaacctggccgcaatgaccccgcacgatttcattgaacacttcctctccaaaatgccagaggcggaggagaacaaacagatcatccgcaaacacgcgcagaccttcgttgccctctgtgccacagatgtgaagttcatttccaatccgccctccatggtggcagcggggagcgtggtggccgcagtgcaaggcctgaacctgaggagccccaacaacttcctgtcctactaccgcctcacacgcttcctctccagagtgatcaagtgtgacccggactgcctccgggcctgccaggagcagatcgaagccctgctggagtcaagcctgcgccaggcccagcagaacatggaccccaaggccgccgaggaggaggaagaggaggaggaggaggtggacctggcttgcacacccaccgacgtgcgggacgtggacatctgagggcgccaggcaggcgggcgccaccgccacccgcagcgagggcggagccggccccaggtgctccactgacagtccctcctctccggagcattttgataccagaagggaaagcttcattctccttgttgttggttgttttttcctttgctctttcccccttccatctctgacttaagcaaaagaaaaagattacccaaaaactgtctttaaaagagagagagagaaaaaaaaaatagtatttgcataaccctgagcggtgggggaggagggttgtgctacagatgatagaggattttataccccaataatcaactcgtttttatattaatgtacttgtttctctgttgtaagaataggcattaacacaaaggaggcgtctcgggagaggattaggttccatcctttacgtgtttaaaaaaaagcataaaaacattttaaaaacatagaaaaattcagcaaaccatttttaaagtagaagagggttttaggtagaaaaacatattcttgtgcttttcctgataaagcacagctgtagtggggttctaggcatctctgtactttgcttgctcatatgcatgtagtcactttataagtcattgtatgttattatattccgtaggtagatgtgtaacctcttcaccttattcatggctgaagtcacctcttggttacagtagcgtagcgtggccgtgtgcatgtcctttgcgcctgtgaccaccaccccaacaaaccatccagtgacaaaccatccagtggaggtttgtcgggcaccagccagcgtagcagggtcgggaaaggccacctgtcccactcctacgatacgctactataaagagaagacgaaatagtgacataatatattctatttttatactcttcctatttttgtagtgacctgtttatgagatgctggttttctacccaacggccctgcagccagctcacgtccaggttcaacccacagctacttggtttgtgttcttcttcatattctaaaaccattccatttccaagcactttcagtccaataggtgtaggaaatagcgctgtttttgttgtgtgtgcagggagggcagttttctaatggaatggtttgggaatatccatgtacttgtttgcaagcaggactttgaggcaagtgtgggccactgtggtggcagtggaggtggggtgtttgggaggctgcgtgccagtcaagaagaaaaaggtttgcattctcacattgccaggatgataagttcctttccttttctttaaagaagttgaagtttaggaatcctttggtgccaactggtgtttgaaagtagggacctcagaggtttacctagagaacaggtggtttttaagggttatcttagatgtttcacaccggaaggtttttaaacactaaaatatataatttatagttaaggctaaaaagtatatttattgcagaggatgttcataaggccagtatgatttataaatgcaatctccccttgatttaaacacacagatacacacacacacacacacacacacacaaaccttctgcctttgatgttacagatttaatacagtttatttttaaagatagatccttttataggtgagaaaaaaacaatctggaagaaaaaaaccacacaaagacattgattcagcctgtttggcgtttcccagagtcatctgattggacaggcatgggtgcaaggaaaattagggtactcaacctaagttcggttccgatgaattcttatcccctgccccttcctttaaaaaacttagtgacaaaatagacaatttgcacatcttggctatgtaattcttgtaatttttatttaggaagtgttgaagggaggtggcaagagtgtggaggctgacgtgtgagggaggacaggcgggaggaggtgtgaggaggaggctcccgaggggaaggggcggtgcccacaccggggacaggccgcagctccattttcttattgcgctgctaccgttgacttccaggcacggtttggaaatattcacatcgcttctgtgtatctctttcacattgtttgctgctattggaggatcagttttttgttttacaatgtcatatactgccatgtactagttttagttttctcttagaacattgtattacagatgccttttttgtagttttttttttttttatgtgatcaatttggacttaatgtgattactgctctattccaaaaaggttgctgtttcacaatacctcatgcttcacttagccatggtggacccagcgggcaggttctgcctgctttggcgggcagacacgcgggcgcgatcccacacaggctggcgggggccggccccgaggccgcgtgcgtgagaaccgcgccggtgtccccagagaccaggctgtgtccctcttctcttccctgcgcctgtgatgctgggcacttcatctgatcgggggcgtagcatcatagtagtttttacagctgtgttattctttgcgtgtagctatggaagttgcataattattattattattattataacaagtgtgtcttacgtgccaccacggcgttgtacctgtaggactctcattcgggatgattggaatagcttctggaatttgttcaagttttgggtatgtttaatctgttatgtactagtgttctgtttgttattgttttgttaattacaccataatgctaatttaaagagactccaaatctcaatgaagccagctcacaacagcggagtctgtcctgtgacgcgcaagtctgagggtctgggcggcgggcggctgggtctgtgcatttctggttgcaccgcggcgcttcccagcaccaacatgtaaccggcatgtttccagcagaagacaaaaagacaaacatgaaagtctagaaataaaactggtaaaacccca

SEQ ID NO: 298389 - DNA, 3795 bp, Homo sapiens
tggtgatctagagatccccattactcacgcaaagtaatatgaaagatagatccttttataggtgagaaaaaaacaatctggaagaaaaaaaccacacaaagacattgattcagcctgtttggcgtttcccagagtcatctgattggacaggcatgggtgcaaggaaaattagggtactcaacctaagttcggttccgatgaattcttatcccctgccccttcctttaaaaaacttagtgacaaaatagacaatttgcacatcttggctatgtaattcttgtaatttttatttaggaagtgttgaagggaggtggcaagagtgtggaggctgacgtgtgagggaggacaggcgggaggaggtctgaggagccccaacaacttcctgtcctactaccgcctcacacgcttcctctccagagtgatcaagtgtgacccggactgcctccgggcctgccaggagcagatcgaagccctgctggagtcaagcctgcgccaggcccagcagaacatggaccccaaggccgccgaggaggaggaagaggaggaggaggaggtggacctggcttgcacacccaccgacgtgcgggacgtggacatctgagggcgccaggcaggcgggcgccaccgccacccgcagcgagggcggagccggccccaggtgctccactgacagtccctcctctccggagcattttgataccagaagggaaagcttcattctccttgttgttggttgttttttcctttgctctttcccccttccatctctgacttaagcaaaagaaaaagattacccaaaaactgtctttaaaagagagagagagaaaaaaaaaatagtatttgcataaccctgagcggtgggggaggagggttgtgctacagatgatagaggattttataccccaataatcaactcgtttttatattaatgtacttgtttctctgttgtaagaataggcattaacacaaaggaggcgtctcgggagaggattaggttccatcctttacgtgtttaaaaaaaagcataaaaacattttaaaaacatagaaaaattcagcaaaccatttttaaagtagaagagggttttaggtagaaaaacatattcttgtgcttttcctgataaagcacagctgtagtggggttctaggcatctctgtactttgcttgctcatatgcatgtagtcactttataagtcattgtatgttattatattccgtaggtagatgtgtaacctcttcaccttattcatggctgaagtcacctcttggttacagtagcgtagcgtggccgtgtgcatgtcctttgcgcctgtgaccaccaccccaacaaaccatccagtgacaaaccatccagtggaggtttgtcgggcaccagccagcgtagcagggtcgggaaaggccacctgtcccactcctacgatacgctactataaagagaagacgaaatagtgacataatatattctatttttatactcttcctatttttgtagtgacctgtttatgagatgctggttttctacccaacggccctgcagccagctcacgtccaggttcaacccacagctacttggtttgtgttcttcttcatattctaaaaccattccatttccaagcactttcagtccaataggtgtaggaaatagcgctgtttttgttgtgtgtgcagggagggcagttttctaatggaatggtttgggaatatccatgtacttgtttgcaagcaggactttgaggcaagtgtgggccactgtggtggcagtggaggtggggtgtttgggaggctgcgtgccagtcaagaagaaaaaggtttgcattctcacattgccaggatgataagttcctttccttttctttaaagaagttgaagtttaggaatcctttggtgccaactggtgtttgaaagtagggacctcagaggtttacctagagaacaggtggtttttaagggttatcttagatgtttcacaccggaaggtttttaaacactaaaatatataatttatagttaaggctaaaaagtatatttattgcagaggatgttcataaggccagtatgatttataaatgcaatctccccttgatttaaacacacagatacacacacacacacacacacacacacaaaccttctgcctttgatgttacagatttaatacagtttatttttaaagatagatccttttataggtgagaaaaaaacaatctggaagaaaaaaaccacacaaagacattgattcagcctgtttggcgtttcccagagtcatctgattggacaggcatgggtgcaaggaaaattagggtactcaacctaagttcggttccgatgaattcttatcccctgccccttcctttaaaaaacttagtgacaaaatagacaatttgcacatcttggctatgtaattcttgtaatttttatttaggaagtgttgaagggaggtggcaagagtgtggaggctgacgtgtgagggaggacaggcgggaggaggtgtgaggaggaggctcccgaggggaaggggcggtgcccacaccggggacaggccgcagctccattttcttattgcgctgctaccgttgacttccaggcacggtttggaaatattcacatcgcttctgtgtatctctttcacattgtttgctgctattggaggatcagttttttgttttacaatgtcatatactgccatgtactagttttagttttctcttagaacattgtattacagatgccttttttgtagttttttttttttttatgtgatcaatttggacttaatgtgattactgctctattccaaaaaggttgctgtttcacaatacctcatgcttcacttagccatggtggacccagcgggcaggttctgcctgctttggcgggcagacacgcgggcgcgatcccacacaggctggcgggggccggccccgaggccgcgtgcgtgagaaccgcgccggtgtccccagagaccaggctgtgtccctcttctcttccctgcgcctgtgatgctgggcacttcatctgatcgggggcgtagcatcatagtagtttttacagctgtgttattctttgcgtgtagctatggaagttgcataattattattattattattataacaagtgtgtcttacgtgccaccacggcgttgtacctgtaggactctcattcgggatgattggaatagcttctggaatttgttcaagttttgggtatgtttaatctgttatgtactagtgttctgtttgttattgttttgttaattacaccataatgctaatttaaagagactccaaatctcaatgaagccagctcacagtgctgtgtgccccggtcacctagcaagctgccgaaccaaaagaatttgcaccccgctgcgggcccacgtggttggggccctgccctggcagggtcatcctgtgctcggaggccatctcgggcacaggcccaccccgccccacccctccagaacacggctcacgcttacctcaaccatcctggctgcggcgtctgtctgaaccacgcgggggccttgagggacgctttgtctgtcgtgatggggcaagggcacaagtcctggatgttgtgtgtatcgagaggccaaaggctggtggcaagtgcacggggcacagcggagtctgtcctgtgacgcgcaagtctgagggtctgggcggcgggcggctgggtctgtgcatttctggttgcaccgcggcgcttcccagcaccaacatgtaaccggcatgtttccagcagaagacaaaaagacaaacatgaaagtctagaaataaaactggtaaaacccca

SEQ ID NO: 298390 - DNA, 3895 bp, Homo sapiens
  misc_feature (56)..(56): n is a, c, g, or t
cggacgcgtgggtccggacgcgtgggtccggacgcgtgggtcgacccacgcgtcgnggactacaggggagttttgttgaagttgcaaagtcctggagcctccagagggctgtcggcgcagtagcagcgagcagcagagtccgcacgctccggcgaggggcagaagagcgcgagggagcgcggggcagcagaagcgagagccgagcgcggacccagccaggacccacagccctccccagctgcccaggaagagccccagccatggaacaccagctcctgtgctgcgaagtggaaaccatccgccgcgcgtaccccgatgccaacctcctcaacgaccgggtgctgcgggccatgctgaaggcggaggagacctgcgcgccctcggtgtcctacttcaaatgtgtgcagaaggaggtcctgccgtccatgcggaagatcgtcgccacctggatgctggaggtctgcgaggaacagaagtgcgaggaggaggtcttcccgctggccatgaactacctggaccgcttcctgtcgctggagcccgtgaaaaagagccgcctgcagctgctgggggccacttgcatgttcgtggcctctaagatgaaggagaccatccccctgacggccgagaagctgtgcatctacaccgacaactccatccggcccgaggagctgctgcaaatggagctgctcctggtgaacaagctcaagtggaacctggccgcaatgaccccgcacgatttcattgaacacttcctctccaaaatgccagaggcggaggagaacaaacagatcatccgcaaacacgcgcagaccttcgttgccctctgtgccacagatgtgaagttcatttccaatccgccctccatggtggcagcggggagcgtggtggccgcagtgcaaggcctgaacctgaggagccccaacaacttcctgtcctactaccgcctcacacgcttcctctccagagtgatcaagtgtgacccggactgcctccgggcctgccaggagcagatcgaagccctgctggagtcaagcctgcgccaggcccagcagaacatggaccccaaggccgccgaggaggaggaagaggaggaggaggaggtggacctggcttgcacacccaccgacgtgcgggacgtggacatctgagggcgccaggcaggcgggcgccaccgccacccgcagcgagggcggagccggccccaggtgctccactgacagtccctcctctccggagcattttgataccagaagggaaagcttcattctccttgttgttggttgttttttcctttgctctttcccccttccatctctgacttaagcaaaagaaaaagattacccaaaaactgtctttaaaagagagagagagaaaaaaaaaatagtatttgcataaccctgagcggtgggggaggagggttgtgctacagatgatagaggattttataccccaataatcaactcgtttttatattaatgtacttgtttctctgttgtaagaataggcattaacacaaaggaggcgtctcgggagaggattaggttccatcctttacgtgtttaaaaaaaagcataaaaacattttaaaaacatagaaaaattcagcaaaccatttttaaagtagaagagggttttaggtagaaaaacatattcttgtgcttttcctgataaagcacagctgtagtggggttctaggcatctctgtactttgcttgctcatatgcatgtagtcactttataagtcattgtatgttattatattccgtaggtagatgtgtaacctcttcaccttattcatggctgaagtcacctcttggttacagtagcgtagcgtggccgtgtgcatgtcctttgcgcctgtgaccaccaccccaacaaaccatccagtgacaaaccatccagtggaggtttgtcgggcaccagccagcgtagcagggtcgggaaaggccacctgtcccactcctacgatacgctactataaagagaagacgaaatagtgacataatatattctatttttatactcttcctatttttgtagtgacctgtttatgagatgctggttttctacccaacggccctgcagccagctcacgtccaggttcaacccacagctacttggtttgtgttcttcttcatattctaaaaccattccatttccaagcactttcagtccaataggtgtaggaaatagcgctgtttttgttgtgtgtgcagggagggcagttttctaatggaatggtttgggaatatccatgtacttgtttgcaagcaggactttgaggcaagtgtgggccactgtggtggcagtggaggtggggtgtttgggaggctgcgtgccagtcaagaagaaaaaggtttgcattctcacattgccaggatgataagttcctttccttttctttaaagaagttgaagtttaggaatcctttggtgccaactggtgtttgaaagtagggacctcagaggtttacctagagaacaggtggtttttaagggttatcttagatgtttcacaccggaaggtttttaaacactaaaatatataatttatagttaaggctaaaaagtatatttattgcagaggatgttcataaggccagtatgatttataaatgcaatctccccttgatttaaacacacagatacacacacacacacacacacacacacaaaccttctgcctttgatgttacagatttaatacagtttatttttaaagatagatccttttataggtgagaaaaaaacaatctggaagaaaaaaaccacacaaagacattgattcagcctgtttggcgtttcccagagtcatctgattggacaggcatgggtgcaaggaaaattagggtactcaacctaagttcggttccgatgaattcttatcccctgccccttcctttaaaaaacttagtgacaaaatagacaatttgcacatcttggctatgtaattcttgtaatttttatttaggaagtgttgaagggaggtggcaagagtgtggaggctgacgtgtgagggaggacaggcgggaggaggtgtgaggaggaggctcccgaggggaaggggcggtgcccacaccggggacaggccgcagctccattttcttattgcgctgctaccgttgacttccaggcacggtttggaaatattcacatcgcttctgtgtatctctttcacattgtttgctgctattggaggatcagttttttgttttacaatgtcatatactgccatgtactagttttagttttctcttagaacattgtattacagatgccttttttgtagttttttttttttttatgtgatcaatttggacttaatgtgattactgctctattccaaaaaggttgctgtttcacaatacctcatgcttcacttagccatggtggacccagcgggcaggttctgcctgctttggcgggcagacacgcgggcgcgatcccacacaggctggcgggggccggccccgaggccgcgtgcgtgagaaccgcgccggtgtccccagagaccaggctgtgtccctcttctcttccctgcgcctgtgatgctgggcacttcatctgatcgggggcgtagcatcatagtagtttttacagctgtgttattctttgcgtgtagctatggaagttgcataattattattattattattataacaagtgtgtcttacgtgccaccacggcgttgtacctgtaggactctcattcgggatgattggaatagcttctggaatttgttcaagttttgggtatgtttaatctgttatgtactagtgttctgtttgttattgttttgttttgtttgagacggagtctccctctgttacccggctggagtgcatggccgatcccggcccccgcacccccgcctcccggtcctcgctccccgcctcg

SEQ ID NO: 298391 - DNA, 3977 bp, Homo sapiens
  misc_feature (56)..(56): n is a, c, g, or t
cggacgcgtgggtccggacgcgtgggtccggacgcgtgggtcgacccacgcgtcgnggactacaggggagttttgttgaagttgcaaagtcctggagcctccagagggctgtcggcgcagtagcagcgagcagcagagtccgcacgctccggcgaggggcagaagagcgcgagggagcgcggggcagcagaagcgagagccgagcgcggacccagccaggacccacagccctccccagctgcccaggaagagccccagccatggaacaccagctcctgtgctgcgaagtggaaaccatccgccgcgcgtaccccgatgccaacctcctcaacgaccgggtgctgcgggccatgctgaaggcggaggagacctgcgcgccctcggtgtcctacttcaaatgtgtgcagaaggaggtcctgccgtccatgcggaagatcgtcgccacctggatgctggaggtctgcgaggaacagaagtgcgaggaggaggtcttcccgctggccatgaactacctggaccgcttcctgtcgctggagcccgtgaaaaagagccgcctgcagctgctgggggccacttgcatgttcgtggcctctaagatgaaggagaccatccccctgacggccgagaagctgtgcatctacaccgacaactccatccggcccgaggagctgctgcaaatggagctgctcctggtgaacaagctcaagtggaacctggccgcaatgaccccgcacgatttcattgaacacttcctctccaaaatgccagaggcggaggagaacaaacagatcatccgcaaacacgcgcagaccttcgttgccctctgtgccacagatgtgaagttcatttccaatccgccctccatggtggcagcggggagcgtggtggccgcagtgcaaggcctgaacctgaggagccccaacaacttcctgtcctactaccgcctcacacgcttcctctccagagtgatcaagtgtgacccggactgcctccgggcctgccaggagcagatcgaagccctgctggagtcaagcctgcgccaggcccagcagaacatggaccccaaggccgccgaggaggaggaagaggaggaggaggaggtggacctggcttgcacacccaccgacgtgcgggacgtggacatctgagggcgccaggcaggcgggcgccaccgccacccgcagcgagggcggagccggccccaggtgctccactgacagtccctcctctccggagcattttgataccagaagggaaagcttcattctccttgttgttggttgttttttcctttgctctttcccccttccatctctgacttaagcaaaagaaaaagattacccaaaaactgtctttaaaagagagagagagaaaaaaaaaatagtatttgcataaccctgagcggtgggggaggagggttgtgctacagatgatagaggattttataccccaataatcaactcgtttttatattaatgtacttgtttctctgttgtaagaataggcattaacacaaaggaggcgtctcgggagaggattaggttccatcctttacgtgtttaaaaaaaagcataaaaacattttaaaaacatagaaaaattcagcaaaccatttttaaagtagaagagggttttaggtagaaaaacatattcttgtgcttttcctgataaagcacagctgtagtggggttctaggcatctctgtactttgcttgctcatatgcatgtagtcactttataagtcattgtatgttattatattccgtaggtagatgtgtaacctcttcaccttattcatggctgaagtcacctcttggttacagtagcgtagcgtggccgtgtgcatgtcctttgcgcctgtgaccaccaccccaacaaaccatccagtgacaaaccatccagtggaggtttgtcgggcaccagccagcgtagcagggtcgggaaaggccacctgtcccactcctacgatacgctactataaagagaagacgaaatagtgacataatatattctatttttatactcttcctatttttgtagtgacctgtttatgagatgctggttttctacccaacggccctgcagccagctcacgtccaggttcaacccacagctacttggtttgtgttcttcttcatattctaaaaccattccatttccaagcactttcagtccaataggtgtaggaaatagcgctgtttttgttgtgtgtgcagggagggcagttttctaatggaatggtttgggaatatccatgtacttgtttgcaagcaggactttgaggcaagtgtgggccactgtggtggcagtggaggtggggtgtttgggaggctgcgtgccagtcaagaagaaaaaggtttgcattctcacattgccaggatgataagttcctttccttttctttaaagaagttgaagtttaggaatcctttggtgccaactggtgtttgaaagtagggacctcagaggtttacctagagaacaggtggtttttaagggttatcttagatgtttcacaccggaaggtttttaaacactaaaatatataatttatagttaaggctaaaaagtatatttattgcagaggatgttcataaggccagtatgatttataaatgcaatctccccttgatttaaacacacagatacacacacacacacacacacacacacaaaccttctgcctttgatgttacagatttaatacagtttatttttaaagatagatccttttataggtgagaaaaaaacaatctggaagaaaaaaaccacacaaagacattgattcagcctgtttggcgtttcccagagtcatctgattggacaggcatgggtgcaaggaaaattagggtactcaacctaagttcggttccgatgaattcttatcccctgccccttcctttaaaaaacttagtgacaaaatagacaatttgcacatcttggctatgtaattcttgtaatttttatttaggaagtgttgaagggaggtggcaagagtgtggaggctgacgtgtgagggaggacaggcgggaggaggtgtgaggaggaggctcccgaggggaaggggcggtgcccacaccggggacaggccgcagctccattttcttattgcgctgctaccgttgacttccaggcacggtttggaaatattcacatcgcttctgtgtatctctttcacattgtttgctgctattggaggatcagttttttgttttacaatgtcatatactgccatgtactagttttagttttctcttagaacattgtattacagatgccttttttgtagttttttttttttttatgtgatcaatttggacttaatgtgattactgctctattccaaaaaggttgctgtttcacaatacctcatgcttcacttagccatggtggacccagcgggcaggttctgcctgctttggcgggcagacacgcgggcgcgatcccacacaggctggcgggggccggccccgaggccgcgtgcgtgagaaccgcgccggtgtccccagagaccaggctgtgtccctcttctcttccctgcgcctgtgatgctgggcacttcatctgatcgggggcgtagcatcatagtagtttttacagctgtgttattctttgcgtgtagctatggaagttgcataattattattattattattataacaagtgtgtcttacgtgccaccacggcgttgtacctgtaggactctcattcgggacgctttgtctgtcgtgatggggcaagggcacaagtcctggatgttgtgtgtatcgagaggccaaaggctggtggcaagtgcacggggcacagcggagtctgtcctgtgacgcgcaagtctgagggtctgggcggcgggcggctgggtctgtgcatttctggttgcaccgcggcgcttcccagcaccaacatgtaaccggcatgtttccagcagaagacaaaaagacaaacatgaaagtctagaaataaaactggtaaaacccca

SEQ ID NO: 298392 - DNA, 4063 bp, Homo sapiens
  misc_feature (56)..(56): n is a, c, g, or t
cggacgcgtgggtccggacgcgtgggtccggacgcgtgggtcgacccacgcgtcgnggactacaggggagttttgttgaagttgcaaagtcctggagcctccagagggctgtcggcgcagtagcagcgagcagcagagtccgcacgctccggcgaggggcagaagagcgcgagggagcgcggggcagcagaagcgagagccgagcgcggacccagccaggacccacagccctccccagctgcccaggaagagccccagccatggaacaccagctcctgtgctgcgaagtggaaaccatccgccgcgcgtaccccgatgccaacctcctcaacgaccgggtgctgcgggccatgctgaaggcggaggagacctgcgcgccctcggtgtcctacttcaaatgtgtgcagaaggaggtcctgccgtccatgcggaagatcgtcgccacctggatgctggaggtctgcgaggaacagaagtgcgaggaggaggtcttcccgctggccatgaactacctggaccgcttcctgtcgctggagcccgtgaaaaagagccgcctgcagctgctgggggccacttgcatgttcgtggcctctaagatgaaggagaccatccccctgacggccgagaagctgtgcatctacaccgacaactccatccggcccgaggagctgctgcaaatggagctgctcctggtgaacaagctcaagtggaacctggccgcaatgaccccgcacgatttcattgaacacttcctctccaaaatgccagaggcggaggagaacaaacagatcatccgcgaggaacagaagtgcgaggaggaggtcttcccgctggccatgaactacctggaccgcttcctgtcgctggagcccgtgaaaaagggcgggcgccaccgccacccgcagcgagggcggagccggccccaggtgctccactgacagtccctcctctccggagcattttgataccagaagggaaagcttcattctccttgttgttggttgttttttcctttgctctttcccccttccatctctgacttaagcaaaagaaaaagattacccaaaaactgtctttaaaagagagagagagaaaaaaaaaatagtatttgcataaccctgagcggtgggggaggagggttgtgctacagatgatagaggattttataccccaataatcaactcgtttttatattaatgtacttgtttctctgttgtaagaataggcattaacacaaaggaggcgtctcgggagaggattaggttccatcctttacgtgtttaaaaaaaagcataaaaacattttaaaaacatagaaaaattcagcaaaccatttttaaagtagaagagggttttaggtagaaaaacatattcttgtgcttttcctgataaagcacagctgtagtggggttctaggcatctctgtactttgcttgctcatatgcatgtagtcactttataagtcattgtatgttattatattccgtaggtagatgtgtaacctcttcaccttattcatggctgaagtcacctcttggttacagtagcgtagcgtggccgtgtgcatgtcctttgcgcctgtgaccaccaccccaacaaaccatccagtgacaaaccatccagtggaggtttgtcgggcaccagccagcgtagcagggtcgggaaaggccacctgtcccactcctacgatacgctactataaagagaagacgaaatagtgacataatatattctatttttatactcttcctatttttgtagtgacctgtttatgagatgctggttttctacccaacggccctgcagccagctcacgtccaggttcaacccacagctacttggtttgtgttcttcttcatattctaaaaccattccatttccaagcactttcagtccaataggtgtaggaaatagcgctgtttttgttgtgtgtgcagggagggcagttttctaatggaatggtttgggaatatccatgtacttgtttgcaagcaggactttgaggcaagtgtgggccactgtggtggcagtggaggtggggtgtttgggaggctgcgtgccagtcaagaagaaaaaggtttgcattctcacattgccaggatgataagttcctttccttttctttaaagaagttgaagtttaggaatcctttggtgccaactggtgtttgaaagtagggacctcagaggtttacctagagaacaggtggtttttaagggttatcttagatgtttcacaccggaaggtttttaaacactaaaatatataatttatagttaaggctaaaaagtatatttattgcagaggatgttcataaggccagtatgatttataaatgcaatctccccttgatttaaacacacagatacacacacacacacacacacacacacaaaccttctgcctttgatgttacagatttaatacagtttatttttaaagatagatccttttataggtgagaaaaaaacaatctggaagaaaaaaaccacacaaagacattgattcagcctgtttggcgtttcccagagtcatctgattggacaggcatgggtgcaaggaaaattagggtactcaacctaagttcggttccgatgaattcttatcccctgccccttcctttaaaaaacttagtgacaaaatagacaatttgcacatcttggctatgtaattcttgtaatttttatttaggaagtgttgaagggaggtggcaagagtgtggaggctgacgtgtgagggaggacaggcgggaggaggtgtgaggaggaggctcccgaggggaaggggcggtgcccacaccggggacaggccgcagctccattttcttattgcgctgctaccgttgacttccaggcacggtttggaaatattcacatcgcttctgtgtatctctttcacattgtttgctgctattggaggatcagttttttgttttacaatgtcatatactgccatgtactagttttagttttctcttagaacattgtattacagatgccttttttgtagttttttttttttttatgtgatcaatttggacttaatgtgattactgctctattccaaaaaggttgctgtttcacaatacctcatgcttcacttagccatggtggacccagcgggcaggttctgcctgctttggcgggcagacacgcgggcgcgatcccacacaggctggcgggggccggccccgaggccgcgtgcgtgagaaccgcgccggtgtccccagagaccaggctgtgtccctcttctcttccctgcgcctgtgatgctgggcacttcatctgatcgggggcgtagcatcatagtagtttttacagctgtgttattctttgcgtgtagctatggaagttgcataattattattattattattataacaagtgtgtcttacgtgccaccacggcgttgtacctgtaggactctcattcgggatgattggaatagcttctggaatttgttcaagttttgggtatgtttaatctgttatgtactagtgttctgtttgttattgttttgttaattacaccataatgctaatttaaagagactccaaatctcaatgaagccagctcacagtgctgtgtgccccggtcacctagcaagctgccgaaccaaaagaatttgcaccccgctgcgggcccacgtggttggggccctgccctggcagggtcatcctgtgctcggaggccatctcgggcacaggcccaccccgccccacccctccagaacacggctcacgcttacctcaaccatcctggctgcggcgtctgtctgaaccacgcgggggccttgagggacgctttgtctgtcgtgatggggcaagggcacaagtcctggatgttgtgtgtatcgagaggccaaaggctggtggcaagtgcacggggcacagcggagtctgtcctgtgacgcgcaagtctgagggtctgggcggcgggcggctgggtctgtgcatttctggttgcaccgcggcgcttcccagcaccaacatgtaaccggcatgtttccagcagaagacaaaaagacaaacatgaaagtctagaaataaaactggtaaaacccca

SEQ ID NO: 298393 - DNA, 3661 bp, Homo sapiens
  misc_feature (56)..(56): n is a, c, g, or t
cggacgcgtgggtccggacgcgtgggtccggacgcgtgggtcgacccacgcgtcgnggactacaggggagttttgttgaagttgcaaagtcctggagcctccagagggctgtcggcgcagtagcagcgagcagcagagtccgcacgctccggcgaggggcagaagagcgcgagggagcgcggggcagcagaagcgagagccgagcgcggacccagccaggacccacagccctccccagctgcccaggaagagccccagccatggaacaccagctcctgtgctgcgaagtggaaaccatccgccgcgcgtaccccgatgccaacctcctcaacgaccgggtgctgcgggccatgctgaaggcggaggagacctgcgcgccctcggtgtcctacttcaaatgtgtgcagaaggaggaggaggtggacctggcttgcacacccaccgacgtgcgggacgtggacatctgagggcgccaggcaggcgggcgccaccgccacccgcagcgagggcggagccggccccaggtgctccactgacagtccctcctctccggagcattttgataccagaagggaaagcttcattctccttgttgttggttgttttttcctttgctctttcccccttccatctctgacttaagcaaaagaaaaagattacccaaaaactgtctttaaaagagagagagagaaaaaaaaaatagtatttgcataaccctgagcggtgggggaggagggttgtgctacagatgatagaggattttataccccaataatcaactcgtttttatattaatgtacttgtttctctgttgtaagaataggcattaacacaaaggaggcgtctcgggagaggattaggttccatcctttacgtgtttaaaaaaaagcataaaaacattttaaaaacatagaaaaattcagcaaaccatttttaaagtagaagagggttttaggtagaaaaacatattcttgtgcttttcctgataaagcacagctgtagtggggttctaggcatctctgtactttgcttgctcatatgcatgtagtcactttataagtcattgtatgttattatattccgtaggtagatgtgtaacctcttcaccttattcatggctgaagtcacctcttggttacagtagcgtagcgtggccgtgtgcatgtcctttgcgcctgtgaccaccaccccaacaaaccatccagtgacaaaccatccagtggaggtttgtcgggcaccagccagcgtagcagggtcgggaaaggccacctgtcccactcctacgatacgctactataaagagaagacgaaatagtgacataatatattctatttttatactcttcctatttttgtagtgacctgtttatgagatgctggttttctacccaacggccctgcagccagctcacgtccaggttcaacccacagctacttggtttgtgttcttcttcatattctaaaaccattccatttccaagcactttcagtccaataggtgtaggaaatagcgctgtttttgttgtgtgtgcagggagggcagttttctaatggaatggtttgggaatatccatgtacttgtttgcaagcaggactttgaggcaagtgtgggccactgtggtggcagtggaggtggggtgtttgggaggctgcgtgccagtcaagaagaaaaaggtttgcattctcacattgccaggatgataagttcctttccttttctttaaagaagttgaagtttaggaatcctttggtgccaactggtgtttgaaagtagggacctcagaggtttacctagagaacaggtggtttttaagggttatcttagatgtttcacaccggaaggtttttaaacactaaaatatataatttatagttaaggctaaaaagtatatttattgcagaggatgttcataaggccagtatgatttataaatgcaatctccccttgatttaaacacacagatacacacacacacacacacacacacacaaaccttctgcctttgatgttacagatttaatacagtttatttttaaagatagatccttttataggtgagaaaaaaacaatctggaagaaaaaaaccacacaaagacattgattcagcctgtttggcgtttcccagagtcatctgattggacaggcatgggtgcaaggaaaattagggtactcaacctaagttcggttccgatgaattcttatcccctgccccttcctttaaaaaacttagtgacaaaatagacaatttgcacatcttggctatgtaattcttgtaatttttatttaggaagtgttgaagggaggtggcaagagtgtggaggctgacgtgtgagggaggacaggcgggaggaggtgtgaggaggaggctcccgaggggaaggggcggtgcccacaccggggacaggccgcagctccattttcttattgcgctgctaccgttgacttccaggcacggtttggaaatattcacatcgcttctgtgtatctctttcacattgtttgctgctattggaggatcagttttttgttttacaatgtcatatactgccatgtactagttttagttttctcttagaacattgtattacagatgccttttttgtagttttttttttttttatgtgatcaatttggacttaatgtgattactgctctattccaaaaaggttgctgtttcacaatacctcatgcttcacttagccatggtggacccagcgggcaggttctgcctgctttggcgggcagacacgcgggcgcgatcccacacaggctggcgggggccggccccgaggccgcgtgcgtgagaaccgcgccggtgtccccagagaccaggctgtgtccctcttctcttccctgcgcctgtgatgctgggcacttcatctgatcgggggcgtagcatcatagtagtttttacagctgtgttattctttgcgtgtagctatggaagttgcataattattattattattattataacaagtgtgtcttacgtgccaccacggcgttgtacctgtaggactctcattcgggatgattggaatagcttctggaatttgttcaagttttgggtatgtttaatctgttatgtactagtgttctgtttgttattgttttgttaattacaccataatgctaatttaaagagactccaaatctcaatgaagccagctcacagtgctgtgtgccccggtcacctagcaagctgccgaaccaaaagaatttgcaccccgctgcgggcccacgtggttggggccctgccctggcagggtcatcctgtgctcggaggccatctcgggcacaggcccaccccgccccacccctccagaacacggctcacgcttacctcaaccatcctggctgcggcgtctgtctgaaccacgcgggggccttgagggacgctttgtctgtcgtgatggggcaagggcacaagtcctggatgttgtgtgtatcgagaggccaaaggctggtggcaagtgcacggggcacagcggagtctgtcctgtgacgcgcaagtctgagggtctgggcggcgggcggctgggtctgtgcatttctggttgcaccgcggcgcttcccagcaccaacatgtaaccggcatgtttccagcagaagacaaaaagacaaacatgaaagtctagaaataaaactggtaaaacccca

SEQ ID NO: 298394 - DNA, 3038 bp, Homo sapiens
  misc_feature (56)..(56): n is a, c, g, or t
cggacgcgtgggtccggacgcgtgggtccggacgcgtgggtcgacccacgcgtcgnggactacaggggagttttgttgaagttgcaaagtcctggagcctccagagggctgtcggcgcagtagcagcgagcagcagagtccgcacgctccggcgaggggcagaagagcgcgagggagcgcggggcagcagaagcgagagccgagcgcggacccagccaggacccacagccctccccagctgcccaggaagagccccagccatggaacaccagctcctgtgctgcgaagtggaaaccatccgccgcgcgtaccccgatgccaacctcctcaacgaccgggtgctgcgggccatgctgaaggcggaggagacctgcgcgccctcggtgtcctacttcaaatgtgtgcagaaggaggtcctgccgtccatgcggaagatcgtcgccacctggatgctggaggtctgcgaggaacagaagtgcgaggaggaggtcttcccgctggccatgaactacctggaccgcttcctgtcgctggagcccgtgaaaaagagccgcctgcagctgctgggggccacttgcatgttcgtggcctctaagatgaaggagaccatccccctgacggccgagaagctgtgcatctacaccgacaactccatccggcccgaggagctgctgcaaatggagctgctcctggtgaacaagctcaagtggaacctggccgcaatgaccccgcacgatttcattgaacacttcctctccaaaatgccagaggcggaggagaacaaacagatcatccgcaaacacgcgcagaccttcgttgccctctgtgccacagatgtgaagttcatttccaatccgccctccatggtggcagcggggagcgtggtggccgcagtgcaaggcctgaacctgaggagccccaacaacttcctgtcctactaccgcctcacacgcttcctctccagagtgatcaagtgtgacccgtgtgggccactgtggtggcagtggaggtggggtgtttgggaggctgcgtgccagtcaagaagaaaaaggtttgcattctcacattgccaggatgataagttcctttccttttctttaaagaagttgaagtttaggaatcctttggtgccaactggtgtttgaaagtagggacctcagaggtttacctagagaacaggtggtttttaagggttatcttagatgtttcacaccggaaggtttttaaacactaaaatatataatttatagttaaggctaaaaagtatatttattgcagaggatgttcataaggccagtatgatttataaatgcaatctccccttgatttaaacacacagatacacacacacacacacacacacacacaaaccttctgcctttgatgttacagatttaatacagtttatttttaaagatagatccttttataggtgagaaaaaaacaatctggaagaaaaaaaccacacaaagacattgattcagcctgtttggcgtttcccagagtcatctgattggacaggcatgggtgcaaggaaaattagggtactcaacctaagttcggttccgatgaattcttatcccctgccccttcctttaaaaaacttagtgacaaaatagacaatttgcacatcttggctatgtaattcttgtaatttttatttaggaagtgttgaagggaggtggcaagagtgtggaggctgacgtgtgagggaggacaggcgggaggaggtgtgaggaggaggctcccgaggggaaggggcggtgcccacaccggggacaggccgcagctccattttcttattgcgctgctaccgttgacttccaggcacggtttggaaatattcacatcgcttctgtgtatctctttcacattgtttgctgctattggaggatcagttttttgttttacaatgtcatatactgccatgtactagttttagttttctcttagaacattgtattacagatgccttttttgtagttttttttttttttatgtgatcaatttggacttaatgtgattactgctctattccaaaaaggttgctgtttcacaatacctcatgcttcacttagccatggtggacccagcgggcaggttctgcctgctttggcgggcagacacgcgggcgcgatcccacacaggctggcgggggccggccccgaggccgcgtgcgtgagaaccgcgccggtgtccccagagaccaggctgtgtccctcttctcttccctgcgcctgtgatgctgggcacttcatctgatcgggggcgtagcatcatagtagtttttacagctgtgttattctttgcgtgtagctatggaagttgcataattattattattattattataacaagtgtgtcttacgtgccaccacggcgttgtacctgtaggactctcattcgggatgattggaatagcttctggaatttgttcaagttttgggtatgtttaatctgttatgtactagtgttctgtttgttattgttttgttaattacaccataatgctaatttaaagagactccaaatctcaatgaagccagctcacagtgctgtgtgccccggtcacctagcaagctgccgaaccaaaagaatttgcaccccgctgcgggcccacgtggttggggccctgccctggcagggtcatcctgtgctcggaggccatctcgggcacaggcccaccccgccccacccctccagaacacggctcacgcttacctcaaccatcctggctgcggcgtctgtctgaaccacgcgggggccttgagggacgctttgtctgtcgtgatggggcaagggcacaagtcctggatgttgtgtgtatcgagaggccaaaggctggtggcaagtgcacggggcacagcggagtctgtcctgtgacgcgcaagtctgagggtctgggcggcgggcggctgggtctgtgcatttctggttgcaccgcggcgcttcccagcaccaacatgtaaccggcatgtttccagcagaagacaaaaagacaaacatgaaagtctagaaataaaactggtaaaacccca

SEQ ID NO: 298395 - DNA, 3504 bp, Homo sapiens
  misc_feature (56)..(56): n is a, c, g, or t
cggacgcgtgggtccggacgcgtgggtccggacgcgtgggtcgacccacgcgtcgnggactacaggggagttttgttgaagttgcaaagtcctggagcctccagagggctgtcggcgcagtagcagcgagcagcagagtccgcacgctccggcgaggggcagaagagcgcgagggagcgcggggcagcagaagcgagagccgagcgcggacccagccaggacccacagccctccccagctgcccaggaagagccccagccatggaacaccagctcctgtgctgcgaagtggaaaccatccgccgcgcgtaccccgatgccaacctcctcaacgaccgggtgctgcgggccatgctgaaggcggaggagacctgcgcgccctcggtgtcctacttcaaatgtgtgcagaaggaggtcctgccgtccatgcggaagatcgtcgccacctggatgctggaggtctgcgaggaacagaagtgcgaggaggaggtcttcccgctggccatgaactacctggaccgcttcctgtcgctggagcccgtgaaaaagagccgcctgcagctgctgggggccacttgcatgttcgtggcctctaagatgaaggagaccatccccctgacggccgagaagctgtgcatctacaccgacaactccatccggcccgaggagctgctgcaaatggagctgctcctggtgaacaagctcaagtggaacctggccgcaatgaccccgcacgatttcattgaacacttcctctccaaaatgccagaggcggaggagaacaaacagatcatccgcaaacacgcgcagaccttcgttgccctctgtgccacagatgtgaagttcatttccaatccgccctccatggtggcagcggggagcgtggtggccgcagtgcaaggcctgaacctgaggagccccaacaacttcctgtcctactaccgcctcacacgcttcctctccagagtgatcaagtgtgacccggactgcctccgggcctgccaggagcagatcgaagccctgctggagtcaagcctgcgccaggcccagcagaacatggaccccaaggccgccgaggaggaggaagaggaggaggaggaggtggacctggcttgcacacccaccgacgtgcgggacgtggacatctgagggcgccaggcaggcgggcgccaccgccacccgcagcgagggcggagccggccccaggtgctccactgacagtccctcctctccggagcattttgataccagaagggaaagcttcattctccttgttgttggttgttttttcctttgctctttcccccttccatctctgacttaagcaaaagaaaaagattacccaaaaactgtctttaaaagagagagagagaaaaaaaaaatagtatttgcataaccctgagcggtgggggaggagggttgtgctacagatgatagaggattttataccccaataatcaactcgtttttatattaatgtacttgtttctctgttgtaagaataggcattaacacaaaggaggcgtctcgggagaggattaggttccatcctttacgtgtttaaaaaaaagcataaaaacattttaaaaacatagaaaaattcagcaaaccatttttaaagtagaagagggttttaggtagaaaaacatattcttgtgcttttcctgataaagcacagctgtagtggggttctaggcatctctgtactttgcttgctcatatgcatgtagtcactttataagtcattgtatgttattatattccgtaggtagatgtgtaacctcttcaccttattcatggctgaagtcacctcttggttacagtagcgtagcgtggccgtgtgcatgtcctttgcgcctgtgaccaccaccccaacaaaccatccagtgacaaaccatccagtggaggtttgtcgggcaccagccagcgtagcagggtcgggaaaggccacctgtcccactcctacgatacgctactataaagagaagacgaaatagtgacataatatattctatttttatactcttcctatttttgtagtgacctgtttatgagatgctggttttctacccaacggccctgcagccagctcacgtccaggttcaacccacagctacttggtttgtgttcttcttcatattctaaaaccattccatttccaagcactttcagtccaataggtgtaggaaatagcgctgtttttgttgtgtgtgcagggagggcagttttctaatggaatggtttgggaatatccatgtacttgtttgcaagcaggactttgaggcaagtgtgggccactgtggtggcagtggaggtggggtgtttgggaggctgcgtgccagtcaagaagaaaaaggtttgcattctcacattgccaggatgataagttcctttccttttctttaaagaagttgaagtttaggaatcctttggtgccaactggtgtttgaaagtagggacctcagaggtttacctagagaacaggtggtttttaagggttatcttagatgtttcacaccggaaggtttttaaacactaaaatatataatttatagttaaggctaaaaagtatatttattgcagaggatgttcataaggccagtatgatttataaatgcaatctccccttgatttaaacacacagatacacacacacacacacacacacacacaaaccttctgcctttgatgttacagatttaatacagtttatttttaaagatagatccttttataggtgagaaaaaaacaatctggaagaaaaaaaccacacaaagacattgattcagcctgtttggcgtttcccagagtcatctgattggacaggcatgggtgcaaggaaaattagggtactcaacctaagttcggttccgatgaattcttatcccctgccccttcctttaaaaaacttagtgacaaaatagacaatttgcacatcttggctatgtaattcttgtaatttttatttaggaagtgttgaagggaggtggcaagagtgtggaggctgacgtgtgagggaggacaggcgggaggaggtgtgaggaggaggctcccgaggggaaggggcggtgcccacaccggggacaggccgcagctccattttcttattgcgctgctaccgttgacttccaggcacggtttggaaatattcacatcgcttctgtgtatctctttcacattgtttgctgctcaaccatcctggctgcggcgtctgtctgaaccacgcgggggccttgagggacgctttgtctgtcgtgatggggcaagggcacaagtcctggatgttgtgtgtatcgagaggccaaaggctggtggcaagtgcacggggcacagcggagtctgtcctgtgacgcgcaagtctgagggtctgggcggcgggcggctgggtctgtgcatttctggttgcaccgcggcgcttcccagcaccaacatgtaaccggcatgtttccagcagaagacaaaaagacaaacatgaaagtctagaaataaaactggtaaaacccca

SEQ ID NO: 298396 - DNA, 3604 bp, Homo sapiens
  misc_feature (56)..(56): n is a, c, g, or t
cggacgcgtgggtccggacgcgtgggtccggacgcgtgggtcgacccacgcgtcgnggactacaggggagttttgttgaagttgcaaagtcctggagcctccagagggctgtcggcgcagtagcagcgagcagcagagtccgcacgctccggcgaggggcagaagagcgcgagggagcgcggggcagcagaagcgagagccgagcgcggacccagccaggacccacagccctccccagctgcccaggaagagccccagccatggaacaccagctcctgtgctgcgaagtggaaaccatccgccgcgcgtaccccgatgccaacctcctcaacgaccgggtgctgcgggccatgctgaaggcggaggagacctgcgcgccctcggtgtcctacttcaaatgtgtgcagaaggaggtcctgccgtccatgcggaagatcgtcgccacctggatgctggaggtctgcgaggaacagaagtgcgaggaggaggtcttcccgctggccatgaactacctggaccgcttcctgtcgctggagcccgtgaaaaagagccgcctgcagctgctgggggccacttgcatgttcgtggcctctaagatgaaggagaccatccccctgacggccgagaagctgtgcatctacaccgacaactccatccggcccgaggagctgctgcaaatggagctgctcctggtgaacaagctcaagtggaacctggccgcaatgaccccgcacgatttcattgaacacttcctctccaaaatgccagaggcggaggagaacaaacagatcatccgcaaacacgcgcagaccttcgttgccctctgtgccacagatgtgaagttcatttccaatccgccctccatggtggcagcggggagcgtggtggccgcagtgcaaggcctgaacctgaggagccccaacaacttcctgtcctactaccgcctcacacgcttcctctccagagtgatcaagtgtgacccggactgcctccgggcctgccaggagcagatcgaagccctgctggagtcaagcctgcgccaggcccagcagaacatggaccccaaggccgccgaggaggaggaagaggaggaggaggaggtggacctggcttgcacacccaccgacgtgcgggacgtggacatctgagggcgccaggcaggcgggcgccaccgccacccgcagcgagggcggagccggccccaggtgctccactgacagtccctcctctccggagcattttgataccagaagggaaagcttcattctccttgttgttggttgttttttcctttgctctttcccccttccatctctgacttaagcaaaagaaaaagattacccaaaaactgtctttaaaagagagagagagaaaaaaaaaatagtatttgcataaccctgagcggtgggggaggagggttgtgctacagatgatagaggattttataccccaataatcaactcgtttttatattaatgtacttgtttctctgttgtaagaataggcattaacacaaaggaggcgtctcgggagaggattaggttccatcctttacgtgtttaaaaaaaagcataaaaacattttaaaaacatagaaaaattcagcaaaccatttttaaagtagaagagggttttaggtagaaaaacatattcttgtgcttttcctgataaagcacagctgtagtggggttctaggcatctctgtactttgcttgctcatatgcatgtagtcactttataagtcattgtatgttattatattccgtaggtagatgtgtaacctcttcaccttattcatggctgaagtcacctcttggttacagtagcgtagcgtggccgtgtgcatgtcctttgcgcctgtgaccaccaccccaacaaaccatccagtgacaaaccatccagtggaggtttgtcgggcaccagccagcgtagcagggtcgggaaaggccacctgtcccactcctacgatacgctactataaagagaagacgaaatagtgacataatatattctatttttatactcttcctatttttgtagtgacctgtttatgagatgctggttttctacccaacggccctgcagccagctcacgtccaggttcaacccacagctacttggtttgtgttcttcttcatattctaaaaccattccatttccaagcactttcagtccaataggtgtaggaaatagcgctgtttttgttgtgtgtgcagggagggcagttttctaatggaatggtttgggaatatccatgtacttgtttgcaagcaggactttgaggcaagtgtgggccactgtggtggcagtggaggtggggtgtttgggaggctgcgtgccagtcaagaagaaaaaggtttgcattctcacattgccaggatgataagttcctttccttttctttaaagaagttgaagtttaggaatcctttggtgccaactggtgtttgaaagtagggacctcagaggtttacctagagaacaggtggtttttaagggttatcttagatgtttcacaccggaaggtttttaaacactaaaatatataatttatagttaaggctaaaaagtatatttattgcagaggatgttcataaggccagtatgatttataaatgcaatctccccttgatttaaacacacagatacacacacacacacacacacacacacaaaccttctgcctttgatgttacagatttaatacagtttatttttaaagatagatccttttataggtgagaaaaaaacaatctggaagaaaaaaaccacacaaagacattgattcagcctgtttggcgtttcccagagtcatctgattggacaggcatgggtgcaaggaaaattagggtactcaacctaagttcggttccgatgaattcttatcccctgccccttcctttaaaaaacttagtgacaaaatagacaatttgcacatcttggctatgtaattcttgtaatttttatttaggaagtgttgaagggaggtggcaagagtgtggaggctgacgtgtgagggaggacaggcgggaggaggtgtgaggaggaggctcccgaggggaaggggcggtgcccacaccggggacaggccgcagctccattttcttattgcgctgctaccgttgacttccaggcacggtttggaaatattcacatcgcttctgtgtatctctttcacattgtttgctgctcaaccatcctggctgcggcgtctgtctgaaccacgcgggggccttgagggacgctttgtctgtcgtgatggggcaagggcacaagtcctggatgttgtgtgtatcgagaggccaaaggctggtggcaagtgcacggggcacagcggagtctgtcctgtgacgcgcaagtctgagggtctgggcggcgggcggctgggtctgtgcatttctggttgcaccgcggcgcttcccagcaccaacatgtaaccggcatgtttccagcagaagacaaaaagacaaacatgaaagtctagaaataaaactggtaaaaccccagcgaaggccgcggggaaggggcccttgggtaagtgggggccgaatggagctcaagctggccaacgctatgagcacctattgggatgaggcgcgggattct

SEQ ID NO: 298397 - DNA, 3239 bp, Homo sapiens
  misc_feature (56)..(56): n is a, c, g, or t
cggacgcgtgggtccggacgcgtgggtccggacgcgtgggtcgacccacgcgtcgnggactacaggggagttttgttgaagttgcaaagtcctggagcctccagagggctgtcggcgcagtagcagcgagcagcagagtccgcacgctccggcgaggggcagaagagcgcgagggagcgcggggcagcagaagcgagagccgagcgcggacccagccaggacccacagccctccccagctgcccaggaagagccccagccatggaacaccagctcctgtgctgcgaagtggaaaccatccgccgcgcgtaccccgatgccaacctcctcaacgaccgggtgctgcgggccatgctgaaggcggaggagacctgcgcgccctcggtgtcctacttcaaatgtgtgcagaaggaggtcctgccgtccatgcggaagatcgtcgccacctggatgctggaggtctgcgaggaacagaagtgcgaggaggaggtcttcccgctggccatgaactacctggaccgcttcctgtcgctggagcccgtgaaaaagagccgcctgcagctgctgggggccacttgcatgttcgtggcctctaagatgaaggagaccatccccctgacggccgagaagctgtgcatctacaccgacaactccatccggcccgaggagctgctgcaaatggagctgctcctggtgaacaagctcaagtggaacctggccgcaatgaccccgcacgatttcattgaacacttcctctccaaaatgccagaggcggaggagaacaaacagatcatccgcaaacacgcgcagaccttcgttgccctctgtgccacagatgtgaagttcatttccaatccgccctccatggtggcagcggggagcgtggtggccgcagtgcaaggcctgaacctgaggagccccaacaacttcctgtcctactaccgcctcacacgcttcctctccagagtgatcaagtgtgacccggactgcctccgggcctgccaggagcagatcgaagccctgctggagtcaagcctgcgccaggcccagcagaacatggaccccaaggccgccgaggaggaggaagaggaggaggaggaggtggacctggcttgcacacccaccgacgtgcgggacgtggacatctgagggcgccaggcaggcgggcgccaccgccacccgcagcgagggcggagccggccccaggtgctccactgacagtccctcctctccggagcattttgataccagaagggaaagcttcattctccttgttgttggttgttttttcctttgctctttcccccttccatctctgacttaagcaaaagaaaaagattacccaaaaactgtctttaaaagagagagagagaaaaaaaaaatagtatttgcataaccctgagcggtgggggaggagggttgtgctacagatgatagaggattttataccccaataatcaactcgtttttatattaatgtacttgtttctctgttgtaagaataggcattaacacaaaggaggcgtctcgggagaggattaggttccatcctttacgtgtttaaaaaaaagcataaaaacattttaaaaacatagaaaaattcagcaaaccatttttaaagtagaagagggttttaggtagaaaaacatattcttgtgcttttcctgataaagcacagctgtagtggggttctaggcatctctgtactttgcttgctcatatgcatgtagtcactttataagtcattgtatgttattatattccgtaggtagatgtgtaacctcttcaccttattcatggctgaagtcacctcttggttacagtagcgtagcgtggccgtgtgcatgtcctttgcgcctgtgaccaccaccccaacaaaccatccagtgacaaaccatccagtggaggtttgtcgggcaccagccagcgtagcagggtcgggaaaggccacctgtcccactcctacgatacgctactataaagagaagacgaaatagtgacataatatattctatttttatactcttcctatttttgtagtgacctgtttatgagatgctggttttctacccaacggccctgcagccagctcacgtccaggttcaacccacagctacttggtttgtgttcttcttcatattctaaaaccattccatttccaagcactttcagtccaataggtgtaggaaatagcgctgtttttgttgtgtgtgcagggagggcagttttctaatggaatggtttgggaatatccatgtacttgtttgcaagcaggactttgaggcaagtgtgggccactgtggtggcagtggaggtggggtgtttgggaggctgcgtgccagtcaagaagaaaaaggtttgcattctcacattgccaggatgataagttcctttccttttctttaaagaagttgaagtttaggaatcctttggtgccaactggtgtttgaaagtagggacctcagaggtttacctagagaacaggtggtttttaagggttatcttagatgtttcacaccggaaggtttttaaacactaaaatatataatttatagttaaggctaaaaagtatatttattgcagaggatgttcataaggccagtatgatttataaatgcaatctccccttgatttaaacacacagatacacacacacacacacacacacacacaaaccttctgcctttgatgttacagatttaatacagtttatttttaaagatagatccttttataggtgagaaaaaaacaatctggaagaaaaaaaccacacaaagacattgattcagcctgtttggcgtttcccagagtcatctgattggacaggcatgggtgcaaggaaaattagggtactcaacctaagttcggttccgatgaattcttatcccctgccccttcctttaaaaaacttagtgacaaaatagacaatttgcacatcttggctatgtaattcttgtaatttttatttaggaagtgttgaagggaggtggcaagagtgtggaggctgacgtgtgagggaggacaggcggggagaggccaaaggctggtggcaagtgcacggggcacagcggagtctgtcctgtgacgcgcaagtctgagggtctgggcggcgggcggctgggtctgtgcatttctggttgcaccgcggcgcttcccagcaccaacatgtaaccggcatgtttccagcagaagacaaaaagacaaacatgaaagtctagaaataaaactggtaaaacccca

SEQ ID NO: 298398 - DNA, 3188 bp, Homo sapiens
  misc_feature (56)..(56): n is a, c, g, or t
cggacgcgtgggtccggacgcgtgggtccggacgcgtgggtcgacccacgcgtcgnggactacaggggagttttgttgaagttgcaaagtcctggagcctccagagggctgtcggcgcagtagcagcgagcagcagagtccgcacgctccggcgaggggcagaagagcgcgagggagcgcggggcagcagaagcgagagccgagcgcggacccagccaggacccacagccctccccagctgcccaggaagagccccagccatggaacaccagctcctgtgctgcgaagtggaaaccatccgccgcgcgtaccccgatgccaacctcctcaacgaccgggtgctgcgggccatgctgaaggcggaggagacctgcgcgccctcggtgtcctacttcaaatgtgtgcagaaggaggtcctgccgtccatgcggaagatcgtcgccacctggatgctggaggtctgcgaggaacagaagtgcgaggaggaggtcttcccgctggccatgaactacctggaccgcttcctgtcgctggagcccgtgaaaaagagccgcctgcagctgctgggggccacttgcatgttcgtggcctctaagatgaaggagaccatccccctgacggccgagaagctgtgcatctacaccgacaactccatccggcccgaggagctgctgcaaatggagctgctcctggtgaacaagctcaagtggaacctggccgcaatgaccccgcacgatttcattgaacacttcctctccaaaatgccagaggcggaggagaacaaacagatcatccgcaaacacgcgcagaccttcgttgccctctgtgccacagatgtgaagttcatttccaatccgccctccatggtggcagcggggagcgtggtggccgcagtgcaaggcctgaacctgaggagccccaacaacttcctgtcctactaccgcctcacacgcttcctctccagagtgatcaagtgtgacccggactgcctccgggcctgccaggagcagatcgaagccctgctggagtcaagcctgcgccaggcccagcagaacatggaccccaaggccgccgaggaggaggaagaggaggaggaggaggtggacctggcttgcacacccaccgacgtgcgggacgtggacatctgagggcgccaggcaggcgggcgccaccgccacccgcagcgagggcggagccggccccaggtgctccactgacagtccctcctctccggagcattttgataccagaagggaaagcttcattctccttgttgttggttgttttttcctttgctctttcccccttccatctctgacttaagcaaaagaaaaagattacccaaaaactgtctttaaaagagagagagagaaaaaaaaaatagtatttgcataaccctgagcggtgggggaggagggttgtgctacagatgatagaggattttataccccaataatcaactcgtttttatattaatgtacttgtttctctgttgtaagaataggcattaacacaaaggaggcgtctcgggagaggattaggttccatcctttacgtgtttaaaaaaaagcataaaaacattttaaaaacatagaaaaattcagcaaaccatttttaaagtagaagagggttttaggtagaaaaacatattcttgtgcttttcctgataaagcacagctgtagtggggttctaggcatctctgtactttgcttgctcatatgcatgtagtcactttataagtcattgtatgttattatattccgtaggtagatgtgtaacctcttcaccttattcatggctgaagtcacctcttggttacagtagcgtagcgtggccgtgtgcatgtcctttgcgcctgtgaccaccaccccaacaaaccatccagtgacaaaccatccagtggaggtttgtcgggcaccagccagcgtagcagggtcgggaaaggccacctgtcccactcctacgatacgctactataaagagaagacgaaatagtgacataatatattctatttttatactcttcctatttttgtagtgacctgtttatgagatgctggttttctacccaacggccctgcagccagctcacgtccaggttcaacccacagctacttggtttgtgttcttcttcatattctaaaaccattccatttccaagcactttcagtccaataggtgtaggaaatagcgctgtttttgttgtgtgtgcagggagggcagttttctaatggaatggtttgggaatatccatgtacttgtttgcaagcaggactttgaggcaagtgtgggccactgtggtggcagtggaggtggggtgtttgggaggctgcgtgccagtcaagaagaaaaaggtttgcattctcacattgccaggatgataagttcctttccttttctttaaagaagttgaagtttaggaatcctttggtgccaactggtgtttgaaagtagggacctcagaggtttacctagagaacaggtggtttttaagggttatcttagatgtttcacaccggaaggtttttaaacactaaaatatataatttatagttaaggctaaaaagtatatttattgcagaggatgttcataaggccagtatgatttataaatgcaatctccccttgatttaaacacacagatacacacacacacacacacacacacacaaaccttctgcctttgatgttacagatttaatacagtttatttttaaagatagatccttttataggtgagaaaaaaacaatctggaagaaaaaaaccacacaaagacattgattcagcctgtttggcgtttcccagagtcatctgattggacaggcatgggtgcaaggaaaattagggtactcaacctaagttcggttccgatgaattcttatcccctgccccttcctttaaaaaacttagtgacaaaatagacaatttgcacatcttggctatgtaattcttgtaatttttatttaggaagtgttggagaggccaaaggctggtggcaagtgcacggggcacagcggagtctgtcctgtgacgcgcaagtctgagggtctgggcggcgggcggctgggtctgtgcatttctggttgcaccgcggcgcttcccagcaccaacatgtaaccggcatgtttccagcagaagacaaaaagacaaacatgaaagtctagaaataaaactggtaaaacccca

SEQ ID NO: 298399 - DNA, 3164 bp, Homo sapiens
  misc_feature (56)..(56): n is a, c, g, or t
cggacgcgtgggtccggacgcgtgggtccggacgcgtgggtcgacccacgcgtcgnggactacaggggagttttgttgaagttgcaaagtcctggagcctccagagggctgtcggcgcagtagcagcgagcagcagagtccgcacgctccggcgaggggcagaagagcgcgagggagcgcggggcagcagaagcgagagccgagcgcggacccagccaggacccacagccctccccagctgcccaggaagagccccagccatggaacaccagctcctgtgctgcgaagtggaaaccatccgccgcgcgtaccccgatgccaacctcctcaacgaccgggtgctgcgggccatgctgaaggcggaggagacctgcgcgccctcggtgtcctacttcaaatgtgtgcagaaggaggtcctgccgtccatgcggaagatcgtcgccacctggatgctggaggtctgcgaggaacagaagtgcgaggaggaggtcttcccgctggccatgaactacctggaccgcttcctgtcgctggagcccgtgaaaaagagccgcctgcagctgctgggggccacttgcatgttcgtggcctctaagatgaaggagaccatccccctgacggccgagaagctgtgcatctacaccgacaactccatccggcccgaggagctgctgcaaatggagctgctcctggtgaacaagctcaagtggaacctggccgcaatgaccccgcacgatttcattgaacacttcctctccaaaatgccagaggcggaggagaacaaacagatcatccgcaaacacgcgcagaccttcgttgccctctgtgccacagatgtgaagttcatttccaatccgccctccatggtggcagcggggagcgtggtggccgcagtgcaaggcctgaacctgaggagccccaacaacttcctgtcctactaccgcctcacacgcttcctctccagagtgatcaagtgtgacccggactgcctccgggcctgccaggagcagatcgaagccctgctggagtcaagcctgcgccaggcccagcagaacatggaccccaaggccgccgaggaggaggaagaggaggaggaggaggtggacctggcttgcacacccaccgacgtgcgggacgtggacatctgagggcgccaggcaggcgggcgccaccgccacccgcagcgagggcggagccggccccaggtgctccactgacagtccctcctctccggagcattttgataccagaagggaaagcttcattctccttgttgttggttgttttttcctttgctctttcccccttccatctctgacttaagcaaaagaaaaagattacccaaaaactgtctttaaaagagagagagagaaaaaaaaaatagtatttgcataaccctgagcggtgggggaggagggttgtgctacagatgatagaggattttataccccaataatcaactcgtttttatattaatgtacttgtttctctgttgtaagaataggcattaacacaaaggaggcgtctcgggagaggattaggttccatcctttacgtgtttaaaaaaaagcataaaaacattttaaaaacatagaaaaattcagcaaaccatttttaaagtagaagagggttttaggtagaaaaacatattcttgtgcttttcctgataaagcacagctgtagtggggttctaggcatctctgtactttgcttgctcatatgcatgtagtcactttataagtcattgtatgttattatattccgtaggtagatgtgtaacctcttcaccttattcatggctgaagtcacctcttggttacagtagcgtagcgtggccgtgtgcatgtcctttgcgcctgtgaccaccaccccaacaaaccatccagtgacaaaccatccagtggaggtttgtcgggcaccagccagcgtagcagggtcgggaaaggccacctgtcccactcctacgatacgctactataaagagaagacgaaatagtgacataatatattctatttttatactcttcctatttttgtagtgacctgtttatgagatgctggttttctacccaacggccctgcagccagctcacgtccaggttcaacccacagctacttggtttgtgttcttcttcatattctaaaaccattccatttccaagcactttcagtccaataggtgtaggaaatagcgctgtttttgttgtgtgtgcagggagggcagttttctaatggaatggtttgggaatatccatgtacttgtttgcaagcaggactttgaggcaagtgtgggccactgtggtggcagtggaggtggggtgtttgggaggctgcgtgccagtcaagaagaaaaaggtttgcattctcacattgccaggatgataagttcctttccttttctttaaagaagttgaagtttaggaatcctttggtgccaactggtgtttgaaagtagggacctcagaggtttacctagagaacaggtggtttttaagggttatcttagatgtttcacaccggaaggtttttaaacactaaaatatataatttatagttaaggctaaaaagtatatttattgcagaggatgttcataaggccagtatgatttataaatgcaatctccccttgatttaaacacacagatacacacacacacacacacacacacacaaaccttctgcctttgatgttacagatttaatacagtttatttttaaagatagatccttttataggtgagaaaaaaacaatctggaagaaaaaaaccacacaaagacattgattcagcctgtttggcgtttcccagagtcatctgattggacaggcatgggtgcaaggaaaattagggtactcaacctaagttcggttccgatgaattcttatcccctgccccttcctttaaaaaacttagtgacaaaatagacaatttgcacatcttggctatgtaattcttgtaatttttatttaggaagtgttgtgtggaggtagcacttgctatctccacaagccgctagtaccgtgagggaacggtgaaaagaaccccgagaggggagtgaaatagattctgaaaccatttacttacaagtagtcagagcacgttaaagtgtgatggcgtacatcttgcagtatgggccgggcagttatgttaatatgcaaggttaag

SEQ ID NO: 298400 - DNA, 3040 bp, Homo sapiens
  misc_feature (56)..(56): n is a, c, g, or t
cggacgcgtgggtccggacgcgtgggtccggacgcgtgggtcgacccacgcgtcgnggactacaggggagttttgttgaagttgcaaagtcctggagcctccagagggctgtcggcgcagtagcagcgagcagcagagtccgcacgctccggcgaggggcagaagagcgcgagggagcgcggggcagcagaagcgagagccgagcgcggacccagccaggacccacagccctccccagctgcccaggaagagccccagccatggaacaccagctcctgtgctgcgaagtggaaaccatccgccgcgcgtaccccgatgccaacctcctcaacgaccgggtgctgcgggccatgctgaaggcggaggagacctgcgcgccctcggtgtcctacttcaaatgtgtgcagaaggaggtcctgccgtccatgcggaagatcgtcgccacctggatgctggaggtctgcgaggaacagaagtgcgaggaggaggtcttcccgctggccatgaactacctggaccgcttcctgtcgctggagcccgtgaaaaagagccgcctgcagctgctgggggccacttgcatgttcgtggcctctaagatgaaggagaccatccccctgacggccgagaagctgtgcatctacaccgacaactccatccggcccgaggagctgctgcaaatggagctgctcctggtgaacaagctcaagtggaacctggccgcaatgaccccgcacgatttcattgaacacttcctctccaaaatgccagaggcggaggagaacaaacagatcatccgcaaacacgcgcagaccttcgttgccctctgtgccacagatgtgaagttcatttccaatccgccctccatggtggcagcggggagcgtggtggccgcagtgcaaggcctgaacctgaggagccccaacaacttcctgtcctactaccgcctcacacgcttcctctccagagtgatcaagtgtgacccggactgcctccgggcctgccaggagcagatcgaagccctgctggagtcaagcctgcgccaggcccagcagaacatggaccccaaggccgccgaggaggaggaagaggaggaggaggaggtggacctggcttgcacacccaccgacgtgcgggacgtggacatctgagggcgccaggcaggcgggcgccaccgccacccgcagcgagggcggagccggccccaggtgctccactgacagtccctcctctccggagcattttgataccagaagggaaagcttcattctccttgttgttggttgttttttcctttgctctttcccccttccatctctgacttaagcaaaagaaaaagattacccaaaaactgtctttaaaagagagagagagaaaaaaaaaatagtatttgcataaccctgagcggtgggggaggagggttgtgctacagatgatagaggattttataccccaataatcaactcgtttttatattaatgtacttgtttctctgttgtaagaataggcattaacacaaaggaggcgtctcgggagaggattaggttccatcctttacgtgtttaaaaaaaagcataaaaacattttaaaaacatagaaaaattcagcaaaccatttttaaagtagaagagggttttaggtagaaaaacatattcttgtgcttttcctgataaagcacagctgtagtggggttctaggcatctctgtactttgcttgctcatatgcatgtagtcactttataagtcattgtatgttattatattccgtaggtagatgtgtaacctcttcaccttattcatggctgaagtcacctcttggttacagtagcgtagcgtggccgtgtgcatgtcctttgcgcctgtgaccaccaccccaacaaaccatccagtgacaaaccatccagtggaggtttgtcgggcaccagccagcgtagcagggtcgggaaaggccacctgtcccactcctacgatacgctactataaagagaagacgaaatagtgacataatatattctatttttatactcttcctatttttgtagtgacctgtttatgagatgctggttttctacccaacggccctgcagccagctcacgtccaggttcaacccacagctacttggtttgtgttcttcttcatattctaaaaccattccatttccaagcactttcagtccaataggtgtaggaaatagcgctgtttttgttgtgtgtgcagggagggcagttttctaatggaatggtttgggaatatccatgtacttgtttgcaagcaggactttgaggcaagtgtgggccactgtggtggcagtggaggtggggtgtttgggaggctgcgtgccagtcaagaagaaaaaggtttgcattctcacattgccaggatgataagttcctttccttttctttaaagaagttgaagtttaggaatcctttggtgccaactggtgtttgaaagtagggacctcagaggtttacctagagaacaggtggtttttaagggttatcttagatgtttcacaccggaaggtttttaaacactaaaatatataatttatagttaaggctaaaaagtatatttattgcagaggatgttcataaggccagtatgatttataaatgcaatctccccttgatttaaacacacagatacacacacacacacacacacacacacaaaccttctgcctttgatgttacagatttaatacagtttatttttaaagatagatccttttataggtgagaaaaaaacaatctggaagaaaaaaaccacacaaagacattgattcagcctgtttggcgtttcccagagtcatctgattggacaggcatgggtgcaaggaaaattagggtactcaacctaagttcggttccgatgaattcttatcccctgccccttcctttaaaaaacttagtgacaaaatagacaatttgcacatcttggctatgtaattcttgtaatttttatttaggaagtgttgtgcaaagagcaatgacctacaacgggtatacctctaggaacagctctcaccacataccgtcc

SEQ ID NO: 298401 - DNA, 2484 bp, Homo sapiens
cgcaggggccagtgctctgagccggaggtgcggcgtggcccggcccccgtgctgccggcttccccgcgcccccgggctggcccgcacctcccctgatggccgctcaccctgtgttcgcagcaaatggagctgctcctggtgaacaagctcaagtggaacctggccgcaatgaccccgcacgatttcattgaacacttcctctccaaaatgccagaggcggaggagaacaaacagatcatccgcaaacacgcgcagaccttcgttgccctctgtgccacagatgtgaagttcatttccaatccgccctccatggtggcagcggggagcgtggtggccgcagtgcaaggcctgaacctgaggagccccaacaacttcctgtcctactaccgcctcacacgcttcctctccagagtgatcaagtgtgacccgtgtgggccactgtggtggcagtggaggtggggtgtttgggaggctgcgtgccagtcaagaagaaaaaggtttgcattctcacattgccaggatgataagttcctttccttttctttaaagaagttgaagtttaggaatcctttggtgccaactggtgtttgaaagtagggacctcagaggtttacctagagaacaggtggtttttaagggttatcttagatgtttcacaccggaaggtttttaaacactaaaatatataatttatagttaaggctaaaaagtatatttattgcagaggatgttcataaggccagtatgatttataaatgcaatctccccttgatttaaacacacagatacacacacacacacacacacacacacaaaccttctgcctttgatgttacagatttaatacagtttatttttaaagatagatccttttataggtgagaaaaaaacaatctggaagaaaaaaaccacacaaagacattgattcagcctgtttggcgtttcccagagtcatctgattggacaggcatgggtgcaaggaaaattagggtactcaacctaagttcggttccgatgaattcttatcccctgccccttcctttaaaaaacttagtgacaaaatagacaatttgcacatcttggctatgtaattcttgtaatttttatttaggaagtgttgaagggaggtggcaagagtgtggaggctgacgtgtgagggaggacaggcgggaggaggtgtgaggaggaggctcccgaggggaaggggcggtgcccacaccggggacaggccgcagctccattttcttattgcgctgctaccgttgacttccaggcacggtttggaaatattcacatcgcttctgtgtatctctttcacattgtttgctgctattggaggatcagttttttgttttacaatgtcatatactgccatgtactagttttagttttctcttagaacattgtattacagatgccttttttgtagttttttttttttttatgtgatcaatttggacttaatgtgattactgctctattccaaaaaggttgctgtttcacaatacctcatgcttcacttagccatggtggacccagcgggcaggttctgcctgctttggcgggcagacacgcgggcgcgatcccacacaggctggcgggggccggccccgaggccgcgtgcgtgagaaccgcgccggtgtccccagagaccaggctgtgtccctcttctcttccctgcgcctgtgatgctgggcacttcatctgatcgggggcgtagcatcatagtagtttttacagctgtgttattctttgcgtgtagctatggaagttgcataattattattattattattataacaagtgtgtcttacgtgccaccacggcgttgtacctgtaggactctcattcgggatgattggaatagcttctggaatttgttcaagttttgggtatgtttaatctgttatgtactagtgttctgtttgttattgttttgttaattacaccataatgctaatttaaagagactccaaatctcaatgaagccagctcacagtgctgtgtgccccggtcacctagcaagctgccgaaccaaaagaatttgcaccccgctgcgggcccacgtggttggggccctgccctggcagggtcatcctgtgctcggaggccatctcgggcacaggcccaccccgccccacccctccagaacacggctcacgcttacctcaaccatcctggctgcggcgtctgtctgaaccacgcgggggccttgagggacgctttgtctgtcgtgatggggcaagggcacaagtcctggatgttgtgtgtatcgagaggccaaaggctggtggcaagtgcacggggcacagcggagtctgtcctgtgacgcgcaagtctgagggtctgggcggcgggcggctgggtctgtgcatttctggttgcaccgcggcgcttcccagcaccaacatgtaaccggcatgtttccagcagaagacaaaaagacaaacatgaaagtctagaaataaaactggtaaaacccca

SEQ ID NO: 298402 - DNA, 2975 bp, Homo sapiens
  misc_feature (56)..(56): n is a, c, g, or t
cggacgcgtgggtccggacgcgtgggtccggacgcgtgggtcgacccacgcgtcgnggactacaggggagttttgttgaagttgcaaagtcctggagcctccagagggctgtcggcgcagtagcagcgagcagcagagtccgcacgctccggcgaggggcagaagagcgcgagggagcgcggggcagcagaagcgagagccgagcgcggacccagccaggacccacagccctccccagctgcccaggaagagccccagccatggaacaccagctcctgtgctgcgaagtggaaaccatccgccgcgcgtaccccgatgccaacctcctcaacgaccgggtgctgcgggccatgctgaaggcggaggagacctgcgcgccctcggtgtcctacttcaaatgtgtgcagaaggaggtcctgccgtccatgcggaagatcgtcgccacctggatgctggaggtctgcgaggaacagaagtgcgaggaggaggtcttcccgctggccatgaactacctggaccgcttcctgtcgctggagcccgtgaaaaagagccgcctgcagctgctgggggccacttgcatgttcgtggcctctaagatgaaggagaccatccccctgacggccgagaagctgtgcatctacaccgacaactccatccggcccgaggagctgctgcaaatggagctgctcctggtgaacaagctcaagtggaacctggccgcaatgaccccgcacgatttcattgaacacttcctctccaaaatgccagaggcggaggagaacaaacagatcatccgcaaacacgcgcagaccttcgttgccctctgtgccacagatgtgaagttcatttccaatccgccctccatggtggcagcggggagcgtggtggccgcagtgcaaggcctgaacctgaggagccccaacaacttcctgtcctactaccgcctcacacgcttcctctccagagtgatcaagtgtgacccggactgcctccgggcctgccaggagcagatcgaagccctgctggagtcaagcctgcgccaggcccagcagaacatggaccccaaggccgccgaggaggaggaagaggaggaggaggaggtggacctggcttgcacacccaccgacgtgcgggacgtggacatctgagggcgccaggcaggcgggcgccaccgccacccgcagcgagggcggagccggccccaggtgctccactgacagtccctcctctccggagcattttgataccagaagggaaagcttcattctccttgttgttggttgttttttcctttgctctttcccccttccatctctgacttaagcaaaagaaaaagattacccaaaaactgtctttaaaagagagagagagaaaaaaaaaatagtatttgcataaccctgagcggtgggggaggagggttgtgctacagatgatagaggattttataccccaataatcaactcgtttttatattaatgtacttgtttctctgttgtaagaataggcattaacacaaaggaggcgtctcgggagaggattaggttccatcctttacgtgtttaaaaaaaagcataaaaacattttaaaaacatagaaaaattcagcaaaccatttttaaagtagaagagggttttaggtagaaaaacatattcttgtgcttttcctgataaagcacagctgtagtggggttctaggcatctctgtactttgcttgctcatatgcatgtagtcactttataagtcattgtatgttattatattccgtaggtagatgtgtaacctcttcaccttattcatggctgaagtcacctcttggttacagtagcgtagcgtggccgtgtgcatgtcctttgcgcctgtgaccaccaccccaacaaaccatccagtgacaaaccatccagtggaggtttgtcgggcaccagccagcgtagcagggtcgggaaaggccacctgtcccactcctacgatacgctactataaagagaagacgaaatagtgacataatatattctatttttatactcttcctatttttgtagtgacctgtttatgagatgctggttttctacccaacggccctgcagccagctcacgtccaggttcaacccacagctacttggtttgtgttcttcttcatattctaaaaccattccatttccaagcactttcagtccaataggtgtaggaaatagcgctgtttttgttgtgtgtgcagggagggcagttttctaatggaatggtttgggaatatccatgtacttgtttgcaagcaggactttgaggcaagtgtgggccactgtggtggcagtggaggtggggtgtttgggaggctgcgtgccagtcaagaagaaaaaggtttgcattctcacattgccaggatgataagttcctttccttttctttaaagaagttgaagtttaggaatcctttggtgccaactggtgtttgaaagtagggacctcagaggtttacctagagaacaggtggtttttaagggttatcttagatgtttcacaccggaaggtttttaaacactaaaatatataatttatagttaaggctaaaaagtatatttattgcagaggatgttcataaggccagtatgatttataaatgcaatctccccttgatttaaacacacagatacacacacacacacacacacacacacaaaccttctgcctttgatgttacagatttaatacagtttatttttaaagatagatccttttataggtgagaaaaaaacaatctggaagaaaaaaaccacacaaagacattgattcagcctgtttggcgtttcccagagtcatctgattggacaggcatgggtgcaaggaaaattagggcggctgggtctgtgcatttctggttgcaccgcggcgcttcccagcaccaacatgtaaccggcatgtttccagcagaagacaaaaagacaaacatgaaagtctagaaataaaactggtaaaacccca

SEQ ID NO: 298403 - DNA, 3127 bp, Homo sapiens
  misc_feature (56)..(56): n is a, c, g, or t
cggacgcgtgggtccggacgcgtgggtccggacgcgtgggtcgacccacgcgtcgnggactacaggggagttttgttgaagttgcaaagtcctggagcctccagagggctgtcggcgcagtagcagcgagcagcagagtccgcacgctccggcgaggggcagaagagcgcgagggagcgcggggcagcagaagcgagagccgagcgcggacccagccaggacccacagccctccccagctgcccaggaagagccccagccatggaacaccagctcctgtgctgcgaagtggaaaccatccgccgcgcgtaccccgatgccaacctcctcaacgaccgggtgctgcgggccatgctgaaggcggaggagacctgcgcgccctcggtgtcctacttcaaatgtgtgcagaaggaggtcctgccgtccatgcggaagatcgtcgccacctggatgctggaggtctgcgaggaacagaagtgcgaggaggaggtcttcccgctggccatgaactacctggaccgcttcctgtcgctggagcccgtgaaaaagagccgcctgcagctgctgggggccacttgcatgttcgtggcctctaagatgaaggagaccatccccctgacggccgagaagctgtgcatctacaccgacaactccatccggcccgaggagctgctgcaaatggagctgctcctggtgaacaagctcaagtggaacctggccgcaatgaccccgcacgatttcattgaacacttcctctccaaaatgccagaggcggaggagaacaaacagatcatccgcaaacacgcgcagaccttcgttgccctctgtgccacagatgtgaagttcatttccaatccgccctccatggtggcagcggggagcgtggtggccgcagtgcaaggcctgaacctgaggagccccaacaacttcctgtcctactaccgcctcacacgcttcctctccagagtgatcaagtgtgacccggactgcctccgggcctgccaggagcagatcgaagccctgctggagtcaagcctgcgccaggcccagcagaacatggaccccaaggccgccgaggaggaggaagaggaggaggaggaggtggacctggcttgcacacccaccgacgtgcgggacgtggacatctgagggcgccaggcaggcgggcgccaccgccacccgcagcgagggcggagccggccccaggtgctccactgacagtccctcctctccggagcattttgataccagaagggaaagcttcattctccttgttgttggttgttttttcctttgctctttcccccttccatctctgacttaagcaaaagaaaaagattacccaaaaactgtctttaaaagagagagagagaaaaaaaaaatagtatttgcataaccctgagcggtgggggaggagggttgtgctacagatgatagaggattttataccccaataatcaactcgtttttatattaatgtacttgtttctctgttgtaagaataggcattaacacaaaggaggcgtctcgggagaggattaggttccatcctttacgtgtttaaaaaaaagcataaaaacattttaaaaacatagaaaaattcagcaaaccatttttaaagtagaagagggttttaggtagaaaaacatattcttgtgcttttcctgataaagcacagctgtagtggggttctaggcatctctgtactttgcttgctcatatgcatgtagtcactttataagtcattgtatgttattatattccgtaggtagatgtgtaacctcttcaccttattcatggctgaagtcacctcttggttacagtagcgtagcgtggccgtgtgcatgtcctttgcgcctgtgaccaccaccccaacaaaccatccagtgacaaaccatccagtggaggtttgtcgggcaccagccagcgtagcagggtcgggaaaggccacctgtcccactcctacgatacgctactataaagagaagacgaaatagtgacataatatattctatttttatactcttcctatttttgtagtgacctgtttatgagatgctggttttctacccaacggccctgcagccagctcacgtccaggttcaacccacagctacttggtttgtgttcttcttcatattctaaaaccattccatttccaagcactttcagtccaataggtgtaggaaatagcgctgtttttgttgtgtgtgcagggagggcagttttctaatggaatggtttgggaatatccatgtacttgtttgcaagcaggactttgaggcaagtgtgggccactgtggtggcagtggaggtggggtgtttgggaggctgcgtgccagtcaagaagaaaaaggtttgcattctcacattgccaggatgataagttcaactgagccttaaaccagcaagttttttattaagggtttcaagaggggagggggtgtgagaacatggagtagagctcatgcttcaaagggcaaaaaacagaacaaagatcacttgcttctgagggaacaggagaaaaggcaacacagaactactgataagggtccatgttcagcggtgcacgtattatcttgataaacatcttgaacaaaaaatagggaaacgtctgaccacaaattcaccagggtggagtttttccccaccgtagtaagcctgagggtactgcaggagatcagggcgtatctcagtccttatctcaaccacgtaagacagacattcccagagcagctgtttatagacctctccccaggaatgcattcctttcccagggtattaatattaatattgcttgctaggaaaagaatttagcgatatcctccctacttgcatgtccttttataggctctctgcaagaagaaaaatatggctttttttgcctgaccctgcaggcagtcagaccttatggttgtcttcccttgttccctaaaatcgctgttattctgttttttctcaaggtgcactgatttcatattgttcaaacacacgttttacaatcaatttgtacagttaacacaattatcacggtggtcctgaggtgacatacatcctcagcttacgaagataacaggattaagagatgagagtaagacaggcgtaagaaattataaaagtattaattt

SEQ ID NO: 298404 - DNA, 1809 bp, Homo sapiens
ctcccgacctcaggcttacacggttcacagtgccatactccctggaatcagtaatgtgagggtgcgtgattctggctacgtatcagatttcctgtgggatttcacacatagcccacacacacacacacacacacacacaaaccttctgcctttgatgttacagatttaatacagtttatttttaaagatagatccttttataggtgagaaaaaaacaatctggaagaaaaaaaccacacaaagacattgattcagcctgtttggcgtttcccagagtcatctgattggacaggcatgggtgcaaggaaaattagggtactcaacctaagttcggttccgatgaattcttatcccctgccccttcctttaaaaaacttagtgacaaaatagacaatttgcacatcttggctatgtaattcttgtaatttttatttaggaagtgttgaagggaggtggcaagagtgtggaggctgacgtgtgagggaggacaggcgggaggaggtgtgaggaggaggctcccgaggggaaggggcggtgcccacaccggggacaggccgcagctccattttcttattgcgctgctaccgttgacttccaggcacggtttggaaatattcacatcgcttctgtgtatctctttcacattgtttgctgctattggaggatcagttttttgttttacaatgtcatatactgccatgtactagttttagttttctcttagaacattgtattacagatgccttttttgtagttttttttttttttatgtgatcaatttggacttaatgtgattactgctctattccaaaaaggttgctgtttcacaatacctcatgcttcacttagccatggtggacccagcgggcaggttctgcctgctttggcgggcagacacgcgggcgcgatcccacacaggctggcgggggccggccccgaggccgcgtgcgtgagaaccgcgccggtgtccccagagaccaggctgtgtccctcttctcttccctgcgcctgtgatgctgggcacttcatctgatcgggggcgtagcatcatagtagtttttacagctgtgttattctttgcgtgtagctatggaagttgcataattattattattattattataacaagtgtgtcttacgtgccaccacggcgttgtacctgtaggactctcattcgggatgattggaatagcttctggaatttgttcaagttttgggtatgtttaatctgttatgtactagtgttctgtttgttattgttttgttaattacaccataatgctaatttaaagagactccaaatctcaatgaagccagctcacagtgctgtgtgccccggtcacctagcaagctgccgaaccaaaagaatttgcaccccgctgcgggcccacgtggttggggccctgccctggcagggtcatcctgtgctcggaggccatctcgggcacaggcccaccccgccccacccctccagaacacggctcacgcttacctcaaccatcctggctgcggcgtctgtctgaaccacgcgggggccttgagggacgctttgtctgtcgtgatggggcaagggcacaagtcctggatgttgtgtgtatcgagaggccaaaggctggtggcaagtgcacggggcacagcggagtctgtcctgtgacgcgcaagtctgagggtctgggcggcgggcggctgggtctgtgcatttctggttgcaccgcggcgcttcccagcaccaacatgtaaccggcatgtttccagcagaagacaaaaagacaaacatgaaagtctagaaataaaactggtaaaacccca

SEQ ID NO: 298405 - DNA, 3174 bp, Homo sapiens
  misc_feature (56)..(56): n is a, c, g, or t
cggacgcgtgggtccggacgcgtgggtccggacgcgtgggtcgacccacgcgtcgnggactacaggggagttttgttgaagttgcaaagtcctggagcctccagagggctgtcggcgcagtagcagcgagcagcagagtccgcacgctccggcgaggggcagaagagcgcgagggagcgcggggcagcagaagcgagagccgagcgcggacccagccaggacccacagccctccccagctgcccaggaagagccccagccatggaacaccagctcctgtgctgcgaagtggaaaccatccgccgcgcgtaccccgatgccaacctcctcaacgaccgggtgctgcgggccatgctgaaggcggaggagacctgcgcgccctcggtgtcctacttcaaatgtgtgcagaaggaggtcctgccgtccatgcggaagatcgtcgccacctggatgctggaggtctgcgaggaacagaagtgcgaggaggaggtcttcccgctggccatgaactacctggaccgcttcctgtcgctggagcccgtgaaaaagagccgcctgcagctgctgggggccacttgcatgttcgtggcctctaagatgaaggagaccatccccctgacggccgagaagctgtgcatctacaccgacaactccatccggcccgaggagctgctgcaaatggagctgctcctggtgaacaagctcaagtggaacctggccgcaatgaccccgcacgatttcattgaacacttcctctccaaaatgccagaggcggaggagaacaaacagatcatccgcaaacacgcgcagaccttcgttgccctctgtgccacagatgtgaagttcatttccaatccgccctccatggtggcagcggggagcgtggtggccgcagtgcaaggcctgaacctgaggagccccaacaacttcctgtcctactaccgcctcacacgcttcctctccagagtgatcaagtgtgacccggactgcctccgggcctgccaggagcagatcgaagccctgctggagtcaagcctgcgccaggcccagcagaacatggaccccaaggccgccgaggaggaggaagaggaggaggaggaggtggacctggcttgcacacccaccgacgtgcgggacgtggacatctgagggcgccaggcaggcgggcgccaccgccacccgcagcgagggcggagccggccccaggtgctccactgacagtccctcctctccggagcattttgataccagaagggaaagcttcattctccttgttgttggttgttttttcctttgctctttcccccttccatctctgacttaagcaaaagaaaaagattacccaaaaactgtctttaaaagagagagagagaggagcccgagccccgacgagtccccgcgcctcatccgcccgcgtccggtccgcgttcctccgccccaccatggctcggggccccggcctcgcgccgccaccgctgcggctgccgctgctgctgctggtgctggcggcggtgaccggccacacggccgcgcaggacaactgcacgtgtcccaccaacaagatgaccgtgtgcagccccgacggccccggcggccgctgccagtgccgcgcgctgggctcgggcatggcggtcgactgctccacgctgacctccaagtgtctgctgctcaaggcgcgcatgagcgcccccaagaacgcccgcacgctggtgcggccgagtgagcacgcgctcgtggacaacgatggcctctacgaccccgactgcgaccccgagggccgcttcaaggcgcgccagtgcaaccagacgtcggtgtgctggtgcgtgaactcggtgggcgtgcgccgcacggacaagggcgacctgagcctacgctgcgatgagctggtgcgcacccaccacatcctcattgacctgcgccaccgccccaccgccggcgccttcaaccactcagacctggacgccgagctgaggcggctcttccgcgagcgctatcggctgcaccccaagttcgtggcggccgtgcactacgagcagcccaccatccagatcgagctgcggcagaacacgtctcagaaggccgccggtgacgtggatatcggcgatgccgcctactacttcgagagggacatcaagggcgagtctctattccagggccgcggcggcctggacttgcgcgtgcgcggagaacccctgcaggtggagcgcacgctcatctattacctggacgagattcccccgaagttctccatgaagcgcctcaccgccggcctcatcgccgtcatcgtggtggtcgtggtggccctcgtcgccggcatggccgtcctggtgatcaccaaccggagaaagtcggggaagtacaagaaggtggagatcaaggaactgggggagttgagaaaggaaccgagcttgtaggtacccggcggggcaggggatggggtggggtaccggatttcggtatcgtcccagacccaagtgagtcacgcttcctgattcctcggcgcaaaggagacgtttatcctttcaaattcctgccttccccctcccttttgcgcacacaccaggtttaatagatcctggcctcagggtctcctttctttctcacttctgtcttgaaggaagcatttctaaaatgtatcccctttcggtccaacaacaggaaacctgactggggcagtgaaggaagggatggcatagcgttatgtgtaaaaaacaagtatctgtatgacaacccgggatcgtttgcaagtaactgaatccattgcgacattgtgaaggcttaaatgagtttagatgggaaatagcgttgttatcgccttgggtttaaattatttgatgagttccacttgtatcatggcctacccgaggagaagaggagtttgttaactgggcctatgtagtagcctcatttaccatcgtttgtattactgaccacatatgcttgtcactgggaaagaagcctgtttcagctgcctgaacgcagtttggatgtctttgaggacagacattgcccggaaactcagtctatttattcttcagcttgcccttactgccactgatattggtaatgttcttttttgtaaaatgtttgtacatatgttgtctttgataatgttgctgtaattttttaaaataaaacacgaatttaataaaatatgggaaaggcacaaaaaaaa

SEQ ID NO: 298406 - DNA, 1394 bp, Homo sapiens
  misc_feature (56)..(56): n is a, c, g, or t
cggacgcgtgggtccggacgcgtgggtccggacgcgtgggtcgacccacgcgtcgnggactacaggggagttttgttgaagttgcaaagtcctggagcctccagagggctgtcggcgcagtagcagcgagcagcagagtccgcacgctccggcgaggggcagaagagcgcgagggagcgcggggcagcagaagcgagagccgagcgcggacccagccaggacccacagccctccccagctgcccaggaagagccccagccatggaacaccagctcctgtgctgcgaagtggaaaccatccgccgcgcgtaccccgatgccaacctcctcaacgaccgggtgctgcgggccatgctgaaggcggaggagacctgcgcgccctcggtgtcctacttcaaatgtgtgcagaaggaggtcctgccgtccatgcggaagatcgtcgccacctggatgctggaggtctgcgaggaacagaagtgcgaggaggaggtcttcccgctggccatgaactacctggaccgcttcctgtcgctggagcccgtgaaaaagagccgcctgcagctgctgggggccacttgcatgttcgtggcctctaagatgaaggagaccatccccctgacggccgagaagctgtgcatctacaccgacaactccatccggcccgaggagctgctgcaaatggagctgctcctggtgaacaagctcaagtggaacctggccgcaatgaccccgcacgatttcattgaacacttcctctccaaaatgccagaggcggaggagaacaaacagatcatccgcaaacacgcgcagaccttcgttgccctctgtgccacagatgtgaagttcatttccaatccgccctccatggtggcagcggggagcgtggtggccgcagtgcaaggcctgaacctgaggagccccaacaacttcctgtcctactaccgcctcacacgcttcctctccagagtgatcaagtgtgacccggactgcctccgggcctgccaggagcagatcgaagccctgctggagtcaagcctgcgccaggcccagcagaacatggaccccaaggccgccgaggaggaggaagaggaggaggaggaggtggacctggcttgcacacccaccgacgtgcgggacgtggacatctgagggcgccaggcaggcgggcgccaccgccacccgcagcgagggcggagccggccccaggtgctccactgacagtccctcctctccggagcattttgataccagaagggaaagcttcattctccttgttgttggttgttttttcctttgctctttcccccttccatctctgacttaagcaaaagaaaaagattacccaaaaactgtctttaaaagagagagagagagaatctacttcaccgggtccat

SEQ ID NO: 298407 - DNA, 1369 bp, Homo sapiens
  misc_feature (56)..(56): n is a, c, g, or t
cggacgcgtgggtccggacgcgtgggtccggacgcgtgggtcgacccacgcgtcgnaggaggtgtgaggaggaggctcccgaggggaaggggcggtgcccacaccggggacaggccgcagctccattttcttattgcgctgctaccgttgacttccaggcacggtttggaaatattcacatcgcttctgtgtatctctttcacattgtttgctgctattggaggatcagttttttgttttacaatgtcatatactgccatgtactagttttagttttctcttagaacattgtattacagatgccttttttgtagttttttttttttttatgtgatcaatttggacttaatgtgattactgctctattccaaaaaggttgctgtttcacaatacctcatgcttcacttagccatggtggacccagcgggcaggttctgcctgctttggcgggcagacacgcgggcgcgatcccacacaggctggcgggggccggccccgaggccgcgtgcgtgagaaccgcgccggtgtccccagagaccaggctgtgtccctcttctcttccctgcgcctgtgatgctgggcacttcatctgatcgggggcgtagcatcatagtagtttttacagctgtgttattctttgcgtgtagctatggaagttgcataattattattattattattataacaagtgtgtcttacgtgccaccacggcgttgtacctgtaggactctcattcgggatgattggaatagcttctggaatttgttcaagttttgggtatgtttaatctgttatgtactagtgttctgtttgttattgttttgttaattacaccataatgctaatttaaagagactccaaatctcaatgaagccagctcacagtgctgtgtgccccggtcacctagcaagctgccgaaccaaaagaatttgcaccccgctgcgggcccacgtggttggggccctgccctggcagggtcatcctgtgctcggaggccatctcgggcacaggcccaccccgccccacccctccagaacacggctcacgcttacctcaaccatcctggctgcggcgtctgtctgaaccacgcgggggccttgagggacgctttgtctgtcgtgatggggcaagggcacaagtcctggatgttgtgtgtatcgagaggccaaaggctggtggcaagtgcacggggcacagcggagtctgtcctgtgacgcgcaagtctgagggtctgggcggcgggcggctgggtctgtgcatttctggttgcaccgcggcgcttcccagcaccaacatgtaaccggcatgtttccagcagaagacaaaaagacaaacatgaaagtctagaaataaaactggtaaaacccca

SEQ ID NO: 298408 - DNA, 1350 bp, Homo sapiens
  misc_feature (31)..(32): n is a, c, g, or t
tgataccctcatggaggatgtcagcaccatnnaggataggaggtgtgaggaggaggctcccgaggggaaggggcggtgcccacaccggggacaggccgcagctccattttcttattgcgctgctaccgttgacttccaggcacggtttggaaatattcacatcgcttctgtgtatctctttcacattgtttgctgctattggaggatcagttttttgttttacaatgtcatatactgccatgtactagttttagttttctcttagaacattgtattacagatgccttttttgtagttttttttttttttatgtgatcaatttggacttaatgtgattactgctctattccaaaaaggttgctgtttcacaatacctcatgcttcacttagccatggtggacccagcgggcaggttctgcctgctttggcgggcagacacgcgggcgcgatcccacacaggctggcgggggccggccccgaggccgcgtgcgtgagaaccgcgccggtgtccccagagaccaggctgtgtccctcttctcttccctgcgcctgtgatgctgggcacttcatctgatcgggggcgtagcatcatagtagtttttacagctgtgttattctttgcgtgtagctatggaagttgcataattattattattattattataacaagtgtgtcttacgtgccaccacggcgttgtacctgtaggactctcattcgggatgattggaatagcttctggaatttgttcaagttttgggtatgtttaatctgttatgtactagtgttctgtttgttattgttttgttaattacaccataatgctaatttaaagagactccaaatctcaatgaagccagctcacagtgctgtgtgccccggtcacctagcaagctgccgaaccaaaagaatttgcaccccgctgcgggcccacgtggttggggccctgccctggcagggtcatcctgtgctcggaggccatctcgggcacaggcccaccccgccccacccctccagaacacggctcacgcttacctcaaccatcctggctgcggcgtctgtctgaaccacgcgggggccttgagggacgctttgtctgtcgtgatggggcaagggcacaagtcctggatgttgtgtgtatcgagaggccaaaggctggtggcaagtgcacggggcacagcggagtctgtcctgtgacgcgcaagtctgagggtctgggcggcgggcggctgggtctgtgcatttctggttgcaccgcggcgcttcccagcaccaacatgtaaccggcatgtttccagcagaagacaaaaagacaaacatgaaagtctagaaataaaactggtaaaacccca

SEQ ID NO: 298409 - DNA, 988 bp, Homo sapiens
  misc_feature (56)..(56): n is a, c, g, or t
cggacgcgtgggtccggacgcgtgggtccggacgcgtgggtcgacccacgcgtcgnggactacaggggagttttgttgaagttgcaaagtcctggagcctccagagggctgtcggcgcagtagcagcgagcagcagagtccgcacgctccggcgaggggcagaagagcgcgagggagcgcggggcagcagaagcgagagccgagcgcggacccagccaggacccacagccctccccagctgcccaggaagagccccagccatggaacaccagctcctgtgctgcgaagtggaaaccatccgccgcgcgtaccccgatgccaacctcctcaacgaccgggtgctgcgggccatgctgaaggcggaggagacctgcgcgccctcggtgtcctacttcaaatgtgtgcagaaggaggtcctgccgtccatgcggaagatcgtcgccacctggatgctggaggtgcggggcttcgggcggctctcttaagacttccctgcaacttgttgcccagacccacgtttctttgctactcacccccctcccttctctcccgctagaactttgaagtttgccgtggtgtttctagggatccgtattttcaaaataaaaattgcgggtattttctgaaggaggaaggggtgggggtgggggtgctaaaagtagcgtttcgtgggaggggagaagggggtccgggaggggtgccttcgggagaagccagtgccaggggcaccccaatgggcccgagggtgcgggctggcaggctgggtgcgctttgtgtcccccgcctgcgccccagcccggctgcgcctcagcggccgggagccgccaactccggggggagggggcatagatttgatttttaaattaatatccatggacacgtatgcaagggccgctcgtgccagtattatgcgccatctttgctcttttattgcaaagcaaaagtgtttattaataattgggggcagggtgggggcggggagcggccg

SEQ ID NO: 298410 - DNA, 793 bp, Homo sapiens
  misc_feature (56)..(56): n is a, c, g, or t
cggacgcgtgggtccggacgcgtgggtccggacgcgtgggtcgacccacgcgtcgnggactacaggggagttttgttgaagttgcaaagtcctggagcctccagagggctgtcggcgcagtagcagcgagcagcagagtccgcacgctccggcgaggggcagaagagcgcgagggagcgcggggcagcagaagcgagagccgagcgcggacccagccaggacccacagcccctgccctggcagggtcatcctgtgctcggaggccatctcgggcacaggcccaccccgccccacccctccagaacacggctcacgcttacctcaaccatcctggctgcggcgtctgtctgaaccacgcgggggccttgagggacgctttgtctgtcgtgatggggcaagggcacaagtcctggatgttgtgtgtatcgagaggccaaaggctggtggcaagtgcacggggcacagcggagtctgtcctgtgacgcgcaagtctgagggtctgggcggcgggcggctgggtctgtgcatttctggttgcaccgcggcgcttcccagcaccaacatgtaaccggcatgtttccagcagaagacaaaaagacaaacatgaaagtctagaaataaaactggtaaaaccccaaaaaaaaaaaaaaaaaaaaaaaaaaaactcggatatatttatgttttctcttttggaggtgtttttcttactttcaaaactctaacttttgcagattttcttgaaaagtgccacggactaggaatccactcaaagggagaaatagaaaaccacccc

SEQ ID NO: 298411 - DNA, 749 bp, Homo sapiens
  misc_feature (56)..(56): n is a, c, g, or t
cggacgcgtgggtccggacgcgtgggtccggacgcgtgggtcgacccacgcgtcgnggactacaggggagttttgttgaagttgcaaagtcctggagcctccagagggctgtcggcgcagtagcagcgagcagcagagtccgcacgctccggcgaggggcagaagagcgcgagggagcgcggggcagcagaagcgagagccgagcgcggacccagccaggacccacagccctccccagctgcccaggaagagccccagccatggaacaccagctcctgtgctgcgaagtggaaaccatccgccgcgcgtaccccgatgccaacctcctcaacgaccgggtgctgcgggccatgctgaaggcggaggagacctgcgcgccctcggtgtcctacttcaaatgtgtgcagaaggaggtcctgccgtccatgcggaagatcgtcgccacctggatgctggaggtgccttcgggagaagccagtgccaggggcaccccaatgggcccgagggtgcgggctggcaggctgggtgcgctttgtgtcccccgcctgcgccccagcccggctgcgcctcagcggccgggagccgccaactccggggggagggggcatagatttgatttttaaattaatatccatggacacgtatgcaagggccgctcgtgccagtattatgcgccatctttgctcttttattgcaaagcaaaagtgtttattaataattgggggcagggtgggggcggggagcggccg

SEQ ID NO: 298412 - DNA, 400 bp, Homo sapiens
agcggccgccgggcgctggggccgcagctaagggccgcgcggctgccgggagcccgcgggaggggcgcagggacgcggcatgggtagttttggggggaccccgctagggaagggggggcctttgttcaagcagcgagtcccggggcgccccgaacgggcagcctgggccggagagcacggcgagctgcaaggtcgcgtggcccccaagacgccagggcttgatccccgtctgcagggatatcggcttggaggaccttctccgagcgagccgggggcctgggagcacattttcagaccttcggtgggcgcctgaggggcccgcaagtattttaaaataatttttgaaagtgcggcgtggtgcccttgcgagagggaaacgccgcccgcgcccagggggaag

SEQ ID NO: 298413 - DNA, 5229 bp, Homo sapiens
ctggttctcaacttcttttgaaataatgttcatagagaaggagggctgtctgagattcgagggaaacaagctctcaggacttccggtcgccatgatggctgtgggcggtaaacgcggttagtgcaagcatctgggccatcttcaatggtaaaaaagatacagtaaagacataaataccacatttgacaaatggaaaaaaaggagtgtccagaaaagagtagcagcagtgaggaagagctgccgagacgggtatacagggagctaccctgtgtttctgagaccctttgtgacatctcacattttttccaagaagatgatgagacagaggcagagccattattgttccgtgctgttcctgagtgtcaactatctgggggggacattcccaggagacatttgctcagaagagaatcaaatagtttcctcttatgcttctaaagtctgttttgagatcgaagaagattataaaaatcgtcagtttctggggcctgaaggaaatgtggatgttgagttgattgataagagcacaaacagatacagcgtttggttccccactgctggctggtatctgtggtcagccacaggcctcggcttcctggtaagggatgaggtcacagtgacgattgcgtttggttcctggagtcagcacctggccctggacctgcagcaccatgaacagtggctggtgggcggccccttgtttgatgtcactgcagagccagaggaggctgtcgccgaaatccacctcccccacttcatctccctccaaggtgaggtggacgtctcctggtttctcgttgcccattttaagaatgaagggatggtcctggagcatccagcccgggtggagcctttctatgctgtcctggaaagccccagcttctctctgatgggcatcctgctgcggatcgccagtgggactcgcctctccatccccatcacttccaacacattgatctattatcacccccaccccgaagatattaagttccacttgtaccttgtccccagcgacgccttgctaacaaaggcgatagatgatgaggaagatcgcttccatggtgtgcgcctgcagacttcgcccccaatggaacccctgaactttggttccagttatattgtgtctaattctgctaacctgaaagtaatgcccaaggagttgaaattgtcctacaggagccctggagaaattcagcacttctcaaaattctatgctgggcagatgaaggaacccattcaacttgagattactgaaaaaagacatgggactttggtgtgggatactgaggtgaagccagtggatctccagcttgtagctgcatcagcccctcctcctttctcaggtgcagcctttgtgaaggagaaccaccggcaactccaagccaggatgggggacctgaaaggggtgctcgatgatctccaggacaatgaggttcttactgagaatgagaaggagctggtggagcaggaaaagacacggcagagcaagaatgaggccttgctgagcatggtggagaagaaaggggacctggccctggacgtgctcttcagaagcattagtgaaagggacccttacctcgtgtcctatcttagacagcagaatttgtaaaatgagtcagttaggtagtctggaagagagaatccagcgttctcattggaaatggataaacagaaatgtgatcattgatttcagtgttcaagacagaagaagactgggtaacatctatcacacaggctttcaggacagacttgtaacctggcatgtacctattgactgtatcctcatgcattttcctcaagaatgtctgaagaaggtagtaatattccttttaaattttttccaaccattgcttgatatatcactattttatccattgacatgattcttgaagacccaggataaaggacatccggataggtgtgtttatgaaggatggggcctggaaaggcaacttttcctgattaatgtgaaaaataattcctatggacactccgtttgaagtatcaccttctcataactaaaagcagaaaagctaacaaaagcttctcagctgaggacactcaaggcatacatgatgacagtcttttttttttttgtatgttaggactttaacactttatctatggctactgttattagaacaatgtaaatgtatttgctgaaagagagcacaaaaatgggagaaaatgcaaacatgagcagaaaatattttcccactggtgtgtagcctgctacaaggagttgttgggttaaatgttcatggtcaactccaaggaatactgagatgaaatgtggtaaatcaactccacagaaccaccaaaaagaaaatgagggtaattcagcttattctgagacagacattcctggcaatgtaccatacaaaaaataagccaactctgacatttggattctaccatagactctgtcattttgtagccatttcagctgtcttttgattaatgttttcgtggcacacatatttccatccttttatgtttaatctgtttaaaacaagttcctagtagacaccatctggttgagtcagttttttttatggtgtattttgaacccattctgatagtctcttttaactggaagatttcaattacttacgttaatgtaattattaatatgttaggatttatcctcagtcagccagtttgttatgtcttttctattctactgttatcacatttgtaccacttaaagtggaatctaggcactttatcaccatttagatcctattaccttttctcatctaggatatagttatcttctacataatctttctgtatcttaaaacccatcaataaattattatatattttctacttttaatcactcagaagatttaaaaaactcatgagaagagtaatctgttatgtttttccagatatttaccatttctgttgctcttccttcattattttccaaatttcgttctgcaaatttccacttcttctgatagacgttttttagttcttttagagtggttctgataggtacagattctcttattttttgcttcctctgaggacatctttttctcaccttcattctcagtgatgttttttgcttgtagtatttttagttgacattgttttctgttcagcagtttccttttagcttccgtatttcctgatgagaaatctgcagtcattcaaattgttgtttccctgtatgtagtgtgtcatttttctgtcagatttcaaggtatttatctttagtttttagccatttcattatgttggggatgagtttccttgttttattccctttggaatttgctccaattcataaatttgcagttttatgtcttttaccaaacttagaggttttcagcctaatttctaaaaatactttttattagcctgattttcatctttataggaaatagtttaagtgatgacaagttccaatagcttatatgcccagaaggccttcaaaataagaattttgaaagaatacagaaaacaaacttttatatccttctcatgtcttctactgtaaaattcatatgctttgctactctaaacctagtttgaaatcaacagtcttgagaatagatgaaaattttgatgaatagtggaattcttttaaatggaaacctcttacatgtgattttccttgccatctagaaataaaccatagtatttatgttgaatcaatcaatattatattttgtttttttcctcctcttctgagactcttattgtggaaatgttagacttttatgttttcctaaatgtccctgatattctacttatttagaacatcttttcattttttccattattctgattgggtaattttaatttgtctattttcaaatttgctggagtgttcacctgttgttgtctgtgtcgtcccactgagtgcattcaccaccttttaaattttggtcactgtatgtatcagttctaaaatttccattttgttctctatattttaaatttcttggcttatattctattttcctgcaaatgtgtcagcatttgcttgtttgagctttttttttttcaagacagggtctcaactctgttacccaggctggagtgcagtggtgcgatctcagctcactgcaacctctgcctcctggttcaagcgattattgtgcctcagcctcctgagtagctgggattacaggcatgcaccaccacagcccagctaattttttgtatttttagtagagacagagttttgctatgttggccaggctggttttgaactcctggcctcaagtgatccacccacctcagcctcccaaagtgctgggattacaggccactacacctggcacatttgagtattttttttttttttttttttttgagatggagtctcgctctgtcatctaggctggagtgcagtggtgtgatctcagctcactgcagcctctgtctcccgggctcaagcgattctcttgcctcagcctcctgagtagctaggactacaggtgcatgccaacacgcccggctaatttttttaaaaaatatttttagtagagacagggtttcaccattttggccaggatggtctcgatctcctgacctcatgatccacccgcctcggccttccaaagtgctgggattacaggcatgagccaccgtgcctggcctcatttgagtatttttataatgtctcttttaaagtctttgtcagataattccactgtacatgttattcagtgtttggtgtccactgagttgtcatttgccagacaagtggagatttttgcagctcatccttgtattctcagtagttccgatatgtaccctcgacatgtgaatgttatcttatgagactctgttttatttgtatccaacagaagatgtttattatttatttggctttctgtgaactgaggtcttaatatcagctcattttaaaagtctttgcagtggtattcggatctatcctgtgtgtgcctatgagattgggtgcagtgtatcctgttagctccattctcagggcgtttgaatgtgaattaggaccagcgcaatgaatgctcaagttggggttgggcgttagaattcataaaagtctttatatgctcagattctgcagctccatcctcttcatgattgtgatcgtaaggacagtggaattttgcagttgtctataccttatcttgaagtagaactaaattgttacatttgaagaatgtacttcataaatttacaaaaataaaaaaataggttaatgttattaaaacaaaaaggcacaca

SEQ ID NO: 298414 - DNA, 1951 bp, Homo sapiens
  misc_feature (679)..(679): n is a, c, g, or t
  misc_feature (706)..(706): n is a, c, g, or t
tatttattttattattttattatttgttttcgagatgaagaacaatcaaaggaaaatgatggacggaaattaacaatcattcttgggcggggggaaaaactccacccacaattcctaagtaaaaagggttacacacattctcggcataataagtctctctcaggccaaatgtgttcatgtgaacactatgaaggcattccagctgaggtcaggaaaataccaagtatgaccttccctatttaagttaaaatattggaagcttattccaaaatattggaataaatttgaaatacagtgattgaatggaaggacattaaattataactcattagacatgttattttactctatagacaaacacaacaaatcacctgaaataagctacaaaagataaaccagtaagttagagaaataatctttttttttttttgagatggagtctccctctgttgcttaggccagagtgcagtggcgcagtcttggctcactgcaacctctgcttcctgagttctagtgagtctcctcctcagcctcccaagtagctgggattacaggcatgtgccaccatgcctggctaattttttttgtatttttagtagagatggggtttcaccatgttggacatgctggtcttgaactcctgacctcaggtgatctgcctgcctcaggttcccaagtnctgggattataggcttgagccattgcncctggccagaagaatcttaatgtacaaaaatgaataggtttttaatacaacagactatcccaattccttgaaagaagaaaatacacccattaaaacagaaactatggtgcctagaattaaactgcacaaaaaactacatgacccatataatttttttatgttgaaataattttaaacatgcaaaattagcaaagattcatataaatcctcaaccagcctatcctgatgttagctatatatataattgtattatatgtataatagttgttatatataaaactgtatatatacatttattgtattataatcatatatatacatttattgcattatatataatatacaactgtatatgtaattgtaatataataattatatacataatagtatatgtaatacaagttatccaaccaggaaattgatgtcaacgtatcttaccattacctaatgtgcagaccttatttgaattttgtcaatatttctcttaacgtcctctttcttctccaagatcgaattgaggatctcacattgcactcagttgttatgtccttagattcctccaggctgtgaccgtttcttattcttcccttgtcttttgtgattgtgacacttttgctgagcatggccaattattttacagaatgtttatcaatttggatttctttgatgttttctcacgattaggctgaggtcatgcatgtttgtcttctgtgttcagtcaacatgccccatcctttttgaaatatttcttcatgttctggcgtcacaatttgttccaatgttatcttatatattcctgccccagccctcgaagtaaccatttctccacagatacttcaaaatagtatttagaaaccaaggccgggcacagtggctcacgcctgtaatcccagcactttgggaggccgaggcgggctgatctcgaggtcaagagacggagaccatcctgaccaacatggtgaaactccgtctttactaaaaatacaaaaaattagccgagcgtggtggcatgcgcctgtaattccagctactcgggaggctgaggcaagagaatcgcttgaacctggaaggcagaggttgcagtgagccgagattgctccattacactccagcctgggtgacagacggagacttcatcaggtgagtttcaggagccctagcgtacaggaaggagaaacggaggcttgttggtaggacaccgccaggctgctctgtgttctgttcctcttagtcagcaaggaagga

SEQ ID NO: 298415 - DNA, 233 bp, Homo sapiens
gacagcctcataggaacttctccctttcttctcaagtgaccaagaggaacagaacacagagcagcctggcagtgtccaagcaacaagcctccgctcctccttcctgcaccctggggctcctgaaactcacatgccccaaagtggaactcacccaaatgtctatcgtctgctgaatggataagagaatatgtgatgtctccatacggtggaatattattcagccatgaaagcaa

SEQ ID NO: 298416 - DNA, 5393 bp, Homo sapiens
aaaagaagttgagaaccagagaaaccgacctaaggggattctcccatttggcccgtcctaccctaaagtcaccacctgctgcttttctggagcgcttaccagtgaccaagaggaacagaacacagagcagcctggcagtgtccaagcaacaagcctccgctcctccttcctgcaccctggggctcctgaaactcacatgagaaggagggctgtctgagattcgagggaaacaagctctcaggacttccggtcgccatgatggctgtgggcggtaaacgcggttagtgcaagcatctgggccatcttcaatggtaaaaaagatacagtaaagacataaataccacatttgacaaatggaaaaaaaggagtgtccagaaaagagtagcagcagtgaggaagagctgccgagacgggtatacagggagctaccctgtgtttctgagaccctttgtgacatctcacattttttccaagaagatgatgagacagaggcagagccattattgttccgtgctgttcctgagtgtcaactatctgggggggacattcccaggagacatttgctcagaagagaatcaaatagtttcctcttatgcttctaaagtctgttttgagatcgaagaagattataaaaatcgtcagtttctggggcctgaaggaaatgtggatgttgagttgattgataagagcacaaacagatacagcgtttggttccccactgctggctggtatctgtggtcagccacaggcctcggcttcctggtaagggatgaggtcacagtgacgattgcgtttggttcctggagtcagcacctggccctggacctgcagcaccatgaacagtggctggtgggcggccccttgtttgatgtcactgcagagccagaggaggctgtcgccgaaatccacctcccccacttcatctccctccaaggtgaggtggacgtctcctggtttctcgttgcccattttaagaatgaagggatggtcctggagcatccagcccgggtggagcctttctatgctgtcctggaaagccccagcttctctctgatgggcatcctgctgcggatcgccagtgggactcgcctctccatccccatcacttccaacacattgatctattatcacccccaccccgaagatattaagttccacttgtaccttgtccccagcgacgccttgctaacaaaggcgatagatgatgaggaagatcgcttccatggtgtgcgcctgcagacttcgcccccaatggaacccctgaactttggttccagttatattgtgtctaattctgctaacctgaaagtaatgcccaaggagttgaaattgtcctacaggagccctggagaaattcagcacttctcaaaattctatgctgggcagatgaaggaacccattcaacttgagattactgaaaaaagacatgggactttggtgtgggatactgaggtgaagccagtggatctccagcttgtagctgcatcagcccctcctcctttctcaggtgcagcctttgtgaaggagaaccaccggcaactccaagccaggatgggggacctgaaaggggtgctcgatgatctccaggacaatgaggttcttactgagaatgagaaggagctggtggagcaggaaaagacacggcagagcaagaatgaggccttgctgagcatggtggagaagaaaggggacctggccctggacgtgctcttcagaagcattagtgaaagggacccttacctcgtgtcctatcttagacagcagaatttgtaaaatgagtcagttaggtagtctggaagagagaatccagcgttctcattggaaatggataaacagaaatgtgatcattgatttcagtgttcaagacagaagaagactgggtaacatctatcacacaggctttcaggacagacttgtaacctggcatgtacctattgactgtatcctcatgcattttcctcaagaatgtctgaagaaggtagtaatattccttttaaattttttccaaccattgcttgatatatcactattttatccattgacatgattcttgaagacccaggataaaggacatccggataggtgtgtttatgaaggatggggcctggaaaggcaacttttcctgattaatgtgaaaaataattcctatggacactccgtttgaagtatcaccttctcataactaaaagcagaaaagctaacaaaagcttctcagctgaggacactcaaggcatacatgatgacagtcttttttttttttgtatgttaggactttaacactttatctatggctactgttattagaacaatgtaaatgtatttgctgaaagagagcacaaaaatgggagaaaatgcaaacatgagcagaaaatattttcccactggtgtgtagcctgctacaaggagttgttgggttaaatgttcatggtcaactccaaggaatactgagatgaaatgtggtaaatcaactccacagaaccaccaaaaagaaaatgagggtaattcagcttattctgagacagacattcctggcaatgtaccatacaaaaaataagccaactctgacatttggattctaccatagactctgtcattttgtagccatttcagctgtcttttgattaatgttttcgtggcacacatatttccatccttttatgtttaatctgtttaaaacaagttcctagtagacaccatctggttgagtcagttttttttatggtgtattttgaacccattctgatagtctcttttaactggaagatttcaattacttacgttaatgtaattattaatatgttaggatttatcctcagtcagccagtttgttatgtcttttctattctactgttatcacatttgtaccacttaaagtggaatctaggcactttatcaccatttagatcctattaccttttctcatctaggatatagttatcttctacataatctttctgtatcttaaaacccatcaataaattattatatattttctacttttaatcactcagaagatttaaaaaactcatgagaagagtaatctgttatgtttttccagatatttaccatttctgttgctcttccttcattattttccaaatttcgttctgcaaatttccacttcttctgatagacgttttttagttcttttagagtggttctgataggtacagattctcttattttttgcttcctctgaggacatctttttctcaccttcattctcagtgatgttttttgcttgtagtatttttagttgacattgttttctgttcagcagtttccttttagcttccgtatttcctgatgagaaatctgcagtcattcaaattgttgtttccctgtatgtagtgtgtcatttttctgtcagatttcaaggtatttatctttagtttttagccatttcattatgttggggatgagtttccttgttttattccctttggaatttgctccaattcataaatttgcagttttatgtcttttaccaaacttagaggttttcagcctaatttctaaaaatactttttattagcctgattttcatctttataggaaatagtttaagtgatgacaagttccaatagcttatatgcccagaaggccttcaaaataagaattttgaaagaatacagaaaacaaacttttatatccttctcatgtcttctactgtaaaattcatatgctttgctactctaaacctagtttgaaatcaacagtcttgagaatagatgaaaattttgatgaatagtggaattcttttaaatggaaacctcttacatgtgattttccttgccatctagaaataaaccatagtatttatgttgaatcaatcaatattatattttgtttttttcctcctcttctgagactcttattgtggaaatgttagacttttatgttttcctaaatgtccctgatattctacttatttagaacatcttttcattttttccattattctgattgggtaattttaatttgtctattttcaaatttgctggagtgttcacctgttgttgtctgtgtcgtcccactgagtgcattcaccaccttttaaattttggtcactgtatgtatcagttctaaaatttccattttgttctctatattttaaatttcttggcttatattctattttcctgcaaatgtgtcagcatttgcttgtttgagctttttttttttcaagacagggtctcaactctgttacccaggctggagtgcagtggtgcgatctcagctcactgcaacctctgcctcctggttcaagcgattattgtgcctcagcctcctgagtagctgggattacaggcatgcaccaccacagcccagctaattttttgtatttttagtagagacagagttttgctatgttggccaggctggttttgaactcctggcctcaagtgatccacccacctcagcctcccaaagtgctgggattacaggccactacacctggcacatttgagtattttttttttttttttttttttgagatggagtctcgctctgtcatctaggctggagtgcagtggtgtgatctcagctcactgcagcctctgtctcccgggctcaagcgattctcttgcctcagcctcctgagtagctaggactacaggtgcatgccaacacgcccggctaatttttttaaaaaatatttttagtagagacagggtttcaccattttggccaggatggtctcgatctcctgacctcatgatccacccgcctcggccttccaaagtgctgggattacaggcatgagccaccgtgcctggcctcatttgagtatttttataatgtctcttttaaagtctttgtcagataattccactgtacatgttattcagtgtttggtgtccactgagttgtcatttgccagacaagtggagatttttgcagctcatccttgtattctcagtagttccgatatgtaccctcgacatgtgaatgttatcttatgagactctgttttatttgtatccaacagaagatgtttattatttatttggctttctgtgaactgaggtcttaatatcagctcattttaaaagtctttgcagtggtattcggatctatcctgtgtgtgcctatgagattgggtgcagtgtatcctgttagctccattctcagggcgtttgaatgtgaattaggaccagcgcaatgaatgctcaagttggggttgggcgttagaattcataaaagtctttatatgctcagattctgcagctccatcctcttcatgattgtgatcgtaaggacagtggaattttgcagttgtctataccttatcttgaagtagaactaaattgttacatttgaagaatgtacttcataaatttacaaaaataaaaaaataggttaatgttattaaaacaaaaaggcacaca

SEQ ID NO: 298417 - DNA, 5543 bp, Homo sapiens
aaaagaagttgagaaccagagaaaccgacctaaggggattctcccatttggcccgtcctaccctaaagtcaccacctgctgcttttctggagcgcttaccagtgaccaagaggaacagaacacagagcagcctggcagtgtccaagcaacaagcctccgctcctccttcctgcaccctggggctcctgaaactcacatgagaaggagggctgtctgagattcgagggaaacaagctctcaggacttccggtcgccatgatggctgtgggcggtaaacgcggttagtgcaagcatctgggccatcttcaatggtaaaaaagatacagtaaagacataaataccacatttgacaaatggaaaaaaaggagtgtccagaaaagagtagcagcagtgaggaagagctgccgagacgggacagtggatccagtaggaacatagatgcatccaaactcattagactacaaggatcacggaaactgttggttgacaatagcatacgggaactgcaatacacaaaaactggaattttttttcaggctgaggcctgtgtgacaaatgatacggtatacagggagctaccctgtgtttctgagaccctttgtgacatctcacattttttccaagaagatgatgagacagaggcagagccattattgttccgtgctgttcctgagtgtcaactatctgggggggacattcccaggagacatttgctcagaagagaatcaaatagtttcctcttatgcttctaaagtctgttttgagatcgaagaagattataaaaatcgtcagtttctggggcctgaaggaaatgtggatgttgagttgattgataagagcacaaacagatacagcgtttggttccccactgctggctggtatctgtggtcagccacaggcctcggcttcctggtaagggatgaggtcacagtgacgattgcgtttggttcctggagtcagcacctggccctggacctgcagcaccatgaacagtggctggtgggcggccccttgtttgatgtcactgcagagccagaggaggctgtcgccgaaatccacctcccccacttcatctccctccaaggtgaggtggacgtctcctggtttctcgttgcccattttaagaatgaagggatggtcctggagcatccagcccgggtggagcctttctatgctgtcctggaaagccccagcttctctctgatgggcatcctgctgcggatcgccagtgggactcgcctctccatccccatcacttccaacacattgatctattatcacccccaccccgaagatattaagttccacttgtaccttgtccccagcgacgccttgctaacaaaggcgatagatgatgaggaagatcgcttccatggtgtgcgcctgcagacttcgcccccaatggaacccctgaactttggttccagttatattgtgtctaattctgctaacctgaaagtaatgcccaaggagttgaaattgtcctacaggagccctggagaaattcagcacttctcaaaattctatgctgggcagatgaaggaacccattcaacttgagattactgaaaaaagacatgggactttggtgtgggatactgaggtgaagccagtggatctccagcttgtagctgcatcagcccctcctcctttctcaggtgcagcctttgtgaaggagaaccaccggcaactccaagccaggatgggggacctgaaaggggtgctcgatgatctccaggacaatgaggttcttactgagaatgagaaggagctggtggagcaggaaaagacacggcagagcaagaatgaggccttgctgagcatggtggagaagaaaggggacctggccctggacgtgctcttcagaagcattagtgaaagggacccttacctcgtgtcctatcttagacagcagaatttgtaaaatgagtcagttaggtagtctggaagagagaatccagcgttctcattggaaatggataaacagaaatgtgatcattgatttcagtgttcaagacagaagaagactgggtaacatctatcacacaggctttcaggacagacttgtaacctggcatgtacctattgactgtatcctcatgcattttcctcaagaatgtctgaagaaggtagtaatattccttttaaattttttccaaccattgcttgatatatcactattttatccattgacatgattcttgaagacccaggataaaggacatccggataggtgtgtttatgaaggatggggcctggaaaggcaacttttcctgattaatgtgaaaaataattcctatggacactccgtttgaagtatcaccttctcataactaaaagcagaaaagctaacaaaagcttctcagctgaggacactcaaggcatacatgatgacagtcttttttttttttgtatgttaggactttaacactttatctatggctactgttattagaacaatgtaaatgtatttgctgaaagagagcacaaaaatgggagaaaatgcaaacatgagcagaaaatattttcccactggtgtgtagcctgctacaaggagttgttgggttaaatgttcatggtcaactccaaggaatactgagatgaaatgtggtaaatcaactccacagaaccaccaaaaagaaaatgagggtaattcagcttattctgagacagacattcctggcaatgtaccatacaaaaaataagccaactctgacatttggattctaccatagactctgtcattttgtagccatttcagctgtcttttgattaatgttttcgtggcacacatatttccatccttttatgtttaatctgtttaaaacaagttcctagtagacaccatctggttgagtcagttttttttatggtgtattttgaacccattctgatagtctcttttaactggaagatttcaattacttacgttaatgtaattattaatatgttaggatttatcctcagtcagccagtttgttatgtcttttctattctactgttatcacatttgtaccacttaaagtggaatctaggcactttatcaccatttagatcctattaccttttctcatctaggatatagttatcttctacataatctttctgtatcttaaaacccatcaataaattattatatattttctacttttaatcactcagaagatttaaaaaactcatgagaagagtaatctgttatgtttttccagatatttaccatttctgttgctcttccttcattattttccaaatttcgttctgcaaatttccacttcttctgatagacgttttttagttcttttagagtggttctgataggtacagattctcttattttttgcttcctctgaggacatctttttctcaccttcattctcagtgatgttttttgcttgtagtatttttagttgacattgttttctgttcagcagtttccttttagcttccgtatttcctgatgagaaatctgcagtcattcaaattgttgtttccctgtatgtagtgtgtcatttttctgtcagatttcaaggtatttatctttagtttttagccatttcattatgttggggatgagtttccttgttttattccctttggaatttgctccaattcataaatttgcagttttatgtcttttaccaaacttagaggttttcagcctaatttctaaaaatactttttattagcctgattttcatctttataggaaatagtttaagtgatgacaagttccaatagcttatatgcccagaaggccttcaaaataagaattttgaaagaatacagaaaacaaacttttatatccttctcatgtcttctactgtaaaattcatatgctttgctactctaaacctagtttgaaatcaacagtcttgagaatagatgaaaattttgatgaatagtggaattcttttaaatggaaacctcttacatgtgattttccttgccatctagaaataaaccatagtatttatgttgaatcaatcaatattatattttgtttttttcctcctcttctgagactcttattgtggaaatgttagacttttatgttttcctaaatgtccctgatattctacttatttagaacatcttttcattttttccattattctgattgggtaattttaatttgtctattttcaaatttgctggagtgttcacctgttgttgtctgtgtcgtcccactgagtgcattcaccaccttttaaattttggtcactgtatgtatcagttctaaaatttccattttgttctctatattttaaatttcttggcttatattctattttcctgcaaatgtgtcagcatttgcttgtttgagctttttttttttcaagacagggtctcaactctgttacccaggctggagtgcagtggtgcgatctcagctcactgcaacctctgcctcctggttcaagcgattattgtgcctcagcctcctgagtagctgggattacaggcatgcaccaccacagcccagctaattttttgtatttttagtagagacagagttttgctatgttggccaggctggttttgaactcctggcctcaagtgatccacccacctcagcctcccaaagtgctgggattacaggccactacacctggcacatttgagtattttttttttttttttttttttgagatggagtctcgctctgtcatctaggctggagtgcagtggtgtgatctcagctcactgcagcctctgtctcccgggctcaagcgattctcttgcctcagcctcctgagtagctaggactacaggtgcatgccaacacgcccggctaatttttttaaaaaatatttttagtagagacagggtttcaccattttggccaggatggtctcgatctcctgacctcatgatccacccgcctcggccttccaaagtgctgggattacaggcatgagccaccgtgcctggcctcatttgagtatttttataatgtctcttttaaagtctttgtcagataattccactgtacatgttattcagtgtttggtgtccactgagttgtcatttgccagacaagtggagatttttgcagctcatccttgtattctcagtagttccgatatgtaccctcgacatgtgaatgttatcttatgagactctgttttatttgtatccaacagaagatgtttattatttatttggctttctgtgaactgaggtcttaatatcagctcattttaaaagtctttgcagtggtattcggatctatcctgtgtgtgcctatgagattgggtgcagtgtatcctgttagctccattctcagggcgtttgaatgtgaattaggaccagcgcaatgaatgctcaagttggggttgggcgttagaattcataaaagtctttatatgctcagattctgcagctccatcctcttcatgattgtgatcgtaaggacagtggaattttgcagttgtctataccttatcttgaagtagaactaaattgttacatttgaagaatgtacttcataaatttacaaaaataaaaaaataggttaatgttattaaaacaaaaaggcacaca

SEQ ID NO: 298418 - DNA, 5477 bp, Homo sapiens
gacagcctcataggaacttctccctttcttctcaagtgaccaagaggaacagaacacagagcagcctggcagtgtccaagcaacaagcctccgctcctccttcctgcaccctggggctcctgaaactcacatgagaaggagggctgtctgagattcgagggaaacaagctctcaggacttccggtcgccatgatggctgtgggcggtaaacgcggttagtgcaagcatctgggccatcttcaatggtaaaaaagatacagtaaagacataaataccacatttgacaaatggaaaaaaaggagtgtccagaaaagagtagcagcagtgaggaagagctgccgagacgggacagtggatccagtaggaacatagatgcatccaaactcattagactacaaggatcacggaaactgttggttgacaatagcatacgggaactgcaatacacaaaaactggaattttttttcaggctgaggcctgtgtgacaaatgatacggtatacagggagctaccctgtgtttctgagaccctttgtgacatctcacattttttccaagaagatgatgagacagaggcagagccattattgttccgtgctgttcctgagtgtcaactatctgggggggacattcccaggagacatttgctcagaagagaatcaaatagtttcctcttatgcttctaaagtctgttttgagatcgaagaagattataaaaatcgtcagtttctggggcctgaaggaaatgtggatgttgagttgattgataagagcacaaacagatacagcgtttggttccccactgctggctggtatctgtggtcagccacaggcctcggcttcctggtaagggatgaggtcacagtgacgattgcgtttggttcctggagtcagcacctggccctggacctgcagcaccatgaacagtggctggtgggcggccccttgtttgatgtcactgcagagccagaggaggctgtcgccgaaatccacctcccccacttcatctccctccaaggtgaggtggacgtctcctggtttctcgttgcccattttaagaatgaagggatggtcctggagcatccagcccgggtggagcctttctatgctgtcctggaaagccccagcttctctctgatgggcatcctgctgcggatcgccagtgggactcgcctctccatccccatcacttccaacacattgatctattatcacccccaccccgaagatattaagttccacttgtaccttgtccccagcgacgccttgctaacaaaggcgatagatgatgaggaagatcgcttccatggtgtgcgcctgcagacttcgcccccaatggaacccctgaactttggttccagttatattgtgtctaattctgctaacctgaaagtaatgcccaaggagttgaaattgtcctacaggagccctggagaaattcagcacttctcaaaattctatgctgggcagatgaaggaacccattcaacttgagattactgaaaaaagacatgggactttggtgtgggatactgaggtgaagccagtggatctccagcttgtagctgcatcagcccctcctcctttctcaggtgcagcctttgtgaaggagaaccaccggcaactccaagccaggatgggggacctgaaaggggtgctcgatgatctccaggacaatgaggttcttactgagaatgagaaggagctggtggagcaggaaaagacacggcagagcaagaatgaggccttgctgagcatggtggagaagaaaggggacctggccctggacgtgctcttcagaagcattagtgaaagggacccttacctcgtgtcctatcttagacagcagaatttgtaaaatgagtcagttaggtagtctggaagagagaatccagcgttctcattggaaatggataaacagaaatgtgatcattgatttcagtgttcaagacagaagaagactgggtaacatctatcacacaggctttcaggacagacttgtaacctggcatgtacctattgactgtatcctcatgcattttcctcaagaatgtctgaagaaggtagtaatattccttttaaattttttccaaccattgcttgatatatcactattttatccattgacatgattcttgaagacccaggataaaggacatccggataggtgtgtttatgaaggatggggcctggaaaggcaacttttcctgattaatgtgaaaaataattcctatggacactccgtttgaagtatcaccttctcataactaaaagcagaaaagctaacaaaagcttctcagctgaggacactcaaggcatacatgatgacagtcttttttttttttgtatgttaggactttaacactttatctatggctactgttattagaacaatgtaaatgtatttgctgaaagagagcacaaaaatgggagaaaatgcaaacatgagcagaaaatattttcccactggtgtgtagcctgctacaaggagttgttgggttaaatgttcatggtcaactccaaggaatactgagatgaaatgtggtaaatcaactccacagaaccaccaaaaagaaaatgagggtaattcagcttattctgagacagacattcctggcaatgtaccatacaaaaaataagccaactctgacatttggattctaccatagactctgtcattttgtagccatttcagctgtcttttgattaatgttttcgtggcacacatatttccatccttttatgtttaatctgtttaaaacaagttcctagtagacaccatctggttgagtcagttttttttatggtgtattttgaacccattctgatagtctcttttaactggaagatttcaattacttacgttaatgtaattattaatatgttaggatttatcctcagtcagccagtttgttatgtcttttctattctactgttatcacatttgtaccacttaaagtggaatctaggcactttatcaccatttagatcctattaccttttctcatctaggatatagttatcttctacataatctttctgtatcttaaaacccatcaataaattattatatattttctacttttaatcactcagaagatttaaaaaactcatgagaagagtaatctgttatgtttttccagatatttaccatttctgttgctcttccttcattattttccaaatttcgttctgcaaatttccacttcttctgatagacgttttttagttcttttagagtggttctgataggtacagattctcttattttttgcttcctctgaggacatctttttctcaccttcattctcagtgatgttttttgcttgtagtatttttagttgacattgttttctgttcagcagtttccttttagcttccgtatttcctgatgagaaatctgcagtcattcaaattgttgtttccctgtatgtagtgtgtcatttttctgtcagatttcaaggtatttatctttagtttttagccatttcattatgttggggatgagtttccttgttttattccctttggaatttgctccaattcataaatttgcagttttatgtcttttaccaaacttagaggttttcagcctaatttctaaaaatactttttattagcctgattttcatctttataggaaatagtttaagtgatgacaagttccaatagcttatatgcccagaaggccttcaaaataagaattttgaaagaatacagaaaacaaacttttatatccttctcatgtcttctactgtaaaattcatatgctttgctactctaaacctagtttgaaatcaacagtcttgagaatagatgaaaattttgatgaatagtggaattcttttaaatggaaacctcttacatgtgattttccttgccatctagaaataaaccatagtatttatgttgaatcaatcaatattatattttgtttttttcctcctcttctgagactcttattgtggaaatgttagacttttatgttttcctaaatgtccctgatattctacttatttagaacatcttttcattttttccattattctgattgggtaattttaatttgtctattttcaaatttgctggagtgttcacctgttgttgtctgtgtcgtcccactgagtgcattcaccaccttttaaattttggtcactgtatgtatcagttctaaaatttccattttgttctctatattttaaatttcttggcttatattctattttcctgcaaatgtgtcagcatttgcttgtttgagctttttttttttcaagacagggtctcaactctgttacccaggctggagtgcagtggtgcgatctcagctcactgcaacctctgcctcctggttcaagcgattattgtgcctcagcctcctgagtagctgggattacaggcatgcaccaccacagcccagctaattttttgtatttttagtagagacagagttttgctatgttggccaggctggttttgaactcctggcctcaagtgatccacccacctcagcctcccaaagtgctgggattacaggccactacacctggcacatttgagtattttttttttttttttttttttgagatggagtctcgctctgtcatctaggctggagtgcagtggtgtgatctcagctcactgcagcctctgtctcccgggctcaagcgattctcttgcctcagcctcctgagtagctaggactacaggtgcatgccaacacgcccggctaatttttttaaaaaatatttttagtagagacagggtttcaccattttggccaggatggtctcgatctcctgacctcatgatccacccgcctcggccttccaaagtgctgggattacaggcatgagccaccgtgcctggcctcatttgagtatttttataatgtctcttttaaagtctttgtcagataattccactgtacatgttattcagtgtttggtgtccactgagttgtcatttgccagacaagtggagatttttgcagctcatccttgtattctcagtagttccgatatgtaccctcgacatgtgaatgttatcttatgagactctgttttatttgtatccaacagaagatgtttattatttatttggctttctgtgaactgaggtcttaatatcagctcattttaaaagtctttgcagtggtattcggatctatcctgtgtgtgcctatgagattgggtgcagtgtatcctgttagctccattctcagggcgtttgaatgtgaattaggaccagcgcaatgaatgctcaagttggggttgggcgttagaattcataaaagtctttatatgctcagattctgcagctccatcctcttcatgattgtgatcgtaaggacagtggaattttgcagttgtctataccttatcttgaagtagaactaaattgttacatttgaagaatgtacttcataaatttacaaaaataaaaaaataggttaatgttattaaaacaaaaaggcacaca

SEQ ID NO: 298419 - DNA, 5432 bp, Homo sapiens
aaaagaagttgagaaccagagaaaccgacctaaggggattctcccatttggcccgtcctaccctaaagtcaccacctgctgcttttctggagcgcttaccagtgaccaagaggaacagaacacagagcagcctggcagtgtccaagcaacaagcctccgctcctccttcctgcaccctggggctcctgaaactcacatgggtaaaaaagatacagtaaagacataaataccacatttgacaaatggaaaaaaaggagtgtccagaaaagagtagcagcagtgaggaagagctgccgagacgggacagtggatccagtaggaacatagatgcatccaaactcattagactacaaggatcacggaaactgttggttgacaatagcatacgggaactgcaatacacaaaaactggaattttttttcaggctgaggcctgtgtgacaaatgatacggtatacagggagctaccctgtgtttctgagaccctttgtgacatctcacattttttccaagaagatgatgagacagaggcagagccattattgttccgtgctgttcctgagtgtcaactatctgggggggacattcccaggagacatttgctcagaagagaatcaaatagtttcctcttatgcttctaaagtctgttttgagatcgaagaagattataaaaatcgtcagtttctggggcctgaaggaaatgtggatgttgagttgattgataagagcacaaacagatacagcgtttggttccccactgctggctggtatctgtggtcagccacaggcctcggcttcctggtaagggatgaggtcacagtgacgattgcgtttggttcctggagtcagcacctggccctggacctgcagcaccatgaacagtggctggtgggcggccccttgtttgatgtcactgcagagccagaggaggctgtcgccgaaatccacctcccccacttcatctccctccaaggtgaggtggacgtctcctggtttctcgttgcccattttaagaatgaagggatggtcctggagcatccagcccgggtggagcctttctatgctgtcctggaaagccccagcttctctctgatgggcatcctgctgcggatcgccagtgggactcgcctctccatccccatcacttccaacacattgatctattatcacccccaccccgaagatattaagttccacttgtaccttgtccccagcgacgccttgctaacaaaggcgatagatgatgaggaagatcgcttccatggtgtgcgcctgcagacttcgcccccaatggaacccctgaactttggttccagttatattgtgtctaattctgctaacctgaaagtaatgcccaaggagttgaaattgtcctacaggagccctggagaaattcagcacttctcaaaattctatgctgggcagatgaaggaacccattcaacttgagattactgaaaaaagacatgggactttggtgtgggatactgaggtgaagccagtggatctccagcttgtagctgcatcagcccctcctcctttctcaggtgcagcctttgtgaaggagaaccaccggcaactccaagccaggatgggggacctgaaaggggtgctcgatgatctccaggacaatgaggttcttactgagaatgagaaggagctggtggagcaggaaaagacacggcagagcaagaatgaggccttgctgagcatggtggagaagaaaggggacctggccctggacgtgctcttcagaagcattagtgaaagggacccttacctcgtgtcctatcttagacagcagaatttgtaaaatgagtcagttaggtagtctggaagagagaatccagcgttctcattggaaatggataaacagaaatgtgatcattgatttcagtgttcaagacagaagaagactgggtaacatctatcacacaggctttcaggacagacttgtaacctggcatgtacctattgactgtatcctcatgcattttcctcaagaatgtctgaagaaggtagtaatattccttttaaattttttccaaccattgcttgatatatcactattttatccattgacatgattcttgaagacccaggataaaggacatccggataggtgtgtttatgaaggatggggcctggaaaggcaacttttcctgattaatgtgaaaaataattcctatggacactccgtttgaagtatcaccttctcataactaaaagcagaaaagctaacaaaagcttctcagctgaggacactcaaggcatacatgatgacagtcttttttttttttgtatgttaggactttaacactttatctatggctactgttattagaacaatgtaaatgtatttgctgaaagagagcacaaaaatgggagaaaatgcaaacatgagcagaaaatattttcccactggtgtgtagcctgctacaaggagttgttgggttaaatgttcatggtcaactccaaggaatactgagatgaaatgtggtaaatcaactccacagaaccaccaaaaagaaaatgagggtaattcagcttattctgagacagacattcctggcaatgtaccatacaaaaaataagccaactctgacatttggattctaccatagactctgtcattttgtagccatttcagctgtcttttgattaatgttttcgtggcacacatatttccatccttttatgtttaatctgtttaaaacaagttcctagtagacaccatctggttgagtcagttttttttatggtgtattttgaacccattctgatagtctcttttaactggaagatttcaattacttacgttaatgtaattattaatatgttaggatttatcctcagtcagccagtttgttatgtcttttctattctactgttatcacatttgtaccacttaaagtggaatctaggcactttatcaccatttagatcctattaccttttctcatctaggatatagttatcttctacataatctttctgtatcttaaaacccatcaataaattattatatattttctacttttaatcactcagaagatttaaaaaactcatgagaagagtaatctgttatgtttttccagatatttaccatttctgttgctcttccttcattattttccaaatttcgttctgcaaatttccacttcttctgatagacgttttttagttcttttagagtggttctgataggtacagattctcttattttttgcttcctctgaggacatctttttctcaccttcattctcagtgatgttttttgcttgtagtatttttagttgacattgttttctgttcagcagtttccttttagcttccgtatttcctgatgagaaatctgcagtcattcaaattgttgtttccctgtatgtagtgtgtcatttttctgtcagatttcaaggtatttatctttagtttttagccatttcattatgttggggatgagtttccttgttttattccctttggaatttgctccaattcataaatttgcagttttatgtcttttaccaaacttagaggttttcagcctaatttctaaaaatactttttattagcctgattttcatctttataggaaatagtttaagtgatgacaagttccaatagcttatatgcccagaaggccttcaaaataagaattttgaaagaatacagaaaacaaacttttatatccttctcatgtcttctactgtaaaattcatatgctttgctactctaaacctagtttgaaatcaacagtcttgagaatagatgaaaattttgatgaatagtggaattcttttaaatggaaacctcttacatgtgattttccttgccatctagaaataaaccatagtatttatgttgaatcaatcaatattatattttgtttttttcctcctcttctgagactcttattgtggaaatgttagacttttatgttttcctaaatgtccctgatattctacttatttagaacatcttttcattttttccattattctgattgggtaattttaatttgtctattttcaaatttgctggagtgttcacctgttgttgtctgtgtcgtcccactgagtgcattcaccaccttttaaattttggtcactgtatgtatcagttctaaaatttccattttgttctctatattttaaatttcttggcttatattctattttcctgcaaatgtgtcagcatttgcttgtttgagctttttttttttcaagacagggtctcaactctgttacccaggctggagtgcagtggtgcgatctcagctcactgcaacctctgcctcctggttcaagcgattattgtgcctcagcctcctgagtagctgggattacaggcatgcaccaccacagcccagctaattttttgtatttttagtagagacagagttttgctatgttggccaggctggttttgaactcctggcctcaagtgatccacccacctcagcctcccaaagtgctgggattacaggccactacacctggcacatttgagtattttttttttttttttttttttgagatggagtctcgctctgtcatctaggctggagtgcagtggtgtgatctcagctcactgcagcctctgtctcccgggctcaagcgattctcttgcctcagcctcctgagtagctaggactacaggtgcatgccaacacgcccggctaatttttttaaaaaatatttttagtagagacagggtttcaccattttggccaggatggtctcgatctcctgacctcatgatccacccgcctcggccttccaaagtgctgggattacaggcatgagccaccgtgcctggcctcatttgagtatttttataatgtctcttttaaagtctttgtcagataattccactgtacatgttattcagtgtttggtgtccactgagttgtcatttgccagacaagtggagatttttgcagctcatccttgtattctcagtagttccgatatgtaccctcgacatgtgaatgttatcttatgagactctgttttatttgtatccaacagaagatgtttattatttatttggctttctgtgaactgaggtcttaatatcagctcattttaaaagtctttgcagtggtattcggatctatcctgtgtgtgcctatgagattgggtgcagtgtatcctgttagctccattctcagggcgtttgaatgtgaattaggaccagcgcaatgaatgctcaagttggggttgggcgttagaattcataaaagtctttatatgctcagattctgcagctccatcctcttcatgattgtgatcgtaaggacagtggaattttgcagttgtctataccttatcttgaagtagaactaaattgttacatttgaagaatgtacttcataaatttacaaaaataaaaaaataggttaatgttattaaaacaaaaaggcacaca

SEQ ID NO: 298420 - DNA, 2179 bp, Homo sapiens
aaaagaagttgagaaccagagaaaccgacctaaggggattctcccatttggcccgtcctaccctaaagtcaccacctgctgcttttctggagcgcttaccagtgaccaagaggaacagaacacagagcagcctggcagtgtccaagcaacaagcctccgctcctccttcctgcaccctggggctcctgaaactcacatgagaaggagggctgtctgagattcgagggaaacaagctctcaggacttccggtcgccatgatggctgtgggcggtaaacgcggttagtgcaagcatctgggccatcttcaatggtaaaaaagatacagtaaagacataaataccacatttgacaaatggaaaaaaaggagtgtccagaaaagagtagcagcagtgaggaagagctgccgagacgggtatacagggagctaccctgtgtttctgagaccctttgtgacatctcacattttttccaagaagatgatgagacagaggcagagccattattgttccgtgctgttcctgagtgtcaactatctgggggggacattcccaggagacatttgctcagaagagaatcaaatagtttcctcttatgcttctaaagtctgttttgagatcgaagaagattataaaaatcgtcagtttctggggcctgaaggaaatgtggatgttgagttgattgataagagcacaaacagatacagcgtttggttccccactgctggctggtatctgtggtcagccacaggcctcggcttcctggtaagggatgaggtcacagtgacgattgcgtttggttcctggagtcagcacctggccctggacctgcagcaccatgaacagtggctggtgggcggccccttgtttgatgtcactgcagagccagaggaggctgtcgccgaaatccacctcccccacttcatctccctccaaggtgaggtggacgtctcctggtttctcgttgcccattttaagaatgaagggatggtcctggagcatccagcccgggtggagcctttctatgctgtcctggaaagccccagcttctctctgatgggcatcctgctgcggatcgccagtgggactcgcctctccatccccatcacttccaacacattgatctattatcacccccaccccgaagatattaagttccacttgtaccttgtccccagcgacgccttgctaacaaaggcgatagatgatgaggaagatcgcttccatggtgtgcgcctgcagacttcgcccccaatggaacccctgaactttggttccagttatattgtgtctaattctgctaacctgaaagtaatgcccaaggagttgaaattgtcctacaggagccctggagaaattcagcacttctcaaaattctatgctgggcagatgaaggaacccattcaacttgagattactgaaaaaagacatgggactttggtgtgggatactgaggtgaagccagtggatctccagcttgtagctgcatcagcccctcctcctttctcaggtgcagcctttgtgaaggagaaccaccggcaactccaagccaggatgggggacctgaaaggggtgctcgatgatctccaggacaatgaggttcttactgagaatgagaaggagctggtggagcaggaaaagacacggcagagcaagaatgaggccttgctgagcatggtggagaagaaaggggacctggccctggacgtgctcttcagaagcattagtgaaagggacccttacctcgtgtcctatcttagacagcagaatttgtaaaatgagtcagttaggtagtctggaagagagaatccagcgttctcattggaaatggataaacagaaatgtgatcattgatttcagtgttcaagacagaagaagactgggtaacatctatcacacaggctttcaggacagacttgtaacctggcatgtacctattgactgtatcctcatgcattttcctcaagaatgtctgaagaaggtagtaatattccttttaaattttttccaaccattgcttgttccgctgcagcggtacaagcaacataagatgaactagcaataatagaaagttttttaacccaactaaactatagcagatggctgcgagaataccatctggtagctctgtgaactgatactactttttgggatataatttgacatttatgtcataatccat

SEQ ID NO: 298421 - DNA, 1869 bp, Homo sapiens
aaaagaagttgagaaccagagaaaccgacctaaggggattctcccatttggcccgtcctaccctaaagtcaccacctgctgcttttctggagcgcttaccagtgaccaagaggaacagaacacagagcagcctggcagtgtccaagcaacaagcctccgctcctccttcctgcaccctggggctcctgaaactcacatgagaaggagggctgtctgagattcgagggaaacaagctctcaggacttccggtcgccatgatggctgtgggcggtaaacgcggttagtgcaagcatctgggccatcttcaatggtaaaaaagatacagtaaagacataaataccacatttgacaaatggaaaaaaaggagtgtccagaaaagagtagcagcagtgaggaagagctgccgagacgggtatacagggagctaccctgtgtttctgagaccctttgtgacatctcacattttttccaagaagatgatgagacagaggcagagccattattgttccgtgctgttcctgagtgtcaactatctgggggggacattcccaggagacatttgctcagaagagaatcaaatagtttcctcttatgcttctaaagtctgttttgagatcgaagaagattataaaaatcgtcagtttctggggcctgaaggaaatgtggatgttgagttgattgataagagcacaaacagatacagcgtttggttccccactgctggctggtatctgtggtcagccacaggcctcggcttcctggtaagggatgaggtcacagtgacgattgcgtttggttcctggagtcagcacctggccctggacctgcagcaccatgaacagtggctggtgggcggccccttgtttgatgtcactgcagagccagaggaggctgtcgccgaaatccacctcccccacttcatctccctccaaggtgaggtggacgtctcctggtttctcgttgcccattttaagaatgaagggatggtcctggagcatccagcccgggtggagcctttctatgctgtcctggaaagccccagcttctctctgatgggcatcctgctgcggatcgccagtgggactcgcctctccatccccatcacttccaacacattgatctattatcacccccaccccgaagatattaagttccacttgtaccttgtccccagcgacgccttgctaacaaaggcgatagatgatgaggaagatcgcttccatggtgtgcgcctgcagacttcgcccccaatggaacccctgaactttggttccagttatattgtgtctaattctgctaacctgaaagtaatgcccaaggagttgaaattgtcctacaggagccctggagaaattcagcacttctcaaaattctatgctgggcagatgaaggaacccattcaacttgagattactgaaaaaagacatgggactttggtgtgggatactgaggtgaagccagtggatctccagcttgtagctgcatcagcccctcctcctttctcaggtgcagcctttgtgaaggagaaccaccggcaactccaagccaggatgggggacctgaaaggggtgctcgatgatctccaggacaatgaggttcttactgagaatgagaaggagctggtggagcaggaaaagacacggcagagcaagaatgaggccttgctgagcatggtggagaagaaaggggacctggccctggacgtgctcttcagaagcattagtgaaagggacccttacctcgtgtcctatcttagacagcagaatttgtaaaatgagtcagtaagaacctcattgtcctggagatcatcgagcacccctttcaggtcccccatcctggcttggagttgccggtggttctccttcaca

SEQ ID NO: 298422 - DNA, 5327 bp, Homo sapiens
ctggctgtgtccacattgaacgtgggcataatacaaagagaagaaggagagatgtcaagacacatttggctcaagggagtgtgttatctctattatttataaatgtggataaaaatatcttcattcaaaatgtcttctatttcttgatagtctagatccgcccagtctaagagaactttctgtgatgacgggagtgttccattctctgctacacagtgttatagccgtgagtgatatgtagctgttgagcacttgaaatatggatagtgcaactgagaaactaaagtttacctaagtttaattcatacaaatttaaatagcatatccgggtagcggctactctacgggacagtgcagctctagttttcaataacatcgtcttcatcttcatcaactgattcttgatgtttttcatctttttgtaacatggggatcccaacctccagtgtatcagaagagcaggaatcttcagagggacaagattcaggagacatttgctcagaagagaatcaaatagtttcctcttatgcttctaaagtctgttttgagatcgaagaagattataaaaatcgtcagtttctggggcctgaaggaaatgtggatgttgagttgattgataagagcacaaacagatacagcgtttggttccccactgctggctggtatctgtggtcagccacaggcctcggcttcctggtaagggatgaggtcacagtgacgattgcgtttggttcctggagtcagcacctggccctggacctgcagcaccatgaacagtggctggtgggcggccccttgtttgatgtcactgcagagccagaggaggctgtcgccgaaatccacctcccccacttcatctccctccaaggtgaggtggacgtctcctggtttctcgttgcccattttaagaatgaagggatggtcctggagcatccagcccgggtggagcctttctatgctgtcctggaaagccccagcttctctctgatgggcatcctgctgcggatcgccagtgggactcgcctctccatccccatcacttccaacacattgatctattatcacccccaccccgaagatattaagttccacttgtaccttgtccccagcgacgccttgctaacaaaggcgatagatgatgaggaagatcgcttccatggtgtgcgcctgcagacttcgcccccaatggaacccctgaactttggttccagttatattgtgtctaattctgctaacctgaaagtaatgcccaaggagttgaaattgtcctacaggagccctggagaaattcagcacttctcaaaattctatgctgggcagatgaaggaacccattcaacttgagattactgaaaaaagacatgggactttggtgtgggatactgaggtgaagccagtggatctccagcttgtagctgcatcagcccctcctcctttctcaggtgcagcctttgtgaaggagaaccaccggcaactccaagccaggatgggggacctgaaaggggtgctcgatgatctccaggacaatgaggttcttactgagaatgagaaggagctggtggagcaggaaaagacacggcagagcaagaatgaggccttgctgagcatggtggagaagaaaggggacctggccctggacgtgctcttcagaagcattagtgaaagggacccttacctcgtgtcctatcttagacagcagaatttgtaaaatgagtcagttaggtagtctggaagagagaatccagcgttctcattggaaatggataaacagaaatgtgatcattgatttcagtgttcaagacagaagaagactgggtaacatctatcacacaggctttcaggacagacttgtaacctggcatgtacctattgactgtatcctcatgcattttcctcaagaatgtctgaagaaggtagtaatattccttttaaattttttccaaccattgcttgatatatcactattttatccattgacatgattcttgaagacccaggataaaggacatccggataggtgtgtttatgaaggatggggcctggaaaggcaacttttcctgattaatgtgaaaaataattcctatggacactccgtttgaagtatcaccttctcataactaaaagcagaaaagctaacaaaagcttctcagctgaggacactcaaggcatacatgatgacagtcttttttttttttgtatgttaggactttaacactttatctatggctactgttattagaacaatgtaaatgtatttgctgaaagagagcacaaaaatgggagaaaatgcaaacatgagcagaaaatattttcccactggtgtgtagcctgctacaaggagttgttgggttaaatgttcatggtcaactccaaggaatactgagatgaaatgtggtaaatcaactccacagaaccaccaaaaagaaaatgagggtaattcagcttattctgagacagacattcctggcaatgtaccatacaaaaaataagccaactctgacatttggattctaccatagactctgtcattttgtagccatttcagctgtcttttgattaatgttttcgtggcacacatatttccatccttttatgtttaatctgtttaaaacaagttcctagtagacaccatctggttgagtcagttttttttatggtgtattttgaacccattctgatagtctcttttaactggaagatttcaattacttacgttaatgtaattattaatatgttaggatttatcctcagtcagccagtttgttatgtcttttctattctactgttatcacatttgtaccacttaaagtggaatctaggcactttatcaccatttagatcctattaccttttctcatctaggatatagttatcttctacataatctttctgtatcttaaaacccatcaataaattattatatattttctacttttaatcactcagaagatttaaaaaactcatgagaagagtaatctgttatgtttttccagatatttaccatttctgttgctcttccttcattattttccaaatttcgttctgcaaatttccacttcttctgatagacgttttttagttcttttagagtggttctgataggtacagattctcttattttttgcttcctctgaggacatctttttctcaccttcattctcagtgatgttttttgcttgtagtatttttagttgacattgttttctgttcagcagtttccttttagcttccgtatttcctgatgagaaatctgcagtcattcaaattgttgtttccctgtatgtagtgtgtcatttttctgtcagatttcaaggtatttatctttagtttttagccatttcattatgttggggatgagtttccttgttttattccctttggaatttgctccaattcataaatttgcagttttatgtcttttaccaaacttagaggttttcagcctaatttctaaaaatactttttattagcctgattttcatctttataggaaatagtttaagtgatgacaagttccaatagcttatatgcccagaaggccttcaaaataagaattttgaaagaatacagaaaacaaacttttatatccttctcatgtcttctactgtaaaattcatatgctttgctactctaaacctagtttgaaatcaacagtcttgagaatagatgaaaattttgatgaatagtggaattcttttaaatggaaacctcttacatgtgattttccttgccatctagaaataaaccatagtatttatgttgaatcaatcaatattatattttgtttttttcctcctcttctgagactcttattgtggaaatgttagacttttatgttttcctaaatgtccctgatattctacttatttagaacatcttttcattttttccattattctgattgggtaattttaatttgtctattttcaaatttgctggagtgttcacctgttgttgtctgtgtcgtcccactgagtgcattcaccaccttttaaattttggtcactgtatgtatcagttctaaaatttccattttgttctctatattttaaatttcttggcttatattctattttcctgcaaatgtgtcagcatttgcttgtttgagctttttttttttcaagacagggtctcaactctgttacccaggctggagtgcagtggtgcgatctcagctcactgcaacctctgcctcctggttcaagcgattattgtgcctcagcctcctgagtagctgggattacaggcatgcaccaccacagcccagctaattttttgtatttttagtagagacagagttttgctatgttggccaggctggttttgaactcctggcctcaagtgatccacccacctcagcctcccaaagtgctgggattacaggccactacacctggcacatttgagtattttttttttttttttttttttgagatggagtctcgctctgtcatctaggctggagtgcagtggtgtgatctcagctcactgcagcctctgtctcccgggctcaagcgattctcttgcctcagcctcctgagtagctaggactacaggtgcatgccaacacgcccggctaatttttttaaaaaatatttttagtagagacagggtttcaccattttggccaggatggtctcgatctcctgacctcatgatccacccgcctcggccttccaaagtgctgggattacaggcatgagccaccgtgcctggcctcatttgagtatttttataatgtctcttttaaagtctttgtcagataattccactgtacatgttattcagtgtttggtgtccactgagttgtcatttgccagacaagtggagatttttgcagctcatccttgtattctcagtagttccgatatgtaccctcgacatgtgaatgttatcttatgagactctgttttatttgtatccaacagaagatgtttattatttatttggctttctgtgaactgaggtcttaatatcagctcattttaaaagtctttgcagtggtattcggatctatcctgtgtgtgcctatgagattgggtgcagtgtatcctgttagctccattctcagggcgtttgaatgtgaattaggaccagcgcaatgaatgctcaagttggggttgggcgttagaattcataaaagtctttatatgctcagattctgcagctccatcctcttcatgattgtgatcgtaaggacagtggaattttgcagttgtctataccttatcttgaagtagaactaaattgttacatttgaagaatgtacttcataaatttacaaaaataaaaaaataggttaatgttattaaaacaaaaaggcacaca

SEQ ID NO: 298423 - DNA, 5185 bp, Homo sapiens
ctggctgtgtccacattgaacgtgggcataatacaaagagaagaaggagagatgtcaagacacatttggctcaagggagtgtgttatctctattatttataaatgtggataaaaatatcttcattcaaaatgtcttctatttcttgatagtctagatccgcccagtctaagagaactttctgtgatgacgggagtgttccattctctgctacacagtgttatagccgtgagtgatatgtagctgttgagcacttgaaatatggatagtgcaactgagaaactaaagtttacctaagtttaattcatacaaatttaaatagcatatccgggtagcggctactctacgggacagtgcagctctagttttcaataacatcgtcttcatcttcatcaactgattcttgatgtttttcatctttttgtaacatggggatcccaacctccagtgtatcagaagagcaggaatcttcagagggacaagattcaggagacatttgctcagaagagaatcaaatagtttcctcttatgcttctaaagtctgttttgagatcgaagaagattataaaaatcgtcagtttctggggcctgaaggaaatgtggatgttgagttgattgataagagcacaaacagatacagcgtttggttccccactgctggctggtatctgtggtcagccacaggcctcggcttcctggtaagggatgaggtcacagtgacgattgcgtttggttcctggagtcagcacctggccctggacctgcagcaccatgaacagtggctggtgggcggccccttgtttgatgtcactgcagagccagaggaggctgtcgccgaaatccacctcccccacttcatctccctccaaggtgaggtggacgtctcctggtttctcgttgcccattttaagaatgaagggatggtcctggagcatccagcccgggtggagcctttctatgctgtcctggaaagccccagcttctctctgatgggcatcctgctgcggatcgccagtgggactcgcctctccatccccatcacttccaacacattgatctattatcacccccaccccgaagatattaagttccacttgtaccttgtccccagcgacgccttgctaacaaaggcgatagatgatgaggaagatcgcttccatggtgtgcgcctgcagacttcgcccccaatggaacccctgaactttggttccagttatattgtgtctaattctgctaacctgaaagtaatgcccaagtggatctccagcttgtagctgcatcagcccctcctcctttctcaggtgcagcctttgtgaaggagaaccaccggcaactccaagccaggatgggggacctgaaaggggtgctcgatgatctccaggacaatgaggttcttactgagaatgagaaggagctggtggagcaggaaaagacacggcagagcaagaatgaggccttgctgagcatggtggagaagaaaggggacctggccctggacgtgctcttcagaagcattagtgaaagggacccttacctcgtgtcctatcttagacagcagaatttgtaaaatgagtcagttaggtagtctggaagagagaatccagcgttctcattggaaatggataaacagaaatgtgatcattgatttcagtgttcaagacagaagaagactgggtaacatctatcacacaggctttcaggacagacttgtaacctggcatgtacctattgactgtatcctcatgcattttcctcaagaatgtctgaagaaggtagtaatattccttttaaattttttccaaccattgcttgatatatcactattttatccattgacatgattcttgaagacccaggataaaggacatccggataggtgtgtttatgaaggatggggcctggaaaggcaacttttcctgattaatgtgaaaaataattcctatggacactccgtttgaagtatcaccttctcataactaaaagcagaaaagctaacaaaagcttctcagctgaggacactcaaggcatacatgatgacagtcttttttttttttgtatgttaggactttaacactttatctatggctactgttattagaacaatgtaaatgtatttgctgaaagagagcacaaaaatgggagaaaatgcaaacatgagcagaaaatattttcccactggtgtgtagcctgctacaaggagttgttgggttaaatgttcatggtcaactccaaggaatactgagatgaaatgtggtaaatcaactccacagaaccaccaaaaagaaaatgagggtaattcagcttattctgagacagacattcctggcaatgtaccatacaaaaaataagccaactctgacatttggattctaccatagactctgtcattttgtagccatttcagctgtcttttgattaatgttttcgtggcacacatatttccatccttttatgtttaatctgtttaaaacaagttcctagtagacaccatctggttgagtcagttttttttatggtgtattttgaacccattctgatagtctcttttaactggaagatttcaattacttacgttaatgtaattattaatatgttaggatttatcctcagtcagccagtttgttatgtcttttctattctactgttatcacatttgtaccacttaaagtggaatctaggcactttatcaccatttagatcctattaccttttctcatctaggatatagttatcttctacataatctttctgtatcttaaaacccatcaataaattattatatattttctacttttaatcactcagaagatttaaaaaactcatgagaagagtaatctgttatgtttttccagatatttaccatttctgttgctcttccttcattattttccaaatttcgttctgcaaatttccacttcttctgatagacgttttttagttcttttagagtggttctgataggtacagattctcttattttttgcttcctctgaggacatctttttctcaccttcattctcagtgatgttttttgcttgtagtatttttagttgacattgttttctgttcagcagtttccttttagcttccgtatttcctgatgagaaatctgcagtcattcaaattgttgtttccctgtatgtagtgtgtcatttttctgtcagatttcaaggtatttatctttagtttttagccatttcattatgttggggatgagtttccttgttttattccctttggaatttgctccaattcataaatttgcagttttatgtcttttaccaaacttagaggttttcagcctaatttctaaaaatactttttattagcctgattttcatctttataggaaatagtttaagtgatgacaagttccaatagcttatatgcccagaaggccttcaaaataagaattttgaaagaatacagaaaacaaacttttatatccttctcatgtcttctactgtaaaattcatatgctttgctactctaaacctagtttgaaatcaacagtcttgagaatagatgaaaattttgatgaatagtggaattcttttaaatggaaacctcttacatgtgattttccttgccatctagaaataaaccatagtatttatgttgaatcaatcaatattatattttgtttttttcctcctcttctgagactcttattgtggaaatgttagacttttatgttttcctaaatgtccctgatattctacttatttagaacatcttttcattttttccattattctgattgggtaattttaatttgtctattttcaaatttgctggagtgttcacctgttgttgtctgtgtcgtcccactgagtgcattcaccaccttttaaattttggtcactgtatgtatcagttctaaaatttccattttgttctctatattttaaatttcttggcttatattctattttcctgcaaatgtgtcagcatttgcttgtttgagctttttttttttcaagacagggtctcaactctgttacccaggctggagtgcagtggtgcgatctcagctcactgcaacctctgcctcctggttcaagcgattattgtgcctcagcctcctgagtagctgggattacaggcatgcaccaccacagcccagctaattttttgtatttttagtagagacagagttttgctatgttggccaggctggttttgaactcctggcctcaagtgatccacccacctcagcctcccaaagtgctgggattacaggccactacacctggcacatttgagtattttttttttttttttttttttgagatggagtctcgctctgtcatctaggctggagtgcagtggtgtgatctcagctcactgcagcctctgtctcccgggctcaagcgattctcttgcctcagcctcctgagtagctaggactacaggtgcatgccaacacgcccggctaatttttttaaaaaatatttttagtagagacagggtttcaccattttggccaggatggtctcgatctcctgacctcatgatccacccgcctcggccttccaaagtgctgggattacaggcatgagccaccgtgcctggcctcatttgagtatttttataatgtctcttttaaagtctttgtcagataattccactgtacatgttattcagtgtttggtgtccactgagttgtcatttgccagacaagtggagatttttgcagctcatccttgtattctcagtagttccgatatgtaccctcgacatgtgaatgttatcttatgagactctgttttatttgtatccaacagaagatgtttattatttatttggctttctgtgaactgaggtcttaatatcagctcattttaaaagtctttgcagtggtattcggatctatcctgtgtgtgcctatgagattgggtgcagtgtatcctgttagctccattctcagggcgtttgaatgtgaattaggaccagcgcaatgaatgctcaagttggggttgggcgttagaattcataaaagtctttatatgctcagattctgcagctccatcctcttcatgattgtgatcgtaaggacagtggaattttgcagttgtctataccttatcttgaagtagaactaaattgttacatttgaagaatgtacttcataaatttacaaaaataaaaaaataggttaatgttattaaaacaaaaaggcacaca

SEQ ID NO: 298424 - DNA, 5584 bp, Homo sapiens
aaaagaagttgagaaccagagaaaccgacctaaggggattctcccatttggcccgtcctaccctaaagtcaccacctgctgcttttctggagcgcttaccagtgaccaagaggaacagaacacagagcagcctggcagtgtccaagcaacaagcctccgctcctccttcctgcaccctggggctcctgaaactcacatgagaaggagggctgtctgagattcgagggaaacaagctctcaggacttccggtcgccatgatggctgtgggcggtaaacgcggttagtgcaagcatctgggccatcttcaatggtaaaaaagatacagtaaagacataaataccacatttgacaaatggaaaaaaaggagtgtccagaaaagagtagcagcagtgaggaagagctgccgagacgggacagtggatccagtaggaacatagatgcatccaaactcattagactacaaggatcacggaaactgttggttgacaatagcatacgggaactgcaatacacaaaaactggaattttttttcaggctgaggcctgtgtgacaaatgatacggtatacagggagctaccctgtgtttctgagaccctttgtgacatctcacattttttccaagaagatgatgagacagaggcagagccattattgttccgtgctgttcctgagtgtcaactatctgggggggacattcccagtgtatcagaagagcaggaatcttcagagggacaagattcaggagacatttgctcagaagagaatcaaatagtttcctcttatgcttctaaagtctgttttgagatcgaagaagattataaaaatcgtcagtttctggggcctgaaggaaatgtggatgttgagttgattgataagagcacaaacagatacagcgtttggttccccactgctggctggtatctgtggtcagccacaggcctcggcttcctggtaagggatgaggtcacagtgacgattgcgtttggttcctggagtcagcacctggccctggacctgcagcaccatgaacagtggctggtgggcggccccttgtttgatgtcactgcagagccagaggaggctgtcgccgaaatccacctcccccacttcatctccctccaaggtgaggtggacgtctcctggtttctcgttgcccattttaagaatgaagggatggtcctggagcatccagcccgggtggagcctttctatgctgtcctggaaagccccagcttctctctgatgggcatcctgctgcggatcgccagtgggactcgcctctccatccccatcacttccaacacattgatctattatcacccccaccccgaagatattaagttccacttgtaccttgtccccagcgacgccttgctaacaaaggcgatagatgatgaggaagatcgcttccatggtgtgcgcctgcagacttcgcccccaatggaacccctgaactttggttccagttatattgtgtctaattctgctaacctgaaagtaatgcccaaggagttgaaattgtcctacaggagccctggagaaattcagcacttctcaaaattctatgctgggcagatgaaggaacccattcaacttgagattactgaaaaaagacatgggactttggtgtgggatactgaggtgaagccagtggatctccagcttgtagctgcatcagcccctcctcctttctcaggtgcagcctttgtgaaggagaaccaccggcaactccaagccaggatgggggacctgaaaggggtgctcgatgatctccaggacaatgaggttcttactgagaatgagaaggagctggtggagcaggaaaagacacggcagagcaagaatgaggccttgctgagcatggtggagaagaaaggggacctggccctggacgtgctcttcagaagcattagtgaaagggacccttacctcgtgtcctatcttagacagcagaatttgtaaaatgagtcagttaggtagtctggaagagagaatccagcgttctcattggaaatggataaacagaaatgtgatcattgatttcagtgttcaagacagaagaagactgggtaacatctatcacacaggctttcaggacagacttgtaacctggcatgtacctattgactgtatcctcatgcattttcctcaagaatgtctgaagaaggtagtaatattccttttaaattttttccaaccattgcttgatatatcactattttatccattgacatgattcttgaagacccaggataaaggacatccggataggtgtgtttatgaaggatggggcctggaaaggcaacttttcctgattaatgtgaaaaataattcctatggacactccgtttgaagtatcaccttctcataactaaaagcagaaaagctaacaaaagcttctcagctgaggacactcaaggcatacatgatgacagtcttttttttttttgtatgttaggactttaacactttatctatggctactgttattagaacaatgtaaatgtatttgctgaaagagagcacaaaaatgggagaaaatgcaaacatgagcagaaaatattttcccactggtgtgtagcctgctacaaggagttgttgggttaaatgttcatggtcaactccaaggaatactgagatgaaatgtggtaaatcaactccacagaaccaccaaaaagaaaatgagggtaattcagcttattctgagacagacattcctggcaatgtaccatacaaaaaataagccaactctgacatttggattctaccatagactctgtcattttgtagccatttcagctgtcttttgattaatgttttcgtggcacacatatttccatccttttatgtttaatctgtttaaaacaagttcctagtagacaccatctggttgagtcagttttttttatggtgtattttgaacccattctgatagtctcttttaactggaagatttcaattacttacgttaatgtaattattaatatgttaggatttatcctcagtcagccagtttgttatgtcttttctattctactgttatcacatttgtaccacttaaagtggaatctaggcactttatcaccatttagatcctattaccttttctcatctaggatatagttatcttctacataatctttctgtatcttaaaacccatcaataaattattatatattttctacttttaatcactcagaagatttaaaaaactcatgagaagagtaatctgttatgtttttccagatatttaccatttctgttgctcttccttcattattttccaaatttcgttctgcaaatttccacttcttctgatagacgttttttagttcttttagagtggttctgataggtacagattctcttattttttgcttcctctgaggacatctttttctcaccttcattctcagtgatgttttttgcttgtagtatttttagttgacattgttttctgttcagcagtttccttttagcttccgtatttcctgatgagaaatctgcagtcattcaaattgttgtttccctgtatgtagtgtgtcatttttctgtcagatttcaaggtatttatctttagtttttagccatttcattatgttggggatgagtttccttgttttattccctttggaatttgctccaattcataaatttgcagttttatgtcttttaccaaacttagaggttttcagcctaatttctaaaaatactttttattagcctgattttcatctttataggaaatagtttaagtgatgacaagttccaatagcttatatgcccagaaggccttcaaaataagaattttgaaagaatacagaaaacaaacttttatatccttctcatgtcttctactgtaaaattcatatgctttgctactctaaacctagtttgaaatcaacagtcttgagaatagatgaaaattttgatgaatagtggaattcttttaaatggaaacctcttacatgtgattttccttgccatctagaaataaaccatagtatttatgttgaatcaatcaatattatattttgtttttttcctcctcttctgagactcttattgtggaaatgttagacttttatgttttcctaaatgtccctgatattctacttatttagaacatcttttcattttttccattattctgattgggtaattttaatttgtctattttcaaatttgctggagtgttcacctgttgttgtctgtgtcgtcccactgagtgcattcaccaccttttaaattttggtcactgtatgtatcagttctaaaatttccattttgttctctatattttaaatttcttggcttatattctattttcctgcaaatgtgtcagcatttgcttgtttgagctttttttttttcaagacagggtctcaactctgttacccaggctggagtgcagtggtgcgatctcagctcactgcaacctctgcctcctggttcaagcgattattgtgcctcagcctcctgagtagctgggattacaggcatgcaccaccacagcccagctaattttttgtatttttagtagagacagagttttgctatgttggccaggctggttttgaactcctggcctcaagtgatccacccacctcagcctcccaaagtgctgggattacaggccactacacctggcacatttgagtattttttttttttttttttttttgagatggagtctcgctctgtcatctaggctggagtgcagtggtgtgatctcagctcactgcagcctctgtctcccgggctcaagcgattctcttgcctcagcctcctgagtagctaggactacaggtgcatgccaacacgcccggctaatttttttaaaaaatatttttagtagagacagggtttcaccattttggccaggatggtctcgatctcctgacctcatgatccacccgcctcggccttccaaagtgctgggattacaggcatgagccaccgtgcctggcctcatttgagtatttttataatgtctcttttaaagtctttgtcagataattccactgtacatgttattcagtgtttggtgtccactgagttgtcatttgccagacaagtggagatttttgcagctcatccttgtattctcagtagttccgatatgtaccctcgacatgtgaatgttatcttatgagactctgttttatttgtatccaacagaagatgtttattatttatttggctttctgtgaactgaggtcttaatatcagctcattttaaaagtctttgcagtggtattcggatctatcctgtgtgtgcctatgagattgggtgcagtgtatcctgttagctccattctcagggcgtttgaatgtgaattaggaccagcgcaatgaatgctcaagttggggttgggcgttagaattcataaaagtctttatatgctcagattctgcagctccatcctcttcatgattgtgatcgtaaggacagtggaattttgcagttgtctataccttatcttgaagtagaactaaattgttacatttgaagaatgtacttcataaatttacaaaaataaaaaaataggttaatgttattaaaacaaaaaggcacaca

SEQ ID NO: 298425 - DNA, 5323 bp, Homo sapiens
aaaagaagttgagaaccagagaaaccgacctaaggggattctcccatttggcccgtcctaccctaaagtcaccacctgctgcttttctggagcgcttaccagtgaccaagaggaacagaacacagagcagcctggcagtgtccaagcaacaagcctccgctcctccttcctgcaccctggggctcctgaaactcacatgggtaaaaaagatacagtaaagacataaataccacatttgacaaatggaaaaaaaggagtgtccagaaaagagtagcagcagtgaggaagagctgccgagacgggtatacagggagctaccctgtgtttctgagaccctttgtgacatctcacattttttccaagaagatgatgagacagaggcagagccattattgttccgtgctgttcctgagtgtcaactatctgggggggacattcccagtgtatcagaagagcaggaatcttcagagggacaagattcaggagacatttgctcagaagagaatcaaatagtttcctcttatgcttctaaagtctgttttgagatcgaagaagattataaaaatcgtcagtttctggggcctgaaggaaatgtggatgttgagttgattgataagagcacaaacagatacagcgtttggttccccactgctggctggtatctgtggtcagccacaggcctcggcttcctggtaagggatgaggtcacagtgacgattgcgtttggttcctggagtcagcacctggccctggacctgcagcaccatgaacagtggctggtgggcggccccttgtttgatgtcactgcagagccagaggaggctgtcgccgaaatccacctcccccacttcatctccctccaaggtgaggtggacgtctcctggtttctcgttgcccattttaagaatgaagggatggtcctggagcatccagcccgggtggagcctttctatgctgtcctggaaagccccagcttctctctgatgggcatcctgctgcggatcgccagtgggactcgcctctccatccccatcacttccaacacattgatctattatcacccccaccccgaagatattaagttccacttgtaccttgtccccagcgacgccttgctaacaaaggcgatagatgatgaggaagatcgcttccatggtgtgcgcctgcagacttcgcccccaatggaacccctgaactttggttccagttatattgtgtctaattctgctaacctgaaagtaatgcccaaggagttgaaattgtcctacaggagccctggagaaattcagcacttctcaaaattctatgctgggcagatgaaggaacccattcaacttgagattactgaaaaaagacatgggactttggtgtgggatactgaggtgaagccagtggatctccagcttgtagctgcatcagcccctcctcctttctcaggtgcagcctttgtgaaggagaaccaccggcaactccaagccaggatgggggacctgaaaggggtgctcgatgatctccaggacaatgaggttcttactgagaatgagaaggagctggtggagcaggaaaagacacggcagagcaagaatgaggccttgctgagcatggtggagaagaaaggggacctggccctggacgtgctcttcagaagcattagtgaaagggacccttacctcgtgtcctatcttagacagcagaatttgtaaaatgagtcagttaggtagtctggaagagagaatccagcgttctcattggaaatggataaacagaaatgtgatcattgatttcagtgttcaagacagaagaagactgggtaacatctatcacacaggctttcaggacagacttgtaacctggcatgtacctattgactgtatcctcatgcattttcctcaagaatgtctgaagaaggtagtaatattccttttaaattttttccaaccattgcttgatatatcactattttatccattgacatgattcttgaagacccaggataaaggacatccggataggtgtgtttatgaaggatggggcctggaaaggcaacttttcctgattaatgtgaaaaataattcctatggacactccgtttgaagtatcaccttctcataactaaaagcagaaaagctaacaaaagcttctcagctgaggacactcaaggcatacatgatgacagtcttttttttttttgtatgttaggactttaacactttatctatggctactgttattagaacaatgtaaatgtatttgctgaaagagagcacaaaaatgggagaaaatgcaaacatgagcagaaaatattttcccactggtgtgtagcctgctacaaggagttgttgggttaaatgttcatggtcaactccaaggaatactgagatgaaatgtggtaaatcaactccacagaaccaccaaaaagaaaatgagggtaattcagcttattctgagacagacattcctggcaatgtaccatacaaaaaataagccaactctgacatttggattctaccatagactctgtcattttgtagccatttcagctgtcttttgattaatgttttcgtggcacacatatttccatccttttatgtttaatctgtttaaaacaagttcctagtagacaccatctggttgagtcagttttttttatggtgtattttgaacccattctgatagtctcttttaactggaagatttcaattacttacgttaatgtaattattaatatgttaggatttatcctcagtcagccagtttgttatgtcttttctattctactgttatcacatttgtaccacttaaagtggaatctaggcactttatcaccatttagatcctattaccttttctcatctaggatatagttatcttctacataatctttctgtatcttaaaacccatcaataaattattatatattttctacttttaatcactcagaagatttaaaaaactcatgagaagagtaatctgttatgtttttccagatatttaccatttctgttgctcttccttcattattttccaaatttcgttctgcaaatttccacttcttctgatagacgttttttagttcttttagagtggttctgataggtacagattctcttattttttgcttcctctgaggacatctttttctcaccttcattctcagtgatgttttttgcttgtagtatttttagttgacattgttttctgttcagcagtttccttttagcttccgtatttcctgatgagaaatctgcagtcattcaaattgttgtttccctgtatgtagtgtgtcatttttctgtcagatttcaaggtatttatctttagtttttagccatttcattatgttggggatgagtttccttgttttattccctttggaatttgctccaattcataaatttgcagttttatgtcttttaccaaacttagaggttttcagcctaatttctaaaaatactttttattagcctgattttcatctttataggaaatagtttaagtgatgacaagttccaatagcttatatgcccagaaggccttcaaaataagaattttgaaagaatacagaaaacaaacttttatatccttctcatgtcttctactgtaaaattcatatgctttgctactctaaacctagtttgaaatcaacagtcttgagaatagatgaaaattttgatgaatagtggaattcttttaaatggaaacctcttacatgtgattttccttgccatctagaaataaaccatagtatttatgttgaatcaatcaatattatattttgtttttttcctcctcttctgagactcttattgtggaaatgttagacttttatgttttcctaaatgtccctgatattctacttatttagaacatcttttcattttttccattattctgattgggtaattttaatttgtctattttcaaatttgctggagtgttcacctgttgttgtctgtgtcgtcccactgagtgcattcaccaccttttaaattttggtcactgtatgtatcagttctaaaatttccattttgttctctatattttaaatttcttggcttatattctattttcctgcaaatgtgtcagcatttgcttgtttgagctttttttttttcaagacagggtctcaactctgttacccaggctggagtgcagtggtgcgatctcagctcactgcaacctctgcctcctggttcaagcgattattgtgcctcagcctcctgagtagctgggattacaggcatgcaccaccacagcccagctaattttttgtatttttagtagagacagagttttgctatgttggccaggctggttttgaactcctggcctcaagtgatccacccacctcagcctcccaaagtgctgggattacaggccactacacctggcacatttgagtattttttttttttttttttttttgagatggagtctcgctctgtcatctaggctggagtgcagtggtgtgatctcagctcactgcagcctctgtctcccgggctcaagcgattctcttgcctcagcctcctgagtagctaggactacaggtgcatgccaacacgcccggctaatttttttaaaaaatatttttagtagagacagggtttcaccattttggccaggatggtctcgatctcctgacctcatgatccacccgcctcggccttccaaagtgctgggattacaggcatgagccaccgtgcctggcctcatttgagtatttttataatgtctcttttaaagtctttgtcagataattccactgtacatgttattcagtgtttggtgtccactgagttgtcatttgccagacaagtggagatttttgcagctcatccttgtattctcagtagttccgatatgtaccctcgacatgtgaatgttatcttatgagactctgttttatttgtatccaacagaagatgtttattatttatttggctttctgtgaactgaggtcttaatatcagctcattttaaaagtctttgcagtggtattcggatctatcctgtgtgtgcctatgagattgggtgcagtgtatcctgttagctccattctcagggcgtttgaatgtgaattaggaccagcgcaatgaatgctcaagttggggttgggcgttagaattcataaaagtctttatatgctcagattctgcagctccatcctcttcatgattgtgatcgtaaggacagtggaattttgcagttgtctataccttatcttgaagtagaactaaattgttacatttgaagaatgtacttcataaatttacaaaaataaaaaaataggttaatgttattaaaacaaaaaggcacaca

SEQ ID NO: 298426 - DNA, 4967 bp, Homo sapiens
  misc_feature (111)..(111): n is a, c, g, or t
cagtcagctgttattatcttacttgaccggatacactggttagaagctctatcccatttcctgaaattcagtactcttgtaggaaaatatttctccgttccaaggacgggncctcactgtcaccagccacgctcctcatccaaatccgcatccagcgctcctgagggcccacctcactcgccttggggttctccgagtgccagtccacatcccctgcagagccctctcctcctctggagtcaggtggtgggagtaccagccccacagccaaccgtggactagtactagtccacggttggctggtatctgtggtcagccacaggcctcggcttcctggtaagggatgaggtcacagtgacgattgcgtttggttcctggagtcagcacctggccctggacctgcagcaccatgaacagtggctggtgggcggccccttgtttgatgtcactgcagagccagaggaggctgtcgccgaaatccacctcccccacttcatctccctccaaggtgaggtggacgtctcctggtttctcgttgcccattttaagaatgaagggatggtcctggagcatccagcccgggtggagcctttctatgctgtcctggaaagccccagcttctctctgatgggcatcctgctgcggatcgccagtgggactcgcctctccatccccatcacttccaacacattgatctattatcacccccaccccgaagatattaagttccacttgtaccttgtccccagcgacgccttgctaacaaaggcgatagatgatgaggaagatcgcttccatggtgtgcgcctgcagacttcgcccccaatggaacccctgaactttggttccagttatattgtgtctaattctgctaacctgaaagtaatgcccaaggagttgaaattgtcctacaggagccctggagaaattcagcacttctcaaaattctatgctgggcagatgaaggaacccattcaacttgagattactgaaaaaagacatgggactttggtgtgggatactgaggtgaagccagtggatctccagcttgtagctgcatcagcccctcctcctttctcaggtgcagcctttgtgaaggagaaccaccggcaactccaagccaggatgggggacctgaaaggggtgctcgatgatctccaggacaatgaggttcttactgagaatgagaaggagctggtggagcaggaaaagacacggcagagcaagaatgaggccttgctgagcatggtggagaagaaaggggacctggccctggacgtgctcttcagaagcattagtgaaagggacccttacctcgtgtcctatcttagacagcagaatttgtaaaatgagtcagttaggtagtctggaagagagaatccagcgttctcattggaaatggataaacagaaatgtgatcattgatttcagtgttcaagacagaagaagactgggtaacatctatcacacaggctttcaggacagacttgtaacctggcatgtacctattgactgtatcctcatgcattttcctcaagaatgtctgaagaaggtagtaatattccttttaaattttttccaaccattgcttgatatatcactattttatccattgacatgattcttgaagacccaggataaaggacatccggataggtgtgtttatgaaggatggggcctggaaaggcaacttttcctgattaatgtgaaaaataattcctatggacactccgtttgaagtatcaccttctcataactaaaagcagaaaagctaacaaaagcttctcagctgaggacactcaaggcatacatgatgacagtcttttttttttttgtatgttaggactttaacactttatctatggctactgttattagaacaatgtaaatgtatttgctgaaagagagcacaaaaatgggagaaaatgcaaacatgagcagaaaatattttcccactggtgtgtagcctgctacaaggagttgttgggttaaatgttcatggtcaactccaaggaatactgagatgaaatgtggtaaatcaactccacagaaccaccaaaaagaaaatgagggtaattcagcttattctgagacagacattcctggcaatgtaccatacaaaaaataagccaactctgacatttggattctaccatagactctgtcattttgtagccatttcagctgtcttttgattaatgttttcgtggcacacatatttccatccttttatgtttaatctgtttaaaacaagttcctagtagacaccatctggttgagtcagttttttttatggtgtattttgaacccattctgatagtctcttttaactggaagatttcaattacttacgttaatgtaattattaatatgttaggatttatcctcagtcagccagtttgttatgtcttttctattctactgttatcacatttgtaccacttaaagtggaatctaggcactttatcaccatttagatcctattaccttttctcatctaggatatagttatcttctacataatctttctgtatcttaaaacccatcaataaattattatatattttctacttttaatcactcagaagatttaaaaaactcatgagaagagtaatctgttatgtttttccagatatttaccatttctgttgctcttccttcattattttccaaatttcgttctgcaaatttccacttcttctgatagacgttttttagttcttttagagtggttctgataggtacagattctcttattttttgcttcctctgaggacatctttttctcaccttcattctcagtgatgttttttgcttgtagtatttttagttgacattgttttctgttcagcagtttccttttagcttccgtatttcctgatgagaaatctgcagtcattcaaattgttgtttccctgtatgtagtgtgtcatttttctgtcagatttcaaggtatttatctttagtttttagccatttcattatgttggggatgagtttccttgttttattccctttggaatttgctccaattcataaatttgcagttttatgtcttttaccaaacttagaggttttcagcctaatttctaaaaatactttttattagcctgattttcatctttataggaaatagtttaagtgatgacaagttccaatagcttatatgcccagaaggccttcaaaataagaattttgaaagaatacagaaaacaaacttttatatccttctcatgtcttctactgtaaaattcatatgctttgctactctaaacctagtttgaaatcaacagtcttgagaatagatgaaaattttgatgaatagtggaattcttttaaatggaaacctcttacatgtgattttccttgccatctagaaataaaccatagtatttatgttgaatcaatcaatattatattttgtttttttcctcctcttctgagactcttattgtggaaatgttagacttttatgttttcctaaatgtccctgatattctacttatttagaacatcttttcattttttccattattctgattgggtaattttaatttgtctattttcaaatttgctggagtgttcacctgttgttgtctgtgtcgtcccactgagtgcattcaccaccttttaaattttggtcactgtatgtatcagttctaaaatttccattttgttctctatattttaaatttcttggcttatattctattttcctgcaaatgtgtcagcatttgcttgtttgagctttttttttttcaagacagggtctcaactctgttacccaggctggagtgcagtggtgcgatctcagctcactgcaacctctgcctcctggttcaagcgattattgtgcctcagcctcctgagtagctgggattacaggcatgcaccaccacagcccagctaattttttgtatttttagtagagacagagttttgctatgttggccaggctggttttgaactcctggcctcaagtgatccacccacctcagcctcccaaagtgctgggattacaggccactacacctggcacatttgagtattttttttttttttttttttttgagatggagtctcgctctgtcatctaggctggagtgcagtggtgtgatctcagctcactgcagcctctgtctcccgggctcaagcgattctcttgcctcagcctcctgagtagctaggactacaggtgcatgccaacacgcccggctaatttttttaaaaaatatttttagtagagacagggtttcaccattttggccaggatggtctcgatctcctgacctcatgatccacccgcctcggccttccaaagtgctgggattacaggcatgagccaccgtgcctggcctcatttgagtatttttataatgtctcttttaaagtctttgtcagataattccactgtacatgttattcagtgtttggtgtccactgagttgtcatttgccagacaagtggagatttttgcagctcatccttgtattctcagtagttccgatatgtaccctcgacatgtgaatgttatcttatgagactctgttttatttgtatccaacagaagatgtttattatttatttggctttctgtgaactgaggtcttaatatcagctcattttaaaagtctttgcagtggtattcggatctatcctgtgtgtgcctatgagattgggtgcagtgtatcctgttagctccattctcagggcgtttgaatgtgaattaggaccagcgcaatgaatgctcaagttggggttgggcgttagaattcataaaagtctttatatgctcagattctgcagctccatcctcttcatgattgtgatcgtaaggacagtggaattttgcagttgtctataccttatcttgaagtagaactaaattgttacatttgaagaatgtacttcataaatttacaaaaataaaaaaataggttaatgttattaaaacaaaaaggcacaca

SEQ ID NO: 298427 - DNA, 4691 bp, Homo sapiens
aaaagaagttgagaaccagagaaaccgacctaaggggattctcccatttggcccgtcctaccctaaagtcaccacctgctgcttttctggagcgcttaccagtgaccaagaggaacagaacacagagcagcctggcagtgtccaagcaacaagcctccgctcctccttcctgcaccctggggctcctgaaactcacatgggtaaaaaagatacagtaaagacataaataccacatttgacaaatggaaaaaaaggagtgtccagaaaagagtagcagcagtgaggaagagctgccgagacgggtatacagggagctaccctgtgtttctgagaccctttgtgacatctcacattttttccaagaagatgatgagacagaggcagagccattattgttccgtgctgttcctgagtgtcaactatctgggggggacattcccagtgtatcagaagagcaggaatcttcagagggacaagattcaggagacatttgctcagaagagaatcaaatagtttcctcttatgcttctaaagtctgttttgagatcgaagaagattataaaaatcgtcagtttctggggcctgaaggaaatgtggatgttgagttgattgataagagcacaaacagatacaggcgatagatgatgaggaagatcgcttccatggtgtgcgcctgcagacttcgcccccaatggaacccctgaactttggttccagttatattgtgtctaattctgctaacctgaaagtaatgcccaagtggatctccagcttgtagctgcatcagcccctcctcctttctcaggtgcagcctttgtgaaggagaaccaccggcaactccaagccaggatgggggacctgaaaggggtgctcgatgatctccaggacaatgaggttcttactgagaatgagaaggagctggtggagcaggaaaagacacggcagagcaagaatgaggccttgctgagcatggtggagaagaaaggggacctggccctggacgtgctcttcagaagcattagtgaaagggacccttacctcgtgtcctatcttagacagcagaatttgtaaaatgagtcagttaggtagtctggaagagagaatccagcgttctcattggaaatggataaacagaaatgtgatcattgatttcagtgttcaagacagaagaagactgggtaacatctatcacacaggctttcaggacagacttgtaacctggcatgtacctattgactgtatcctcatgcattttcctcaagaatgtctgaagaaggtagtaatattccttttaaattttttccaaccattgcttgatatatcactattttatccattgacatgattcttgaagacccaggataaaggacatccggataggtgtgtttatgaaggatggggcctggaaaggcaacttttcctgattaatgtgaaaaataattcctatggacactccgtttgaagtatcaccttctcataactaaaagcagaaaagctaacaaaagcttctcagctgaggacactcaaggcatacatgatgacagtcttttttttttttgtatgttaggactttaacactttatctatggctactgttattagaacaatgtaaatgtatttgctgaaagagagcacaaaaatgggagaaaatgcaaacatgagcagaaaatattttcccactggtgtgtagcctgctacaaggagttgttgggttaaatgttcatggtcaactccaaggaatactgagatgaaatgtggtaaatcaactccacagaaccaccaaaaagaaaatgagggtaattcagcttattctgagacagacattcctggcaatgtaccatacaaaaaataagccaactctgacatttggattctaccatagactctgtcattttgtagccatttcagctgtcttttgattaatgttttcgtggcacacatatttccatccttttatgtttaatctgtttaaaacaagttcctagtagacaccatctggttgagtcagttttttttatggtgtattttgaacccattctgatagtctcttttaactggaagatttcaattacttacgttaatgtaattattaatatgttaggatttatcctcagtcagccagtttgttatgtcttttctattctactgttatcacatttgtaccacttaaagtggaatctaggcactttatcaccatttagatcctattaccttttctcatctaggatatagttatcttctacataatctttctgtatcttaaaacccatcaataaattattatatattttctacttttaatcactcagaagatttaaaaaactcatgagaagagtaatctgttatgtttttccagatatttaccatttctgttgctcttccttcattattttccaaatttcgttctgcaaatttccacttcttctgatagacgttttttagttcttttagagtggttctgataggtacagattctcttattttttgcttcctctgaggacatctttttctcaccttcattctcagtgatgttttttgcttgtagtatttttagttgacattgttttctgttcagcagtttccttttagcttccgtatttcctgatgagaaatctgcagtcattcaaattgttgtttccctgtatgtagtgtgtcatttttctgtcagatttcaaggtatttatctttagtttttagccatttcattatgttggggatgagtttccttgttttattccctttggaatttgctccaattcataaatttgcagttttatgtcttttaccaaacttagaggttttcagcctaatttctaaaaatactttttattagcctgattttcatctttataggaaatagtttaagtgatgacaagttccaatagcttatatgcccagaaggccttcaaaataagaattttgaaagaatacagaaaacaaacttttatatccttctcatgtcttctactgtaaaattcatatgctttgctactctaaacctagtttgaaatcaacagtcttgagaatagatgaaaattttgatgaatagtggaattcttttaaatggaaacctcttacatgtgattttccttgccatctagaaataaaccatagtatttatgttgaatcaatcaatattatattttgtttttttcctcctcttctgagactcttattgtggaaatgttagacttttatgttttcctaaatgtccctgatattctacttatttagaacatcttttcattttttccattattctgattgggtaattttaatttgtctattttcaaatttgctggagtgttcacctgttgttgtctgtgtcgtcccactgagtgcattcaccaccttttaaattttggtcactgtatgtatcagttctaaaatttccattttgttctctatattttaaatttcttggcttatattctattttcctgcaaatgtgtcagcatttgcttgtttgagctttttttttttcaagacagggtctcaactctgttacccaggctggagtgcagtggtgcgatctcagctcactgcaacctctgcctcctggttcaagcgattattgtgcctcagcctcctgagtagctgggattacaggcatgcaccaccacagcccagctaattttttgtatttttagtagagacagagttttgctatgttggccaggctggttttgaactcctggcctcaagtgatccacccacctcagcctcccaaagtgctgggattacaggccactacacctggcacatttgagtattttttttttttttttttttttgagatggagtctcgctctgtcatctaggctggagtgcagtggtgtgatctcagctcactgcagcctctgtctcccgggctcaagcgattctcttgcctcagcctcctgagtagctaggactacaggtgcatgccaacacgcccggctaatttttttaaaaaatatttttagtagagacagggtttcaccattttggccaggatggtctcgatctcctgacctcatgatccacccgcctcggccttccaaagtgctgggattacaggcatgagccaccgtgcctggcctcatttgagtatttttataatgtctcttttaaagtctttgtcagataattccactgtacatgttattcagtgtttggtgtccactgagttgtcatttgccagacaagtggagatttttgcagctcatccttgtattctcagtagttccgatatgtaccctcgacatgtgaatgttatcttatgagactctgttttatttgtatccaacagaagatgtttattatttatttggctttctgtgaactgaggtcttaatatcagctcattttaaaagtctttgcagtggtattcggatctatcctgtgtgtgcctatgagattgggtgcagtgtatcctgttagctccattctcagggcgtttgaatgtgaattaggaccagcgcaatgaatgctcaagttggggttgggcgttagaattcataaaagtctttatatgctcagattctgcagctccatcctcttcatgattgtgatcgtaaggacagtggaattttgcagttgtctataccttatcttgaagtagaactaaattgttacatttgaagaatgtacttcataaatttacaaaaataaaaaaataggttaatgttattaaaacaaaaaggcacaca

SEQ ID NO: 298428 - DNA, 4622 bp, Homo sapiens
cttgttttctgaagaaactagagatttgcatgagctaagcttttcctaattctgtcctgcataaggggctttcttgctccccagggcagctttttttaggaatcctggggagactgggtgcaaaacagagagggacctgaaatggcttatctgaccccggcttcccagcgaggctcagagagacctgatggggctgctttggaagctttcttgcttctctatagaatctcggattctgagctggtcgcatcattaatgaggggcctcaaaaccctcaaaatctaagacgtttgtattcagttggtagctcagatagtttttctctgactcatgtggtgttgacagctaggttattcttcccttcctggtataaaagcatttcctaacattgtaaatgtaaagagctgtttacctctctccctctgtttcccactcaaccagccatgacattgcacaggaaacgggttaagttccattggccagttcactgtagggagccgggcctttccaccctccactgcttcaagtcaactgatgtgtttcctctaggagttgaaattgtcctacaggagccctggagaaattcagcacttctcaaaattctatgctgggcagatgaaggaacccattcaacttgagattactgaaaaaagacatgggactttggtgtgggatactgaggtgaagccagtggatctccagcttgtagctgcatcagcccctcctcctttctcaggtgcagcctttgtgaaggagaaccaccggcaactccaagccaggatgggggacctgaaaggggtgctcgatgatctccaggacaatgaggttcttactgagaatgagaaggagctggtggagcaggaaaagacacggcagagcaagaatgaggccttgctgagcatggtggagaagaaaggggacctggccctggacgtgctcttcagaagcattagtgaaagggacccttacctcgtgtcctatcttagacagcagaatttgtaaaatgagtcagttaggtagtctggaagagagaatccagcgttctcattggaaatggataaacagaaatgtgatcattgatttcagtgttcaagacagaagaagactgggtaacatctatcacacaggctttcaggacagacttgtaacctggcatgtacctattgactgtatcctcatgcattttcctcaagaatgtctgaagaaggtagtaatattccttttaaattttttccaaccattgcttgatatatcactattttatccattgacatgattcttgaagacccaggataaaggacatccggataggtgtgtttatgaaggatggggcctggaaaggcaacttttcctgattaatgtgaaaaataattcctatggacactccgtttgaagtatcaccttctcataactaaaagcagaaaagctaacaaaagcttctcagctgaggacactcaaggcatacatgatgacagtcttttttttttttgtatgttaggactttaacactttatctatggctactgttattagaacaatgtaaatgtatttgctgaaagagagcacaaaaatgggagaaaatgcaaacatgagcagaaaatattttcccactggtgtgtagcctgctacaaggagttgttgggttaaatgttcatggtcaactccaaggaatactgagatgaaatgtggtaaatcaactccacagaaccaccaaaaagaaaatgagggtaattcagcttattctgagacagacattcctggcaatgtaccatacaaaaaataagccaactctgacatttggattctaccatagactctgtcattttgtagccatttcagctgtcttttgattaatgttttcgtggcacacatatttccatccttttatgtttaatctgtttaaaacaagttcctagtagacaccatctggttgagtcagttttttttatggtgtattttgaacccattctgatagtctcttttaactggaagatttcaattacttacgttaatgtaattattaatatgttaggatttatcctcagtcagccagtttgttatgtcttttctattctactgttatcacatttgtaccacttaaagtggaatctaggcactttatcaccatttagatcctattaccttttctcatctaggatatagttatcttctacataatctttctgtatcttaaaacccatcaataaattattatatattttctacttttaatcactcagaagatttaaaaaactcatgagaagagtaatctgttatgtttttccagatatttaccatttctgttgctcttccttcattattttccaaatttcgttctgcaaatttccacttcttctgatagacgttttttagttcttttagagtggttctgataggtacagattctcttattttttgcttcctctgaggacatctttttctcaccttcattctcagtgatgttttttgcttgtagtatttttagttgacattgttttctgttcagcagtttccttttagcttccgtatttcctgatgagaaatctgcagtcattcaaattgttgtttccctgtatgtagtgtgtcatttttctgtcagatttcaaggtatttatctttagtttttagccatttcattatgttggggatgagtttccttgttttattccctttggaatttgctccaattcataaatttgcagttttatgtcttttaccaaacttagaggttttcagcctaatttctaaaaatactttttattagcctgattttcatctttataggaaatagtttaagtgatgacaagttccaatagcttatatgcccagaaggccttcaaaataagaattttgaaagaatacagaaaacaaacttttatatccttctcatgtcttctactgtaaaattcatatgctttgctactctaaacctagtttgaaatcaacagtcttgagaatagatgaaaattttgatgaatagtggaattcttttaaatggaaacctcttacatgtgattttccttgccatctagaaataaaccatagtatttatgttgaatcaatcaatattatattttgtttttttcctcctcttctgagactcttattgtggaaatgttagacttttatgttttcctaaatgtccctgatattctacttatttagaacatcttttcattttttccattattctgattgggtaattttaatttgtctattttcaaatttgctggagtgttcacctgttgttgtctgtgtcgtcccactgagtgcattcaccaccttttaaattttggtcactgtatgtatcagttctaaaatttccattttgttctctatattttaaatttcttggcttatattctattttcctgcaaatgtgtcagcatttgcttgtttgagctttttttttttcaagacagggtctcaactctgttacccaggctggagtgcagtggtgcgatctcagctcactgcaacctctgcctcctggttcaagcgattattgtgcctcagcctcctgagtagctgggattacaggcatgcaccaccacagcccagctaattttttgtatttttagtagagacagagttttgctatgttggccaggctggttttgaactcctggcctcaagtgatccacccacctcagcctcccaaagtgctgggattacaggccactacacctggcacatttgagtattttttttttttttttttttttgagatggagtctcgctctgtcatctaggctggagtgcagtggtgtgatctcagctcactgcagcctctgtctcccgggctcaagcgattctcttgcctcagcctcctgagtagctaggactacaggtgcatgccaacacgcccggctaatttttttaaaaaatatttttagtagagacagggtttcaccattttggccaggatggtctcgatctcctgacctcatgatccacccgcctcggccttccaaagtgctgggattacaggcatgagccaccgtgcctggcctcatttgagtatttttataatgtctcttttaaagtctttgtcagataattccactgtacatgttattcagtgtttggtgtccactgagttgtcatttgccagacaagtggagatttttgcagctcatccttgtattctcagtagttccgatatgtaccctcgacatgtgaatgttatcttatgagactctgttttatttgtatccaacagaagatgtttattatttatttggctttctgtgaactgaggtcttaatatcagctcattttaaaagtctttgcagtggtattcggatctatcctgtgtgtgcctatgagattgggtgcagtgtatcctgttagctccattctcagggcgtttgaatgtgaattaggaccagcgcaatgaatgctcaagttggggttgggcgttagaattcataaaagtctttatatgctcagattctgcagctccatcctcttcatgattgtgatcgtaaggacagtggaattttgcagttgtctataccttatcttgaagtagaactaaattgttacatttgaagaatgtacttcataaatttacaaaaataaaaaaataggttaatgttattaaaacaaaaaggcacaca

SEQ ID NO: 298429 - DNA, 2675 bp, Homo sapiens
  misc_feature (1911)..(1911): n is a, c, g, or t
ctggctgtgtccacattgaacgtgggcataatacaaagagaagaaggagagatgtcaagacacatttggctcaagggagtgtgttatctctattatttataaatgtggataaaaatatcttcattcaaaatgtcttctatttcttgatagtctagatccgcccagtctaagagaactttctgtgatgacgggagtgttccattctctgctacacagtgttatagccgtgagtgatatgtagctgttgagcacttgaaatatggatagtgcaactgagaaactaaagtttacctaagtttaattcatacaaatttaaatagcatatccgggtagcggctactctacgggacagtgcagctctagttttcaataacatcgtcttcatcttcatcaactgattcttgatgtttttcatctttttgtaacatggggatcccaacctccagtgtatcagaagagcaggaatcttcagagggacaagattcaggagacatttgctcagaagagaatcaaatagtttcctcttatgcttctaaagtctgttttgagatcgaagaagattataaaaatcgtcagtttctggggcctgaaggaaatgtggatgttgagttgattgataagagcacaaacagatacagcgtttggttccccactgctggctggtatctgtggtcagccacaggcctcggcttcctggtaagggatgaggtcacagtgacgattgcgtttggttcctggagtcagcacctggccctggacctgcagcaccatgaacagtggctggtgggcggccccttgtttgatgtcactgcagagccagaggaggctgtcgccgaaatccacctcccccacttcatctccctccaaggtgaggtggacgtctcctggtttctcgttgcccattttaagaatgaagggatggtcctggagcatccagcccgggtggagcctttctatgctgtcctggaaagccccagcttctctctgatgggcatcctgctgcggatcgccagtgggactcgcctctccatccccatcacttccaacacattgatctattatcacccccaccccgaagatattaagttccacttgtaccttgtccccagcgacgccttgctaacaaaggcgatagatgatgaggaagatcgcttccatggtgtgcgcctgcagacttcgcccccaatggaacccctgaactttggttccagttatattgtgtctaattctgctaacctgaaagtaatgcccaaggagttgaaattgtcctacaggagccctggagaaattcagcacttctcaaaattctatgctgggcagatgaaggaacccattcaacttgagattactgaaaaaagacatgggactttggtgtgggatactgaggtgaagccagtggatctccagcttgtagctgcatcagcccctcctcctttctcaggagtgaggatgtggcctggatgctgcccaatcttgcctagaactggctgcacctgcttgtgccttaacccttggttaccctaaatccctgttatccagactcattgggactgctctagatcttcactatccaatacgggttactgtggcaacgccaacctttgaatccccctcctgcgcgctgagcggctcgtaaccatggagaccgaagcaggtttcccgcgtccgcctcctcacacagagactgcagccccggcgcccagaccctttggacaaggagatccaagcgggccccacaatgctcagcgggtaaagagctcctccccactcctctcccgccagcagacgaaggaaacaccccgcagcctgcacatgctcagatggagctctgggcccgcgggttctactgcgcaggccctcacactcagcaaagggacttggacgcgaaagccctggtggcgctcagccggntgggagttgtagctttctggctgctacagcaggagatacaggtggccaatgggtgagctggctggaggtaggaacaaggttaaggaagctgggatcttcgtgcagactggatcgtcactatagcaacaatgaaacatcgggaagggctagttctgctaggcagtctgccattttcattctttcatctttttttttaactcaaagcttactttgcaacaggcactgttctaggcactggggatacaatggaaaacaaaatagagcttctattttggcgggagatcgacttaataactgtgaacacgtgtcactggaaaaagcagtatgttaataagtaactgggctgctttgggaaaaatggaaatgcaggcaatgttagaacactggtacacacactaattcattcatcctcacaaagccctatagacaggtactattatgaccccctcaactgtaacataggctggaaggtcacatgacaaggaagtagtggagctgggatttgaacccaggcagtctggcttcatacttgataagcttaatcacaatgccaaactggtaaatagctgtgtggcataatttcaggtagtgataagtgctgtgaaggataaagcaaagaaaggggcagggatggctctttggagagactacttagggatggctttcaggaagaggtggcatttgagcaggggcccgagggattgatgtgacttgtgataaaagaaaaacttcagacgaattaaatttaaagaagtttaattggc

SEQ ID NO: 298430 - DNA, 3095 bp, Homo sapiens
  misc_feature (1911)..(1911): n is a, c, g, or t
ctggctgtgtccacattgaacgtgggcataatacaaagagaagaaggagagatgtcaagacacatttggctcaagggagtgtgttatctctattatttataaatgtggataaaaatatcttcattcaaaatgtcttctatttcttgatagtctagatccgcccagtctaagagaactttctgtgatgacgggagtgttccattctctgctacacagtgttatagccgtgagtgatatgtagctgttgagcacttgaaatatggatagtgcaactgagaaactaaagtttacctaagtttaattcatacaaatttaaatagcatatccgggtagcggctactctacgggacagtgcagctctagttttcaataacatcgtcttcatcttcatcaactgattcttgatgtttttcatctttttgtaacatggggatcccaacctccagtgtatcagaagagcaggaatcttcagagggacaagattcaggagacatttgctcagaagagaatcaaatagtttcctcttatgcttctaaagtctgttttgagatcgaagaagattataaaaatcgtcagtttctggggcctgaaggaaatgtggatgttgagttgattgataagagcacaaacagatacagcgtttggttccccactgctggctggtatctgtggtcagccacaggcctcggcttcctggtaagggatgaggtcacagtgacgattgcgtttggttcctggagtcagcacctggccctggacctgcagcaccatgaacagtggctggtgggcggccccttgtttgatgtcactgcagagccagaggaggctgtcgccgaaatccacctcccccacttcatctccctccaaggtgaggtggacgtctcctggtttctcgttgcccattttaagaatgaagggatggtcctggagcatccagcccgggtggagcctttctatgctgtcctggaaagccccagcttctctctgatgggcatcctgctgcggatcgccagtgggactcgcctctccatccccatcacttccaacacattgatctattatcacccccaccccgaagatattaagttccacttgtaccttgtccccagcgacgccttgctaacaaaggcgatagatgatgaggaagatcgcttccatggtgtgcgcctgcagacttcgcccccaatggaacccctgaactttggttccagttatattgtgtctaattctgctaacctgaaagtaatgcccaaggagttgaaattgtcctacaggagccctggagaaattcagcacttctcaaaattctatgctgggcagatgaaggaacccattcaacttgagattactgaaaaaagacatgggactttggtgtgggatactgaggtgaagccagtggatctccagcttgtagctgcatcagcccctcctcctttctcaggagtgaggatgtggcctggatgctgcccaatcttgcctagaactggctgcacctgcttgtgccttaacccttggttaccctaaatccctgttatccagactcattgggactgctctagatcttcactatccaatacgggttactgtggcaacgccaacctttgaatccccctcctgcgcgctgagcggctcgtaaccatggagaccgaagcaggtttcccgcgtccgcctcctcacacagagactgcagccccggcgcccagaccctttggacaaggagatccaagcgggccccacaatgctcagcgggtaaagagctcctccccactcctctcccgccagcagacgaaggaaacaccccgcagcctgcacatgctcagatggagctctgggcccgcgggttctactgcgcaggccctcacactcagcaaagggacttggacgcgaaagccctggtggcgctcagccggntgggagttgtagctttctggctgctacagcaggagatacaggtggccaatgggtgagctggctggaggtaggaacaaggttaaggaagctgggatcttcgtgcagactggatcgtcactatagcaacaatgaaacatcgggaagggctagttctgctaggcagtctgccattttcattctttcatctttttttttaactcaaagcttactttgcaacaggcactgttctaggcactggggatacaatggaaaacaaaatagagcttctattttggcgggagatcgacttaataactgtgaacacgtgtcactggaaaaagcagtatgttaataagtaactgggctgctttgggaaaaatggaaatgcaggcaatgttagaacactggtacacacactaattcattcatcctcacaaagccctatagacaggtactattatgaccccctcaactgtaacataggctggaaggtcacatgacaaggaagtagtggagctgggatttgaacccaggcagtctggcttcatacttgataagcttaatcacaatgccaaactggtaaatagctgtgtggcataatttcaggtagtgataagtgctgtgaaggataaagcaaagaaaggggcagggatggctctttggagagactacttagggatggctttcaggaagaggtggcatttgagcaggggcccgagggattgatgtgacttgtgataaaagaaaaacttcagacgaattaaatttaaagaagtttaattggctaggcactgtggttcatgcctgtaatcccagcactttgggaggccgaggagggcggatggcttcaagtcaggagcttgagaccagcctggtcaacatggcaaaaccctgtctctactacaaatacaaaaattagctaggcatggtggtgggcacctgtagtcccagctactcgggaggctgaggcacaagaattgcttgaacgcagaaggtggaggttgtagtgagctgagatcgcaccactgtgctccagcctgtgcaacagagcgagactccatctctaaataaataaataaatagagtttaattgagcaatgaaggatccacgaatcaggtagcctcgggccagagtaggctgaaactccagcacagccatgtggtggaagatttatggacagaaaaaggaaagtgacatacagaaa

SEQ ID NO: 298431 - DNA, 873 bp, Homo sapiens
aaaagaagttgagaaccagagaaaccgacctaaggggattctcccatttggcccgtcctaccctaaagtcaccacctgctgcttttctggagcgcttaccagtgaccaagaggaacagaacacagagcagcctggcagtgtccaagcaacaagcctccgctcctccttcctgcaccctggggctcctgaaactcacatgagaaggagggctgtctgagattcgagggaaacaagctctcaggacttccggtcgccatgatggctgtgggcggtaaacgcggttagtgcaagcatctgggccatcttcaatggtaaaaaagatacagtaaagacataaataccacatttgacaaatggaaaaaaaggagtgtccagaaaagagtagcagcagtgaggaagagctgccgagacgggacagtggatccagtaggaacatagatgcatccaaactcattagactacaaggatcacggaaactgttggttgacaatagcatacgggaactgcaatacacaaaaactggaattttttttcaggctgaggcctgtgtgacaaatgatacgtaagggacatctatttgttgggaaaaaattaaagatttggaattttgctccattggtttatgtacattcataagaagcaaagacatgcaggttatttgcataaaaattagtatatatgttacttttcttctttgttatcttaagtttttatttcaaaagagtttgtatcccaaagtgctgggattacaggcgtgagtcgctgcacccagccgataatacttcctgtaacaatagcgatatgatttggatgtttgtcccttccaaatctcatgctgaaatgtgatggagtgttggaggtggggcctggagg

SEQ ID NO: 298432 - DNA, 1406 bp, Homo sapiens
attctgcgcttagcggcgccctttttttccatttgtcaatgcggatgttgagttgatttgacaaatggaaaaaaaggagtgtccagaaaagagtagcagcagtgaggaagagctgccgagacgggacagtggatccagtaggaacatagatgcatccaaactcattagactacaaggatcacggaaactgttggttgacaatagcatacgggaactgcaatacacaaaaactggaattttttttcaggctgaggcctgtgtgacaaatgatacggtatacagggagctaccctgtgtttctgagaccctttgtgacatctcacattttttccaagaagatgatgagacagaggcagagccattattgttccgtgctgttcctgagtgtcaactatctgggggggacattcccaggtaagaaaagctattccgttggaaaactattggacgctgtgtctcaatatcacagaggaacatgagaattagaggaatttgggtgtttttcatcgaactcaggggagagtgaatgagcttatgcaatactggcaatgaatccagaaatttttgaaacaaaccttaagcaatgaggttttcttccatggaggtgtctagagaacctatacacaaaaaggcaatgagcaatgcaatcgaagaccagtgggttattggttaagctgttactcaatacataaaaccaacctaattctctaggaaactggctgatgcatgaggctgaaggcacagtggggtctgaggtttaacaccggggaggggagaatgcgtctatttgtagggtatgccaatttccaagggttgaatatccccatcatggcagatttcaaactaccaacgtgaagcccctgatgagggagttgaaagaacacatgcagaagtctgtcatcctgctttcaccacacagatacaagagacataaataacctcaagggcatagactgctgaaaagtgtagaaaaatgactggaaattggtatgttttaatatgtattacttttgtttttaatatgatttatttaaatgttagcttgtatcatttaatttagactaatggttgtgttgaacaacttggttgcaaaagccctgaaaatggaaccgtcagctctcatgatctgggatgcgctgtctgcagttcagcgctgggttcctcccactttctaaacccctcctcagcaggcagactccagcatgcacatgcaccaggaaagagaatataaaatggcatgtttactcttgctgctttgcctgtagctacccgaatccatagcaaaatgtgtagccgcagacagcaaccagtcttaggatgtcagcccaggggtctctccatgcttggcttgcccacagaatccttccgagaaaagcgctgtaaagcctttctcttcatcccacttc

SEQ ID NO: 298433 - DNA, 1503 bp, Homo sapiens
ctggctgtgtccacattgaacgtgggcataatacaaagagaagaaggagagatgtcaagacacatttggctcaagggagtgtgttatctctattatttataaatgtggataaaaatatcttcattcaaaatgtcttctatttcttgatagtctagatccgcccagtctaagagaactttctgtgatgacgggagtgttccattctctgctacacagtgttatagccgtgagtgatatgtagctgttgagcacttgaaatatggatagtgcaactgagaaactaaagtttacctaagtttaattcatacaaatttaaatagcatatccgggtagcggctactctacgggacagtgcagctctagttttcaataacatcgtcttcatcttcatcaactgattcttgatgtttttcatctttttgtaacatggggatcccaacctccagtgtatcagaagagcaggaatcttcagagggacaagattcaggagacatttgctcagaagagaatcaaatagtttcctcttatgcttctaaagtctgttttgagatcgaagaagattataaaaatcgtcagtttctggggcctgaaggaaatgtggatgttgagttgattgataagagcacaaacagatacagcgtttggttccccactgctggctggtatctgtggtcagccacaggcctcggcttcctggtaagggatgaggtcacagtgacgattgcgtttggttcctggagtcagcacctggccctggacctgcagcaccatgaacagtggctggtgggcggccccttgtttgatgtcactgcagagccagaggaggctgtcgccgaaatccacctcccccacttcatctccctccaaggtgaggtggacgtctcctggtttctcgttgcccattttaagaatgaagggatggtcctggagcatccagcccgggtggagcctttctatgctgtcctggaaagccccagcttctctctgatgggcatcctgctgcggatcgccagtgggactcgcctctccatccccatcacttccaacacattgatctattatcacccccaccccgaagatattaagttccacttgtaccttgtccccagcgacgccttgctaacaaaggcgatagatgatgaggaagatcgcttccatggtgtgcgcctgcagacttcgcccccaatggaacccctgaactttggttccagttatattgtgtctaattctgctaacctgaaagtaatgcccaagtggatctccagcttgtagctgcatcagcccctcctcctttctcaggtaagtgaaatgtttacattaaagccaagggtatgtatgagacatcaaggggtctttgagtgacagtggaaggtatccaagtgacatggcaccagaacgttactggcagcaaatccgtataggtctgcagcaacctcaattcttgcctccttagaagacagaatttgactgaggggcataaggcagaaggagagaccgaggcaa

SEQ ID NO: 298434 - DNA, 762 bp, Homo sapiens
aaaagaagttgagaaccagagaaaccgacctaaggggattctcccatttggcccgtcctaccctaaagtcaccacctgctgcttttctggagcgcttaccagtgaccaagaggaacagaacacagagcagcctggcagtgtccaagcaacaagcctccgctcctccttcctgcaccctggggctcctgaaactcacatgggtaaaaaagatacagtaaagacataaataccacatttgacaaatggaaaaaaaggagtgtccagaaaagagtagcagcagtgaggaagagctgccgagacgggacagtggatccagtaggaacatagatgcatccaaactcattagactacaaggatcacggaaactgttggttgacaatagcatacgggaactgcaatacacaaaaactggaattttttttcaggctgaggcctgtgtgacaaatgatacgtaagggacatctatttgttgggaaaaaattaaagatttggaattttgctccattggtttatgtacattcataagaagcaaagacatgcaggttatttgcataaaaattagtatatatgttacttttcttctttgttatcttaagtttttatttcaaaagagtttgtatcccaaagtgctgggattacaggcgtgagtcgctgcacccagccgataatacttcctgtaacaatagcgatatgatttggatgtttgtcccttccaaatctcatgctgaaatgtgatggagtgttggaggtggggcctggagg

SEQ ID NO: 298435 - DNA, 916 bp, Homo sapiens
ctggctgtgtccacattgaacgtgggcataatacaaagagaagaaggagagatgtcaagacacatttggctcaagggagtgtgttatctctattatttataaatgtggataaaaatatcttcattcaaaatgtcttctatttcttgatagtctagatccgcccagtctaagagaactttctgtgatgacgggagtgttccattctctgctacacagtgttatagccgtgagtgatatgtagctgttgagcacttgaaatatggatagtgcaactgagaaactaaagtttacctaagtttaattcatacaaatttaaatagcatatccgggtagcggctactctacgggacagtgcagctctagttttcaataacatcgtcttcatcttcatcaactgattcttgatgtttttcatctttttgtaacatggggatcccaacctccagtgtatcagaagagcaggaatcttcagagggacaagattcaggagacatttgctcagaagagaatcaaatagtttcctcttatgcttctaaagtctgttttgagatcgaagaagattataaaaatcgtcagtttctggggcctgaaggaaatgtggatgttgagttgattgataagagcacaaacagatacagcgtttggttccccactgctggctggtatctgtggtcagccacaggcctcggcttcctggtaagggatgaggtcacagtgacgattgcgtttggttcctggagtcagcacctggccctggacctgcagcaccatgaacagtggctggtgggcggccccttgtttgatgtcactgcagagccagaggaggctgtcgccgaaatccacctcccccacttcatctccctccaaggtaatgtggggtgagcggaggctgtgggggccgctggggtgcgtgccg

SEQ ID NO: 298436 - DNA, 1124 bp, Homo sapiens
aaaagaagttgagaaccagagaaaccgacctaaggggattctcccatttggcccgtcctaccctaaagtcaccacctgctgcttttctggagcgcttaccagtgaccaagaggaacagaacacagagcagcctggcagtgtccaagcaacaagcctccgctcctccttcctgcaccctggggctcctgaaactcacatgagaaggagggctgtctgagattcgagggaaacaagctctcaggacttccggtcgccatgatggctgtgggcggtaaacgcggttagtgcaagcatctgggccatcttcaatggtaaaaaagatacagtaaagacataaataccacatttgacaaatggaaaaaaaggagtgtccagaaaagagtagcagcagtgaggaagagctgccgagacgggtatacagggagctaccctgtgtttctgagaccctttgtgacatctcacattttttccaagaagatgatgagacagaggcagagccattattgttccgtgctgttcctgagtgtcaactatctgggggggacattcccagatttcaaactaccaacgtgaagcccctgatgagggagttgaaagaacacatgcagaagtctgtcatcctgctttcaccacacagatacaagagacataaataacctcaagggcatagactgctgaaaagtgtagaaaaatgactggaaattggtatgttttaatatgtattacttttgtttttaatatgatttatttaaatgttagcttgtatcatttaatttagactaatggttgtgttgaacaacttggttgcaaaagccctgaaaatggaaccgtcagctctcatgatctgggatgcgctgtctgcagttcagcgctgggttcctcccactttctaaacccctcctcagcaggcagactccagcatgcacatgcaccaggaaagagaatataaaatggcatgtttactcttgctgctttgcctgtagctacccgaatccatagcaaaatgtgtagccgcagacagcaaccagtcttaggatgtcagcccaggggtctctccatgcttggcttgcccacagaatccttccgagaaaagcgctgtaaagcctttctcttcatcccacttc

SEQ ID NO: 298437 - DNA, 581 bp, Homo sapiens
aagcggcagcctataatttccatatagtcaaatagtaggatataagagtatgatttgacaaatggaaaaaaaggagtgtccagaaaagagtagcagcagtgaggaagagctgccgagacgggacagtggatccagtaggaacatagatgcatccaaactcattagactacaaggatcacggaaactgttggttgacaatagcatacgggaactgcaatacacaaaaactggaattttttttcaggctgaggcctgtgtgacaaatgatacgtaagggacatctatttgttgggaaaaaattaaagatttggaattttgctccattggtttatgtacattcataagaagcaaagacatgcaggttatttgcataaaaattagtatatatgttacttttcttctttgttatcttaagtttttatttcaaaagagtttgtatcccaaagtgctgggattacaggcgtgagtcgctgcacccagccgataatacttcctgtaacaatagcgatatgatttggatgtttgtcccttccaaatctcatgctgaaatgtgatggagtgttggaggtggggcctggagg

SEQ ID NO: 298438 - DNA, 294 bp, Homo sapiens
cagcgacgccttgctaacaaaggtaagctgagtgatttaggagaccagagaagatgacgattatatttccaggttatccccttggcccctccagttcctcgtggaacagaaagggcaaggcatggttttcatggacagaagcaggagtcacccttcctgaggttcatccaaggtgctgactctggagctatgtgcttccctaaccatcttcagtagtgattcagtgctactgaaaaaggaaattcccttttctggctctcaagaaggagaaagttagtgattttgggggaccag

SEQ ID NO: 298439 - DNA, 1479 bp, Homo sapiens
tagtgataaggctcataacaattagagaaggcttcttattggtcttacacagaaagatacatcaaaagcagcatgactcaaaatgatttggaaaaggttaaagttagtgctctgctgaagtgcctttgatatagacttgcattattagaaggatataacatcttttttaagtgtgcattttctttcagttaaccaaattaaacagatgtgcagttttattaaaaatatagacctagtgtttcatgttggaacaataaatattgcatgtgagtagtatttcttgttttttgaatacagtatatattgataaattgtttatgttggaatgaagttagaaactatatagcaaaacattatattttaagtgtttatttttcccacctttaaataaaaatgtttcatctcagcttggtaatgaaatacacatattggtataagggtataccattcaggtatgccacttattttattcatttttgtgtaagggaaatgagatgatgtatcccaagggcttttctagaactacttgtttgctttcagaataaaaccttattattttttacactgcacatgctgttctcaattggtaattataggcaatttatcttttctaatgatcaaaagagtgtgacttctcatttgtgagtagttcacaaatttcctgttaaaaagctgaaaccatctactttttcttaacccaagtgataataaacaatattcacaactttcttaaatttttaaattgaaaaccaaggttttttcaaatataaacctagatgattttggtcacaaattgttaacatttgtcgatcctttgtatatactttggatatatattaaaggcaaaactatctcttgactaactgatggattcatttactaaagcacagctgtatgtatttttgaatacatattatgatcttgagactttataaatcaatttttatgactttatgcagttgtatagggattatgccctttcagttctatagggattatgcccttttataatacataatataccacagagattacaaatgttgaggaatgaaagcacttctttgctttggcaatcattttcagaccactatgtgtttgaatcctctggtatcaatacgtattatagggttttagagatctgtgggtcaaatgatgtccctcaaaacttcctaaaaaggtgaagctcaaagtcacacattcatttataaggcgcatgagtttctcattttcccatgtacgagcattgtaaaggaattcagctgtattaatttctatttcagatctagaattgacattttgccttcttgtttccaggtgtttctattttttgtattctttcagagaaatctcatatttcggtgtatttattgctgttactactatatttactgctgaaaactgtaacaacctgaagatttgtaaaatgttaaacatagttcattaaaaataataaaataaatctaaaatgtacttggagca

SEQ ID NO: 298440 - DNA, 789 bp, Homo sapiens
gcgtggtcgcggccgaggtacgcgggattcacaactttcttaaatttttaaattgaaaaccaaggttttttcaaatataaacctagatgattttggtcacaaattgttaacatttgtcgatcctttgtatatactttggatatatattaaaggcaaaactatctcttgactaactgatggattcatttactaaagcacagctgtatgtatttttgaatacatattatgatcttgagactttataaatcaatttttatgactttatgcagttgtatagggattatgccctttcagttctatagggattatgcccttttataatacataatataccacagagattacaaatgttgaggaatgaaagcacttctttgctttggcaatcattttcagaccactatgtgtttgaatcctctggtatcaatacgtattatagggttttagagatctgtgggtcaaatgatgtccctcaaaacttcctaaaaaggtgaagctcaaagtcacacattcatttataaggcgcatgagtttctcattttcccatgtacgagcattgtaaaggaattcagctgtattaatttctatttcagatctagaattgacattttgccttcttgtttccaggtgtttctattttttgtattctttcagagaaatctcatatttcggtgtatttattgctgttactactatatttactgctgaaaactgtaacaacctgaagatttgtaaaatgttaaacatagttcattaaaaataataaaataaatctaaaatgtacttggagca

SEQ ID NO: 298441 - DNA, 751 bp, Homo sapiens
gcgtggtcgcggccgaggtacgcggggttttttcaaatataaacctagatgattttggtcacaaattgttaacatttgtcgatcctttgtatatactttggatatatattaaaggcaaaactatctcttgactaactgatggattcatttactaaagcacagctgtatgtatttttgaatacatattatgatcttgagactttataaatcaatttttatgactttatgcagttgtatagggattatgccctttcagttctatagggattatgcccttttataatacataatataccacagagattacaaatgttgaggaatgaaagcacttctttgctttggcaatcattttcagaccactatgtgtttgaatcctctggtatcaatacgtattatagggttttagagatctgtgggtcaaatgatgtccctcaaaacttcctaaaaaggtgaagctcaaagtcacacattcatttataaggcgcatgagtttctcattttcccatgtacgagcattgtaaaggaattcagctgtattaatttctatttcagatctagaattgacattttgccttcttgtttccaggtgtttctattttttgtattctttcagagaaatctcatatttcggtgtatttattgctgttactactatatttactgctgaaaactgtaacaacctgaagatttgtaaaatgttaaacatagttcattaaaaataataaaataaatctaaaatgtacttggagca

SEQ ID NO: 298442 - DNA, 219 bp, Homo sapiens
  misc_feature (39)..(40): n is a, c, g, or t
gaggtcgatctcaggatttactcttcactgtgttgagcnngaaagccaggtggctgctctgtcccctacatggggctgatgaagacacccagcacccctcaggtccttctccacccctaggttgaaagatctgttctaccgctccagcaacctgcagtacttcaagcggctcattcagatcccccagctgcctgaggtaagcatgcccaaccacacacc

SEQ ID NO: 298443 - DNA, 7962 bp, Homo sapiens
cacggcttggtcttaggtcctgtgtgactccagggaagtccagagaacagcctgttctcagatgatgttccctaacccagagccccctccagagactgtcagcatcaataaggccattaatacgcaggaagtggctgtaaaggaaaaacacgccagaacgtgcatactgggcacccaccatgagaaaggggcacagaccttctggtctgttgtcaaccgcctgcctctgtctagcaacgcagtgctctgctggaagttctgccatgtgttccacaaactcctccgagatggacacccgaacgtcctgaaggactctctgagatacagaaatgaattgagtgacatgagcaggatgtggggccacctgagcgaggggtatggccagctgtgcagcatctacctgaaactgctaagaaccaagatggagtaccacaccaaaaatcccaggttcccaggcaacctgcagatgagtgaccgccagctggacgaggctggagaaagtgacgtgaacaactttttccagttaacagtggagatgtttgactacctggagtgtgaactcaacctcttccaaacagtattcaactccctggacatgtcccgctctgtgtccgtgacggcagcagggcagtgccgcctcgccccgctgatccaggtcatcttggactgcagccacctttatgactacactgtcaagcttctcttcaaactccactcctgcctcccagctgacaccctgcaaggccaccgggaccgcttcatggagcagtttacaaagttgaaagatctgttctaccgctccagcaacctgcagtacttcaagcggctcattcagatcccccagctgcctgagaacccacccaacttcctgcgagcctcagccctgtcagaacatatcagccctgtggtggtgatccctgcagaggcctcatcccccgacagcgagccagtcctagagaaggatgacctcatggacatggatgcctctcagcagaatttatttgacaacaagtttgatgacatctttggcagttcattcagcagtgatcccttcaatttcaacagtcaaaatggtgtgaacaaggatgagaaggaccacttaattgagcgactatacagagagatcagtggattgaaggcacagctagaaaacatgaagactgagagccagcgggttgtgctgcagctgaagggccacgtcagcgagctggaagcagatctggccgagcagcagcacctgcggcagcaggcggccgacgactgtgaattcctgcgggcagaactggacgagctcaggaggcagcgggaggacaccgagaaggctcagcggagcctgtctgagatagaaaggaaagctcaagccaatgaacagcgatatagcaagctaaaggagaagtacagcgagctggttcagaaccacgctgacctgctgcggaagaatgcagaggtgaccaaacaggtgtccatggccagacaagcccaggtagatttggaacgagagaaaaaagagctggaggattcgttggagcgcatcagtgaccagggccagcggaagactcaagaacagctggaagttctagagagcttgaagcaggaacttgccacaagccaacgggagcttcaggttctgcaaggcagcctggaaacttctgcccagtcagaagcaaactgggcagccgagttcgccgagctagagaaggagcgggacagcctggtgagtggcgcagctcatagggaggaggaattatctgctcttcggaaagaactgcaggacactcagctcaaactggccagcacagaggaatctatgtgccagcttgccaaagaccaacgaaaaatgcttctggtggggtccaggaaggctgcggagcaggtgatacaagacgccctgaaccagcttgaagaacctcctctcatcagctgcgctgggtctgcagatcacctcctctccacggtcacatccatttccagctgcatcgagcaactggagaaaagctggagccagtatctggcctgcccagaagacatcagtggacttctccattccataaccctgctggcccacttgaccagcgacgccattgctcatggtgccaccacctgcctcagagccccacctgagcctgccgactcactgaccgaggcctgtaagcagtatggcagggaaaccctcgcctacctggcctccctggaggaagagggaagccttgagaatgccgacagcacagccatgaggaactgcctgagcaagatcaaggccatcggcgaggagctcctgcccaggggactggacatcaagcaggaggagctgggggacctggtggacaaggagatggcggccacttcagctgctattgaaactgccacggccagaatagaggagatgctcagcaaatcccgagcaggagacacaggagtcaaattggaggtgaatgaaaggatccttggttgctgtaccagcctcatgcaagctattcaggtgctcatcgtggcctctaaggacctccagagagagattgtggagagcggcaggggtacagcatcccctaaagagttttatgccaagaactctcgatggacagaaggacttatctcagcctccaaggctgtgggctggggagccactgtcatggtggatgcagctgatctggtggtacaaggcagagggaaatttgaggagctaatggtgtgttctcatgaaattgctgctagcacagcccagcttgtggctgcatccaaggtgaaagctgataaggacagccccaacctagcccagctgcagcaggcctctcggggagtgaaccaggccactgccggcgttgtggcctcaaccatttccggcaaatcacagatcgaagagacagacaacatggacttctcaagcatgacgctgacacagatcaaacgccaagagatggattctcaggttagggtgctagagctagaaaatgaattgcagaaggagcgtcaaaaactgggagagcttcggaaaaagcactacgagcttgctggtgttgctgagggctgggaagaaggaacagaggcatctccacctacactgcaagaagtggtaaccgaaaaagaatagagccaaaccaacaccccatatgtcagtgtaaatccttgttacctatctcgtgtgtgttatttccccagccacaggccaaatccttggagtcccaggggcagccacaccactgccattacccagtgccgaggacatgcatgacacttccaaagactccctccatagcgacaccctttctgtttggacccatggtcatctctgttcttttcccgcctccctagttagcatccaggctggccagtgctgcccatgagcaagcctaggtacgaagaggggtggtggggggcagggccaatcaacagagaggaccaacatccagtcctgctgactatttgacccccacaacaatgggtatccttaatagaggagctgcttgttgtttgttgacagcttggaaagggaagatcttatgccttttcttttctgttttcttctcagtcttttcagtttcatcatttgcacaaacttgtgagcatcagagggctgatggattccaaaccaggacactaccctgagatctgcacagtcagaaggacggcaggagtgtcctggctgtgaatgccaaagccattctccccctctttgggcagtgccatggatttccactgcttcttatggtggttgattgggttttttggttttgttttttttttttaagtttcactcacatagccaactctcccaaagggcacacccctggggctgagtctccagggccccccaactgtggtagctccagcgatggtgctgcccaggcctctcggtgctccatctccgcctccacactgaccaagtgctggcccacccagtccatgctccagggtcaggcggagctgctgagtgacagctttcctcaaaaagcagaaggagagtgagtgcctttccctcctaaagctgaatcccggcggaaagcctctgtccgcctttacaagggagaagacaacagaaagagggacaagagggttcacacagcccagttcccgtgacgaggctcaaaaacttgatcacatgcttgaatggagctggtgagatcaacaacactacttccctgccggaatgaactgtccgtgaatggtctctgtcaagcgggccgtctcccttggcccagagacggagtgtgggagtgattcccaactcctttctgcagacgtctgccttggcatcctcttgaataggaagatcgttccactttctacgcaattgacaaacccggaagatcagatgcaattgctcccatcagggaagaaccctatacttggtttgctacccttagtatttattactaacctcccttaagcagcaacagcctacaaagagatgcttggagcaatcagaacttcaggtgtgactctagcaaggctcatctttctgcccggctacatcagccttcaagaatcagaagaaaggccaaggtgctggactgttactgacttggatcccaaagcaaggagatcatttggagctcttgggtcagagaaaatgagaaaggacagagccagcggctccaactcctttcagccacatgccccaggctctcgctgccctgtggacaggatgaggacagagggcacatgaacagcttgccagggatgggcagcccaacagcacttttcctcttctagatggaccccagcatttaagtgaccttctgatcttggaaaaacagcgtcttccttctttatctatagcaactcattggtggtagccatcaagcacttcccaggatctgctccaacagaatattgctaggttttgctacatgacgggttgtgagacttctgtttgatcactgtgaaccaacccccatctccctagcccaccccgctccccaactccctctctgtgcattttctaagtgggacattcaaaaaactctctcccaggacctcggatgaccatactcagacgtgtgacctccatactgggctaaggaagtatcagcactagaaattgggcagtcttaatgttgaatgctgctttctgcttagtatttttttgattcaaggctcagaaggaatggtgcgtggcttccctgtcccagttgtggcaactaaaccaatcggtgtgttcttgatgcgggtcaacatttccaaaagtggctagtcctcacttctagatctcagccattctaactcatatgttcccaattaccaaggggtggccgggcacagtggctcacgcctgtaatcccagcactttgagaggctgaggtggtaggatcacctgaggtcaggagttcaagaccagcctgtccaacatggtgaaacccccatctctactaaaaataccaaaaattagccgagcgtagtgacgggtgcccgtaatcccagctactcaggaggctgagacaggagaatcacctgaaccccagaggcagaggttgcagtgagctgagatcacgccattgtactccagcctgggcaacaagagcaaaactccgtctcaaaaaaaaaaaaaaattacaaatggggcaaacagtctagtgtaatggatcaaattaagattctctgcccagccgggcacagtggcgcatgcctgtaatcccagaactttgggaggccaagacgggatgattgcttgagctcaggagtttgagaccaggctgggcatcatagcaagacctcatctctactaaaattcaaaaacaaaattagccgggcatgatggtgcatgcctgtagtctcagctagttggggagctaaggtgggagaattgcttgagcttgggaagtcgaggctgcagtcagccctgattgtgccagtgcactccggcctgggtgacagagtgagaccctgtctcaaaaaaaaaaagattctgtgtcagagcccagcccaggagtttgaggctgcaatgagccatgatttcccactgcactccagcctgagtgacagagcgagactccatctctttaaaaacaaacaaaaaattatctgaatgatcctgtctctaaaaagaagccacagaaatgtttaaaaacttcatcgacttagcctgagtcataacggttaagaaagcacttaaacagaagcagaggctaattcagtgtcacatgaggaagtagctgtcagatgtcacataattactttcgtaatagctcagattagaatggctaccccattctctagacaaaatcaaattgtcctattgtgactcttctaaaaatgaagatgaagagctatttaatgacacaccttggattaaaacgggaatcacatcttaaagctaaaaatgaacctgcaagccttctaaatgagtcactgagcatcactagtgacaagtctcgggtgagcgtaaatgggtcatgacaagatgggacagcaacaaaatcatggcttaggatcgacaagaagttaaaaaacagctgcatctgttacttaagtttgtaagacagtgccctgagacctctagagaaaagatgtttgtttacataagagaaagaggccagacatggtgtctcacacgtttaatcccagcactttgggaggcaggggcgggtggatcacctgaggtcaggagttcaagactagcctggccaacatggtgaaaccccgtctctactaaaaatacaaaaattagccgggcatggtggcaggcgcctataatcccagctactggggaggctgaggcaggagaatcacttgaacccgggggacagaggttgtagtgagccaagatcgcaccactgcactccagcctgggtcacagagtgagactccatctcaaaaaaaaaaaagagagagagagagaaagaaatagaagagaagagccatcttggcagggttattttatatctgagcaaggagtttaaatgagactagtttagattgtctgctgatgcagccgtccatagcagtacccctaaaatcccaccagaatacgggtccctctaacccagtggctggaagaaccactgtctagagcaacttttcttggaactgtcccagctaccaagtcagacaccaaggtttatgccaccaggtaacacgggaatcacaggtacatgtcgctccggtcagattagttggctttggcccctcgaccctgtgcaggagctagttctcagcttgcagctggaagttccctcttagctccttagtctagaggggtctcctggctccatttgaccctggtctttaataaccggtcagcatcttgctaccttctaccacctttccaaatctctggaaatcctgccagggaaagcctccagttccaacattggctttccaagcaaactggctttgccctctctctgccatccttgtcctccagagactgcaccacctgtagcatagaaaaccaccaccacggacctgccagccatcggcgcagcaaaccagccagctgtttgctgccaaattccttcctctcccaggtccagaccaaatacaagatcagcaccacaccgtggtgttgtcaggagccaaagcaacaggaaacaattcaatgctgttgggttcgattctgagagtagatttttccagacatgtctttcaggtgaccctcaactacctcaggtttgaaggccctaaatgaaactgattaccactcatagggacaaaccgagggggttcggttacatcttggtgataatgcagttgtctcaaacttataacagactctttcacatttcagtttgcagggatagggttgggtttgtttttcttctgtttttaacctttcccctgggtttccattagggtagttccttgaaatgaatttcatttttcactgagtgcctaccttcccagggcaggtggccactggcttctgtttccctccaacaatacttttattatggtattaagacctttctttgtataatacattgcatctgtgttttcaatttttcaaataaatatttccgcctggca

SEQ ID NO: 298444 - DNA, 8118 bp, Homo sapiens
cacggcttggtcttaggtcctgtgtgactccagggaagtccagagaacagcctgttctcagatgatgttccctaacccagagccccctccagagactgtcagcatcaataaggccattaatacgcaggaagtggctgtaaaggaaaaacacgccagaacgtgcatactgggcacccaccatgagaaaggggcacagaccttctggtctgttgtcaaccgcctgcctctgtctagcaacgcagtgctctgctggaagttctgccatgtgttccacaaactcctccgagatggacacccgaacgtcctgaaggactctctgagatacagaaatgaattgagtgacatgagcaggatgtggggccacctgagcgaggggtatggccagctgtgcagcatctacctgaaactgctaagaaccaagatggagtaccacaccaaaaatcccaggttcccaggcaacctgcagatgagtgaccgccagctggacgaggctggagaaagtgacgtgaacaactttttccagttaacagtggagatgtttgactacctggagtgtgaactcaacctcttccaaacagtattcaactccctggacatgtcccgctctgtgtccgtgacggcagcagggcagtgccgcctcgccccgctgatccaggtcatcttggactgcagccacctttatgactacactgtcaagcttctcttcaaactccactcctgcctcccagctgacaccctgcaaggccaccgggaccgcttcatggagcagtttacaaagttgaaagatctgttctaccgctccagcaacctgcagtacttcaagcggctcattcagatcccccagctgcctgagaacccacccaacttcctgcgagcctcagccctgtcagaacatatcagccctgtggtggtgatccctgcagaggcctcatcccccgacagcgagccagtcctagagaaggatgacctcatggacatggatgcctctcagcagaatttatttgacaacaagtttgatgacatctttggcagttcattcagcagtgatcccttcaatttcaacagtcaaaatggtgtgaacaaggatgagaaggaccacttaattgagcgactatacagagagatcagtggattgaaggcacagctagaaaacatgaagactgagagccagcgggttgtgctgcagctgaagggccacgtcagcgagctggaagcagatctggccgagcagcagcacctgcggcagcaggcggccgacgactgtgaattcctgcgggcagaactggacgagctcaggaggcagcgggaggacaccgagaaggctcagcggagcctgtctgagatagaaaggaaagctcaagccaatgaacagcgatatagcaagctaaaggagaagtacagcgagctggttcagaaccacgctgacctgctgcggaagaatgcagaggtgaccaaacaggtgtccatggccagacaagcccaggtagatttggaacgagagaaaaaagagctggaggattcgttggagcgcatcagtgaccagggccagcggaagactcaagaacagctggaagttctagagagcttgaagcaggaacttgccacaagccaacgggagcttcaggttctgcaaggcagcctggaaacttctgcccagtcagaagcaaactgggcagccgagttcgccgagctagagaaggagcgggacagcctggtgagtggcgcagctcatagggaggaggaattatctgctcttcggaaagaactgcaggacactcagctcaaactggccagcacagaggaatctatgtgccagcttgccaaagaccaacgaaaaatgcttctggtggggtccaggaaggctgcggagcaggtgatacaagacgccctgaaccagcttgaagaacctcctctcatcagctgcgctgggtctgcagatcacctcctctccacggtcacatccatttccagctgcatcgagcaactggagaaaagctggagccagtatctggcctgcccagaagacatcagtggacttctccattccataaccctgctggcccacttgaccagcgacgccattgctcatggtgccaccacctgcctcagagccccacctgagcctgccgactcactgaccgaggcctgtaagcagtatggcagggaaaccctcgcctacctggcctccctggaggaagagggaagccttgagaatgccgacagcacagccatgaggaactgcctgagcaagatcaaggccatcggcgaggagctcctgcccaggggactggacatcaagcaggaggagctgggggacctggtggacaaggagatggcggccacttcagctgctattgaaactgccacggccagaatagaggagatgctcagcaaatcccgagcaggagacacaggagtcaaattggaggtgaatgaaaggatccttggttgctgtaccagcctcatgcaagctattcaggtgctcatcgtggcctctaaggacctccagagagagattgtggagagcggcaggggtacagcatcccctaaagagttttatgccaagaactctcgatggacagaaggacttatctcagcctccaaggctgtgggctggggagccactgtcatggtggatgcagctgatctggtggtacaaggcagagggaaatttgaggagctaatggtgtgttctcatgaaattgctgctagcacagcccagcttgtggctgcatccaaggtgaaagctgataaggacagccccaacctagcccagctgcagcaggcctctcggggagtgaaccaggccactgccggcgttgtggcctcaaccatttccggcaaatcacagatcgaagagacagacaacatggacttctcaagcatgacgctgacacagatcaaacgccaagagatggattctcaggttagggtgctagagctagaaaatgaattgcagaaggagcgtcaaaaactgggagagcttcggaaaaagcactacgagcttgctggtgttgctgagggctgggaagaaggaacagaggcatctccacctacactgcaagaagtggtaaccgaaaaagaatagagccaaaccaacaccccatatgtcagtgtaaatccttgttacctatctcgtgtgtgttatttccccagccacaggccaaatccttggagtcccaggggcagccacaccactgccattacccagtgccgaggacatgcatgacacttccaaagactccctccatagcgacaccctttctgtttggacccatggtcatctctgttcttttcccgcctccctagttagcatccaggctggccagtgctgcccatgagcaagcctaggtacgaagaggggtggtggggggcagggccaatcaacagagaggaccaacatccagtcctgctgactatttgacccccacaacaatgggtatccttaatagaggagctgcttgttgtttgttgacagcttggaaagggaagatcttatgccttttcttttctgttttcttctcagtcttttcagtttcatcatttgcacaaacttgtgagcatcagagggctgatggattccaaaccaggacactaccctgagatctgcacagtcagaaggacggcaggagtgtcctggctgtgaatgccaaagccattctccccctctttgggcagtgccatggatttccactgcttcttatggtggttgattgggttttttggttttgttttttttttttaagtttcactcacatagccaactctcccaaagggcacacccctggggctgagtctccagggccccccaactgtggtagctccagcgatggtgctgcccaggcctctcggtgctccatctccgcctccacactgaccaagtgctggcccacccagtccatgctccagggtcaggcggagctgctgagtgacagctttcctcaaaaagcagaaggagagtgagtgcctttccctcctaaagctgaatcccggcggaaagcctctgtccgcctttacaagggagaagacaacagaaagagggacaagagggttcacacagcccagttcccgtgacgaggctcaaaaacttgatcacatgcttgaatggagctggtgagatcaacaacactacttccctgccggaatgaactgtccgtgaatggtctctgtcaagcgggccgtctcccttggcccagagacggagtgtgggagtgattcccaactcctttctgcagacgtctgccttggcatcctcttgaataggaagatcgttccactttctacgcaattgacaaacccggaagatcagatgcaattgctcccatcagggaagaaccctatacttggtttgctacccttagtatttattactaacctcccttaagcagcaacagcctacaaagagatgcttggagcaatcagaacttcaggtgtgactctagcaaggctcatctttctgcccggctacatcagccttcaagaatcagaagaaaggccaaggtgctggactgttactgacttggatcccaaagcaaggagatcatttggagctcttgggtcagagaaaatgagaaaggacagagccagcggctccaactcctttcagccacatgccccaggctctcgctgccctgtggacaggatgaggacagagggcacatgaacagcttgccagggatgggcagcccaacagcacttttcctcttctagatggaccccagcatttaagtgaccttctgatcttggaaaaacagcgtcttccttctttatctatagcaactcattggtggtagccatcaagcacttcccaggatctgctccaacagaatattgctaggttttgctacatgacgggttgtgagacttctgtttgatcactgtgaaccaacccccatctccctagcccaccccgctccccaactccctctctgtgcattttctaagtgggacattcaaaaaactctctcccaggacctcggatgaccatactcagacgtgtgacctccatactgggctaaggaagtatcagcactagaaattgggcagtcttaatgttgaatgctgctttctgcttagtatttttttgattcaaggctcagaaggaatggtgcgtggcttccctgtcccagttgtggcaactaaaccaatcggtgtgttcttgatgcgggtcaacatttccaaaagtggctagtcctcacttctagatctcagccattctaactcatatgttcccaattaccaaggggtggccgggcacagtggctcacgcctgtaatcccagcactttgagaggctgaggtggtaggatcacctgaggtcaggagttcaagaccagcctgtccaacatggtgaaacccccatctctactaaaaataccaaaaattagccgagcgtagtgacgggtgcccgtaatcccagctactcaggaggctgagacaggagaatcacctgaaccccagaggcagaggttgcagtgagctgagatcacgccattgtactccagcctgggcaacaagagcaaaactccgtctcaaaaaaaaaaaaaaattacaaatggggcaaacagtctagtgtaatggatcaaattaagattctctgcccagccgggcacagtggcgcatgcctgtaatcccagaactttgggaggccaagacgggatgattgcttgagctcaggagtttgagaccaggctgggcatcatagcaagacctcatctctactaaaattcaaaaacaaaattagccgggcatgatggtgcatgcctgtagtctcagctagttggggagctaaggtgggagaattgcttgagcttgggaagtcgaggctgcagtcagccctgattgtgccagtgcactccggcctgggtgacagagtgagaccctgtctcaaaaaaaaaaagattctgtgtcagagcccagcccaggagtttgaggctgcaatgagccatgatttcccactgcactccagcctgagtgacagagcgagactccatctctttaaaaacaaacaaaaaattatctgaatgatcctgtctctaaaaagaagccacagaaatgtttaaaaacttcatcgacttagcctgagtcataacggttaagaaagcacttaaacagaagcagaggctaattcagtgtcacatgaggaagtagctgtcagatgtcacataattactttcgtaatagctcagattagaatggctaccccattctctagacaaaatcaaattgtcctattgtgactcttctaaaaatgaagatgaagagctatttaatgacacaccttggattaaaacgggaatcacatcttaaagctaaaaatgaacctgcaagccttctaaatgagtcactgagcatcactagtgacaagtctcgggtgagcgtaaatgggtcatgacaagatgggacagcaacaaaatcatggcttaggatcgacaagaagttaaaaaacagctgcatctgttacttaagtttgtaagacagtgccctgagacctctagagaaaagatgtttgtttacataagagaaagaggccagacatggtgtctcacacgtttaatcccagcactttgggaggcaggggcgggtggatcacctgaggtcaggagttcaagactagcctggccaacatggtgaaaccccgtctctactaaaaatacaaaaattagccgggcatggtggcaggcgcctataatcccagctactggggaggctgaggcaggagaatcacttgaacccgggggacagaggttgtagtgagccaagatcgcaccactgcactccagcctgggtcacagagtgagactccatctcaaaaaaaaaaaagagagagagagagaaagaaatagaagagaagagccatcttggcagggttattttatatctgagcaaggagtttaaatgagactagtttagattgtctgctgatgcagccgtccatagcagtacccctaaaatcccaccagaatacgggtccctctaacccagtggctggaagaaccactgtctagagcaacttttcttggaactgtcccagctaccaagtcagacaccaaggtttatgccaccaggtaacacgggaatcacaggtacatgtcgctccggtcagattagttggctttggcccctcgaccctgtgcaggagctagttctcagcttgcagctggaagttccctcttagctccttagtctagaggggtctcctggctccatttgaccctggtctttaataaccggtcagcatcttgctaccttctaccacctttccaaatctctggaaatcctgccagggaaagcctccagttccaacattggctttccaagcaaactggctttgccctctctctgccatccttgtcctccagagactgcaccacctgtagcatagaaaaccaccaccacggacctgccagccatcggcgcagcaaaccagccagctgtttgctgccaaattccttcctctcccaggtccagaccaaatacaagatcagcaccacaccgtggtgttgtcaggagccaaagcaacaggaaacaattcaatgctgttgggttcgattctgagagtagatttttccagacatgtctttcaggtgaccctcaactacctcaggtttgaaggccctaaatgaaactgattaccactcatagggacaaaccgagggggttcggttacatcttggtgataatgcagttgtctcaaacttataacagactctttcacatttcagtttgcagggatagggttgggtttgtttttcttctgtttttaacctttcccctgggtttccattagggtagttccttgaaatgaatttcatttttcactgagtgcctaccttcccagggcaggtggccactggcttctgtttccctccaacaatacttttattatggtattaagacctttctttgtataatacattgcatctgtgttttcaatttttcaaataaatatttccgcctggcaatggagcgtggtggtgattgaccagccagcgtggctctgaggtataggctccagtgagaagcctgcatttgtatcctggggttcatggaatccacttagccccacacctctgggaatatatcttagaaatattagttttgagccgggtgtggtggc

SEQ ID NO: 298445 - DNA, 7909 bp, Homo sapiens
cacggcttggtcttaggtcctgtgtgactccagggaagtccagagaacagcctgttctcagatgatgttccctaacccagagccccctccagagactgtcagcatcaataaggccattaatacgcaggaagtggctgtaaaggaaaaacacgccagaacgtgcatactgggcacccaccatgagaaaggggcacagaccttctggtctgttgtcaaccgcctgcctctgtctagcaacgcagtgctctgctggaagttctgccatgtgttccacaaactcctccgagatggacacccgaacgtcctgaaggactctctgagatacagaaatgaattgagtgacatgagcaggatgtggggccacctgagcgaggggtatggccagctgtgcagcatctacctgaaactgctaagaaccaagatggagtaccacaccaaaaatcccaggttcccaggcaacctgcagatgagtgaccgccagctggacgaggctggagaaagtgacgtgaacaactttttccagttaacagtggagatgtttgactacctggagtgtgaactcaacctcttccaaacagtattcaactccctggacatgtcccgctctgtgtccgtgacggcagcagggcagtgccgcctcgccccgctgatccaggtcatcttggactgcagccacctttatgactacactgtcaagcttctcttcaaactccactcctgcctcccagctgacaccctgcaaggccaccgggaccgcttcatggagcagtttacaaagttgaaagatctgttctaccgctccagcaacctgcagtacttcaagcggctcattcagatcccccagctgcctgagaacccacccaacttcctgcgagcctcagccctgtcagaacatatcagccctgtggtggtgatccctgcagaggcctcatcccccgacagcgagccagtcctagagaaggatgacctcatggacatggatgcctctcagcagaatttatttgacaacaagtttgatgacatctttggcagttcattcagcagtgatcccttcaatttcaacagtcaaaatggtgtgaacaaggatgagaaggaccacttaattgagcgactatacagagagatcagtggattgaaggcacagctagaaaacatgaagactgagagccagcgggttgtgctgcagctgaagggccacgtcagcgagctggaagcagatctggccgagcagcagcacctgcggcagcaggcggccgacgactgtgaattcctgcgggcagaactggacgagctcaggaggcagcgggaggacaccgagaaggctcagcggagcctgtctgagatagaaaggaaagctcaagccaatgaacagcgatatagcaagctaaaggagaagtacagcgagctggttcagaaccacgctgacctgctgcggaagaatgcagaggtgaccaaacaggtgtccatggccagacaagcccaggtagatttggaacgagagaaaaaagagctggaggattcgttggagcgcatcagtgaccagggccagcggaagactcaagaacagctggaagttctagagagcttgaagcaggaacttgccacaagccaacgggagcttcaggttctgcaaggcagcctggaaacttctgcccagtcagaagcaaactgggcagccgagttcgccgagctagagaaggagcgggacagcctggtgagtggcgcagctcatagggaggaggaattatctgctcttcggaaagaactgcaggacactcagctcaaactggccagcacagaggaatctatgtgccagcttgccaaagaccaacgaaaaatgcttctggtggggtccaggaaggctgcggagcaggtgatacaagacgccctgaaccagcttgaagaacctcctctcatcagctgcgctgggtctgcagatcacctcctctccacggtcacatccatttccagctgcatcgagcaactggagaaaagctggagccagtatctggcctgcccagaagacatcagtggacttctccattccataaccctgctggcccacttgaccagcgacgccattgctcatggtgccaccacctgcctcagagccccacctgagcctgccgactcactgaccgaggcctgtaagcagtatggcagggaaaccctcgcctacctggcctccctggaggaagagggaagccttgagaatgccgacagcacagccatgaggaactgcctgagcaagatcaaggccatcggcgaggagctcctgcccaggggactggacatcaagcaggaggagctgggggacctggtggacaaggagatggcggccacttcagctgctattgaaactgccacggccagaatagaggagatgctcagcaaatcccgagcaggagacacaggagtcaaattggaggtgaatgaaaggatccttggttgctgtaccagcctcatgcaagctattcaggtgctcatcgtggcctctaaggacctccagagagagattgtggagagcggcaggggtacagcatcccctaaagagttttatgccaagaactctcgatggacagaaggacttatctcagcctccaaggctgtgggctggggagccactgtcatggtggatgcagctgatctggtggtacaaggcagagggaaatttgaggagctaatggtgtgttctcatgaaattgctgctagcacagcccagcttgtggctgcatccaaggtgaaagctgataaggacagccccaacctagcccagctgcagcaggcctctcggggagtgaaccaggccactgccggcgttgtggcctcaaccatttccggcaaatcacagatcgaagagacagacaacatggacttctcaagcatgacgctgacacagatcaaacgccaagagatggattctcaggttagggtgctagagctagaaaatgaattgcagaaggagcgtcaaaaactgggagagcttcggaaaaagcactacgagcttgctggtgttgctgagggctgggaagaaggaacagaggcatctccacctacactgcaagaagtggtaaccgaaaaagaatagagccaaaccaacaccccatatgtcagtgtaaatccttgttacctatctcgtgtgtgttatttccccagccacaggccaaatccttggagtcccaggggcagccacaccactgccattacccagtgccgaggacatgcatgacacttccaaagactccctccatagcgacaccctttctgtttggacccatggtcatctctgttcttttcccgcctccctagttagcatccaggctggccagtgctgcccatgagcaagcctaggtacgaagaggggtggtggggggcagggccaatcaacagagaggaccaacatccagtcctgctgactatttgacccccacaacaatgggtatccttaatagaggagctgcttgttgtttgttgacagcttggaaagggaagatcttatgccttttcttttctgttttcttctcagtcttttcagtttcatcatttgcacaaacttgtgagcatcagagggctgatggattccaaaccaggacactaccctgagatctgcacagtcagaaggacggcaggagtgtcctggctgtgaatgccaaagccattctccccctctttgggcagtgccatggatttccactgcttcttatggtggttgattgggttttttggttttgttttttttttttaagtttcactcacatagccaactctcccaaagggcacacccctggggctgagtctccagggccccccaactgtggtagctccagcgatggtgctgcccaggcctctcggtgctccatctccgcctccacactgaccaagtgctggcccacccagtccatgctccagggtcaggcggagctgctgagtgacagctttcctcaaaaagcagaaggagagtgagtgcctttccctcctaaagctgaatcccggcggaaagcctctgtccgcctttacaagggagaagacaacagaaagagggacaagagggttcacacagcccagttcccgtgacgaggctcaaaaacttgatcacatgcttgaatggagctggtgagatcaacaacactacttccctgccggaatgaactgtccgtgaatggtctctgtcaagcgggccgtctcccttggcccagagacggagtgtgggagtgattcccaactcctttctgcagacgtctgccttggcatcctcttgaataggaagatcgttccactttctacgcaattgacaaacccggaagatcagatgcaattgctcccatcagggaagaaccctatacttggtttgctacccttagtatttattactaacctcccttaagcagcaacagcctacaaagagatgcttggagcaatcagaacttcaggtgtgactctagcaaggctcatctttctgcccggctacatcagccttcaagaatcagaagaaaggccaaggtgctggactgttactgacttggatcccaaagcaaggagatcatttggagctcttgggtcagagaaaatgagaaaggacagagccagcggctccaactcctttcagccacatgccccaggctctcgctgccctgtggacaggatgaggacagagggcacatgaacagcttgccagggatgggcagcccaacagcacttttcctcttctagatggaccccagcatttaagtgaccttctgatcttggaaaaacagcgtcttccttctttatctatagcaactcattggtggtagccatcaagcacttcccaggatctgctccaacagaatattgctaggttttgctacatgacgggttgtgagacttctgtttgatcactgtgaaccaacccccatctccctagcccaccccgctccccaactccctctctgtgcattttctaagtgggacattcaaaaaactctctcccaggacctcggatgaccatactcagacgtgtgacctccatactgggctaaggaagtatcagcactagaaattgggcagtcttaatgttgaatgctgctttctgcttagtatttttttgattcaaggctcagaaggaatggtgcgtggcttccctgtcccagttgtggcaactaaaccaatcggtgtgttcttgatgcgggtcaacatttccaaaagtggctagtcctcacttctagatctcagccattctaactcatatgttcccaattaccaaggggtggccgggcacagtggctcacgcctgtaatcccagcactttgagaggctgaggtggtaggatcacctgaggtcaggagttcaagaccagcctgtccaacatggtgaaacccccatctctactaaaaataccaaaaattagccgagcgtagtgacgggtgcccgtaatcccagctactcaggaggctgagacaggagaatcacctgaaccccagaggcagaggttgcagtgagctgagatcacgccattgtactccagcctgggcaacaagagcaaaactccgtctcaaaaaaaaaaaaaaattacaaatggggcaaacagtctagtgtaatggatcaaattaagattctctgcccagccgggcacagtggcgcatgcctgtaatcccagaactttgggaggccaagacgggatgattgcttgagctcaggagtttgagaccaggctgggcatcatagcaagacctcatctctactaaaattcaaaaacaaaattagccgggcatgatggtgcatgcctgtagtctcagctagttggggagctaaggtgggagaattgcttgagcttgggaagtcgaggctgcagtcagccctgattgtgccagtgcactccggcctgggtgacagagtgagaccctgtctcaaaaaaaaaaagattctgtgtcagagcccagcccaggagtttgaggctgcaatgagccatgatttcccactgcactccagcctgagtgacagagcgagactccatctctttaaaaacaaacaaaaaattatctgaatgatcctgtctctaaaaagaagccacagaaatgtttaaaaacttcatcgacttagcctgagtcataacggttaagaaagcacttaaacagaagcagaggctaattcagtgtcacatgaggaagtagctgtcagatgtcacataattactttcgtaatagctcagattagaatggctaccccattctctagacaaaatcaaattgtcctattgtgactcttctaaaaatgaagatgaagagctatttaatgacacaccttggattaaaacgggaatcacatcttaaagctaaaaatgaacctgcaagccttctaaatgagtcactgagcatcactagtgacaagtctcgggtgagcgtaaatgggtcatgacaagatgggacagcaacaaaatcatggcttaggatcgacaagaagttaaaaaacagctgcatctgttacttaagtttgtaagacagtgccctgagacctctagagaaaagatgtttgtttacataagagaaagaggccagacatggtgtctcacacgtttaatcccagcactttgggaggcaggggcgggtggatcacctgaggtcaggagttcaagactagcctggccaacatggtgaaaccccgtctctactaaaaatacaaaaattagccgggcatggtggcaggcgcctataatcccagctactggggaggctgaggcaggagaatcacttgaacccgggggacagaggttgtagtgagccaagatcgcaccactgcactccagcctgggtcacagagtgagactccatctcaaaaaaaaaaaagagagagagagagaaagaaatagaagagaagagccatcttggcagggttattttatatctgagcaaggagtttaaatgagactagtttagattgtctgctgatgcagccgtccatagcagtaccctgtctagagcaacttttcttggaactgtcccagctaccaagtcagacaccaaggtttatgccaccaggtaacacgggaatcacaggtacatgtcgctccggtcagattagttggctttggcccctcgaccctgtgcaggagctagttctcagcttgcagctggaagttccctcttagctccttagtctagaggggtctcctggctccatttgaccctggtctttaataaccggtcagcatcttgctaccttctaccacctttccaaatctctggaaatcctgccagggaaagcctccagttccaacattggctttccaagcaaactggctttgccctctctctgccatccttgtcctccagagactgcaccacctgtagcatagaaaaccaccaccacggacctgccagccatcggcgcagcaaaccagccagctgtttgctgccaaattccttcctctcccaggtccagaccaaatacaagatcagcaccacaccgtggtgttgtcaggagccaaagcaacaggaaacaattcaatgctgttgggttcgattctgagagtagatttttccagacatgtctttcaggtgaccctcaactacctcaggtttgaaggccctaaatgaaactgattaccactcatagggacaaaccgagggggttcggttacatcttggtgataatgcagttgtctcaaacttataacagactctttcacatttcagtttgcagggatagggttgggtttgtttttcttctgtttttaacctttcccctgggtttccattagggtagttccttgaaatgaatttcatttttcactgagtgcctaccttcccagggcaggtggccactggcttctgtttccctccaacaatacttttattatggtattaagacctttctttgtataatacattgcatctgtgttttcaatttttcaaataaatatttccgcctggca

SEQ ID NO: 298446 - DNA, 7904 bp, Homo sapiens
cacggcttggtcttaggtcctgtgtgactccagggaagtccagagaacagcctgttctcagatgatgttccctaacccagagccccctccagagactgtcagcatcaataaggccattaatacgcaggaagtggctgtaaaggaaaaacacgccagaacgtgcatactgggcacccaccatgagaaaggggcacagaccttctggtctgttgtcaaccgcctgcctctgtctagcaacgcagtgctctgctggaagttctgccatgtgttccacaaactcctccgagatggacacccgaacgtcctgaaggactctctgagatacagaaatgaattgagtgacatgagcaggatgtggggccacctgagcgaggggtatggccagctgtgcagcatctacctgaaactgctaagaaccaagatggagtaccacaccaaaaatcccaggttcccaggcaacctgcagatgagtgaccgccagctggacgaggctggagaaagtgacgtgaacaactttttccagttaacagtggagatgtttgactacctggagtgtgaactcaacctcttccaaacagtattcaactccctggacatgtcccgctctgtgtccgtgacggcagcagggcagtgccgcctcgccccgctgatccaggtcatcttggactgcagccacctttatgactacactgtcaagcttctcttcaaactccactcctgcctcccagctgacaccctgcaaggccaccgggaccgcttcatggagcagtttacaaagttgaaagatctgttctaccgctccagcaacctgcagtacttcaagcggctcattcagatcccccagctgcctgagaacccacccaacttcctgcgagcctcagccctgtcagaacatatcagccctgtggtggtgatccctgcagaggcctcatcccccgacagcgagccagtcctagagaaggatgacctcatggacatggatgcctctcagcagaatttatttgacaacaagtttgatgacatctttggcagttcattcagcagtgatcccttcaatttcaacagtcaaaatggtgtgaacaaggatgagaaggaccacttaattgagcgactatacagagagatcagtggattgaaggcacagctagaaaacatgaagactgagagccagcgggttgtgctgcagctgaagggccacgtcagcgagctggaagcagatctggccgagcagcagcacctgcggcagcaggcggccgacgactgtgaattcctgcgggcagaactggacgagctcaggaggcagcgggaggacaccgagaaggctcagcggagcctgtctgagatagaaaggaaagctcaagccaatgaacagcgatatagcaagctaaaggagaagtacagcgagctggttcagaaccacgctgacctgctgcggaagaatgcagaggtgaccaaacaggtgtccatggccagacaagcccaggtagatttggaacgagagaaaaaagagctggaggattcgttggagcgcatcagtgaccagggccagcggaagactcaagaacagctggaagttctagagagcttgaagcaggaacttgccacaagccaacgggagcttcaggttctgcaaggcagcctggaaacttctgcccagtcagaagcaaactgggcagccgagttcgccgagctagagaaggagcgggacagcctggtgagtggcgcagctcatagggaggaggaattatctgctcttcggaaagaactgcaggacactcagctcaaactggccagcacagaggaatctatgtgccagcttgccaaagaccaacgaaaaatgcttctggtggggtccaggaaggctgcggagcaggtgatacaagacgccctgaaccagcttgaagaacctcctctcatcagctgcgctgggtctgcagatcacctcctctccacggtcacatccatttccagctgcatcgagcaactggagaaaagctggagccagtatctggcctgcccagaagacatcagtggacttctccattccataaccctgctggcccacttgaccagcgacgccattgctcatggtgccaccacctgcctcagagccccacctgagcctgccgactcactgaccgaggcctgtaagcagtatggcagggaaaccctcgcctacctggcctccctggaggaagagggaagccttgagaatgccgacagcacagccatgaggaactgcctgagcaagatcaaggccatcggcgaggagctcctgcccaggggactggacatcaagcaggaggagctgggggacctggtggacaaggagatggcggccacttcagctgctattgaaactgccacggccagaatagaggagatgctcagcaaatcccgagcaggagacacaggagtcaaattggaggtgaatgaaaggatccttggttgctgtaccagcctcatgcaagctattcaggtgctcatcgtggcctctaaggacctccagagagagattgtggagagcggcaggggtacagcatcccctaaagagttttatgccaagaactctcgatggacagaaggacttatctcagcctccaaggctgtgggctggggagccactgtcatggtggatgcagctgatctggtggtacaaggcagagggaaatttgaggagctaatggtgtgttctcatgaaattgctgctagcacagcccagcttgtggctgcatccaaggtgaaagctgataaggacagccccaacctagcccagctgcagcaggcctctcggggagtgaaccaggccactgccggcgttgtggcctcaaccatttccggcaaatcacagatcgaagagacagacaacatggacttctcaagcatgacgctgacacagatcaaacgccaagagatggattctcaggttagggtgctagagctagaaaatgaattgcagaaggagcgtcaaaaactgggagagcttcggaaaaagcactacgagcttgctggtgttgctgagggctgggaagaaggaacagaggcatctccacctacactgcaagaagtggtaaccgaaaaagaatagagccaaaccaacaccccatatgtcagtgtaaatccttgttacctatctcgtgtgtgttatttccccagccacaggccaaatccttggagtcccaggggcagccacaccactgccattacccagtgccgaggacatgcatgacacttccaaagactccctccatagcgacaccctttctgtttggacccatggtcatctctgttcttttcccgcctccctagttagcatccaggctggccagtgctgcccatgagcaagcctaggtacgaagaggggtggtggggggcagggccaatcaacagagaggaccaacatccagtcctgctgactatttgacccccacaacaatgggtatccttaatagaggagctgcttgttgtttgttgacagcttggaaagggaagatcttatgccttttcttttctgttttcttctcagtcttttcagtttcatcatttgcacaaacttgtgagcatcagagggctgatggattccaaaccaggacactaccctgagatctgcacagtcagaaggacggcaggagtgtcctggctgtgaatgccaaagccattctccccctctttgggcagtgccatggatttccactgcttcttatggtggttgattgggttttttggttttgttttttttttttaagtttcactcacatagccaactctcccaaagggcacacccctggggctgagtctccagggccccccaactgtggtagctccagcgatggtgctgcccaggcctctcggtgctccatctccgcctccacactgaccaagtgctggcccacccagtccatgctccagggtcaggcggagctgctgagtgacagctttcctcaaaaagcagaaggagagtgagtgcctttccctcctaaagctgaatcccggcggaaagcctctgtccgcctttacaagggagaagacaacagaaagagggacaagagggttcacacagcccagttcccgtgacgaggctcaaaaacttgatcacatgcttgaatggagctggtgagatcaacaacactacttccctgccggaatgaactgtccgtgaatggtctctgtcaagcgggccgtctcccttggcccagagacggagtgtgggagtgattcccaactcctttctgcagacgtctgccttggcatcctcttgaataggaagatcgttccactttctacgcaattgacaaacccggaagatcagatgcaattgctcccatcagggaagaaccctatacttggtttgctacccttagtatttattactaacctcccttaagcagcaacagcctacaaagagatgcttggagcaatcagaacttcaggtgtgactctagcaaggctcatctttctgcccggctacatcagccttcaagaatcagaagaaaggccaaggtgctggactgttactgacttggatcccaaagcaaggagatcatttggagctcttgggtcagagaaaatgagaaaggacagagccagcggctccaactcctttcagccacatgccccaggctctcgctgccctgtggacaggatgaggacagagggcacatgaacagcttgccagggatgggcagcccaacagcacttttcctcttctagatggaccccagcatttaagtgaccttctgatcttggaaaaacagcgtcttccttctttatctatagcaactcattggtggtagccatcaagcacttcccaggatctgctccaacagaatattgctaggttttgctacatgacgggttgtgagacttctgtttgatcactgtgaaccaacccccatctccctagcccaccccgctccccaactccctctctgtgcattttctaagtgggacattcaaaaaactctctcccaggacctcggatgaccatactcagacgtgtgacctccatactgggctaaggaagtatcagcactagaaattgggcagtcttaatgttgaatgctgctttctgcttagtatttttttgattcaaggctcagaaggaatggtgcgtggcttccctgtcccagttgtggcaactaaaccaatcggtgtgttcttgatgcgggtcaacatttccaaaagtggctagtcctcacttctagatctcagccattctaactcatatgttcccaattaccaaggggtggccgggcacagtggctcacgcctgtaatcccagcactttgagaggctgaggtggtaggatcacctgaggtcaggagttcaagaccagcctgtccaacatggtgaaacccccatctctactaaaaataccaaaaattagccgagcgtagtgacgggtgcccgtaatcccagctactcaggaggctgagacaggagaatcacctgaaccccagaggcagaggttgcagtgagctgagatcacgccattgtactccagcctgggcaacaagagcaaaactccgtctcaaaaaaaaaaaaaaattacaaatggggcaaacagtctagtgtaatggatcaaattaagattctctgcccagccgggcacagtggcgcatgcctgtaatcccagaactttgggaggccaagacgggatgattgcttgagctcaggagtttgagaccaggctgggcatcatagcaagacctcatctctactaaaattcaaaaacaaaattagccgggcatgatggtgcatgcctgtagtctcagctagttggggagctaaggtgggagaattgcttgagcttgggaagtcgaggctgcagtcagccctgattgtgccagtgcactccggcctgggtgacagagtgagaccctgtctcaaaatttcccactgcactccagcctgagtgacagagcgagactccatctctttaaaaacaaacaaaaaattatctgaatgatcctgtctctaaaaagaagccacagaaatgtttaaaaacttcatcgacttagcctgagtcataacggttaagaaagcacttaaacagaagcagaggctaattcagtgtcacatgaggaagtagctgtcagatgtcacataattactttcgtaatagctcagattagaatggctaccccattctctagacaaaatcaaattgtcctattgtgactcttctaaaaatgaagatgaagagctatttaatgacacaccttggattaaaacgggaatcacatcttaaagctaaaaatgaacctgcaagccttctaaatgagtcactgagcatcactagtgacaagtctcgggtgagcgtaaatgggtcatgacaagatgggacagcaacaaaatcatggcttaggatcgacaagaagttaaaaaacagctgcatctgttacttaagtttgtaagacagtgccctgagacctctagagaaaagatgtttgtttacataagagaaagaggccagacatggtgtctcacacgtttaatcccagcactttgggaggcaggggcgggtggatcacctgaggtcaggagttcaagactagcctggccaacatggtgaaaccccgtctctactaaaaatacaaaaattagccgggcatggtggcaggcgcctataatcccagctactggggaggctgaggcaggagaatcacttgaacccgggggacagaggttgtagtgagccaagatcgcaccactgcactccagcctgggtcacagagtgagactccatctcaaaaaaaaaaaagagagagagagagaaagaaatagaagagaagagccatcttggcagggttattttatatctgagcaaggagtttaaatgagactagtttagattgtctgctgatgcagccgtccatagcagtacccctaaaatcccaccagaatacgggtccctctaacccagtggctggaagaaccactgtctagagcaacttttcttggaactgtcccagctaccaagtcagacaccaaggtttatgccaccaggtaacacgggaatcacaggtacatgtcgctccggtcagattagttggctttggcccctcgaccctgtgcaggagctagttctcagcttgcagctggaagttccctcttagctccttagtctagaggggtctcctggctccatttgaccctggtctttaataaccggtcagcatcttgctaccttctaccacctttccaaatctctggaaatcctgccagggaaagcctccagttccaacattggctttccaagcaaactggctttgccctctctctgccatccttgtcctccagagactgcaccacctgtagcatagaaaaccaccaccacggacctgccagccatcggcgcagcaaaccagccagctgtttgctgccaaattccttcctctcccaggtccagaccaaatacaagatcagcaccacaccgtggtgttgtcaggagccaaagcaacaggaaacaattcaatgctgttgggttcgattctgagagtagatttttccagacatgtctttcaggtgaccctcaactacctcaggtttgaaggccctaaatgaaactgattaccactcatagggacaaaccgagggggttcggttacatcttggtgataatgcagttgtctcaaacttataacagactctttcacatttcagtttgcagggatagggttgggtttgtttttcttctgtttttaacctttcccctgggtttccattagggtagttccttgaaatgaatttcatttttcactgagtgcctaccttcccagggcaggtggccactggcttctgtttccctccaacaatacttttattatggtattaagacctttctttgtataatacattgcatctgtgttttcaatttttcaaataaatatttccgcctggca

SEQ ID NO: 298447 - DNA, 7287 bp, Homo sapiens
agcgggcgtggggagggggcaggaaagccaggtggctgctctgtcccctacatggggctgatgaagacacccagcacccctcaggtccttctccacccctaggttgaaagatctgttctaccgctccagcaacctgcagtacttcaagcggctcattcagatcccccagctgcctgagaacccacccaacttcctgcgagcctcagccctgtcagaacatatcagccctgtggtggtgatccctgcagaggcctcatcccccgacagcgagccagtcctagagaaggatgacctcatggacatggatgcctctcagcagaatttatttgacaacaagtttgatgacatctttggcagttcattcagcagtgatcccttcaatttcaacagtcaaaatggtgtgaacaaggatgagaaggaccacttaattgagcgactatacagagagatcagtggattgaaggcacagctagaaaacatgaagactgagagccagcgggttgtgctgcagctgaagggccacgtcagcgagctggaagcagatctggccgagcagcagcacctgcggcagcaggcggccgacgactgtgaattcctgcgggcagaactggacgagctcaggaggcagcgggaggacaccgagaaggctcagcggagcctgtctgagatagaaaggaaagctcaagccaatgaacagcgatatagcaagctaaaggagaagtacagcgagctggttcagaaccacgctgacctgctgcggaagaatgcagaggtgaccaaacaggtgtccatggccagacaagcccaggtagatttggaacgagagaaaaaagagctggaggattcgttggagcgcatcagtgaccagggccagcggaagactcaagaacagctggaagttctagagagcttgaagcaggaacttgccacaagccaacgggagcttcaggttctgcaaggcagcctggaaacttctgcccagtcagaagcaaactgggcagccgagttcgccgagctagagaaggagcgggacagcctggtgagtggcgcagctcatagggaggaggaattatctgctcttcggaaagaactgcaggacactcagctcaaactggccagcacagaggaatctatgtgccagcttgccaaagaccaacgaaaaatgcttctggtggggtccaggaaggctgcggagcaggtgatacaagacgccctgaaccagcttgaagaacctcctctcatcagctgcgctgggtctgcagatcacctcctctccacggtcacatccatttccagctgcatcgagcaactggagaaaagctggagccagtatctggcctgcccagaagacatcagtggacttctccattccataaccctgctggcccacttgaccagcgacgccattgctcatggtgccaccacctgcctcagagccccacctgagcctgccgactcactgaccgaggcctgtaagcagtatggcagggaaaccctcgcctacctggcctccctggaggaagagggaagccttgagaatgccgacagcacagccatgaggaactgcctgagcaagatcaaggccatcggcgaggagctcctgcccaggggactggacatcaagcaggaggagctgggggacctggtggacaaggagatggcggccacttcagctgctattgaaactgccacggccagaatagaggagatgctcagcaaatcccgagcaggagacacaggagtcaaattggaggtgaatgaaaggatccttggttgctgtaccagcctcatgcaagctattcaggtgctcatcgtggcctctaaggacctccagagagagattgtggagagcggcaggggtacagcatcccctaaagagttttatgccaagaactctcgatggacagaaggacttatctcagcctccaaggctgtgggctggggagccactgtcatggtggatgcagctgatctggtggtacaaggcagagggaaatttgaggagctaatggtgtgttctcatgaaattgctgctagcacagcccagcttgtggctgcatccaaggtgaaagctgataaggacagccccaacctagcccagctgcagcaggcctctcggggagtgaaccaggccactgccggcgttgtggcctcaaccatttccggcaaatcacagatcgaagagacagacaacatggacttctcaagcatgacgctgacacagatcaaacgccaagagatggattctcaggttagggtgctagagctagaaaatgaattgcagaaggagcgtcaaaaactgggagagcttcggaaaaagcactacgagcttgctggtgttgctgagggctgggaagaaggaacagaggcatctccacctacactgcaagaagtggtaaccgaaaaagaatagagccaaaccaacaccccatatgtcagtgtaaatccttgttacctatctcgtgtgtgttatttccccagccacaggccaaatccttggagtcccaggggcagccacaccactgccattacccagtgccgaggacatgcatgacacttccaaagactccctccatagcgacaccctttctgtttggacccatggtcatctctgttcttttcccgcctccctagttagcatccaggctggccagtgctgcccatgagcaagcctaggtacgaagaggggtggtggggggcagggccaatcaacagagaggaccaacatccagtcctgctgactatttgacccccacaacaatgggtatccttaatagaggagctgcttgttgtttgttgacagcttggaaagggaagatcttatgccttttcttttctgttttcttctcagtcttttcagtttcatcatttgcacaaacttgtgagcatcagagggctgatggattccaaaccaggacactaccctgagatctgcacagtcagaaggacggcaggagtgtcctggctgtgaatgccaaagccattctccccctctttgggcagtgccatggatttccactgcttcttatggtggttgattgggttttttggttttgttttttttttttaagtttcactcacatagccaactctcccaaagggcacacccctggggctgagtctccagggccccccaactgtggtagctccagcgatggtgctgcccaggcctctcggtgctccatctccgcctccacactgaccaagtgctggcccacccagtccatgctccagggtcaggcggagctgctgagtgacagctttcctcaaaaagcagaaggagagtgagtgcctttccctcctaaagctgaatcccggcggaaagcctctgtccgcctttacaagggagaagacaacagaaagagggacaagagggttcacacagcccagttcccgtgacgaggctcaaaaacttgatcacatgcttgaatggagctggtgagatcaacaacactacttccctgccggaatgaactgtccgtgaatggtctctgtcaagcgggccgtctcccttggcccagagacggagtgtgggagtgattcccaactcctttctgcagacgtctgccttggcatcctcttgaataggaagatcgttccactttctacgcaattgacaaacccggaagatcagatgcaattgctcccatcagggaagaaccctatacttggtttgctacccttagtatttattactaacctcccttaagcagcaacagcctacaaagagatgcttggagcaatcagaacttcaggtgtgactctagcaaggctcatctttctgcccggctacatcagccttcaagaatcagaagaaaggccaaggtgctggactgttactgacttggatcccaaagcaaggagatcatttggagctcttgggtcagagaaaatgagaaaggacagagccagcggctccaactcctttcagccacatgccccaggctctcgctgccctgtggacaggatgaggacagagggcacatgaacagcttgccagggatgggcagcccaacagcacttttcctcttctagatggaccccagcatttaagtgaccttctgatcttggaaaaacagcgtcttccttctttatctatagcaactcattggtggtagccatcaagcacttcccaggatctgctccaacagaatattgctaggttttgctacatgacgggttgtgagacttctgtttgatcactgtgaaccaacccccatctccctagcccaccccgctccccaactccctctctgtgcattttctaagtgggacattcaaaaaactctctcccaggacctcggatgaccatactcagacgtgtgacctccatactgggctaaggaagtatcagcactagaaattgggcagtcttaatgttgaatgctgctttctgcttagtatttttttgattcaaggctcagaaggaatggtgcgtggcttccctgtcccagttgtggcaactaaaccaatcggtgtgttcttgatgcgggtcaacatttccaaaagtggctagtcctcacttctagatctcagccattctaactcatatgttcccaattaccaaggggtggccgggcacagtggctcacgcctgtaatcccagcactttgagaggctgaggtggtaggatcacctgaggtcaggagttcaagaccagcctgtccaacatggtgaaacccccatctctactaaaaataccaaaaattagccgagcgtagtgacgggtgcccgtaatcccagctactcaggaggctgagacaggagaatcacctgaaccccagaggcagaggttgcagtgagctgagatcacgccattgtactccagcctgggcaacaagagcaaaactccgtctcaaaaaaaaaaaaaaattacaaatggggcaaacagtctagtgtaatggatcaaattaagattctctgcccagccgggcacagtggcgcatgcctgtaatcccagaactttgggaggccaagacgggatgattgcttgagctcaggagtttgagaccaggctgggcatcatagcaagacctcatctctactaaaattcaaaaacaaaattagccgggcatgatggtgcatgcctgtagtctcagctagttggggagctaaggtgggagaattgcttgagcttgggaagtcgaggctgcagtcagccctgattgtgccagtgcactccggcctgggtgacagagtgagaccctgtctcaaaaaaaaaaagattctgtgtcagagcccagcccaggagtttgaggctgcaatgagccatgatttcccactgcactccagcctgagtgacagagcgagactccatctctttaaaaacaaacaaaaaattatctgaatgatcctgtctctaaaaagaagccacagaaatgtttaaaaacttcatcgacttagcctgagtcataacggttaagaaagcacttaaacagaagcagaggctaattcagtgtcacatgaggaagtagctgtcagatgtcacataattactttcgtaatagctcagattagaatggctaccccattctctagacaaaatcaaattgtcctattgtgactcttctaaaaatgaagatgaagagctatttaatgacacaccttggattaaaacgggaatcacatcttaaagctaaaaatgaacctgcaagccttctaaatgagtcactgagcatcactagtgacaagtctcgggtgagcgtaaatgggtcatgacaagatgggacagcaacaaaatcatggcttaggatcgacaagaagttaaaaaacagctgcatctgttacttaagtttgtaagacagtgccctgagacctctagagaaaagatgtttgtttacataagagaaagaggccagacatggtgtctcacacgtttaatcccagcactttgggaggcaggggcgggtggatcacctgaggtcaggagttcaagactagcctggccaacatggtgaaaccccgtctctactaaaaatacaaaaattagccgggcatggtggcaggcgcctataatcccagctactggggaggctgaggcaggagaatcacttgaacccgggggacagaggttgtagtgagccaagatcgcaccactgcactccagcctgggtcacagagtgagactccatctcaaaaaaaaaaaagagagagagagagaaagaaatagaagagaagagccatcttggcagggttattttatatctgagcaaggagtttaaatgagactagtttagattgtctgctgatgcagccgtccatagcagtacccctaaaatcccaccagaatacgggtccctctaacccagtggctggaagaaccactgtctagagcaacttttcttggaactgtcccagctaccaagtcagacaccaaggtttatgccaccaggtaacacgggaatcacaggtacatgtcgctccggtcagattagttggctttggcccctcgaccctgtgcaggagctagttctcagcttgcagctggaagttccctcttagctccttagtctagaggggtctcctggctccatttgaccctggtctttaataaccggtcagcatcttgctaccttctaccacctttccaaatctctggaaatcctgccagggaaagcctccagttccaacattggctttccaagcaaactggctttgccctctctctgccatccttgtcctccagagactgcaccacctgtagcatagaaaaccaccaccacggacctgccagccatcggcgcagcaaaccagccagctgtttgctgccaaattccttcctctcccaggtccagaccaaatacaagatcagcaccacaccgtggtgttgtcaggagccaaagcaacaggaaacaattcaatgctgttgggttcgattctgagagtagatttttccagacatgtctttcaggtgaccctcaactacctcaggtttgaaggccctaaatgaaactgattaccactcatagggacaaaccgagggggttcggttacatcttggtgataatgcagttgtctcaaacttataacagactctttcacatttcagtttgcagggatagggttgggtttgtttttcttctgtttttaacctttcccctgggtttccattagggtagttccttgaaatgaatttcatttttcactgagtgcctaccttcccagggcaggtggccactggcttctgtttccctccaacaatacttttattatggtattaagacctttctttgtataatacattgcatctgtgttttcaatttttcaaataaatatttccgcctggca

SEQ ID NO: 298448 - DNA, 1299 bp, Homo sapiens
ccgaaaattaccacagcgtggtgccaggcacctgcagtcccaactacttgggaggagaatggcctgaatcttggaagttgtggttgccatgagccaagatcgcaccactgcactccagcctgggtcacagagtgagactccatctcaaaaaaaaaaaagagagagagagagaaagaaatagaagagaagagccatcttggcagggttattttatatctgagcaaggagtttaaatgagactagtttagattgtctgctgatgcagccgtccatagcagtacccctaaaatcccaccagaatacgggtccctctaacccagtggctggaagaaccactgtctagagcaacttttcttggaactgtcccagctaccaagtcagacaccaaggtttatgccaccaggtaacacgggaatcacaggtacatgtcgctccggtcagattagttggctttggcccctcgaccctgtgcaggagctagttctcagcttgcagctggaagttccctcttagctccttagtctagaggggtctcctggctccatttgaccctggtctttaataaccggtcagcatcttgctaccttctaccacctttccaaatctctggaaatcctgccagggaaagcctccagttccaacattggctttccaagcaaactggctttgccctctctctgccatccttgtcctccagagactgcaccacctgtagcatagaaaaccaccaccacggacctgccagccatcggcgcagcaaaccagccagctgtttgctgccaaattccttcctctcccaggtccagaccaaatacaagatcagcaccacaccgtggtgttgtcaggagccaaagcaacaggaaacaattcaatgctgttgggttcgattctgagagtagatttttccagacatgtctttcaggtgaccctcaactacctcaggtttgaaggccctaaatgaaactgattaccactcatagggacaaaccgagggggttcggttacatcttggtgataatgcagttgtctcaaacttataacagactctttcacatttcagtttgcagggatagggttgggtttgtttttcttctgtttttaacctttcccctgggtttccattagggtagttccttgaaatgaatttcatttttcactgagtgcctaccttcccagggcaggtggccactggcttctgtttccctccaacaatacttttattatggtattaagacctttctttgtataatacattgcatctgtgttttcaatttttcaaataaatatttccgcctggca

SEQ ID NO: 298449 - DNA, 2067 bp, Homo sapiens
cacggcttggtcttaggtcctgtgtgactccagggaagtccagagaacagcctgttctcagatgatgttccctaacccagagccccctccagagactgtcagcatcaataaggccattaatacgcaggaagtggctgtaaaggaaaaacacgccagaacgtgcatactgggcacccaccatgagaaaggggcacagaccttctggtctgttgtcaaccgcctgcctctgtctagcaacgcagtgctctgctggaagttctgccatgtgttccacaaactcctccgagatggacacccgaacgtcctgaaggactctctgagatacagaaatgaattgagtgacatgagcaggatgtggggccacctgagcgaggggtatggccagctgtgcagcatctacctgaaactgctaagaaccaagatggagtaccacaccaaaaatcccaggttcccaggcaacctgcagatgagtgaccgccagctggacgaggctggagaaagtgacgtgaacaactttttccagttaacagtggagatgtttgactacctggagtgtgaactcaacctcttccaaacagtattcaactccctggacatgtcccgctctgtgtccgtgacggcagcagggcagtgccgcctcgccccgctgatccaggtcatcttggactgcagccacctttatgactacactgtcaagcttctcttcaaactccactcctgcctcccagctgacaccctgcaaggccaccgggaccgcttcatggagcagtttacaaagttgaaagatctgttctaccgctccagcaacctgcagtacttcaagcggctcattcagatcccccagctgcctgagaacccacccaacttcctgcgagcctcagccctgtcagaacatatcagccctgtggtggtgatccctgcagaggcctcatcccccgacagcgagccagtcctagagaaggatgacctcatggacatggatgcctctcagcagaatttatttgacaacaagtttgatgacatctttggcagttcattcagcagtgatcccttcaatttcaacagtcaaaatggtgtgaacaaggatgagaaggaccacttaattgagcgactatacagagagatcagtggattgaaggcacagctagaaaacatgaagactgagagccagcgggttgtgctgcagctgaagggccacgtcagcgagctggaagcagatctggccgagcagcagcacctgcggcagcaggcggccgacgactgtgaattcctgcgggcagaactggacgagctcaggaggcagcgggaggacaccgagaaggctcagcggagcctgtctgagatagaaaggaaagctcaagccaatgaacagcgatatagcaagctaaaggagaagtacagcgagctggttcagaaccacgctgacctgctgcggaagaatgcagaggtgaccaaacaggtgtccatggccagacaagcccaggtagatttggaacgagagaaaaaagagctggaggattcgttggagcgcatcagtgaccagggccagcggaagactcaagaacagctggaagttctagagagcttgaagcaggaacttgccacaagccaacgggagcttcaggttctgcaaggcagcctggaaacttctgcccagtcagaagcaaactgggcagccgagttcgccgagctagagaaggagcgggacagcctggtgagtggcgcagctcatagggaggaggaattatctgctcttcggaaagaactgcaggacactcagctcaaactggccagcacagaggaatctatgtgccagcttgccaaagaccaacgaaaaatgcttctggtggggtccaggaaggctgcggagcaggtgatacaagacgccctgaaccagcttgaagaacctcctctcatcagctgcgctgggtctgcagatcacctcctctccacggtcacatccatttccagctgcatcgagcaactggagaaaagctggtcaagtgggccagcagggttatggaatggagaagtccacggagagagcgagctgagtggttgtgtgag

SEQ ID NO: 298450 - DNA, 1386 bp, Homo sapiens
cacggcttggtcttaggtcctgtgtgactccagggaagtccagagaacagcctgttctcagatgatgttccctaacccagagccccctccagagactgtcagcatcaataaggccattaatacgcaggaagtggctgtaaaggaaaaacacgccagaacgtgcatactgggcacccaccatgagaaaggggcacagaccttctggtctgttgtcaaccgcctgcctctgtctagcaacgcagtgctctgctggaagttctgccatgtgttccacaaactcctccgagatggacacccgaacgtcctgaaggactctctgagatacagaaatgaattgagtgacatgagcaggatgtggggccacctgagcgaggggtatggccagctgtgcagcatctacctgaaactgctaagaaccaagatggagtaccacaccaaaaatcccaggttcccaggcaacctgcagatgagtgaccgccagctggacgaggctggagaaagtgacgtgaacaactttttccagttaacagtggagatgtttgactacctggagtgtgaactcaacctcttccaaacagtattcaactccctggacatgtcccgctctgtgtccgtgacggcagcagggcagtgccgcctcgccccgctgatccaggtcatcttggactgcagccacctttatgactacactgtcaagcttctcttcaaactccactcctgcctcccagctgacaccctgcaaggccaccgggaccgcttcatggagcagtttacaaagttgaaagatctgttctaccgctccagcaacctgcagtacttcaagcggctcattcagatcccccagctgcctgagaacccacccaacttcctgcgagcctcagccctgtcagaacatatcagccctgtggtggtgatccctgcagaggcctcatcccccgacagcgagccagtcctagagaaggatgacctcatggacatggatgcctctcagcagaatttatttgacaacaagtttgatgacatctttggcagttcattcagcagtgatcccttcaatttcaacagtcaaaatggtgtgaacaaggatgagaaggaccacttaattgagcgactatacagagagatcagtggattgaaggcacagctagaaaacatgaagactgaggtactaaatcaaacttctcgacttgagatacagctgctggagaattcattatccacctacaagctagagaagcaacttcttcaacagacaaatgaaatcttgaagatccatgaaaaaaacagatggtcaatatactattcttgatcccacagaactatcgtgaaatttagtcaatgttaacgttttccccaccccaaataaatgaagcaaagtgaataaaa

SEQ ID NO: 298451 - DNA, 345 bp, Homo sapiens
aatttatttgacaacaagtttgatgacatctttggcagttcattcagcagtgatcccttcaatttcaacagtcaaaatggtgtgaacaaggatgagaagtgagtccaagctgggttcaagcagatggttcaggagctaagttaagccatggtctgcctcaaaacactaaccaaagaggaattcttaatgatactggggcttcttagatacagaacatcttgaagggttgggggcaatggcttatgcctgtaatcccaacatgtggggaggatgaggtaggaggattttttaaggccaggagtttaagaccaagcttgggcaacatagcaagatcccatctttatt

SEQ ID NO: 298452 - DNA, 749 bp, Homo sapiens
agtcccagctactcaggaggctgaggcaggagaatggcgtgaacccgggaggcggagcttgcagtgagccgagattgcgccactgcactccagcctgggtgacagagcgagactccatctcaaaaaaaaaaaaaaaaaaaaagaagggatcaggtgctgagaaatggagtggcatggagtcacattcaggctgccagcccagagacttgccatccatcacctcgagtctatatgttgttgtctgcatgtcgaaagcagtcaacttgatcacagccaagactgttcactcttagtggacttgactgactctgggcaccaaccatagacagatcctagtcattcctagacacgaaacttggggactatgtgattacaccatggttataattataatgtatttttgagcccccatggtggcaggttttgttggttaagtgaatgaatgcattcatgagtgctttgcaacataaattatcattgtcttttaggaacagaggcatctccacctacactgcaagaagtggtaaccgaaaaagaatagagccaaaccaacaccccatatgtcagtgtaaatccttgttacctatctcgtgtgtgttatttccccagccacaggccaaatccttggagtcccaggggcagccacaccactgccattacccagtgccgaggacatgcatgacacttccaaagactccctccatagcgacaccctttctgtttggacccatggtcatctctgttctttt

SEQ ID NO: 298453 - DNA, 5225 bp, Homo sapiens
ggccgccgggagccggggcccagcgcgtgcgcagacggagcgcgctgagcggagggggaggtggctgccgcttctcccgcgtccgccattttgttgctgtggctattgggaacaagctgggcaaaagcaccccggaggcgcgacgctccttcgagttcggtgcctcgtgtgacggcgggggtcggtgaagacccgtcgagctgcggcgccggcgcgttccaggccgggagtcactggaggcacccctgggacgccgagcagcccgagaaccccggggtggcctccgctgcggctcgggtttgcctgccccgaccccccggctctgccgtgcattcccgggcggctctctccgtgtggcggccccggagcaggcgggcggcgtcggaggatgctgcgggcccggagccgagaggaaagtgctggcccagccctctgagcgctcctcgaggtgtgcgagaggcccttcctcggccccaaagccgtctgccgggctaaggcgtgcagagcaggcgaggacagccgccgcccctaccgccgcagagtccccggtccaacaccatgtcctccgccaggttcgactcctcggaccgctccgcctggtatatggggccggtgtctcgccaggaggcgcagacccggctccagggccagcgccacggtatgttcctcgtccgcgattcttccacctgccctggggactatgtgctgtcggtgtccgagaactcgcgggtctcccactacatcatcaactcgctgcccaaccgccgttttaagatcggggaccaggaatttgaccatttgccggccctgctggagttttacaagatccactacctggacaccaccaccctcatcgagcctgcgcccaggtatccaagcccaccaatgggatctgtctcagcacccaacctgcctacagcagaagataacctggaatatgtacggactctgtatgattttcctgggaatgatgccgaagacctgccctttaaaaagggtgagatcctagtgataatagagaagcctgaagaacagtggtggagtgcccggaacaaggatggccgggttgggatgattcctgtcccttatgtcgaaaagcttgtgagatcctcaccacacggaaagcatggaaataggaattccaacagttatgggatcccagaacctgctcatgcatacgctcaacctcagaccacaactcctctacctgcagtttccggttctcctggggcagcaatcacccctttgccatccacacagaatggacctgtctttgcgaaagcaatccagaaaagagtaccctgtgcttatgacaagactgccttggcattagaggttggtgacatcgtgaaagtcacaaggatgaatataaatggccagtgggaaggcgaagtgaacgggcgcaaagggcttttcccctttacgcacgtcaaaatctttgaccctcaaaacccagatgaaaacgagtgattgctgttgccctgtttcctgctgctttgttgttctgcctgtcctagtctcctttgaagtgggaaagcattttctctcataggcaagtcacactgcattgccgaagtccagctttctgcagactggcagtcgcacacacatttggaatgcacacagcggctgcctcctgatgtttgtatcatagtcgtattgtcaaagagtagccgattttagagttcttttggatcataaactggaaatactgatggaagcacacaagtggagagaagttgacgtggaaagggtcttccttctcattgctgcccgtttgtacatgggactgattctgtcgtgttcaccagagaaagcttgaggccatggcgagatactgcatgtttgctgttccacaaagcagtggcttagctgccatcttgcttttctttggacaacaggaagtgaaccttaaggaagagagaattctgttctaaaactccaaaatctggctttttttttttctttggtttgggttgggtttgggaaaactaattaattagacttgtgtgggggttttttttgttttgttttgtttgttttgttttgtttttttgagacggtgtctcgctgcatcacccaggctggagtgcagtggcgcaatctcgccttcctgcagtctccgcctcctgagttcaagcgattctcctgcctcagcctcccaagttagctgggactgcaggcgcgcacaccacgcccagctaattttggtatttttagtagagacggggtttcatcatgttgaccaggctggtctcaaactcctgacttcaggtgatccacccgccttcagcctcccaacgtgctgggattacagccgtgagccgccgcgcctggcctagacttgtgtgttctaaacaggttaagtagcaggttgggtttttatgatagtgcaaggaatgactcatgcctctgagcttctaaactgaagctgctgtaactaaaggaatctgaaaagaacaaccctgaagcagaggcctttattgtcttggttgccagtagtaccttgttttgccatgtagcagacaacacacaaaataatgcagttgtggtgtgccatgctatgtgcacagccccttggattactttgttttaaaaagcatcagagttgggggtactttagggaaacctttgcttaccttgttttgccagtgataagagcagtgggttggagggcacttggccagttttctgttcagcttttcagtgaatgtacccctttaaggttcagacttaaacttccttaaaaagtggcgttgttcatagaatcgttggactcattaatgaatcgttcaactccactcactgaagcccagacctccgtgcccaggcccaatctcgtcaggctgccagagaaagttggtgctgctcatactggtctcacagtctaagtaagtgtctgtgatgctcccaagcaaaggaaatgcaagctctggaaattcgttaatgtatttgatgtcttagtgttttagtgactagggagaccattaactagtttatcattaaccacttatcagtgtattgatgttaaagcatttccctgttagctaaaagaggcctgttcatacaagccaactggtatatacgtgtggttcatccatcatctgctgcacatagcagactagaattctgggaaccctgtgcaattcagtctgctctcccttgtggaccctggtaaagaaaagcctcagctcatagtgaacacagcagacctagaaatgtagcagcagcctactgagtagctttcatttactgatcatctgctgtgactgtggccctgtctggaggttcctaggttttgagatttagagcaatgcattctggagacagaaccagcagaacagccatttttcaatttttctttaaatcagtattccatcaggcagataactgctgtattcatgaatcttgagagtgttcctgagacagaattaatggtcatttgggaaaactatcgccatggcttcccatctgtggttttcctctaaaagccttggagattagcccttccttgccagtgagaacggtgaccgcctcctgctctgcacggtctgcggcagttgccgcttctggttaggtgtgtcaggttggcttattttgggttcaggcctggcgtagcacccacaagtggcagacatatcacaagagtccccagactctgcctagaaacagtgtttgccctttggccagtgacgtggttcatcccggcccatgttgagccatgagtggagtttccagcagagggaggaatgtgtgccttgttcaaggagggcacgacccttaggcctttttcaaccagatttagctgaagggcttgacacctttgaattacagcagttgactcagagtgcaagaagtctggccattttggaaagcaaggtttcctttcagccctgtctactgaccaataccccgactcaccttgtgtggcgcacttcagaatcagatatacctagagtatacctgtggtttggttttataattaatcagctcgttacttcagcccatgaaaatggcatccagggctgccaggagattcagagctcaaaacaaggcgagcttgagttctgcactccagatgtgtgccaaaactagtaaaacttaacggacttacaaccttgtcagtttttttaatgaggcagggatactctgtttttcacactaaacatatgaatgcagcactgctgcctcagctcagcttcgtgcctgggttccccactggtctgggaagactgttgtgctccatagagcagtgcacatctgacccagagggtgggtgttcataactgctacttgctctgctctaccatgtttaaagaaatatttggatgttaaattaactcactatggtttttcacctgggaaggaaacaaattacgtactagagggcattgattggttaaaaacttgtgtatcccgggaaggacctgcggtacaggagtcagccatgtctgtgctgtgtggaaccacctgatgacatggttaacgaggaagacgatgtgttgaccggctgccgtttgaggactttggtcacccagactagacaccttctgtgctcatgtttggaaagctgaaagggaaggacagctgtgccctcctgggagctcatgtgtccctggcgctgtgctagctttcctttacagctgtttacagacaaggcaggcctgaggcagatggccactgctcttgtgatgtttgctcagaggaatatgaacattttatttttgaaaagggatgatgtggttttttgccaggtgtttataattaatcctttaatattatggttattaacctcttaaacatgaatgaattcttgattgttttaacacagtacctaagactaatgctttctgtggacaccactgagctctgcctcaactccaccctctgcgaccggaggactatgcccctagtaactgctgtcggtgtggacgctgtgctggttctgttttctaaaggagcagaaggacaggtctctgagacaggatcgttgtccctacaggaggaacagtggccttgcttcttagacggtcttcactgtgtgttttaaaacaacaacaacaacaacaacaacataaaactcttttgacctgtaacttaaagatcataaacttcaggcaataatattttctgtgtaagcttttaaaattatttttggggatcatagcttgttttattttgtgctataaaattaacagtattaaatgacttatattcttagaata

SEQ ID NO: 298454 - DNA, 5370 bp, Homo sapiens
ggccgccgggagccggggcccagcgcgtgcgcagacggagcgcgctgagcggagggggaggtggctgccgcttctcccgcgtccgccattttgttgctgtggctattgggaacaagctgggcaaaagcaccccggaggcgcgacgctccttcgagttcggtgcctcgtgtgacggcgggggtcggtgaagacccgtcgagctgcggcgccggcgcgttccaggccgggagtcactggaggcacccctgggacgccgagcagcccgagaaccccggggtggcctccgctgcggctcgggtttgcctgccccgaccccccggctctgccgtgcattcccgggcggctctctccgtgtggcggccccggagcaggcgggcggcgtcggaggatgctgcgggcccggagccgagaggaaagtgctggcccagccctctgagcgctcctcgaggtgtgcgagaggcccttcctcggccccaaagccgtctgccgggctaaggcgtgcagagcaggcgaggacagccgccgcccctaccgccgcagagtccccggtccaacaccatgtcctccgccaggttcgactcctcggaccgctccgcctggtatatggggccggtgtctcgccaggaggcgcagacccggctccagggccagcgccacggtatgttcctcgtccgcgattcttccacctgccctggggactatgtgctgtcggtgtccgagaactcgcgggtctcccactacatcatcaactcgctgcccaaccgccgttttaagatcggggaccaggaatttgaccatttgccggccctgctggagttttacaagatccactacctggacaccaccaccctcatcgagcctgcgcccaggtatccaagcccaccaatgggatctgtctcagcacccaacctgcctacagcagaagataacctggaatatgtacggactctgtatgattttcctgggaatgatgccgaagacctgccctttaaaaagggtgagatcctagtgataatagagaagcctgaagaacagtggtggagtgcccggaacaaggatggccgggttgggatgattcctgtcccttatgtcgaaaagcttgtgagatcctcaccacacggaaagcatggaaataggaattccaacagttatgggatcccagaacctgctcatgcatacgctcaacctcagaccacaactcctctacctgcagtttccggttctcctggggcagcaatcacccctttgccatccacacagaatggacctgtctttgcgaaagcaatccagaaaagagtaccctgtgcttatgacaagactgccttggcattagaggttggtgacatcgtgaaagtcacaaggatgaatataaatggccagtgggaaggcgaagtgaacgggcgcaaagggcttttcccctttacgcacgtcaaaatctttgaccctcaaaacccagatgaaaacgagtgattgctgttgccctgtttcctgctgctttgttgttctgcctgtcctagtctcctttgaagtgggaaagcattttctctcataggcaagtcacactgcattgccgaagtccagctttctgcagactggcagtcgcacacacatttggaatgcacacagcggctgcctcctgatgtttgtatcatagtcgtattgtcaaagagtagccgattttagagttcttttggatcataaactggaaatactgatggaagcacacaagtggagagaagttgacgtggaaagggtcttccttctcattgctgcccgtttgtacatgggactgattctgtcgtgttcaccagagaaagcttgaggccatggcgagatactgcatgtttgctgttccacaaagcagtggcttagctgccatcttgcttttctttggacaacaggaagtgaaccttaaggaagagagaattctgttctaaaactccaaaatctggctttttttttttctttggtttgggttgggtttgggaaaactaattaattagacttgtgtgggggttttttttgttttgttttgtttgttttgttttgtttttttgagacggtgtctcgctgcatcacccaggctggagtgcagtggcgcaatctcgccttcctgcagtctccgcctcctgagttcaagcgattctcctgcctcagcctcccaagttagctgggactgcaggcgcgcacaccacgcccagctaattttggtatttttagtagagacggggtttcatcatgttgaccaggctggtctcaaactcctgacttcaggtgatccacccgccttcagcctcccaacgtgctgggattacagccgtgagccgccgcgcctggcctagacttgtgtgttctaaacaggttaagtagcaggttgggtttttatgatagtgcaaggaatgactcatgcctctgagcttctaaactgaagctgctgtaactaaaggaatctgaaaagaacaaccctgaagcagaggcctttattgtcttggttgccagtagtaccttgttttgccatgtagcagacaacacacaaaataatgcagttgtggtgtgccatgctatgtgcacagccccttggattactttgttttaaaaagcatcagagttgggggtactttagggaaacctttgcttaccttgttttgccagtgataagagcagtgggttggagggcacttggccagttttctgttcagcttttcagtgaatgtacccctttaaggttcagacttaaacttccttaaaaagtggcgttgttcatagaatcgttggactcattaatgaatcgttcaactccactcactgaagcccagacctccgtgcccaggcccaatctcgtcaggctgccagagaaagttggtgctgctcatactggtctcacagtctaagtaagtgtctgtgatgctcccaagcaaaggaaatgcaagctctggaaattcgttaatgtatttgatgtcttagtgttttagtgactagggagaccattaactagtttatcattaaccacttatcagtgtattgatgttaaagcatttccctgttagctaaaagaggcctgttcatacaagccaactggtatatacgtgtggttcatccatcatctgctgcacatagcagactagaattctgggaaccctgtgcaattcagtctgctctcccttgtggaccctggtaaagaaaagcctcagctcatagtgaacacagcagacctagaaatgtagcagcagcctactgagtagctttcatttactgatcatctgctgtgactgtggccctgtctggaggttcctaggttttgagatttagagcaatgcattctggagacagaaccagcagaacagccatttttcaatttttctttaaatcagtattccatcaggcagataactgctgtattcatgaatcttgagagtgttcctgagacagaattaatggtcatttgggaaaactatcgccatggcttcccatctgtggttttcctctaaaagccttggagattagcccttccttgccagtgagaacggtgaccgcctcctgctctgcacggtctgcggcagttgccgcttctggttaggtgtgtcaggttggcttattttgggttcaggcctggcgtagcacccacaagtggcagacatatcacaagagtccccagactctgcctagaaacagtgtttgccctttggccagtgacgtggttcatcccggcccatgttgagccatgagtggagtttccagcagagggaggaatgtgtgccttgttcaaggagggcacgacccttaggcctttttcaaccagatttagctgaagggcttgacacctttgaattacagcagttgactcagagtgcaagaagtctggccattttggaaagcaaggtttcctttcagccctgtctactgaccaataccccgactcaccttgtgtggcgcacttcagaatcagatatacctagagtatacctgtggtttggttttataattaatcagctcgttacttcagcccatgaaaatggcatccagggctgccaggagattcagagctcaaaacaaggcgagcttgagttctgcactccagatgtgtgccaaaactagtaaaacttaacggacttacaaccttgtcagtttttttaatgaggcagggatactctgtttttcacactaaacatatgaatgcagcactgctgcctcagctcagcttcgtgcctgggttccccactggtctgggaagactgttgtgctccatagagcagtgcacatctgacccagagggtgggtgttcataactgctacttgctctgctctaccatgtttaaagaaatatttggatgttaaattaactcactatggtttttcacctgggaaggaaacaaattacgtactagagggcattgattggttaaaaacttgtgtatcccgggaaggacctgcggtacaggagtcagccatgtctgtgctgtgtggaaccacctgatgacatggttaacgaggaagacgatgtgttgaccggctgccgtttgaggactttggtcacccagactagacaccttctgtgctcatgtttggaaagctgaaagggaaggacagctgtgccctcctgggagctcatgtgtccctggcgctgtgctagctttcctttacagctgtttacagacaaggcaggcctgaggcagatggccactgctcttgtgatgtttgctcagaggaatatgaacattttatttttgaaaagggatgatgtggttttttgccaggtgtttataattaatcctttaatattatggttattaacctcttaaacatgaatgaattcttgattgttttaacacagtacctaagactaatgctttctgtggacaccactgagctctgcctcaactccaccctctgcgaccggaggactatgcccctagtaactgctgtcggtgtggacgctgtgctggttctgttttctaaaggagcagaaggacaggtctctgagacaggatcgttgtccctacaggaggaacagtggccttgcttcttagacggtcttcactgtgtgttttaaaacaacaacaacaacaacaacaacataaaactcttttgacctgtaacttaaagatcataaacttcaggcaataatattttctgtgtaagcttttaaaattatttttggggatcatagcttgttttattttgtgctataaaattaacagtattaaatgacttatattcttagaatacatcgagtgtcttttcttaacagattagtgcctttttatttttgtattccgttttacgttactggtcccagcatcaaaacccttgtttccatggcctgtttgtatattgtctcaataaaacttgcatcagccggtggtggcggca

SEQ ID NO: 298455 - DNA, 5172 bp, Homo sapiens
ggccgccgggagccggggcccagcgcgtgcgcagacggagcgcgctgagcggagggggaggtggctgccgcttctcccgcgtccgccattttgttgctgtggctattgggaacaagctgggcaaaagcaccccggaggcgcgacgctccttcgagttcggtgcctcgtgtgacggcgggggtcggtgaagacccgtcgagctgcggcgccggcgcgttccaggccgggagtcactggaggcacccctgggacgccgagcagcccgagaaccccggggtggcctccgctgcggctcgggtttgcctgccccgaccccccggctctgccgtgcattcccgggcggctctctccgtgtggcggccccggagcaggcgggcggcgtcggaggatgctgcgggcccggagccgagaggaaagtgctggcccagccctctgagcgctcctcgaggtgtgcgagaggcccttcctcggccccaaagccgtctgccgggctaaggcgtgcagagcaggcgaggacagccgccgcccctaccgccgcagagtccccggtccaacaccatgtcctccgccaggttcgactcctcggaccgctccgcctggtatatggggccggtgtctcgccaggaggcgcagacccggctccagggccagcgccacggtatgttcctcgtccgcgattcttccacctgccctggggactatgtgctgtcggtgtccgagaactcgcgggtctcccactacatcatcaactcgctgcccaaccgccgttttaagatcggggaccaggaatttgaccatttgccggccctgctggagttttacaagatccactacctggacaccaccaccctcatcgagcctgcgcccaggtatccaagcccaccaatgggatctgtctcagcacccaacctgcctacagcagaagataacctggaatatgtacggactctgtatgattttcctgggaatgatgccgaagacctgccctttaaaaagggtgagatcctagtgataatagagaagcctgaagaacagtggtggagtgcccggaacaaggatggccgggttgggatgattcctgtcccttatgtcgaaaagcttgtgagatcctcaccacacggaaagcatggaaataggaattccaacagttatgggatcccagaacctgctcatgcatacgctcaacctcagaccacaactcctctacctgcagtttccggttctcctggggcagcaatcacccctttgccatccacacagaatggacctgtctttgcgaaagcaatccagaaaagagtaccctgtgcttatgacaagactgccttggcattagaggttggtgacatcgtgaaagtcacaaggatgaatataaatggccagtgggaaggcgaagtgaacgggcgcaaagggcttttcccctttacgcacgtcaaaatctttgaccctcaaaacccagatgaaaacgagtgattgctgttgccctgtttcctgctgctttgttgttctgcctgtcctagtctcctttgaagtgggaaagcattttctctcataggcaagtcacactgcattgccgaagtccagctttctgcagactggcagtcgcacacacatttggaatgcacacagcggctgcctcctgatgtttgtatcatagtcgtattgtcaaagagtagccgattttagagttcttttggatcataaactggaaatactgatggaagcacacaagtggagagaagttgacgtggaaagggtcttccttctcattgctgcccgtttgtacatgggactgattctgtcgtgttcaccagagaaagcttgaggccatggcgagatactgcatgtttgctgttccacaaagcagtggcttagctgccatcttgcttttctttggacaacaggaagtgaaccttaaggaagagagaattctgttctaaaactccaaaatctggctttttttttttctttggtttgggttgggtttgggaaaactaattaattagacttgtgtgggggttttttttgttttgttttgtttgttttgttttgtttttttgagacggtgtctcgctgcatcacccaggctggagtgcagtggcgcaatctcgccttcctgcagtctccgcctcctgagttcaagcgattctcctgcctcagcctcccaagttagctgggactgcaggcgcgcacaccacgcccagctaattttggtatttttagtagagacggggtttcatcatgttgaccaggctggtctcaaactcctgacttcaggtgatccacccgccttcagcctcccaacgtgctgggattacagccgtgagccgccgcgcctggcctagacttgtgtgttctaaacaggttaagtagcaggttgggtttttatgatagtgcaaggaatgactcatgcctctgagcttctaaactgaagctgctgtaactaaaggaatctgaaaagaacaaccctgaagcagaggcctttattgtcttggttgccagtagtaccttgttttgccatgtagcagacaacacacaaaataatgcagttgtggtgtgccatgctatgtgcacagccccttggattactttgttttaaaaagcatcagagttgggggtactttagggaaacctttgcttaccttgttttgccagtgataagagcagtgggttggagggcacttggccagttttctgttcagcttttcagtgaatgtacccctttaaggttcagacttaaacttccttaaaaagtggcgttgttcatagaatcgttggactcattaatgaatcgttcaactccactcactgaagcccagacctccgtgcccaggcccaatctcgtcaggctgccagagaaagttggtgctgctcatactggtctcacagtctaagtaagtgtctgtgatgctcccaagcaaaggaaatgcaagctctggaaattcgttaatgtatttgatgtcttagtgttttagtgactagggagaccattaactagtttatcattaaccacttatcagtgtattgatgttaaagcatttccctgttagctaaaagaggcctgttcatacaagccaactggtatatacgtgtggttcatccatcatctgctgcacatagcagactagaattctgggaaccctgtgcaattcagtctgctctcccttgtggaccctggtaaagaaaagcctcagctcatagtgaacacagcagacctagaaatgtagcagcagcctactgagtagctttcatttactgatcatctgctgtgactgtggccctgtctggaggttcctaggttttgagatttagagcaatgcattctggagacagaaccagcagaacagccatttttcaatttttctttaaatcagtattccatcaggcagataactgctgtattcatgaatcttgagagtgttcctgagacagaattaatggtcatttgggaaaactatcgccatggcttcccatctgtggttttcctctgctctgcacggtctgcggcagttgccgcttctggttaggtgtgtcaggttggcttattttgggttcaggcctggcgtagcacccacaagtggcagacatatcacaagagtccccagactctgcctagaaacagtgtttgccctttggccagtgacgtggttcatcccggcccatgttgagccatgagtggagtttccagcagagggaggaatgtgtgccttgttcaaggagggcacgacccttaggcctttttcaaccagatttagctgaagggcttgacacctttgaattacagcagttgactcagagtgcaagaagtctggccattttggaaagcaaggtttcctttcagccctgtctactgaccaataccccgactcaccttgtgtggcgcacttcagaatcagatatacctagagtatacctgtggtttggttttataattaatcagctcgttacttcagcccatgaaaatggcatccagggctgccaggagattcagagctcaaaacaaggcgagcttgagttctgcactccagatgtgtgccaaaactagtaaaacttaacggacttacaaccttgtcagtttttttaatgaggcagggatactctgtttttcacactaaacatatgaatgcagcactgctgcctcagctcagcttcgtgcctgggttccccactggtctgggaagactgttgtgctccatagagcagtgcacatctgacccagagggtgggtgttcataactgctacttgctctgctctaccatgtttaaagaaatatttggatgttaaattaactcactatggtttttcacctgggaaggaaacaaattacgtactagagggcattgattggttaaaaacttgtgtatcccgggaaggacctgcggtacaggagtcagccatgtctgtgctgtgtggaaccacctgatgacatggttaacgaggaagacgatgtgttgaccggctgccgtttgaggactttggtcacccagactagacaccttctgtgctcatgtttggaaagctgaaagggaaggacagctgtgccctcctgggagctcatgtgtccctggcgctgtgctagctttcctttacagctgtttacagacaaggcaggcctgaggcagatggccactgctcttgtgatgtttgctcagaggaatatgaacattttatttttgaaaagggatgatgtggttttttgccaggtgtttataattaatcctttaatattatggttattaacctcttaaacatgaatgaattcttgattgttttaacacagtacctaagactaatgctttctgtggacaccactgagctctgcctcaactccaccctctgcgaccggaggactatgcccctagtaactgctgtcggtgtggacgctgtgctggttctgttttctaaaggagcagaaggacaggtctctgagacaggatcgttgtccctacaggaggaacagtggccttgcttcttagacggtcttcactgtgtgttttaaaacaacaacaacaacaacaacaacataaaactcttttgacctgtaacttaaagatcataaacttcaggcaataatattttctgtgtaagcttttaaaattatttttggggatcatagcttgttttattttgtgctataaaattaacagtattaaatgacttatattcttagaata

SEQ ID NO: 298456 - DNA, 5738 bp, Homo sapiens
ggccgccgggagccggggcccagcgcgtgcgcagacggagcgcgctgagcggagggggaggtggctgccgcttctcccgcgtccgccattttgttgctgtggctattgggaacaagctgggcaaaagcaccccggaggcgcgacgctccttcgagttcggtgcctcgtgtgacggcgggggtcggtgaagacccgtcgagctgcggcgccggcgcgttccaggccgggagtcactggaggcacccctgggacgccgagcagcccgagaaccccggggtggcctccgctgcggctcgggtttgcctgccccgaccccccggctctgccgtgcattcccgggcggctctctccgtgtggcggccccggagcaggcgggcggcgtcggaggatgctgcgggcccggagccgagaggaaagtgctggcccagccctctgagcgctcctcgaggtgtgcgagaggcccttcctcggccccaaagccgtctgccgggctaaggcgtgcagagcaggcgaggacagccgccgcccctaccgccgcagagtccccggtccaacaccatgtcctccgccaggttcgactcctcggaccgctccgcctggtatatggggccggtgtctcgccaggaggcgcagacccggctccagggccagcgccacggtatgttcctcgtccgcgattcttccacctgccctggggactatgtgctgtcggtgtccgagaactcgcgggtctcccactacatcatcaactcgctgcccaaccgccgttttaagatcggggaccaggaatttgaccatttgccggccctgctggagttttacaagatccactacctggacaccaccaccctcatcgagcctgcgcccaggtatccaagcccaccaatgggatctgtctcagcacccaacctgcctacagcagaagataacctggaatatgtacggactctgtatgattttcctgggaatgatgccgaagacctgccctttaaaaagggtgagatcctagtgataatagagaagcctgaagaacagtggtggagtgcccggaacaaggatggccgggttgggatgattcctgtcccttatgtcgaaaagcttgtgagatcctcaccacacggaaagcatggaaataggaattccaacagttatgggatcccagaacctgctcatgcatacgctcaacctcagaccacaactcctctacctgcagtttccggttctcctggggcagcaatcacccctttgccatccacacagaatggacctgtctttgcgaaagcaatccagaaaagagtaccctgtgcttatgacaagactgccttggcattagaggttggtgacatcgtgaaagtcacaaggatgaatataaatggccagtgggaaggcgaagtgaacgggcgcaaagggcttttcccctttacgcacgtcaaaatctttgaccctcaaaacccagatgaaaacgagtgattgctgttgccctgtttcctgctgctttgttgttctgcctgtcctagtctcctttgaagtgggaaagcattttctctcataggcaagtcacactgcattgccgaagtccagctttctgcagactggcagtcgcacacacatttggaatgcacacagcggctgcctcctgatgtttgtatcatagtcgtattgtcaaagagtagccgattttagagttcttttggatcataaactggaaatactgatggaagcacacaagtggagagaagttgacgtggaaagggtcttccttctcattgctgcccgtttgtacatgggactgattctgtcgtgttcaccagagaaagcttgaggccatggcgagatactgcatgtttgctgttccacaaagcagtggcttagctgccatcttgcttttctttggacaacaggaagtgaaccttaaggaagagagaattctgttctaaaactccaaaatctggctttttttttttctttggtttgggttgggtttgggaaaactaattaattagacttgtgtgggggttttttttgttttgttttgtttgttttgttttgtttttttgagacggtgtctcgctgcatcacccaggctggagtgcagtggcgcaatctcgccttcctgcagtctccgcctcctgagttcaagcgattctcctgcctcagcctcccaagttagctgggactgcaggcgcgcacaccacgcccagctaattttggtatttttagtagagacggggtttcatcatgttgaccaggctggtctcaaactcctgacttcaggtgatccacccgccttcagcctcccaacgtgctgggattacagccgtgagccgccgcgcctggcctagacttgtgtgttctaaacaggttaagtagcaggttgggtttttatgatagtgcaaggaatgactcatgcctctgagcttctaaactgaagctgctgtaactaaaggaatctgaaaagaacaaccctgaagcagaggcctttattgtcttggttgccagtagtaccttgttttgccatgtagcagacaacacacaaaataatgcagttgtggtgtgccatgctatgtgcacagccccttggattactttgttttaaaaagcatcagagttgggggtactttagggaaacctttgcttaccttgttttgccagtgataagagcagtgggttggagggcacttggccagttttctgttcagcttttcagtgaatgtacccctttaaggttcagacttaaacttccttaaaaagtggcgttgttcatagaatcgttggactcattaatgaatcgttcaactccactcactgaagcccagacctccgtgcccaggcccaatctcgtcaggctgccagagaaagttggtgctgctcatactggtctcacagtctaagtaagtgtctgtgatgctcccaagcaaaggaaatgcaagctctggaaattcgttaatgtatttgatgtcttagtgttttagtgactagggagaccattaactagtttatcattaaccacttatcagtgtattgatgttaaagcatttccctgttagctaaaagaggcctgttcatacaagccaactggtatatacgtgtggttcatccatcatctgctgcacatagcagactagaattctgggaaccctgtgcaattcagtctgctctcccttgtggaccctggtaaagaaaagcctcagctcatagtgaacacagcagacctagaaatgtagcagcagcctactgagtagctttcatttactgatcatctgctgtgactgtggccctgtctggaggttcctaggttttgagatttagagcaatgcattctggagacagaaccagcagaacagccatttttcaatttttctttaaatcagtattccatcaggcagataactgctgtattcatgaatcttgagagtgttcctgagacagaattaatggtcatttgggaaaactatcgccatggcttcccatctgtggttttcctctaaaagccttggagattagcccttccttgccagtgagaacggtgaccgcctcctgctctgcacggtctgcggcagttgccgcttctggttaggtgtgtcaggttggcttattttgggttcaggcctggcgtagcacccacaagtggcagacatatcacaagagtccccagactctgcctagaaacagtgtttgccctttggccagtgacgtggttcatcccggcccatgttgagccatgagtggagtttccagcagagggaggaatgtgtgccttgttcaaggagggcacgacccttaggcctttttcaaccagatttagctgaagggcttgacacctttgaattacagcagttgactcagagtgcaagaagtctggccattttggaaagcaaggtttcctttcagccctgtctactgaccaataccccgactcaccttgtgtggcgcacttcagaatcagatatacctagagtatacctgtggtttggttttataattaatcagctcgttacttcagcccatgaaaatggcatccagggctgccaggagattcagagctcaaaacaaggcgagcttgagttctgcactccagatgtgtgccaaaactagtaaaacttaacggacttacaaccttgtcagtttttttaatgaggcagggatactctgtttttcacactaaacatatgaatgcagcactgctgcctcagctcagcttcgtgcctgggttccccactggtctgggaagactgttgtgctccatagagcagtgcacatctgacccagagggtgggtgttcataactgctacttgctctgctctaccatgtttaaagaaatatttggatgttaaattaactcactatggtttttcacctgggaaggaaacaaattacgtactagagggcattgattggttaaaaacttgtgtatcccgggaaggacctgcggtacaggagtcagccatgtctgtgctgtgtggaaccacctgatgacatggttaacgaggaagacgatgtgttgaccggctgccgtttgaggactttggtcacccagactagacaccttctgtgctcatgtttggaaagctgaaagggaaggacagctgtgccctcctgggagctcatgtgtccctggcgctgtgctagctttcctttacagctgtttacagacaaggcaggcctgaggcagatggccactgctcttgtgatgtttgctcagaggaatatgaacattttatttttgaaaagggatgatgtggttttttgccaggtgtttataattaatcctttaatattatggttattaacctcttaaacatgaatgaattcttgattgttttaacacagtacctaagactaatgctttctgtggacaccactgagctctgcctcaactccaccctctgcgaccggaggactatgcccctagtaactgctgtcggtgtggacgctgtgctggttctgttttctaaaggagcagaaggacaggtctctgagacaggatcgttgtccctacaggaggaacagtggccttgcttcttagacggtcttcactgtgtgttttaaaacaacaacaacaacaacaacaacataaaactcttttgacctgtaacttaaagatcataaacttcaggcaataatattttctgtgtaagcttttaaaattatttttggggatcatagcttgttttattttgtgctataaaattaacagtattaaatgacttatattcttagaatacatcgagtgtcttttcttaacagattagtgcctttttatttttgtattccgttttacgttactggtcccagcatcaaaacccttgtttccatggcctgtttgtatattgtctcaataaaacttgcatcagccggtggtggcggcagcttcggtgtttcagtgtctcctcagtccgcccccactagcctcctggcagttcatcagtggtgaaatctctgatgcttctcagagacccttagtgctgctgctgaccaagagctagaatgaagtcttggcatccgcccattccaacactcgggcacccagaggagagcacctggggtctccctccaaaagagaaatctccctcccagagtgtctgtcttgtaggtattgtatgggagcctagtgcttggccttctgagcatgaggcaatagttcccacaggttgcaccaccacagagaacttggatctttttccttctaggcacccatatctgaggcttctagtaaatatttcttcagcatgagcta

SEQ ID NO: 298457 - DNA, 2652 bp, Homo sapiens
cccaacaccacacaaacaacacaaacacacaatagacacgtacagagcccgtgttaatctgcatgaggctaggatctgagatttagagcagtgggttggagggcacttggccagttttctgttcagcttttcagtgaatgtacccctttaaggttcagacttaaacttccttaaaaagtggcgttgttcatagaatcgttggactcattaatgaatcgttcaactccactcactgaagcccagacctccgtgcccaggcccaatctcgtcaggctgccagagaaagttggtgctgctcatactggtctcacagtctaagtaagtgtctgtgatgctcccaagcaaaggaaatgcaagctctggaaattcgttaatgtatttgatgtcttagtgttttagtgactagggagaccattaactagtttatcattaaccacttatcagtgtattgatgttaaagcatttccctgttagctaaaagaggcctgttcatacaagccaactggtatatacgtgtggttcatccatcatctgctgcacatagcagactagaattctgggaaccctgtgcaattcagtctgctctcccttgtggaccctggtaaagaaaagcctcagctcatagtgaacacagcagacctagaaatgtagcagcagcctactgagtagctttcatttactgatcatctgctgtgactgtggccctgtctggaggttcctaggttttgagatttagagcaatgcattctggagacagaaccagcagaacagccatttttcaatttttctttaaatcagtattccatcaggcagataactgctgtattcatgaatcttgagagtgttcctgagacagaattaatggtcatttgggaaaactatcgccatggcttcccatctgtggttttcctctaaaagccttggagattagcccttccttgccagtgagaacggtgaccgcctcctgctctgcacggtctgcggcagttgccgcttctggttaggtgtgtcaggttggcttattttgggttcaggcctggcgtagcacccacaagtggcagacatatcacaagagtccccagactctgcctagaaacagtgtttgccctttggccagtgacgtggttcatcccggcccatgttgagccatgagtggagtttccagcagagggaggaatgtgtgccttgttcaaggagggcacgacccttaggcctttttcaaccagatttagctgaagggcttgacacctttgaattacagcagttgactcagagtgcaagaagtctggccattttggaaagcaaggtttcctttcagccctgtctactgaccaataccccgactcaccttgtgtggcgcacttcagaatcagatatacctagagtatacctgtggtttggttttataattaatcagctcgttacttcagcccatgaaaatggcatccagggctgccaggagattcagagctcaaaacaaggcgagcttgagttctgcactccagatgtgtgccaaaactagtaaaacttaacggacttacaaccttgtcagtttttttaatgaggcagggatactctgtttttcacactaaacatatgaatgcagcactgctgcctcagctcagcttcgtgcctgggttccccactggtctgggaagactgttgtgctccatagagcagtgcacatctgacccagagggtgggtgttcataactgctacttgctctgctctaccatgtttaaagaaatatttggatgttaaattaactcactatggtttttcacctgggaaggaaacaaattacgtactagagggcattgattggttaaaaacttgtgtatcccgggaaggacctgcggtacaggagtcagccatgtctgtgctgtgtggaaccacctgatgacatggttaacgaggaagacgatgtgttgaccggctgccgtttgaggactttggtcacccagactagacaccttctgtgctcatgtttggaaagctgaaagggaaggacagctgtgccctcctgggagctcatgtgtccctggcgctgtgctagctttcctttacagctgtttacagacaaggcaggcctgaggcagatggccactgctcttgtgatgtttgctcagaggaatatgaacattttatttttgaaaagggatgatgtggttttttgccaggtgtttataattaatcctttaatattatggttattaacctcttaaacatgaatgaattcttgattgttttaacacagtacctaagactaatgctttctgtggacaccactgagctctgcctcaactccaccctctgcgaccggaggactatgcccctagtaactgctgtcggtgtggacgctgtgctggttctgttttctaaaggagcagaaggacaggtctctgagacaggatcgttgtccctacaggaggaacagtggccttgcttcttagacggtcttcactgtgtgttttaaaacaacaacaacaacaacaacaacataaaactcttttgacctgtaacttaaagatcataaacttcaggcaataatattttctgtgtaagcttttaaaattatttttggggatcatagcttgttttattttgtgctataaaattaacagtattaaatgacttatattcttagaata

SEQ ID NO: 298458 - DNA, 1573 bp, Homo sapiens
tccctctactgagaaactgtgtatggctctttggcctcctgacgtgtgttctcccggacatggttgccgcctcgttcagttcgcgcccggtgagggatgtgtgccctttgtctcggcgggcacgcatcttacgtcgtttctggccgtcattttctacgtggcttgacacctttgaattacagcagttgactcagagtgcaagaagtctggccattttggaaagcaaggtttcctttcagccctgtctactgaccaataccccgactcaccttgtgtggcgcacttcagaatcagatatacctagagtatacctgtggtttggttttataattaatcagctcgttacttcagcccatgaaaatggcatccagggctgccaggagattcagagctcaaaacaaggcgagcttgagttctgcactccagatgtgtgccaaaactagtaaaacttaacggacttacaaccttgtcagtttttttaatgaggcagggatactctgtttttcacactaaacatatgaatgcagcactgctgcctcagctcagcttcgtgcctgggttccccactggtctgggaagactgttgtgctccatagagcagtgcacatctgacccagagggtgggtgttcataactgctacttgctctgctctaccatgtttaaagaaatatttggatgttaaattaactcactatggtttttcacctgggaaggaaacaaattacgtactagagggcattgattggttaaaaacttgtgtatcccgggaaggacctgcggtacaggagtcagccatgtctgtgctgtgtggaaccacctgatgacatggttaacgaggaagacgatgtgttgaccggctgccgtttgaggactttggtcacccagactagacaccttctgtgctcatgtttggaaagctgaaagggaaggacagctgtgccctcctgggagctcatgtgtccctggcgctgtgctagctttcctttacagctgtttacagacaaggcaggcctgaggcagatggccactgctcttgtgatgtttgctcagaggaatatgaacattttatttttgaaaagggatgatgtggttttttgccaggtgtttataattaatcctttaatattatggttattaacctcttaaacatgaatgaattcttgattgttttaacacagtacctaagactaatgctttctgtggacaccactgagctctgcctcaactccaccctctgcgaccggaggactatgcccctagtaactgctgtcggtgtggacgctgtgctggttctgttttctaaaggagcagaaggacaggtctctgagacaggatcgttgtccctacaggaggaacagtggccttgcttcttagacggtcttcactgtgtgttttaaaacaacaacaacaacaacaacaacataaaactcttttgacctgtaacttaaagatcataaacttcaggcaataatattttctgtgtaagcttttaaaattatttttggggatcatagcttgttttattttgtgctataaaattaacagtattaaatgacttatattcttagaata

SEQ ID NO: 298459 - DNA, 3285 bp, Homo sapiens
ggccgccgggagccggggcccagcgcgtgcgcagacggagcgcgctgagcggagggggaggtggctgccgcttctcccgcgtccgccattttgttgctgtggctattgggaacaagctgggcaaaagcaccccggaggcgcgacgctccttcgagttcggtgcctcgtgtgacggcgggggtcggtgaagacccgtcgagctgcggcgccggcgcgttccaggccgggagtcactggaggcacccctgggacgccgagcagcccgagaaccccggggtggcctccgctgcggctcgggtttgcctgccccgaccccccggctctgccgtgcattcccgggcggctctctccgtgtggcggccccggagcaggcgggcggcgtcggaggatgctgcgggcccggagccgagaggaaagtgctggcccagccctctgagcgctcctcgaggtgtgcgagaggcccttcctcggccccaaagccgtctgccgggctaaggcgtgcagagcaggcgaggacagccgccgcccctaccgccgcagagtccccggtccaacaccatgtcctccgccaggttcgactcctcggaccgctccgcctggtatatggggccggtgtctcgccaggaggcgcagacccggctccagggccagcgccacggtatgttcctcgtccgcgattcttccacctgccctggggactatgtgctgtcggtgtccgagaactcgcgggtctcccactacatcatcaactcgctgcccaaccgccgttttaagatcggggaccaggaatttgaccatttgccggccctgctggagttttacaagatccactacctggacaccaccaccctcatcgagcctgcgcccaggtatccaagcccaccaatgggatctgtctcagcacccaacctgcctacagcagaagataacctggaatatgtacggactctgtatgattttcctgggaatgatgccgaagacctgccctttaaaaagggtgagatcctagtgataatagagaagcctgaagaacagtggtggagtgcccggaacaaggatggccgggttgggatgattcctgtcccttatgtcgaaaagcttgtgagatcctcaccacacggaaagcatggaaataggaattccaacagttatgggatcccagaacctgctcatgcatacgctcaacctcagaccacaactcctctacctgcagtttccggttctcctggggcagcaatcacccctttgccatccacacagaatggacctgtctttgcgaaagcaatccagaaaagagtaccctgtgcttatgacaagactgccttggcattagaggttggtgacatcgtgaaagtcacaaggatgaatataaatggccagtgggaaggcgaagtgaacgggcgcaaagggcttttcccctttacgcacgtcaaaatctttgaccctcaaaacccagatgaaaacgagtgattgctgttgccctgtttcctgctgctttgttgttctgcctgtcctagtctcctttgaagtgggaaagcattttctctcataggcaagtcacactgcattgccgaagtccagctttctgcagactggcagtcgcacacacatttggaatgcacacagcggctgcctcctgatgtttgtatcatagtcgtattgtcaaagagtagccgattttagagttcttttggatcataaactggaaatactgatggaagcacacaagtggagagaagttgacgtggaaagggtcttccttctcattgctgcccgtttgtacatgggactgattctgtcgtgttcaccagagaaagcttgaggccatggcgagatactgcatgtttgctgttccacaaagcagtggcttagctgccatcttgcttttctttggacaacaggaagtgaaccttaaggaagagagaattctgttctaaaactccaaaatctggctttttttttttctttggtttgggttgggtttgggaaaactaattaattagacttgtgtgggggttttttttgttttgttttgtttgttttgttttgtttttttgagacggtgtctcgctgcatcacccaggctggagtgcagtggcgcaatctcgccttcctgcagtctccgcctcctgagttcaagcgattctcctgcctcagcctcccaagttagctgggactgcaggcgcgcacaccacgcccagctaattttggtatttttagtagagacggggtttcatcatgttgaccaggctggtctcaaactcctgacttcaggtgatccacccgccttcagcctcccaacgtgctgggattacagccgtgagccgccgcgcctggcctagacttgtgtgttctaaacaggttaagtagcaggttgggtttttatgatagtgcaaggaatgactcatgcctctgagcttctaaactgaagctgctgtaactaaaggaatctgaaaagaacaaccctgaagcagaggcctttattgtcttggttgccagtagtaccttgttttgccatgtagcagacaacacacaaaataatgcagttgtggtgtgccatgctatgtgcacagccccttggattactttgttttaaaaagcatcagagttgggggtactttagggaaacctttgcttaccttgttttgccagtgataagagcagtgggttggagggcacttggccagttttctgttcagcttttcagtgaatgtacccctttaaggttcagacttaaacttccttaaaaagtggcgttgttcatagaatcgttggactcattaatgaatcgttcaactccactcactgaagcccagacctccgtgcccaggcccaatctcgtcaggctgccagagaaagttggtgctgctcatactggtctcacagtctaatacctaagactaatgctttctgtggacaccactgagctctgcctcaactccaccctctgcgaccggaggactatgcccctagtaactgctgtcggtgtggacgctgtgctggttctgttttctaaaggagcagaaggacaggtctctgagacaggatcgttgtccctacaggaggaacagtggccttgcttcttagacggtcttcactgtgtgttttaaaacaacaacaacaacaacaacaacataaaactcttttgacctgtaacttaaagatcataaacttcaggcaataatattttctgtgtaagcttttaaaattatttttggggatcatagcttgttttattttgtgctataaaattaacagtattaaatgacttatattcttagaata

SEQ ID NO: 298460 - DNA, 2091 bp, Homo sapiens
ggccgccgggagccggggcccagcgcgtgcgcagacggagcgcgctgagcggagggggaggtggctgccgcttctcccgcgtccgccattttgttgctgtggctattgggaacaagctgggcaaaagcaccccggaggcgcgacgctccttcgagttcggtgcctcgtgtgacggcgggggtcggtgaagacccgtcgagctgcggcgccggcgcgttccaggccgggagtcactggaggcacccctgggacgccgagcagcccgagaaccccggggtggcctccgctgcggctcgggtttgcctgccccgaccccccggctctgccgtgcattcccgggcggctctctccgtgtggcggccccggagcaggcgggcggcgtcggaggatgctgcgggcccggagccgagaggaaagtgctggcccagccctctgagcgctcctcgaggtgtgcgagaggcccttcctcggccccaaagccgtctgccgggctaaggcgtgcagagcaggcgaggacagccgccgcccctaccgccgcagagtccccggtccaacaccatgtcctccgccaggttcgactcctcggaccgctccgcctggtatatggggccggtgtctcgccaggaggcgcagacccggctccagggccagcgccacggtatgttcctcgtccgcgattcttccacctgccctggggactatgtgctgtcggtgtccgagaactcgcgggtctcccactacatcatcaactcgctgcccaaccgccgttttaagatcggggaccaggaatttgaccatttgccggccctgctggagttttacaagatccactacctggacaccaccaccctcatcgagcctgcgcccaggtatccaagcccaccaatgggatctgtctcagcacccaacctgcctacagcagaagataacctggaatatgtacggactctgtatgattttcctgggaatgatgccgaagacctgccctttaaaaagggtgagatcctagtgataatagagaagcctgaagaacagtggtggagtgcccggaacaaggatggccgggttgggatgattcctgtcccttatgtcgaaaagcttgtgagatcctcaccacacggaaagcatggaaataggaattccaacagttatgggatcccagaacctgctcatgcatacgctcaacctcagaccacaactcctctacctgcagtttccggttctcctggggcagcaatcacccctttgccatccacacagaatggacctgtctttgcgaaagcaatccagaaaagagtaccctgtgcttatgacaagactgccttggcattagaggttggtgacatcgtgaaagtcacaaggatgaatataaatggccagtgggaaggcgaagtgaacgggcgcaaagggcttttcccctttacgcacgtcaaaatctttgaccctcaaaacccagatgaaaacgagtgattgctgttgccctgtttcctgctgctttgttgttctgcctgtcctagtctcctttgaagtgggaaagcattttctctcatagtacctaagactaatgctttctgtggacaccactgagctctgcctcaactccaccctctgcgaccggaggactatgcccctagtaactgctgtcggtgtggacgctgtgctggttctgttttctaaaggagcagaaggacaggtctctgagacaggatcgttgtccctacaggaggaacagtggccttgcttcttagacggtcttcactgtgtgttttaaaacaacaacaacaacaacaacaacataaaactcttttgacctgtaacttaaagatcataaacttcaggcaataatattttctgtgtaagcttttaaaattatttttggggatcatagcttgttttattttgtgctataaaattaacagtattaaatgacttatattcttagaatacatcgagtgtcttttcttaacagattagtgcctttttatttttgtattccgttttacgttactggtcccagcatcaaaacccttgtttccatggcctgtttgtatattgtctcaataaaacttgcatcagccggtggtggcggca

SEQ ID NO: 298461 - DNA, 1355 bp, Homo sapiens
agctggtagtcttgacgtgagctagctggcatggcggcctgcattgcagcggggcactgggctgcaatgggcctaggccggagtttccaagccgccaggactctgctccccccgccggcctctatcgcctgcagggtccacgcggggcctgtccggcagcagagcactgggccttccgagcccggtgcgttccaaccgccgccgaaaccggtcatcgtggacaagcaccgccccgtggaaccggaacgcaggttcttgagtcctgaattcattcctcgaaggggaagaacagatcctctgaaatttcaaatagaaagaaaagatatgttagaaaggagaaaagtactccacattccagagttctatgttggaagtattcttcgtgttactacagctgacccatatgccagtggaaaaatcagccagtttctggggatttgcattcagagatcaggaagaggacttggagctactttcatccttaggaatgttatcgaaggacaaggtgtcgagatttgctttgaactttataatcctcgggtccaggagattcaggtggtcaaattagagaaacggctggatgatagcttgctatacttacgagatgcccttcctgaatatagcacttttgatgtgaatatgaagccagtagtacaagagcctaaccaaaaagttcctgttaatgagctgaaagtaaaaatgaagcctaagccctggtctaaacgctgggaacgtccaaattttaatattaaaggaatcagatttgatctttgtttaactgaacagcaaatgaaagaagctcagaagtggaatcagccatggcttgaatttgatatgatgagggaatatgatacttcaaaaattgaagctgcaatatggaaggaaattgaagcgtcgaaaaggtcttgattctgagaatgaatttggttagttgcagaagatacattggctctaagaggatatattttgagaccaatttaatttcatttataagaacatagtaattaagtgaactaagcattcattgttttattaatactttttttctaaaataaaacttgtacaccagtttattactctaaaaagagaattacacatgccaaatggaccaatgtccatttgcttattggaggcaaagctacaatagaagtcagagcatcaccagaatggtctttaatgagcatggaacctgagcaaagggaataggtgggatgaattttttttttaattgtgaaacaattcataagcacaatatgatttacagaataataaacattcatgtacccactatcaggttaagaaatagaacatttattaatatgtaggaatgttaagaaataaaacatttaataaga

SEQ ID NO: 298462 - DNA, 709 bp, Homo sapiens
agctggtagtcttgacgtgagctagctggcatggcggcctgcattgcagcggggcactgggctgcaatgggcctaggccggagtttccaagccgccaggactctgctccccccgccggcctctatcgcctgcagggtccacgcggggcctgtccggcagcagagcactgggccttccgagcccggtgcgttccaaccgccgccgaaaccggtcatcgtggacaagcaccgccccgtggaaccggaacgcaggttcttgagtcctgaattcattcctcgaaggggaagaacagatcctctgaaatttcaaatagaaagaaaagatatgttagaaaggagaaaagtactccacattccagagttctatgttggaagtattcttcgtgttactacagctgacccatatgccagtggaaaaatcagccagtttctggggatttgcattcagagatcaggaagaggacttggagctactttcatccttaggaatgttatcgaaggacaagggccagtgtatattcataatcctgaaagatggctgcctgggccatgagaacacaaatcagatcactgaacagagaaaagtaccttcgagattcaatctcttctaaaatccactgagttttttcatctactgagaagtttccacttgtggatgtctcatctttgcctgttaataaataaaattgacttcatactacaaattctca

SEQ ID NO: 298463 - DNA, 4191 bp, Homo sapiens
agctggtagtcttgacgtgagctagctggcatggcggcctgcattgcagcggggcactgggctgcaatgggcctaggccggagtttccaagccgccaggactctgctccccccgccggcctctatcgcctgcagggtccacgcggggcctgtccggcagcagagcactgggccttccgagcccggtgcgttccaaccgccgccgaaaccggtcatcgtggacaagcaccgccccgtggaaccggaacgcaggttcttgagtcctgaattcattcctcgaaggggaagaacagatcctctgaaatttcaaatagaaagaaaagatatgttagaaaggagaaaagtactccacattccagagttctatgttggaagtattcttcgtgttactacagctgacccatatgccagtggaaaaatcagccagtttctggggatttgcattcagagatcaggaagaggacttggagctactttcatccttaggaatgttatcgaaggacaaggtgtcgagatttgctttgaactttataatcctcgggtccaggagattcaggtggtcaaattagagaaacggctggatgatagcttgctatacttacgagatgcccttcctgaatatagcacttttgatgtgaatatgaagccagtagtacaagagcctaaccaaaaagttcctgttaatgagctgaaagtaaaaatgaagcctaagccctggtctaaacgctgggaacgtccaaattttaatattaaaggaatcagatttgatctttgtttaactgaacagcaaatgaaagaagctcagaagtggaatcagccatggcttgaatttgatatgatgagggaatatgatacttcaaaaattgaagctgcaatatggaaggaaattgaagcgtcgaaaaggtcttgattctgagaatgaatttggttagttgcagaagatacattggctctaagaggatatattttgagaccaatttaatttcatttataagaacatagtaattaagtgaactaagcattcattgttttattaatactttttttctaaaataaaacttgtacaccagtttattactctaaaaagagaattacacatgccaaatggaccaatgtccatttgcttattggaggcaaagctacaatagaagtcagagcatcaccagaatggtctttaatgagcatggaacctgagcaaagggaataggtgggatgaattttttttttaattgtgaaacaattcataagcacaatatgatttacagaataataaacattcatgtacccactatcaggttaagaaatagaacatttattaatatgtaggaatgttaagaaataaaacatttaataagatctcagaagactccagtaaatctgcaattgtatctctctcctttttaaatgtaaatatcatcttgacttgttaattattcccttgcatttcttttagtttactgccaacacatatattcttcaacaatatatttaattttgaaaaacctgaaaaaaaaaacctgttagcaagtataaaggggcagtattactattattgcatgaaggcttcaagggaaacgttacagtctttgggtcatagtctggcttcagcttcctctgagagtttacagaggccaattttgagcaaattcatggctaaggttatgagtgagttctgctaaacagaaggctcaccacaaggtatctggcaggattatactgggtagctggatgttgcagaaatgtggttagaggaagtaaactgttttttgatgctcacagcatgatgaatcaaactctgtatcttaggattaggttaaaacaatacctttggtatgatatgagtgttgttgctgatccatgcagcatggattggaaagctggggtataagcacacatgctaaagaaaaacatgtaatttggtccatactcacctggatatactgttcctcaggttaaaaaatacagtactatcctaaatcttgaaggcaactctcagcctatccattgagttaccttcagatctgccctctggttcctagctgtcttgggactaacttctttcctgcgctcagctgttttctggattccatgttttccattttattgagtactaacttgttttgctgcagcacatcctttggtagcttctagaggaagtttgtgtggaggtaaaatttttgagaccttgcatgtctcatgtttgattgatactttatacgtttaggtaggaggtaattttccttcaggactttaaaaatattgttgctccattttctttgtttctattgttgtattgagaaatccaatgccattttgatttccccatcataaatttcatgatgatgtgtcttggtgtgggtctatatttatccattgcattgggttttaggtgaacccttccagatagtaactcatttctgtcagttctgggaaacacttagcattggttgatgatttattctctgctgctttgttctcccaactattatttggatgttggatatccagcactgggtatctattttcttacctccctcccttgaccccagtctctgttttttagctctttagctcaatcttccaactctttgctattgtattttaaaatcttaagaccccttcttgatttgtagaagttccttttcttacaaccaaaaagcctttatctatggatttgttcacagataaggggtattcaatatagtgtatttttttttcatttaaaattgtttgcgcatctatttcctccaaatttctttctgtatttattttttgttgtctatatttcagacttttccaggatatctgataatctttggctgtcttcttatggttgaaagagggactaaaaagcttggaaagcctttgggttgtgggaaggggctgtctttaggattatctgaatgggcttttttgggagtcccctcctccacatgaatattttggttttgtcagattccctagaatagaggcttccaatctccttcctggaggggtctgtccaggaaggagattgtctaggggtctgtcagacagcagctttcagctacttccttgatctttttcactaatgattatatagtcatctaactactgtcaacaagtaatagatatcctatccttcacttgtttagattatttgctgagataacctctcaaaagaacctctcaaaataaaaggttaacaagagcctatatcttatatttttcttctctttatcttgttagaagatagctattaaaacctgttctttttctgtcttgataaacacacttcaatcttggtagaatggtagatgggacagtatattttaggacctaaagctctgcaaatgtatgatcagcttgtaagtacaggtgctcaaaaacatgtaaacaatcatgctttttactctgtaggaatatctttaaaattcttgtgaatttttccccagaagtaaagcaaatcttcccccagaaataaaattaaatgtgcataatctaaagcttttttttcttattgtggtaggatatatatataaaacataatttgccattgtaaacattttaaatttacaagtcagaggcattaattacatcacaatgttgtgaaattattactactatttccaaaattttctcatcaccccaaactgaaactctgtaactgttgagcaataacctcattcctgtatctctcccaaccccaggtaacctcaaatctttctttttatctttgagacaaggtctcattctatcactcaggtaggagtgcagtggtgtgatcatagctcattgcagcctcaaaatcctgggctcaagcaatcctccttgagtagctaagactataggcacacattaactgcgcctggctgattttgttttttgtagagatgtggtcttgctatgtttcccatgctggtcttgagttcctggcctcaagcagtccttaagattcatccatgttgtggcatgtgtcagaatttcatttgtttttatgactaaataatattccattgtatgtatatacattttgttcatccatcttctgatgaacactgggatatgtctaccttttggctattgtgaataatgctgcagtaaacattgacataacaagtatgtatttgattaccaattcagttcccctcaatatcattttgaatttctcacctgttttaaatcaattcatttctacatgaagattatcagt

SEQ ID NO: 298464 - DNA, 1441 bp, Homo sapiens
ggcttccctcagagtgaagcaaaggaagtaagaactatcatagtcagtgcatttgtgtttttattttatttttttaaatttatttattttttcgagatggagtcttgctctgtcgcccaggctggcatgctagtggcgcgatctcggctcactgccacctccgcctcctaggttcaagtgattctcctgcctcagcctcctaagtagctgggattacaggggtccacgcggggcctgtccggcagcagagcactgggccttccgagcccggtgcgttccaaccgccgccgaaaccggtcatcgtggacaagcaccgccccgtggaaccggaacgcaggttcttgagtcctgaattcattcctcgaaggggaagaacagatcctctgaaatttcaaatagaaagaaaagatatgttagaaaggagaaaagtactccacattccagagttctatgttggaagtattcttcgtgttactacagctgacccatatgccagtggaaaaatcagccagtttctggggatttgcattcagagatcaggaagaggacttggagctactttcatccttaggaatgttatcgaaggacaaggtgtcgagatttgctttgaactttataatcctcgggtccaggagattcaggtggtcaaattagagaaacggctggatgatagcttgctatacttacgagatgcccttcctgaatatagcacttttgatgtgaatatgaagccagtagtacaagagcctaaccaaaaagttcctgttaatgagctgaaagtaaaaatgaagcctaagccctggtctaaacgctgggaacgtccaaattttaatattaaaggaatcagatttgatctttgtttaactgaacagcaaatgaaagaagctcagaagtggaatcagccatggcttgaatttgatatgatgagggaatatgatacttcaaaaattgaagctgcaatatggaaggaaattgaagcgtcgaaaaggtcttgattctgagaatgaatttggttagttgcagaagatacattggctctaagaggatatattttgagaccaatttaatttcatttataagaacatagtaattaagtgaactaagcattcattgttttattaatactttttttctaaaataaaacttgtacaccagtttattactctaaaaagagaattacacatgccaaatggaccaatgtccatttgcttattggaggcaaagctacaatagaagtcagagcatcaccagaatggtctttaatgagcatggaacctgagcaaagggaataggtgggatgaattttttttttaattgtgaaacaattcataagcacaatatgatttacagaataataaacattcatgtacccactatcaggttaagaaatagaacatttattaatatgtaggaatgttaagaaataaaacatttaataaga

SEQ ID NO: 298465 - DNA, 1301 bp, Homo sapiens
agctggtagtcttgacgtgagctagctggcatggcggcctgcattgcagcggggcactgggctgcaatgggcctaggccggagtttccaagccgccaggactctgctccccccgccggcctctatcgcctgcagggtccacgcggggcctgtccggcagcagagcactgggccttccgagcccggtgcgttccaaccgccgccgaaaccggtcatcgtggacaagcaccgccccgtggaaccggaacgcaggttcttgagtcctgaattcattcctcgaaggggaagaacagatcctctgaaatttcaaatagaaagaaaagatatgttagaaaggagaaaagtactccacattccagagttctatgttggaagtattcttcgtgttactacagctgacccatatgccattggagctactttcatccttaggaatgttatcgaaggacaaggtgtcgagatttgctttgaactttataatcctcgggtccaggagattcaggtggtcaaattagagaaacggctggatgatagcttgctatacttacgagatgcccttcctgaatatagcacttttgatgtgaatatgaagccagtagtacaagagcctaaccaaaaagttcctgttaatgagctgaaagtaaaaatgaagcctaagccctggtctaaacgctgggaacgtccaaattttaatattaaaggaatcagatttgatctttgtttaactgaacagcaaatgaaagaagctcagaagtggaatcagccatggcttgaatttgatatgatgagggaatatgatacttcaaaaattgaagctgcaatatggaaggaaattgaagcgtcgaaaaggtcttgattctgagaatgaatttggttagttgcagaagatacattggctctaagaggatatattttgagaccaatttaatttcatttataagaacatagtaattaagtgaactaagcattcattgttttattaatactttttttctaaaataaaacttgtacaccagtttattactctaaaaagagaattacacatgccaaatggaccaatgtccatttgcttattggaggcaaagctacaatagaagtcagagcatcaccagaatggtctttaatgagcatggaacctgagcaaagggaataggtgggatgaattttttttttaattgtgaaacaattcataagcacaatatgatttacagaataataaacattcatgtacccactatcaggttaagaaatagaacatttattaatatgtaggaatgttaagaaataaaacatttaataaga

SEQ ID NO: 298466 - DNA, 898 bp, Homo sapiens
gcgcgccagtttcaggatgcagggtctagggaggagctgcaatcgtgtctggggccccagcccaggctggccggagctcctgtttccgctgctctgctgcctgcccggggtaccaacatggcccagaagcgtcctgcctgcaccctgaagcctgagtgtgtccagcagctgctggtttgctcccaggaggccaagaagtcagcctactgcccctacagtcactttcctgtgggggctgccctgctcacccaggaggggagaatcttcaaagggtgcaacatagaaaatgcctgctacccgctgggcatctgtgctgaacggaccgctatccagaaggccgtctcagaagggtacaaggatttcagggcaattgctatcgccagtgacatgcaagatgattttatctctccatgtggggcctgcaggcaagtcatgagagagtttggcaccaactggcccgtgtacatgaccaagccggatggtacgtatattgtcatgacggtccaggagctgctgccctcctcctttgggcctgaggacctgcagaagacccagtgacagccagagaatgcccactgcctgtaacagccacctggagaacttcataaagatgtctcacagccctggggacacctgcccagtgggccccagccctacagggactgggcaaagatgatgtttccagattacactccagcctgagtcagcacccctcctagcaacctgccttgggacttagaacaccgccgccccctgccccacctttcctttccttcctgtgggccctctttcaaagtccagcctagtctggactgcttccccatcagccttcccaaggttctatcctgttccgagcaacttttctaattataaacatcacagaacatcctggatcaaa

SEQ ID NO: 298467 - DNA, 961 bp, Homo sapiens
gtccaaaccatgggaggctcctctcctagaccctgcatcctgaaagctgcgtacctgagagcctgcggtctggctgcagggacacacccaggggaggagctgcaatcgtgtctggggccccagcccaggctggccggagctcctgtttccgctgctctgctgcctgcccggggtaccaacatggcccagaagcgtcctgcctgcaccctgaagcctgagtgtgtccagcagctgctggtttgctcccaggaggccaagaagtcagcctactgcccctacagtcactttcctgtgggggctgccctgctcacccaggaggggagaatcttcaaagggtgcaacatagaaaatgcctgctacccgctgggcatctgtgctgaacggaccgctatccagaaggccgtctcagaagggtacaaggatttcagggcaattgctatcgccagtgacatgcaagatgattttatctctccatgtggggcctgcaggcaagtcatgagagagtttggcaccaactggcccgtgtacatgaccaagccggatggtacgtatattgtcatgacggtccaggagctgctgccctcctcctttgggcctgaggacctgcagaagacccagtgacagccagagaatgcccactgcctgtaacagccacctggagaacttcataaagatgtctcacagccctggggacacctgcccagtgggccccagccctacagggactgggcaaagatgatgtttccagattacactccagcctgagtcagcacccctcctagcaacctgccttgggacttagaacaccgccgccccctgccccacctttcctttccttcctgtgggccctctttcaaagtccagcctagtctggactgcttccccatcagccttcccaaggttctatcctgttccgagcaacttttctaattataaacatcacagaacatcctggatcaaa

SEQ ID NO: 298468 - DNA, 1069 bp, Homo sapiens
gtccaaaccatgggaggctcctctcctagaccctgcatcctgaaagctgcgtacctgagagcctgcggtctggctgcagggacacacccaggggaggagctgcaatcgtgtctggggccccagcccaggctggccggagctcctgtttccgctgctctgctgcctgcccggggtaccaacatggcccagaagcgtcctgcctgcaccctgaagcctgagtgtgtccagcagctgctggtttgctcccaggaggccaagaagtcagcctactgcccctacagtcactttcctgtgggggctgccctgctcacccaggaggggagaatcttcaaagggtgcaacatagaaaatgcctgctacccgctgggcatctgtgctgaacggaccgctatccagaaggccgtctcagaagggtacaaggatttcagggcaattgctatcgccagtgacatgcaagatgattttatctctccatgtggggcctgcaggcaagtcatgagagagtttggcaccaactggcccgtgtacatgaccaagccggatggtacgtatattgtcatgacggtccaggagctgctgccctcctcctttgggcctgaggacctgcagaagacccagtgacagccagagaatgcccactgcctgtaacagccacctggagaacttcataaagatgtctcacagccctggggacacctgcccagtgggccccagccctacagggactgggcaaagatgatgtttccagattacactccagcctgagtcagcacccctcctagcaacctgccttgggacttagaacaccgccgccccctgccccacctttcctttccttcctgtgggccctctttcaaagtccagcctagtctggactgcttccccatcagccttcccaaggttctatcctgttccgagcaacttttctaattataaacatcacagaacatcctggatcaaaaaaaaaggggggggtcaaaattcctcgaggggcagtacggtccgttttgaaagggccatggggggtaaaagggggggtaaagggggaaaggcgggttgggaccctggg

SEQ ID NO: 298469 - DNA, 1082 bp, Homo sapiens
gtccaaaccatgggaggctcctctcctagaccctgcatcctgaaagctgcgtacctgagagcctgcggtctggctgcagggacacacccaggggaggagctgcaatcgtgtctggggccccagcccaggctggccggagctcctgtttccgctgctctgctgcctgcccggggtaccaacatggcccagaagcgtcctgcctgcaccctgaagcctgagtgtgtccagcagctgctggtttgctcccaggaggccaagaagtcagcctactgcccctacagtcactttcctgtgggggctgccctgctcacccaggaggggagaatcttcaaaggcagggtctctctgctgcccatgctggaagtacagtggcgcgagcctagttcactgcagtctcaaacccctgagttcaagctatcctcctgtcttagcctcccaagtagctgggactacagggtgcaacatagaaaatgcctgctacccgctgggcatctgtgctgaacggaccgctatccagaaggccgtctcagaagggtacaaggatttcagggcaattgctatcgccagtgacatgcaagatgattttatctctccatgtggggcctgcaggcaagtcatgagagagtttggcaccaactggcccgtgtacatgaccaagccggatggtacgtatattgtcatgacggtccaggagctgctgccctcctcctttgggcctgaggacctgcagaagacccagtgacagccagagaatgcccactgcctgtaacagccacctggagaacttcataaagatgtctcacagccctggggacacctgcccagtgggccccagccctacagggactgggcaaagatgatgtttccagattacactccagcctgagtcagcacccctcctagcaacctgccttgggacttagaacaccgccgccccctgccccacctttcctttccttcctgtgggccctctttcaaagtccagcctagtctggactgcttccccatcagccttcccaaggttctatcctgttccgagcaacttttctaattataaacatcacagaacatcctggatcaaa

SEQ ID NO: 298470 - DNA, 836 bp, Homo sapiens
gcgcgccagtttcaggatgcagggtctagggaggagctgcaatcgtgtctggggccccagcccaggctggccggagctcctgtttccgctgctctgctgcctgcccggggtaccaacatggcccagaagcgtcctgcctgcaccctgaagcctgagtgtgtccagcagctgctggtttgctcccaggaggccaagaagtcagcctactgcccctacagtcactttcctgtgggggctgccctgctcacccaggaggggagaatcttcaaagaaggccgtctcagaagggtacaaggatttcagggcaattgctatcgccagtgacatgcaagatgattttatctctccatgtggggcctgcaggcaagtcatgagagagtttggcaccaactggcccgtgtacatgaccaagccggatggtacgtatattgtcatgacggtccaggagctgctgccctcctcctttgggcctgaggacctgcagaagacccagtgacagccagagaatgcccactgcctgtaacagccacctggagaacttcataaagatgtctcacagccctggggacacctgcccagtgggccccagccctacagggactgggcaaagatgatgtttccagattacactccagcctgagtcagcacccctcctagcaacctgccttgggacttagaacaccgccgccccctgccccacctttcctttccttcctgtgggccctctttcaaagtccagcctagtctggactgcttccccatcagccttcccaaggttctatcctgttccgagcaacttttctaattataaacatcacagaacatcctggatcaaa

SEQ ID NO: 298471 - DNA, 588 bp, Homo sapiens
  misc_feature (39)..(39): n is a, c, g, or t
cagaggcaccaaggagcgcagaggcaccaaggagccagnaggcaccaaggagggtacaaggatttcagggcaatgacatgcaagatgattttatctctccatgtggggcctgcaggcaagtcatgagagagtttggcaccaactggcccgtgtacatgaccaagccggatggtacgtatattgtcatgacggtccaggagctgctgccctcctcctttgggcctgaggacctgcagaagacccagtgacagccagagaatgcccactgcctgtaacagccacctggagaacttcataaagatgtctcacagccctggggacacctgcccagtgggccccagccctacagggactgggcaaagatgatgtttccagattacactccagcctgagtcagcacccctcctagcaacctgccttgggacttagaacaccgccgccccctgccccacctttcctttccttcctgtgggccctctttcaaagtccagcctagtctggactgcttccccatcagccttcccaaggttctatcctgttccgagcaacttttctaattataaacatcacagaacatcctggatcaaa

SEQ ID NO: 298472 - DNA, 840 bp, Homo sapiens
gcgcgccagtttcaggatgcagggtctagggaggagctgcaatcgtgtctggggccccagcccaggctggccggagctcctgtttccgctgctctgctgcctgcccggggtaccaacatggcccagaagcgtcctgcctgcaccctgaagcctgagtgtgtccagcagctgctggtttgctcccaggaggccaagaagtcagcctactgcccctacagtcactttcctgtgggggctgccctgctcacccaggaggggagaatcttcaaagggtgcaacatagaaaatgcctgctacccgctgggcatctgtgctgaacggaccgctatccagaaggccgtctcagaagggtacaaggatttcagggcaattgctatcgccagtttggcaccaactggcccgtgtacatgaccaagccggatggtacgtatattgtcatgacggtccaggagctgctgccctcctcctttgggcctgaggacctgcagaagacccagtgacagccagagaatgcccactgcctgtaacagccacctggagaacttcataaagatgtctcacagccctggggacacctgcccagtgggccccagccctacagggactgggcaaagatgatgtttccagattacactccagcctgagtcagcacccctcctagcaacctgccttgggacttagaacaccgccgccccctgccccacctttcctttccttcctgtgggccctctttcaaagtccagcctagtctggactgcttccccatcagccttcccaaggttctatcctgttccgagcaacttttctaattataaacatcacagaacatcctggatcaaa

SEQ ID NO: 298473 - DNA, 510 bp, Homo sapiens
  misc_feature (27)..(27): n is a, c, g, or t
cggagtgaagagggaaggtgtaagggnaagaacagacaacgctatcttggacctttggcaccaactggcccgtgtacatgaccaagccggatggtacgtatattgtcatgacggtccaggagctgctgccctcctcctttgggcctgaggacctgcagaagacccagtgacagccagagaatgcccactgcctgtaacagccacctggagaacttcataaagatgtctcacagccctggggacacctgcccagtgggccccagccctacagggactgggcaaagatgatgtttccagattacactccagcctgagtcagcacccctcctagcaacctgccttgggacttagaacaccgccgccccctgccccacctttcctttccttcctgtgggccctctttcaaagtccagcctagtctggactgcttccccatcagccttcccaaggttctatcctgttccgagcaacttttctaattataaacatcacagaacatcctggatcaaa

SEQ ID NO: 298474 - DNA, 558 bp, Homo sapiens
gcatccccagtaagcagggccctgcgtggcaggcaccacattggacaatcccacaggctttcccactagtgcagtgggccggtgacccaatcctgtttaatgaggtctggatctccggcccttgggagccaccgcattcctggatttgctccctccttggtgcctcttggctgctgccctcctcctttgggcctgaggacctgcagaagacccagtgacagccagagaatgcccactgcctgtaacagccacctggagaacttcataaagatgtctcacagccctggggacacctgcccagtgggccccagccctacagggactgggcaaagatgatgtttccagattacactccagcctgagtcagcacccctcctagcaacctgccttgggacttagaacaccgccgccccctgccccacctttcctttccttcctgtgggccctctttcaaagtccagcctagtctggactgcttccccatcagccttcccaaggttctatcctgttccgagcaacttttctaattataaacatcacagaacatcctggatcaaa

SEQ ID NO: 298475 - DNA, 385 bp, Homo sapiens
ccttgggagagactaatttgagtttgattctttgcttccctgacatgcaagatgattttatctctccatgtggggcctgcaggcaagtcatgagagaggtaagcagcttctcttgctgtctggaatgcaaatatcttccctgtcgcaggctatgggagccacgccaagttgcaggcatggcaggcatggcaggcgtggagacacagctactgtcctgtttgcttggttggctgacttctaaggcctccctacgcttgcatgagtcactggaaattattccttcatttaacaaatacttaccgagtgagtgtctgctttgtgccaggccctgaggtagctctggggaggcacagggaaaagatgggccaggccctgccctcacaga

SEQ ID NO: 298476 - DNA, 1011 bp, Homo sapiens
cgctacggctagtacgaggctgggtgttgagcaaatccagctgctgctgcggcggctgtggcggcggcagcggcggtgactgaggatagagagccacagcacgaggagctgccaggcctggacagccagtggcgccagatagaaaacggcgagagtgggcgagaacgtccactgcgggccggcgaaagctggttccttgtggagaagcactggtataagcagtgggaggcatacgtgcagggaggggaccaggactccagcaccttccctggctgcatcaacaatgccacactctttcaagatgagataaactggcgcctcaaggagggactggtggaaggcgaggattatgtgctgctcccagcagctgcttggcattacctggtcagctggtatggtctagagcatggccagccacccattgaacgcaaggtcatagagctgcccaacatccagaaggtcgaagtgtacccagtagaactgctgcttgtccggcacaatgatttgggcaaatctcacactgttcagttcagccataccgattctattggcctagtattgcgcacagctcgggagcggtttctggtggagccccaggaagacactcggctttgggccaagaactcagaaggctctttggataggttgtatgacacacacatcacggttctcgatgcggcccttgagactgggcagttgatcatcatggagacccgcaagaaaagatggcacttggcccagcgcacagctgcatgtcatgaacaacaacatgtcggaagaggatgaggacttcaagggtcagccaggcatctgtggcctcaccaatctgggcaacacgtgcttcatgaactcggccctgcagtgctcaacaatgtgccaaggttcaccgagtcttctcaaaatggtactcgggggtcaaatccgcgacccatggggttagggggatatggcaaggccttgccctgttgagtcggggtgctggcccagctgtctttgcccttgtttcacatc

SEQ ID NO: 298477 - DNA, 3239 bp, Homo sapiens
agaatccggaagtggctgttgaggggcgtcttccaatctcgcacagctgcgttggctgtagaagagaacggacggcgatggcgacggtcgcagcaaatccagctgctgctgcggcggctgtggcggcggcagcggcggtgactgaggatagagagccacagcacgaggagctgccaggcctggacagccagtggcgccagatagaaaacggcgagagtgggcgagaacgtccactgcgggccggcgaaagctggttccttgtggagaagcactggtataagcagtgggaggcatacgtgcagggaggggaccaggactccagcaccttccctggctgcatcaacaatgccacactctttcaagatgagataaactggcgcctcaaggagggactggtggaaggcgaggattatgtgctgctcccagcagctgcttggcattacctggtcagctggtatggtctagagcatggccagccacccattgaacgcaaggtcatagagctgcccaacatccagaaggtcgaagtgtacccagtagaactgctgcttgtccggcacaatgatttgggcaaatctcacactgttcagttcagccataccgattctattggcctagtattgcgcacagctcgggagcggtttctggtggagccccaggaagacactcggctttgggccaagaactcagaaggctctttggataggttgtatgacacacacatcacggttctcgatgcggcccttgagactgggcagttgatcatcatggagacccgcaagaaaagatggcacttggcccagcgcacagctgcatgtcatgaacaacaacatgtcggaagaggatgaggacttcaagggtcagccaggcatctgtggcctcaccaatctgggcaacacgtgcttcatgaactcggccctgcagtgcctcagcaatgtgccacagctcaccgagtacttcctcaacaactgctacctggaggagctcaacttccgcaacccactgggcatgaagggtgagatcgcagaggcctatgcagacctggtgaagcaggcgtggtctggccaccaccgctccattgtgccacatgtgttcaagaacaaggttggccattttgcatcccaatttctgggctaccagcagcatgactctcaggagctgctgtcattcctcctggacgggctgcatgaggaccttaatcgggtgaagaagaaggagtatgtggagctgtgcgatgctgctgggcgaccggatcaggaggtggcacaggaggcatggcaaaaccacaaacggcggaacgattctgtgatcgtggacactttccacggcctcttcaagtccacgctggtgtgccccgattgtggcaatgtatctgtgaccttcgaccccttctgctacctcagtgttccactgcctatcagccacaagagggtcttggaggtcttctttatccccatggatccgcgccgcaagccagagcagcaccggctcgtggtccccaagaaaggcaagatctcggatctatgtgtggctctgtccaaacacacgggcatctcgccagagaggatgatggtggctgatgtcttcagtcaccgcttctataagctctatcagctagaggagcctctgagcagcatcttggaccgtgatgatatcttcgtctatgaggtgtcaggtcgcattgaggccattgagggctcaagagaggacatcgtggttcctgtctacctgcgggagcgcacccctgcccgtgactacaacaactcctactacggcctgatgctttttggacaccccctcctggtatcagtgccccgggaccgcttcacctgggagggcctgtataacgtcctgatgtaccggctctcacgctacgtgaccaaacccaactcagatgatgaggacgatggggatgagaaagaagatgacgaggaggataaagatgacgtccctgggccctcaactgggggcagcctccgagaccctgagccagagcaggctgggcccagctctggagtcacgaacaggtgcccgttcctcctggacaattgccttggcacatctcagtggcccccaaggcgacgacgcaagcagctgttcaccctgcagacggtgaactccaatgggaccagcgaccgcacaacctcccctgaagaagtccatgcccagccgtacattgctatcgactgggagccagagatgaagaagcgttactatgacgaggtagaggctgagggctacgtgaagcatgactgcgtcgggtacgtgatgaagaaggctcccgtgcggctgcaggagtgcattgagctcttcaccactgtggagaccctggagaaggaaaacccctggtactgcccttcctgcaagcagcaccagctggcaaccaagaagctggacctgtggatgctgccggagattctcatcatccacctgaaacgcttttcctacaccaagttctcccgagagaagctggacaccctcgtggagtttcctatccgggacctggacttctctgagtttgtcatccagccacagaatgagtcgaatccggagctgtacaaatatgacctcatcgcggtttccaaccattatgggggcatgcgtgatggacactacacaacatttgcctgcaacaaggacagcggccagtggcactactttgatgacaacagcgtctcccctgtcaatgagaatcagatcgagtccaaggcagcctatgtcctcttctaccaacgccaggacgtggcgcgacgcctgctgtccccggccggctcatctggcgccccagcctcccctgcctgcagctccccacccagctctgagttcatggatgttaattgagagccctgggtcctgccacagaaaaaaaaaaaaaaaagccctctctgcaatctcgcttctcgtgtccgccccgcttctcttattcgtgttaggtgcccccgccaggcattgcaggcttagtcgtggctactgttctcctgtgccgctgcatcgctctctcccgggaaagaacaggtcgtgtctcctcctagcagtgcgcgccccgcctgtgtttgcccttccagcagtgaccctcccttctagtctttatttatggtcgtgcccttccctctcctcagcccagagtgttctgcgtgggtggtgatgggggttcacctgaacacagagtgtattttcttattgaggccctgtaccttctgctgtgtgtgtgtatatataaagcaccagtctgctcccca

SEQ ID NO: 298478 - DNA, 3548 bp, Homo sapiens
  misc_feature (3548)..(3548): n is a, c, g, or t
agaatccggaagtggctgttgaggggcgtcttccaatctcgcacagctgcgttggctgtagaagagaacggacggcgatggcgacggtcgcagcaaatccagctgctgctgcggcggctgtggcggcggcagcggcggtgactgaggatagagagccacagcacgaggagctgccaggcctggacagccagtggcgccagatagaaaacggcgagagtgggcgagaacgtccactgcgggccggcgaaagctggttccttgtggagaagcactggtataagcagtgggaggcatacgtgcagggaggggaccaggactccagcaccttccctggctgcatcaacaatgccacactctttcaagatgagataaactggcgcctcaaggagggactggtggaaggcgaggattatgtgctgctcccagcagctgcttggcattacctggtcagctggtatggtctagagcatggccagccacccattgaacgcaaggtcatagagctgcccaacatccagaaggtcgaagtgtacccagtagaactgctgcttgtccggcacaatgatttgggcaaatctcacactgttcagttcagccataccgattctattggcctagtattgcgcacagctcgggagcggtttctggtggagccccaggaagacactcggctttgggccaagaactcagaaggctctttggataggttgtatgacacacacatcacggttctcgatgcggcccttgagactgggcagttgatcatcatggagacccgcaagaaaagatggcacttggcccagcgcacagctgcatgtcatgaacaacaacatgtcggaagaggatgaggacttcaagggtcagccaggcatctgtggcctcaccaatctgggcaacacgtgcttcatgaactcggccctgcagtgcctcagcaatgtgccacagctcaccgagtacttcctcaacaactgctacctggaggagctcaacttccgcaacccactgggcatgaagggtgagatcgcagaggcctatgcagacctggtgaagcaggcgtggtctggccaccaccgctccattgtgccacatgtgttcaagaacaaggttggccattttgcatcccaatttctgggctaccagcagcatgactctcaggagctgctgtcattcctcctggacgggctgcatgaggaccttaatcgggtgaagaagaaggagtatgtggagctgtgcgatgctgctgggcgaccggatcaggaggtggcacaggaggcatggcaaaaccacaaacggcggaacgattctgtgatcgtggacactttccacggcctcttcaagtccacgctggtgtgccccgattgtggcaatgtatctgtgaccttcgaccccttctgctacctcagtgttccactgcctatcagccacaagagggtcttggaggtcttctttatccccatggatccgcgccgcaagccagagcagcaccggctcgtggtccccaagaaaggcaagatctcggatctatgtgtggctctgtccaaacacacgggcatctcgccagagaggatgatggtggctgatgtcttcagtcaccgcttctataagctctatcagctagaggagcctctgagcagcatcttggaccgtgatgatatcttcgtctatgaggtgtcaggtcgcattgaggccattgagggctcaagagaggacatcgtggttcctgtctacctgcgggagcgcacccctgcccgtgactacaacaactcctactacggcctgatgctttttggacaccccctcctggtatcagtgccccgggaccgcttcacctgggagggcctgtataacgtcctgatgtaccggctctcacgctacgtgaccaaacccaactcagatgatgaggacgatggggatgagaaagaagatgacgaggaggataaagatgacgtccctgggccctcaactgggggcagcctccgagaccctgagccagagcaggctgggcccagctctggagtcacgaacaggtgcccgttcctcctggacaattgccttggcacatctcagtggcccccaaggcgacgacgcaagcagctgttcaccctgcagacggtgaactccaatgggaccagcgaccgcacaacctcccctgaagaagtccatgcccagccgtacattgctatcgactgggagccagagatgaagaagcgttactatgacgaggtagaggctgagggctacgtgaagcatgactgcgtcgggtacgtgatgaagaaggctcccgtgcggctgcaggagtgcattgagctcttcaccactgtggagaccctggagaaggaaaacccctggtactgcccttcctgcaagcagcaccagctggcaaccaagaagctggacctgtggatgctgccggagattctcatcatccacctgaaacgcttttcctacaccaagttctcccgagagaagctggacaccctcgtggagtttcctatccgggacctggacttctctgagtttgtcatccagccacagaatgagtcgaatccggagctgtacaaatatgacctcatcgcggtttccaaccattatgggggcatgcgtgatggacactacacaacatttgcctgcaacaaggacagcggccagtggcactactttgatgacaacagcgtctcccctgtcaatgagaatcagatcgagtccaaggcagcctatgtcctcttctaccaacgccaggacgtggcgcgacgcctgctgtccccggccggctcatctggcgccccagcctcccctgcctgcagctccccacccagctctgagttcatggatgttaattgagagccctgggtcctgccacagaaaaaaaaaaaaaaaagccctctctgcaatctcgcttctcgtgtccgccccgcttctcttattcgtgttaggtgcccccgccaggcattgcaggcttagtcgtggctactgttctcctgtgccgctgcatcgctctctcccgggaaagaacaggtcgtgtctcctcctagcagtgcgcgccccgcctgtgtttgcccttccagcagtgaccctcccttctagtctttatttatggtcgtgcccttccctctcctcagcccagagtgttctgcgtgggtggtgatgggggttcacctgaacacagagtgtattttcttattgaggccctgtaccttctgctgtgtgtgtgtatatataaagcaccagtctgctccccaaaaaacaaaaataaaagaaacaacaagacacaccacaaaacacaaacgaacaaaaaaaaagtacaggcgagcgacaattatcagagcggcggcgcgtcacaaaaagacagagtgataacaaaaagacgaggcaacgacgagggacaccacgcaggtgacaacacgacaaccaccaggacgttactagcggtacaacaagacggtggagcagaacacctcggaggcccccaccaataaagtggagagcacacaaaagaccaacacgaaagccgaccggggaaccccgccaaataaaaatcactgaggaan

SEQ ID NO: 298479 - DNA, 3965 bp, Homo sapiens
agaatccggaagtggctgttgaggggcgtcttccaatctcgcacagctgcgttggctgtagaagagaacggacggcgatggcgacggtcgcagcaaatccagctgctgctgcggcggctgtggcggcggcagcggcggtgactgaggatagagagccacagcacgaggagctgccaggcctggacagccagtggcgccagatagaaaacggcgagagtgggcgagaacgtccactgcgggccggcgaaagctggttccttgtggagaagcactggtataagcagtgggaggcatacgtgcagggaggggaccaggactccagcaccttccctggctgcatcaacaatgccacactctttcaagatgagataaactggcgcctcaaggagggactggtggaaggcgaggattatgtgctgctcccagcagctgcttggcattacctggtcagctggtatggtctagagcatggccagccacccattgaacgcaaggtcatagagctgcccaacatccagaaggtcgaagtgtacccagtagaactgctgcttgtccggcacaatgatttgggcaaatctcacactgttcagttcagccataccgattctattggcctagtattgcgcacagctcgggagcggtttctggtggagccccaggaagacactcggctttgggccaagaactcagaaggctctttggataggttgtatgacacacacatcacggttctcgatgcggcccttgagactgggcagttgatcatcatggagacccgcaagaaaagatggcacttggcccagcgcacagctgcatgtcatgaacaacaacatgtcggaagaggatgaggacttcaagggtcagccaggcatctgtggcctcaccaatctgggcaacacgtgcttcatgaactcggccctgcagtgcctcagcaatgtgccacagctcaccgagtacttcctcaacaactgctacctggaggagctcaacttccgcaacccactgggcatgaagggtgagatcgcagaggcctatgcagacctggtgaagcaggcgtggtctggccaccaccgctccattgtgccacatgtgttcaagaacaaggttggccattttgcatcccaatttctgggctaccagcagcatgactctcaggagctgctgtcattcctcctggacgggctgcatgaggaccttaatcgggtgaagaagaaggagtatgtggagctgtgcgatgctgctgggcgaccggatcaggaggtggcacaggaggcatggcaaaaccacaaacggcggaacgattctgtgatcgtggacactttccacggcctcttcaagtccacgctggtgtgccccgattgtggcaatgtatctgtgaccttcgaccccttctgctacctcagtgttccactgcctatcagccacaagagggtcttggaggtcttctttatccccatggatccgcgccgcaagccagagcagcaccggctcgtggtccccaagaaaggcaagatctcggatctatgtgtggctctgtccaaacacacgggcatctcgccagagaggatgatggtggctgatgtcttcagtcaccgcttctataagctctatcagctagaggagcctctgagcagcatcttggaccgtgatgatatcttcgtctatgaggtgtcaggtcgcattgaggccattgagggctcaagagaggacatcgtggttcctgtctacctgcgggagcgcacccctgcccgtgactacaacaactcctactacggcctgatgctttttggacaccccctcctggtatcagtgccccgggaccgcttcacctgggagggcctgtataacgtcctgatgtaccggctctcacgctacgtgaccaaacccaactcagatgatgaggacgatggggatgagaaagaagatgacgaggaggataaagatgacgtccctgggccctcaactgggggcagcctccgagaccctgagccagagcaggctgggcccagctctggagtcacgaacaggtgcccgttcctcctggacaattgccttggcacatctcagtggcccccaaggcgacgacgcaagcagctgttcaccctgcagacggtgaactccaatgggaccagcgaccgcacaacctcccctgaagaagtccatgcccagccgtacattgctatcgactgggagccagagatgaagaagcgttactatgacgaggtagaggctgagggctacgtgaagcatgactgcgtcgggtacgtgatgaagaaggctcccgtgcggctgcaggagtgcattgagctcttcaccactgtggagaccctggagaaggaaaacccctggtactgcccttcctgcaagcagcaccagctggcaaccaagaagctggacctgtggatgctgccggagattctcatcatccacctgaaacgcttttcctacaccaagttctcccgagagaagctggacaccctcgtggagtttcctatccgggacctggacttctctgagtttgtcatccagccacagaatgagtcgaatccggagctgtacaaatatgacctcatcgcggtttccaaccattatgggggcatgcgtgatggacactacacaacatttgcctgcaacaaggacagcggccagtggcactactttgatgacaacagcgtctcccctgtcaatgagaatcagatcgagtccaaggcagcctatgtcctcttctaccaacgccaggacgtggcgcgacgcctgctgtccccggccggctcatctggcgccccagcctcccctgcctgcagctccccacccagctctgagttcatggatgttaattgagagccctgggtcctgccacagaaaaaaaaaaaaaaaagccctctctgcaatctcgcttctcgtgtccgccccgcttctcttattcgtgttaggtgcccccgccaggcattgcaggcttagtcgtggctactgttctcctgtgccgctgcatcgctctctcccgggaaagaacaggtcgtgtctcctcctagcagtgcgcgccccgcctgtgtttgcccttccagcagtgaccctcccttctagtctttatttatggtcgtgcccttccctctcctcagcccagagtgttctgcgtgggtggtgatgggggttcacctgaacacagagtgtattttcttattgaggccctgtaccttctgctgtgtgtgtgtatatataaagcaccagtctgctccccaaaaaaaaaaaaaaaaaaaaaaaaaaaaaaaaaaaaaaaaaaaaaaaaaaaaaaaaaaaaaaaaaaaaaaaaaaaaaaaaaaaaaaaaaaaaaaaaaaaaaaaaagggacacaaaaaagcataaaccacaacagaacgaaagaacaaagacgaacgacactgcccgcgacgacagcacgaacatagacaggtcgagagatagaagagcaagcaaggcgccggaagcaaaacaagcgccaccgcgcatagccaaccgcagaacacgcgacaataatacgacagcatcatgatggctcagacaagagagacgaacgagaatgaagcgccagccgcgcccgcggcagagaaactcgtagccgaagagagtcgccacaacagagatcgacgagtaggacgacgcaacactcaaccgcatgtacacgcacggagaaggaacgatacgacgacaaacacaacacagcaacaagaaactaccggacccaccacccagcggcagacggaaagaaggcagcccgcacgccacgaaacgaagacaagcacgaagacaggaagagacacaaaaaaaatgggagagaaaaccgcgcagaggtactcagacacacccggacacactgcaggagaaggtaccacacaaccaacacggaccaagacaccagagagcagacaaagcaacaaaggagcgtgcggataccccgaaggaatgcacgccaccagcggaacacgctcc

SEQ ID NO: 298480 - DNA, 3142 bp, Homo sapiens
agaatccggaagtggctgttgaggggcgtcttccaatctcgcacagctgcgttggctgtagaagagaacggacggcgatggcgacggtcgcagcaaatccagctgctgctgcggcggctgtggcggcggcagcggcggtgactgaggatagagagccacagcacgaggagctgccaggcctggacagccagtggcgccagatagaaaacggcgagagtgggcgagaacgtccactgcgggccggcgaaagctggttccttgtggagaagcactggtataagcagtgggaggcatacgtgcagggaggggaccaggactccagcaccttccctggctgcatcaacaatgccacactctttcaagatgagataaactggcgcctcaaggagggactggtggaaggcgaggattatgtgctgctcccagcagctgcttggcattacctggtcagctggtatggtctagagcatggccagccacccattgaacgcaaggtcatagagctgcccaacatccagaaggtcgaagtgtacccagtagaactgctgcttgtccggcacaatgatttgggcaaatctcacactgttcagttcagccataccgattctattggcctagtattgcgcacagctcgggagcggtttctggtggagccccaggaagacactcggctttgggccaagaactcagaaggctctttggataggttgtatgacacacacatcacggttctcgatgcggcccttgagactgggcagttgatcatcatggagacccgcaagaaaagatggcacttggcccagcgcacagctgcatgtcatgaacaacaacatgtcggaagaggatgaggacttcaagggtcagccaggcatctgtggcctcaccaatctgggcaacacgtgcttcatgaactcggccctgcagtgcctcagcaatgtgccacagctcaccgagtacttcctcaacaactgctacctggaggagctcaacttccgcaacccactgggcatgaagggtgagatcgcagaggcctatgcagacctggtgaagcaggcgtggtctggccaccaccgctccattgtgccacatgtgttcaagaacaaggttggccattttgcatcccaatttctgggctaccagcagcatgactctcaggagctgctgtcattcctcctggacgggctgcatgaggaccttaatcgggtgaagaagaaggagtatgtggagctgtgcgatgctgctgggcgaccggatcaggaggtggcacaggaggcatggcaaaaccacaaacggcggaacgattctgtgatcgtggacactttccacggcctcttcaagtccacgctggtgtgccccgattgtggcaatgtatctgtgaccttcgaccccttctgctacctcagtgttccactgcctatcagccacaagagggtcttggaggtcttctttatccccatggatccgcgccgcaagccagagcagcaccggctcgtggtccccaagaaaggcaagatctcggatctatgtgtggctctgtccaaacacacgggcatctcgccagagaggatgatggtggctgatgtcttcagtcaccgcttctataagctctatcagctagaggagcctctgagcagcatcttggaccgtgatgatatcttcgtctatgaggtgtcaggtcgcattgaggccattgagggctcaagagaggacatcgtggttcctgtctacctgcgggagcgcacccctgcccgtgactacaacaactcctactacggcctgatgctttttggacaccccctcctggtatcagtgccccgggaccgcttcacctgggagggcctgtataacgtcctgatgtaccggctctcacgctacgtgaccaaacccaactcagatgatgaggacgatggggatgagaaagaagatgacgaggaggataaagatgacgtccctgggccctcaactgggggcagcctccgagaccctgagccagagcaggctgggcccagctctggagtcacgaacaggtgcccgttcctcctggacaattgccttggcacatctcagtggcccccaaggcgacgacgcaagcagctgttcaccctgcagacggtgaactccaatgggaccagcgaccgcacaacctcccctgaagaagtccatgcccagccgtacattgctatcgactgggagccagagatgaagaagcgttactatgacgaggtagaggctgagggctacgtgaagcatgactgcgtcgggtacgtgatgaagaaggctcccgtgcggctgcaggagtgcattgagctcttcaccactgtggagaccctggagaaggaaaacccctggtactgcccttcctgcaagcagcaccagctggcaaccaagaagctggacctgtggatgctgccggagattctcatcatccacctgaaacgcttttcctacaccaagttctcccgagagaagctggacaccctcgtggagtttcctatccgggacctggacttctctgagtttgtcatccagccacagaatgagtcgaatccggagctgtacaaatatgacctcatcgcggtttccaaccattatgggggcatgcgtgatggacactacacaacatttgcctgcaacaaggacagcggccagtggcactactttgatgacaacagcgtctcccctgtcaatgagaatcagatcgagtccaaggcagcctatgtcctcttctaccaacgccaggacgtggcgcgacgcctgctgtccccggccggctcatctggcgccccagcctcccctgcctgcagctccccacccagctctgagttcatggatgttaattgagagccctgggtcctgccacagaaaaaaaaaaaaaaaagccctctctgcaatctcgcttctcgtgtccgccccgcttcgtcgtgtctcctcctagcagtgcgcgccccgcctgtgtttgcccttccagcagtgaccctcccttctagtctttatttatggtcgtgcccttccctctcctcagcccagagtgttctgcgtgggtggtgatgggggttcacctgaacacagagtgtattttcttattgaggccctgtaccttctgctgtgtgtgtgtatatataaagcaccagtctgctcccca

SEQ ID NO: 298481 - DNA, 3371 bp, Homo sapiens
agaatccggaagtggctgttgaggggcgtcttccaatctcgcacagctgcgttggctgtagaagagaacggacggcgatggcgacggtcgcagcaaatccagctgctgctgcggcggctgtggcggcggcagcggcggtgactgaggatagagagccacagcacgaggagctgccaggcctggacagccagtggcgccagatagaaaacggcgagagtgggcgagaacgtccactgcgggccggcgaaagctggttccttgtggagaagcactggtataagcagtgggaggcatacgtgcagggaggggaccaggactccagcaccttccctggctgcatcaacaatgccacactctttcaagatgagataaactggcgcctcaaggagggactggtggaaggcgaggattatgtgctgctcccagcagctgcttggcattacctggtcagctggtatggtctagagcatggccagccacccattgaacgcaaggtcatagagctgcccaacatccagaaggtcgaagtgtacccagtagaactgctgcttgtccggcacaatgatttgggcaaatctcacactgttcagttcagccataccgattctattggcctagtattgcgcacagctcgggagcggtttctggtggagccccaggaagacactcggctttgggccaagaactcagaaggctctttggataggttgtatgacacacacatcacggttctcgatgcggcccttgagactgggcagttgatcatcatggagacccgcaagaaaagatggcacttggcccagcgcacagctgcatgtcatgaacaacaacatgtcggaagaggatgaggacttcaagggtcagccaggcatctgtggcctcaccaatctgggcaacacgtgcttcatgaactcggccctgcagtgcctcagcaatgtgccacagctcaccgagtacttcctcaacaactgctacctggaggagctcaacttccgcaacccactgggcatgaagggtgagatcgcagaggcctatgcagacctggtgaagcaggcgtggtctggccaccaccgctccattgtgccacatgtgttcaagaacaaggttggccattttgcatcccaatttctgggctaccagcagcatgactctcaggagctgctgtcattcctcctggacgggctgcatgaggaccttaatcgggtgaagaagaaggagtatgtggagctgtgcgatgctgctgggcgaccggatcaggaggtggcacaggaggcatggcaaaaccacaaacggcggaacgattctgtgatcgtggacactttccacggcctcttcaagtccacgctggtgtgccccgattgtggcaatgtatctgtgaccttcgaccccttctgctacctcagtgttccactgcctatcagccacaagagggtcttggaggtcttctttatccccatggatccgcgccgcaagccagagcaggtgtggggcagtgggggcctggggagatgatgatggacacatagagtttgattagctgccatagctcaaggcttcttgcattaactcaccacaagcccttttggtcttttgtggataccgtttttcccttagcaccggctcgtggtccccaagaaaggcaagatctcggatctatgtgtggctctgtccaaacacacgggcatctcgccagagaggatgatggtggctgatgtcttcagtcaccgcttctataagctctatcagctagaggagcctctgagcagcatcttggaccgtgatgatatcttcgtctatgaggtgtcaggtcgcattgaggccattgagggctcaagagaggacatcgtggttcctgtctacctgcgggagcgcacccctgcccgtgactacaacaactcctactacggcctgatgctttttggacaccccctcctggtatcagtgccccgggaccgcttcacctgggagggcctgtataacgtcctgatgtaccggctctcacgctacgtgaccaaacccaactcagatgatgaggacgatggggatgagaaagaagatgacgaggaggataaagatgacgtccctgggccctcaactgggggcagcctccgagaccctgagccagagcaggctgggcccagctctggagtcacgaacaggtgcccgttcctcctggacaattgccttggcacatctcagtggcccccaaggcgacgacgcaagcagctgttcaccctgcagacggtgaactccaatgggaccagcgaccgcacaacctcccctgaagaagtccatgcccagccgtacattgctatcgactgggagccagagatgaagaagcgttactatgacgaggtagaggctgagggctacgtgaagcatgactgcgtcgggtacgtgatgaagaaggctcccgtgcggctgcaggagtgcattgagctcttcaccactgtggagaccctggagaaggaaaacccctggtactgcccttcctgcaagcagcaccagctggcaaccaagaagctggacctgtggatgctgccggagattctcatcatccacctgaaacgcttttcctacaccaagttctcccgagagaagctggacaccctcgtggagtttcctatccgggacctggacttctctgagtttgtcatccagccacagaatgagtcgaatccggagctgtacaaatatgacctcatcgcggtttccaaccattatgggggcatgcgtgatggacactacacaacatttgcctgcaacaaggacagcggccagtggcactactttgatgacaacagcgtctcccctgtcaatgagaatcagatcgagtccaaggcagcctatgtcctcttctaccaacgccaggacgtggcgcgacgcctgctgtccccggccggctcatctggcgccccagcctcccctgcctgcagctccccacccagctctgagttcatggatgttaattgagagccctgggtcctgccacagaaaaaaaaaaaaaaaagccctctctgcaatctcgcttctcgtgtccgccccgcttctcttattcgtgttaggtgcccccgccaggcattgcaggcttagtcgtggctactgttctcctgtgccgctgcatcgctctctcccgggaaagaacaggtcgtgtctcctcctagcagtgcgcgccccgcctgtgtttgcccttccagcagtgaccctcccttctagtctttatttatggtcgtgcccttccctctcctcagcccagagtgttctgcgtgggtggtgatgggggttcacctgaacacagagtgtattttcttattgaggccctgtaccttctgctgtgtgtgtgtatatataaagcaccagtctgctcccca

SEQ ID NO: 298482 - DNA, 3177 bp, Homo sapiens
cgctacggctagtacgaggctgggtgttgagcaaatccagctgctgctgcggcggctgtggcggcggcagcggcggtgactgaggatagagagccacagcacgaggagctgccaggcctggacagccagtggcgccagatagaaaacggcgagagtgggcgagaacgtccactgcgggccggcgaaagctggttccttgtggagaagcactggtataagcagtgggaggcatacgtgcagggaggggaccaggactccagcaccttccctggctgcatcaacaatgccacactctttcaagatgagataaactggcgcctcaaggagggactggtggaaggcgaggattatgtgctgctcccagcagctgcttggcattacctggtcagctggtatggtctagagcatggccagccacccattgaacgcaaggtcatagagctgcccaacatccagaaggtcgaagtgtacccagtagaactgctgcttgtccggcacaatgatttgggcaaatctcacactgttcagttcagccataccgattctattggcctagtattgcgcacagctcgggagcggtttctggtggagccccaggaagacactcggctttgggccaagaactcagaaggctctttggataggttgtatgacacacacatcacggttctcgatgcggcccttgagactgggcagttgatcatcatggagacccgcaagaaaagatggcacttggcccagcgcacagctgcatgtcatgaacaacaacatgtcggaagaggatgaggacttcaagggtcagccaggcatctgtggcctcaccaatctgggcaacacgtgcttcatgaactcggccctgcagtgcctcagcaatgtgccacagctcaccgagtacttcctcaacaactgctacctggaggagctcaacttccgcaacccactgggcatgaagggtgagatcgcagaggcctatgcagacctggtgaagcaggcgtggtctggccaccaccgctccattgtgccacatgtgttcaagaacaaggttggccattttgcatcccaatttctgggctaccagcagcatgactctcaggagctgctgtcattcctcctggacgggctgcatgaggaccttaatcgggtgaagaagaaggagtatgtggagctgtgcgatgctgctgggcgaccggatcaggaggtggcacaggaggcatggcaaaaccacaaacggcggaacgattctgtgatcgtggacactttccacggcctcttcaagtccacgctggtgtgccccgattgtggcaatgtatctgtgaccttcgaccccttctgctacctcagtgttccactgcctatcagccacaagagggtcttggaggtcttctttatccccatggatccgcgccgcaagccagagcagcaccggctcgtggtccccaagaaaggcaagatctcggatctatgtgtggctctgtccaaacacacgggcatctcgccagagaggatgatggtggctgatgtcttcagtcaccgcttctataagctctatcagctagaggagcctctgagcagcatcttggaccgtgatgatatcttcgtctatgaggtgtcaggtcgcattgaggccattgagggctcaagagaggacatcgtggttcctgtctacctgcgggagcgcacccctgcccgtgactacaacaactcctactacggcctgatgctttttggacaccccctcctggtatcagtgccccgggaccgcttcacctgggagggcctgtataacgtcctgatgtaccggctctcacgctacgtgaccaaacccaactcagatgatgaggacgatggggatgagaaagaagatgacgaggaggataaagatgacgtccctgggccctcaactgggggcagcctccgagaccctgagccagagcaggctgggcccagctctggagtcacgaacaggtgcccgttcctcctggacaattgccttggcacatctcagtggcccccaaggcgacgacgcaagcagctgttcaccctgcagacggtgaactccaatgggaccagcgaccgcacaacctcccctgaagaagtccatgcccagccgtacattgctatcgactgggagccagagatgaagaagcgttactatgacgaggtagaggctgagggctacgtgaagcatgactgcgtcgggtacgtgatgaagaaggctcccgtgcggctgcaggagtgcattgagctcttcaccactgtggagaccctggagaaggaaaacccctggtactgcccttcctgcaagcagcaccagctggcaaccaagaagctggacctgtggatgctgccggagattctcatcatccacctgaaacgcttttcctacaccaagttctcccgagagaagctggacaccctcgtggagtttcctatccgggacctggacttctctgagtttgtcatccagccacagaatgagtcgaatccggagctgtacaaatatgacctcatcgcggtttccaaccattatgggggcatgcgtgatggacactacacaacatttgcctgcaacaaggacagcggccagtggcactactttgatgacaacagcgtctcccctgtcaatgagaatcagatcgagtccaaggcagcctatgtcctcttctaccaacgccaggacgtggcgcgacgcctgctgtccccggccggctcatctggcgccccagcctcccctgcctgcagctccccacccagctctgagttcatggatgttaattgagagccctgggtcctgccacagaaaaaaaaaaaaaaaagccctctctgcaatctcgcttctcgtgtccgccccgcttctcttattcgtgttaggtgcccccgccaggcattgcaggcttagtcgtggctactgttctcctgtgccgctgcatcgctctctcccgggaaagaacaggtcgtgtctcctcctagcagtgcgcgccccgcctgtgtttgcccttccagcagtgaccctcccttctagtctttatttatggtcgtgcccttccctctcctcagcccagagtgttctgcgtgggtggtgatgggggttcacctgaacacagagtgtattttcttattgaggccctgtaccttctgctgtgtgtgtgtatatataaagcaccagtctgctcccca

SEQ ID NO: 298483 - DNA, 3430 bp, Homo sapiens
agaatccggaagtggctgttgaggggcgtcttccaatctcgcacagctgcgttggctgtagaagagaacggacggcgatggcgacggtcgcagcaaatccagctgctgctgcggcggctgtggcggcggcagcggcggtgactgaggatagagagccacagcacgaggagctgccaggcctggacagccagtggcgccagatagaaaacggcgagagtgggcgagaacgtccactgcgggccggcgaaagctggttccttgtggagaagcactggtataagcagtgggaggcatacgtgcagggaggggaccaggactccagcaccttccctggctgcatcaacaatgccacactctttcaagatgagataaactggcgcctcaaggagggactggtggaaggcgaggattatgtgctgctcccagcagctgcttggcattacctggtcagctggtatggtctagagcatggccagccacccattgaacgcaaggtcatagagctgcccaacatccagaaggtcgaagtgtacccagtagaactgctgcttgtccggcacaatgatttgggcaaatctcacactgttcagttcagccataccgattctattggcctagtattgcgcacagctcgggagcggtttctggtggagccccaggaagacactcggctttgggccaagaactcagaaggctctttggataggttgtatgacacacacatcacggttctcgatgcggcccttgagactgggcagttgatcatcatggagacccgcaagaaaagatggcacttggcccagcgcacagctgcatgtcatgaacaacaacatgtcggaagaggatgaggacttcaagggtcagccaggcatctgtggcctcaccaatctgggcaacacgtgcttcatgaactcggccctgcagtgcctcagcaatgtgccacagctcaccgagtacttcctcaacaactgctacctggaggagctcaacttccgcaacccactgggcatgaagggtgagatcgcagaggcctatgcagacctggtgaagcaggcgtggtctggccaccaccgctccattgtgccacatgtgttcaagaacaaggttggccattttgcatcccaatttctgggctaccagcagcatgactctcaggagctgctgtcattcctcctggacgggctgcatgaggaccttaatcgggtgaagaagaaggagtatgtggagctgtgcgatgctgctgggcgaccggatcaggaggtggcacaggaggcatggcaaaaccacaaacggcggaacgattctgtgatcgtggacactttccacggcctcttcaagtccacgctggtgtgccccgattgtggcaatgtatctgtgaccttcgaccccttctgctacctcagtgttccactgcctatcagccacaagagggtcttggaggtcttctttatccccatggatccgcgccgcaagccagagcagcaccggctcgtggtccccaagaaaggcaagatctcggatctatgtgtggctctgtccaaacacacgggcatctcgccagagaggatgatggtggctgatgtcttcagtcaccgcttctataagctctatcagctagaggagcctctgagcagcatcttggaccgtgatgatatcttcgtctatgaggtgtcaggtcgcattgaggccattgagggctcaagagaggacatcgtggttcctgtctacctgcgggagcgcacccctgcccgtgactacaacaactcctactacggcctgatgctttttggacaccccctcctggtatcagtgccccgggaccgcttcacctgggagggcctgtataacgtcctgatgtaccggctctcacgctacgtgaccaaacccaactcagatgatgaggacgatggggatgagaaagaagatgacgaggaggataaagatgacgtccctgggccctcaactgggggcagcctccgagaccctgagccagagcaggctgggcccagctctggagtcacgaacaggtgcccgttcctcctggacaattgccttggcacatctcagtggcccccaaggcgacgacgcaagcagctgttcaccctgcagacggtgaactccaatgggaccagcgaccgcacaacctcccctgaagaagtccatgcccagccgtacattgctatcgactgggagccagagatgaagaagcgttactatgacgaggtagaggctgagggctacgtgaagcatgactgcgtcgggtacgtgatgaagaaggctcccgtgcggctgcaggagtgcattgagctcttcaccactgtggagaccctggagaaggaaaacccctggtactgcccttcctgcaagcagcaccagctggcaaccaagaagctggacctgtggatgctgccggagattctcatcatccacctgaaacgcttttcctacaccaagttctcccgagagaagctggacaccctcgtggagtttcctatccgggacctggacttctctgagtttgtcatccagccacagaatgagtcgaatccggagctgtacaaatatgacctcatcgcggtttccaaccattatgggggcatgcgtgatggacactgtatgtgccaggctgtgggtggggcctgccctgggggttctgggcaggggggcgatcaggaccttcccagtgagtgactagggatgtgagccagtggtgaggttatcgtggtgggaggagtgacaagagtgaatctggacacttctgagaggcaggaagggtaggcgaggataactctccttccctttcagacacaacatttgcctgcaacaaggacagcggccagtggcactactttgatgacaacagcgtctcccctgtcaatgagaatcagatcgagtccaaggcagcctatgtcctcttctaccaacgccaggacgtggcgcgacgcctgctgtccccggccggctcatctggcgccccagcctcccctgcctgcagctccccacccagctctgagttcatggatgttaattgagagccctgggtcctgccacagaaaaaaaaaaaaaaaagccctctctgcaatctcgcttctcgtgtccgccccgcttctcttattcgtgttaggtgcccccgccaggcattgcaggcttagtcgtggctactgttctcctgtgccgctgcatcgctctctcccgggaaagaacaggtcgtgtctcctcctagcagtgcgcgccccgcctgtgtttgcccttccagcagtgaccctcccttctagtctttatttatggtcgtgcccttccctctcctcagcccagagtgttctgcgtgggtggtgatgggggttcacctgaacacagagtgtattttcttattgaggccctgtaccttctgctgtgtgtgtgtatatataaagcaccagtctgctcccca

SEQ ID NO: 298484 - DNA, 3321 bp, Homo sapiens
agaatccggaagtggctgttgaggggcgtcttccaatctcgcacagctgcgttggctgtagaagagaacggacggcgatggcgacggtcgcagcaaatccagctgctgctgcggcggctgtggcggcggcagcggcggtgactgaggatagagagccacagcacgaggagctgccaggcctggacagccagtggcgccagatagaaaacggcgagagtgggcgagaacgtccactgcgggccggcgaaagctggttccttgtggagaagcactggtataagcagtgggaggcatacgtgcagggaggggaccaggactccagcaccttccctggctgcatcaacaatgccacactctttcaagatgagataaactggcgcctcaaggagggactggtggaaggcgaggattatgtgctgctcccagcagctgcttggcattacctggtcagctggtatggtctagagcatggccagccacccattgaacgcaaggtcatagagctgcccaacatccagaaggtcgaagtgtacccagtagaactgctgcttgtccggcacaatgatttgggcaaatctcacactgttcagttcagccataccgattctattggcctagtattgcgcacagctcgggagcggtttctggtggagccccaggaagacactcggctttgggccaagaactcagaaggctctttggataggttgtatgacacacacatcacggttctcgatgcggcccttgagactgggcagttgatcatcatggagacccgcaagaaaagatggcacttggcccagcgcacagctgcatgtcatgaacaacaacatgtcggaagaggatgaggacttcaagggtcagccaggcatctgtggcctcaccaatctgggcaacacgtgcttcatgaactcggccctgcagtgcctcagcaatgtgccacagctcaccgagtacttcctcaacaactgctacctggaggagctcaacttccgcaacccactgggcatgaagggtgagatcgcagaggcctatgcagacctggtgaagcaggcgtggtctggccaccaccgctccattgtgccacatgtgttcaagaacaaggttggccattttgcatcccaatttctgggctaccagcagcatgactctcaggagctgctgtcattcctcctggacgggctgcatgaggaccttaatcgggtgaagaagaaggagtatgtggagctgtgcgatgctgctgggcgaccggatcaggaggtggcacaggaggcatggcaaaaccacaaacggcggaacgattctgtgatcgtggacactttccacggcctcttcaagtccacgctggtgtgccccgattgtggcaatgtatctgtgaccttcgaccccttctgctacctcagtgttccactgcctatcagccacaagagggtcttggaggtcttctttatccccatggatccgcgccgcaagccagagcagcaccggctcgtggtccccaagaaaggcaagatctcggatctatgtgtggctctgtccaaacacacgggcatctcgccagagaggatgatggtggctgatgtcttcagtcaccgcttctataagctctatcagctagaggagcctctgagcagcatcttggaccgtgatgatatcttcgtctatgaggtgtcaggtcgcattgaggccattgagggctcaagagaggacatcgtggttcctgtctacctgcgggagcgcacccctgcccgtgactacaacaactcctactacggcctgatgctttttggacaccccctcctggtatcagtgccccgggaccgcttcacctgggagggcctgtataacgtcctgatgtaccggctctcacgctacgtgaccaaacccaactcagatgatgaggacgatggggatgagaaagaagatgacgaggaggataaagatgacgtccctgggccctcaactgggggcagcctccgagaccctgagccagagcaggctgggcccagctctggagtcacgaacaggtgcccgttcctcctggacaattgccttggcacatctcagtggcccccaaggcgacgacgcaagcagctgttcaccctgcagacggtgaactccaatgggaccagcgaccgcacaacctcccctgaagaagtccatgcccagccgtacattgctatcgactgggagccagagatgaagaagcgttactatgacgaggtagaggctgagggctacgtgaagcatgactgcgtcgggtacgtgatgaagaaggctcccgtgcggctgcaggagtgcattgagctcttcaccactgtggagaccctggagaaggaaaacccctggtactgcccttcctgcaagcagcaccagctggcaaccaagaagctggacctgtggatgctgccggagattctcatcatccacctgaaacgcttttcctacaccaagttctcccgagagaagctggacaccctcgtggagtttcctatccggtcaggggccagggagaggatggctgggggaaggcagggaaaggagggggtgtaccagtattaaccctctccccacccacagggacctggacttctctgagtttgtcatccagccacagaatgagtcgaatccggagctgtacaaatatgacctcatcgcggtttccaaccattatgggggcatgcgtgatggacactacacaacatttgcctgcaacaaggacagcggccagtggcactactttgatgacaacagcgtctcccctgtcaatgagaatcagatcgagtccaaggcagcctatgtcctcttctaccaacgccaggacgtggcgcgacgcctgctgtccccggccggctcatctggcgccccagcctcccctgcctgcagctccccacccagctctgagttcatggatgttaattgagagccctgggtcctgccacagaaaaaaaaaaaaaaaagccctctctgcaatctcgcttctcgtgtccgccccgcttctcttattcgtgttaggtgcccccgccaggcattgcaggcttagtcgtggctactgttctcctgtgccgctgcatcgctctctcccgggaaagaacaggtcgtgtctcctcctagcagtgcgcgccccgcctgtgtttgcccttccagcagtgaccctcccttctagtctttatttatggtcgtgcccttccctctcctcagcccagagtgttctgcgtgggtggtgatgggggttcacctgaacacagagtgtattttcttattgaggccctgtaccttctgctgtgtgtgtgtatatataaagcaccagtctgctcccca

SEQ ID NO: 298485 - DNA, 3512 bp, Homo sapiens
agaatccggaagtggctgttgaggggcgtcttccaatctcgcacagctgcgttggctgtagaagagaacggacggcgatggcgacggtcgcagcaaatccagctgctgctgcggcggctgtggcggcggcagcggcggtgactgaggatagagagccacagcacgaggagctgccaggcctggacagccagtggcgccagatagaaaacggcgagagtgggcgagaacgtccactgcgggccggcgaaagctggttccttgtggagaagcactggtataagcagtgggaggcatacgtgcagggaggggaccaggactccagcaccttccctggctgcatcaacaatgccacactctttcaagatgagataaactggcgcctcaaggagggactggtggaaggcgaggattatgtgctgctcccagcagctgcttggcattacctggtcagctggtatggtctagagcatggccagccacccattgaacgcaaggtcatagagctgcccaacatccagaaggtcgaagtgtacccagtagaactgctgcttgtccggcacaatgatttgggcaaatctcacactgttcagttcagccataccgattctattggcctagtattgcgcacagctcgggagcggtttctggtggagccccaggaagacactcggctttgggccaagaactcagaaggctctttggataggttgtatgacacacacatcacggttctcgatgcggcccttgagactgggcagttgatcatcatggagacccgcaagaaaagatggcacttggcccagcgcacagctgcatgtcatgaacaacaacatgtcggaagaggatgaggacttcaagggtcagccaggcatctgtggcctcaccaatctgggcaacacgtgcttcatgaactcggccctgcagtgcctcagcaatgtgccacagctcaccgagtacttcctcaacaactgctacctggaggagctcaacttccgcaacccactgggcatgaagggtgagatcgcagaggcctatgcagacctggtgaagcaggcgtggtctggccaccaccgctccattgtgccacatgtgttcaagaacaaggttggccattttgcatcccaatttctgggctaccagcagcatgactctcaggagctgctgtcattcctcctggacgggctgcatgaggaccttaatcgggtgaagaagaaggagtatgtggagctgtgcgatgctgctgggcgaccggatcaggaggtggcacaggaggcatggcaaaaccacaaacggcggaacgattctgtgatcgtggacactttccacggcctcttcaagtccacgctggtgtgccccgattgtggcaatgtatctgtgaccttcgaccccttctgctacctcagtgttccactgcctatcagccacaagagggtcttggaggtcttctttatccccatggatccgcgccgcaagccagagcagcaccggctcgtggtccccaagaaaggcaagatctcggatctatgtgtggctctgtccaaacacacgggcatctcgccagagaggatgatggtggctgatgtcttcagtcaccgcttctataagctctatcagctagaggagcctctgagcagcatcttggaccgtgatgatatcttcgtctatgaggtgtcaggtcgcattgaggccattgagggctcaagagaggacatcgtggttcctgtctacctgcgggagcgcacccctgcccgtgactacaacaactcctactacggcctgatgctttttggacaccccctcctggtatcagtgccccgggaccgcttcacctgggagggcctgtataacgtcctgatgtaccggctctcacgctacgtgaccaaacccaactcagatgatgaggacgatggggatgagaaagaagatgacgaggaggataaagatgacgtccctgggccctcaactgggggcagcctccgagaccctgagccagagcaggctgggcccagctctggagtcacgaacaggtgcccgttcctcctggacaattgccttggcacatctcagtggcccccaaggcgacgacgcaagcagctgttcaccctgcagacggtgaactccaatgggaccagcgaccgcacaacctcccctgaagaagtccatgcccagccgtacattgctatcgactgggagccagagatgaagaagcgttactatgacgaggtagaggctgagggctacgtgaagcatgactgcgtcgggtacgtgatgaagaaggctcccgtgcggctgcaggagtgcattgagctcttcaccactgtggagaccctggagaaggaaaacccctggtactgcccttcctgcaagcagcaccagctggcaaccaagaagctggacctgtggatgctgccggagattctcatcatccacctgaaacgcttttcctacaccaagttctcccgagagaagctggacaccctcgtggagtttcctatccggtcaggggccagggagaggatggctgggggaaggcagggaaaggagggggtgtaccagtattaaccctctccccacccacagggacctggacttctctgagtttgtcatccagccacagaatgagtcgaatccggagctgtacaaatatgacctcatcgcggtttccaaccattatgggggcatgcgtgatggacactgtatgtgccaggctgtgggtggggcctgccctgggggttctgggcaggggggcgatcaggaccttcccagtgagtgactagggatgtgagccagtggtgaggttatcgtggtgggaggagtgacaagagtgaatctggacacttctgagaggcaggaagggtaggcgaggataactctccttccctttcagacacaacatttgcctgcaacaaggacagcggccagtggcactactttgatgacaacagcgtctcccctgtcaatgagaatcagatcgagtccaaggcagcctatgtcctcttctaccaacgccaggacgtggcgcgacgcctgctgtccccggccggctcatctggcgccccagcctcccctgcctgcagctccccacccagctctgagttcatggatgttaattgagagccctgggtcctgccacagaaaaaaaaaaaaaaaagccctctctgcaatctcgcttctcgtgtccgccccgcttctcttattcgtgttaggtgcccccgccaggcattgcaggcttagtcgtggctactgttctcctgtgccgctgcatcgctctctcccgggaaagaacaggtcgtgtctcctcctagcagtgcgcgccccgcctgtgtttgcccttccagcagtgaccctcccttctagtctttatttatggtcgtgcccttccctctcctcagcccagagtgttctgcgtgggtggtgatgggggttcacctgaacacagagtgtattttcttattgaggccctgtaccttctgctgtgtgtgtgtatatataaagcaccagtctgctcccca

SEQ ID NO: 298486 - DNA, 2868 bp, Homo sapiens
  misc_feature (2868)..(2868): n is a, c, g, or t
agaatccggaagtggctgttgaggggcgtcttccaatctcgcacagctgcgttggctgtagaagagaacggacggcgatggcgacggtcgcagcaaatccagctgctgctgcggcggctgtggcggcggcagcggcggtgactgaggatagagagccacagcacgaggagctgccaggcctggacagccagtggcgccagatagaaaacggcgagagtgggcgagaacgtccactgcgggccggcgaaagctggttccttgtggagaagcactggtataagcagtgggaggcatacgtgcagggaggggaccaggactccagcaccttccctggctgcatcaacaatgccacactctttcaagatgagataaactggcgcctcaaggagggactggtggaaggcgaggattatgtgctgctcccagcagctgcttggcattacctggtcagctggtatggtctagagcatggccagccacccattgaacgcaaggtcatagagctgcccaacatccagaaggtcgaagtgtacccagtagaactgctgcttgtccggcacaatgatttgggcaaatctcacactgttcagttcagccataccgattctattggcctagtattgcgcacagctcgggagcggtttctggtggagccccaggaagacactcggctttgggccaagaactcagaaggctctttggataggttgtatgacacacacatcacggttctcgatgcggcccttgagactgggcagttgatcatcatggagacccgcaagaaaagatggcacttggcccagcgcacagctgcatgtcatgaacaacaacatgtcggaagaggatgaggacttcaagggtcagccaggcatctgtggcctcaccaatctgggcaacacgtgcttcatgaactcggccctgcagtgcctcagcaatgtgccacagctcaccgagtacttcctcaacaactgctacctggaggagctcaacttccgcaacccactgggcatgaagggtgagatcgcagaggcctatgcagacctggtgaagcaggcgtggtctggccaccaccgctccattgtgccacatgtgttcaagaacaaggttggccattttgcatcccaatttctgggctaccagcagcatgactctcaggagctgctgtcattcctcctggacgggctgcatgaggaccttaatcgggtgaagaagaaggagtatgtggagctgtgcgatgctgctgggcgaccggatcaggaggtggcacaggaggcatggcaaaaccacaaacggcggaacgattctgtgatcgtggacactttccacggcctcttcaagtccacgctggtgtgccccgattgtggcaatgtatctgtgaccttcgaccccttctgctacctcagtgttccactgcctatcagccacaagagggtcttggaggtcttctttatccccatggatccgcgccgcaagccagagcagcaccggctcgtggtccccaagaaaggcaagatctcggatctatgtgtggctctgtccaaacacacgggcatctcgccagagaggatgatggtggctgatgtcttcagtcaccgcttctataagctctatcagctagaggagcctctgagcagcatcttggaccgtgatgatatcttcgtctatgaggtgtcaggtcgcattgaggccattgagggctcaagagaggacatcgtggttcctgtctacctgcgggagcgcacccctgcccgtgactacaacaactcctactacggcctgatgctttttggacaccccctcctggtatcagtgccccgggaccgcttcacctgggagggcctgtataacgtcctgatgtaccggctctcacgctacgtgaccaaacccaactcagatgatgaggacgatggggatgagaaagaagatgacgaggaggataaagatgacgtccctgggccctcaactgggggcagcctccgagaccctgagccagagcaggctgggcccagctctggagtcacgaacaggtgcccgttcctcctggacaattgccttggcacatctcagtggcccccaaggcgacgacgcaagcagctgttcaccctgcagacggtgaactccaatgggaccagcgaccgcacaacctcccctgaagaagtccatgcccagccgtacattgctatcgactgggagccagagatgaagaagcgttactatgacgaggtagaggctgagggctacgtgaagcatgactgcgtcgggtacgtgatgaagaaggctcccgtgcggctgcaggagtgcattgagctcttcaccactgtggagaccctggagaaggaaaacccctggtactgcccttcctgcaagcagcaccagctggcaaccaagaagctggacctgtggatgctgccggagattctcatcatccacctgaaacgcttttcctacaccaagttctcccgagagaagctggacaccctcgtggagtttcctatccgggacctggacttctctgagtttgtcatccagccacagaatgagtcgaatccggagctgtacaaatatgacctcatcgcggtttccaaccattatgggggcatgcgtgatggacactacacaacatttgcctgcaacaaggacagcggccagtggcactactttgatgacaacagcgtctcccctgtcaatgagaatcagatcgagtccaaggcagcctatgtcctcttctaccaacgccaggacgtggcgcgacgcctgctgtccccggccggctcatctggcgccccagcctcccctgcctgcagctccccactaacctgaggtactgagcggtccttgtgctgtgtggtgtgcggtggtgggtgtggn

SEQ ID NO: 298487 - DNA, 2368 bp, Homo sapiens
agaatccggaagtggctgttgaggggcgtcttccaatctcgcacagctgcgttggctgtagaagagaacggacggcgatggcgacggtcgcagcaaatccagctgctgctgcggcggctgtggcggcggcagcggcggtgactgaggatagagagccacagcacgaggagctgccaggcctggacagccagtggcgccagatagaaaacggcgagagtgggcgagaacgtccactgcgggccggcgaaagctggttccttgtggagaagcactggtataagcagtgggaggcatacgtgcagggaggggaccaggactccagcaccttccctggctgcatcaacaatgccacactctttcaagatgagataaactggcgcctcaaggagggactggtggaaggcgaggattatgtgctgctcccagcagctgcttggcattacctggtcagctggtatggtctagagcatggccagccacccattgaacgcaaggtcatagagctgcccaacatccagaaggtcgaagtgtacccagtagaactgctgcttgtccggcacaatgatttgggcaaatctcacactgttcagttcagccataccgattctattggcctagtattgcgcacagctcgggagcggtttctggtggagccccaggaagacactcggctttgggccaagaactcagaaggctctttggataggttgtatgacacacacatcacggttctcgatgcggcccttgagactgggcagttgatcatcatggagacccgcaagaaaagatggcacttggcccagcgcacagctgcatgtcatgaacaacaacatgtcggaagaggatgaggacttcaagggtcagccaggcatctgtggcctcaccaatctgggcaacacgtgcttcatgaactcggccctgcagtgcctcagcaatgtgccacagctcaccgagtacttcctcaacaactgctacctggaggagctcaacttccgcaacccactgggcatgaagggtgagatcgcagaggcctatgcagacctggtgaagcaggcgtggtctggccaccaccgctccattgtgccacatgtgttcaagaacaaggttggccattttgcatcccaatttctgggctaccagcagcatgactctcaggagctgctgtcattcctcctggacgggctgcatgaggaccttaatcgggtgaagaagaaggagtatgtggagctgtgcgatgctgctgggcgaccggatcaggaggtggcacaggaggcatggcaaaaccacaaacggcggaacgattctgtgatcgtggacactttccacggcctcttcaagtccacgctggtgtgccccgattgtggcaatgtatctgtgaccttcgaccccttctgctacctcagtgttccactgcctatcagccacaagagggtcttggaggtcttctttatccccatggatccgcgccgcaagccagagcagcaccggctcgtggtccccaagaaaggcaagatctcggatctatgtgtggctctgtccaaacacacgggcatctcgccagagaggatgatggtggctgatgtcttcagtcaccgcttctataagctctatcagctagaggagcctctgagcagcatcttggaccgtgatgatatcttcgtctatgaggtgtcaggtcgcattgaggccattgagggctcaagagaggacatcgtggttcctgtctacctgcgggagcgcacccctgcccgtgactacaacaactcctactacggcctgatgctttttggacaccccctcctggtatcagtgccccgggaccgcttcacctgggagggcctgtataacgtcctgatgtaccggctctcacgctacgtgaccaaacccaactcagatgatgaggacgatggggatgagaaagaagatgacgaggaggataaagatgacgtccctgggccctcaactgggggcagcctccgagaccctgagccagagcaggctgggcccagctctggagtcacgaacaggtgcccgttcctcctggacaattgccttggcacatctcagtggcccccaaggcgacgacgcaagcagctgttcaccctgcagacggtgaactccaatgggaccagcgaccgcacaacctcccctgaagaagtccatgcccagccgtacattgctatcgactgggagccagagatgaagaagcgttactatgacgaggtagaggctgagggctacgtgaagcatgactgcgtcgggtacgtgatgaagaaggctcccgtgcggctgcaggagtgcattgagctcttcaccactgtggagaccctggagaaggaaaacccctggtgaggggccagagcggggc

SEQ ID NO: 298488 - DNA, 2591 bp, Homo sapiens
agaatccggaagtggctgttgaggggcgtcttccaatctcgcacagctgcgttggctgtagaagagaacggacggcgatggcgacggtcgcagcaaatccagctgctgctgcggcggctgtggcggcggcagcggcggtgactgaggatagagagccacagcacgaggagctgccaggcctggacagccagtggcgccagatagaaaacggcgagagtgggcgagaacgtccactgcgggccggcgaaagctggttccttgtggagaagcactggtataagcagtgggaggcatacgtgcagggaggggaccaggactccagcaccttccctggctgcatcaacaatgccacactctttcaagatgagataaactggcgcctcaaggagggactggtggaaggcgaggattatgtgctgctcccagcagctgcttggcattacctggtcagctggtatggtctagagcatggccagccacccattgaacgcaaggtcatagagctgcccaacatccagaaggtcgaagtgtacccagtagaactgctgcttgtccggcacaatgatttgggcaaatctcacactgttcagttcagccataccgattctattggcctagtattgcgcacagctcgggagcggtttctggtggagccccaggaagacactcggctttgggccaagaactcagaaggctctttggataggttgtatgacacacacatcacggttctcgatgcggcccttgagactgggcagttgatcatcatggagacccgcaagaaaagatggcacttggcccagcgcacagctgcatgtcatgaacaacaacatgtcggaagaggatgaggacttcaagggtcagccaggcatctgtggcctcaccaatctgggcaacacgtgcttcatgaactcggccctgcagtgcctcagcaatgtgccacagctcaccgagtacttcctcaacaactgctacctggaggagctcaacttccgcaacccactgggcatgaagggtgagatcgcagaggcctatgcagacctggtgaagcaggcgtggtctggccaccaccgctccattgtgccacatgtgttcaagaacaaggttggccattttgcatcccaatttctgggctaccagcagcatgactctcaggagctgctgtcattcctcctggacgggctgcatgaggaccttaatcgggtgaagaagaaggagtatgtggagctgtgcgatgctgctgggcgaccggatcaggaggtggcacaggaggcatggcaaaaccacaaacggcggaacgattctgtgatcgtggacactttccacggcctcttcaagtccacgctggtgtgccccgattgtggcaatgtatctgtgaccttcgaccccttctgctacctcagtgttccactgcctatcagccacaagagggtcttggaggtcttctttatccccatggatccgcgccgcaagccagagcagcaccggctcgtggtccccaagaaaggcaagatctcggatctatgtgtggctctgtccaaacacacgggcatctcgccagagaggatgatggtggctgatgtcttcagtcaccgcttctataagctctatcagctagaggagcctctgagcagcatcttggaccgtgatgatatcttcgtctatgaggtgtcaggtcgcattgaggccattgagggctcaagagaggacatcgtggttcctgtctacctgcgggagcgcacccctgcccgtgactacaacaactcctactacggcctgatgctttttggacaccccctcctggtatcagtgccccgggaccgcttcacctgggagggcctgtataacgtcctgatgtaccggctctcacgctacgtgaccaaacccaactcagatgatgaggacgatggggatgagaaagaagatgacgaggaggataaagatgacgtccctgggccctcaactgggggcagcctccgagaccctgagccagagcaggctgggcccagctctggagtcacgaacaggtgcccgttcctcctggacaattgccttggcacatctcagtggcccccaaggcgacgacgcaagcagctgttcaccctgcagacggtgaactccaatgggaccagcgaccgcacaacctcccctgaagaagtccatgccagctctgagttcatggatgttaattgagagccctgggtcctgccacagaaaaaaaaaaaaaaaagccctctctgcaatctcgcttctcgtgtccgccccgcttctcttattcgtgttaggtgcccccgccaggcattgcaggcttagtcgtggctactgttctcctgtgccgctgcatcgctctctcccgggaaagaacaggtcgtgtctcctcctagcagtgcgcgccccgcctgtgtttgcccttccagcagtgaccctcccttctagtctttatttatggtcgtgcccttccctctcctcagcccagagtgttctgcgtgggtggtgatgggggttcacctgaacacagagtgtattttcttattgaggccctgtaccttctgctgtgtgtgtgtatatataaagcaccagtctgctcccca

SEQ ID NO: 298489 - DNA, 3059 bp, Homo sapiens
gatgagaccagtttcggtcctggaggtggggccgggcctgcgtagtgaaactgcgtaggaacctgggaagaaggttccttgtggagaagcactggtataagcagtgggaggcatacgtgcagggaggggaccaggactccagcaccttccctggctgcatcaacaatgccacactctttcaagatgagataaactggcgcctcaaggagggactggtggaaggcgaggattatgtgctgctcccagcagctgcttggcattacctggtcagctggtatggtctagagcatggccagccacccattgaacgcaaggtcatagagctgcccaacatccagaaggtcgaagtgtacccagtagaactgctgcttgtccggcacaatgatttgggcaaatctcacactgttcagttcagccataccgattctattggcctagtattgcgcacagctcgggagcggtttctggtggagccccaggaagacactcggctttgggccaagaactcagaaggctctttggataggttgtatgacacacacatcacggttctcgatgcggcccttgagactgggcagttgatcatcatggagacccgcaagaaaagatggcacttggcccagcgcacagctgcatgtcatgaacaacaacatgtcggaagaggatgaggacttcaagggtcagccaggcatctgtggcctcaccaatctgggcaacacgtgcttcatgaactcggccctgcagtgcctcagcaatgtgccacagctcaccgagtacttcctcaacaactgctacctggaggagctcaacttccgcaacccactgggcatgaagggtgagatcgcagaggcctatgcagacctggtgaagcaggcgtggtctggccaccaccgctccattgtgccacatgtgttcaagaacaaggttggccattttgcatcccaatttctgggctaccagcagcatgactctcaggagctgctgtcattcctcctggacgggctgcatgaggaccttaatcgggtgaagaagaaggagtatgtggagctgtgcgatgctgctgggcgaccggatcaggaggtggcacaggaggcatggcaaaaccacaaacggcggaacgattctgtgatcgtggacactttccacggcctcttcaagtccacgctggtgtgccccgattgtggcaatgtatctgtgaccttcgaccccttctgctacctcagtgttccactgcctatcagccacaagagggtcttggaggtcttctttatccccatggatccgcgccgcaagccagagcagcaccggctcgtggtccccaagaaaggcaagatctcggatctatgtgtggctctgtccaaacacacgggcatctcgccagagaggatgatggtggctgatgtcttcagtcaccgcttctataagctctatcagctagaggagcctctgagcagcatcttggaccgtgatgatatcttcgtctatgaggtgtcaggtcgcattgaggccattgagggctcaagagaggacatcgtggttcctgtctacctgcgggagcgcacccctgcccgtgactacaacaactcctactacggcctgatgctttttggacaccccctcctggtatcagtgccccgggaccgcttcacctgggagggcctgtataacgtcctgatgtaccggctctcacgctacgtgaccaaacccaactcagatgatgaggacgatggggatgagaaagaagatgacgaggaggataaagatgacgtccctgggccctcaactgggggcagcctccgagaccctgagccagagcaggctgggcccagctctggagtcacgaacaggtgcccgttcctcctggacaattgccttggcacatctcagtggcccccaaggcgacgacgcaagcagctgttcaccctgcagacggtgaactccaatgggaccagcgaccgcacaacctcccctgaagaagtccatgcccagccgtacattgctatcgactgggagccagagatgaagaagcgttactatgacgaggtagaggctgagggctacgtgaagcatgactgcgtcgggtacgtgatgaagaaggctcccgtgcggctgcaggagtgcattgagctcttcaccactgtggagaccctggagaaggaaaacccctggtactgcccttcctgcaagcagcaccagctggcaaccaagaagctggacctgtggatgctgccggagattctcatcatccacctgaaacgcttttcctacaccaagttctcccgagagaagctggacaccctcgtggagtttcctatccgggacctggacttctctgagtttgtcatccagccacagaatgagtcgaatccggagctgtacaaatatgacctcatcgcggtttccaaccattatgggggcatgcgtgatggacactacacaacatttgcctgcaacaaggacagcggccagtggcactactttgatgacaacagcgtctcccctgtcaatgagaatcagatcgagtccaaggcagcctatgtcctcttctaccaacgccaggacgtggcgcgacgcctgctgtccccggccggctcatctggcgccccagcctcccctgcctgcagctccccacccagctctgagttcatggatgttaattgagagccctgggtcctgccacagaaaaaaaaaaaaaaaagccctctctgcaatctcgcttctcgtgtccgccccgcttctcttattcgtgttaggtgcccccgccaggcattgcaggcttagtcgtggctactgttctcctgtgccgctgcatcgctctctcccgggaaagaacaggtcgtgtctcctcctagcagtgcgcgccccgcctgtgtttgcccttccagcagtgaccctcccttctagtctttatttatggtcgtgcccttccctctcctcagcccagagtgttctgcgtgggtggtgatgggggttcacctgaacacagagtgtattttcttattgaggccctgtaccttctgctgtgtgtgtgtatatataaagcaccagtctgctcccca

SEQ ID NO: 298490 - DNA, 3410 bp, Homo sapiens
agaatccggaagtggctgttgaggggcgtcttccaatctcgcacagctgcgttggctgtagaagagaacggacggcgatggcgacggtcgcagcaaatccagctgctgctgcggcggctgtggcggcggcagcggcggtgactgaggatagagagccacagcacgaggagctgccaggcctggacagccagtggcgccagatagaaaacggcgagagtgggcgagaacgtccactgcgggccggcgaaagctggttccttgtggagaagcactggtataagcagtgggaggcatacgtgcagggaggggaccaggactccagcaccttccctggctgcatcaacaatgccacactctttcaaggtacaaggcctttgcctccttctcaccctagccctggagttcttgtcccttccgtccctacagatgatcataagcccattctgtgtgctaggtcactggtggggtggccagagtcattcgtcagtttcctttgttgattcttcctctgccacctccacccccgccccacagatgagataaactggcgcctcaaggagggactggtggaaggcgaggattatgtgctgctcccagcagctgcttggcattacctggtcagctggtatggtctagagcatggccagccacccattgaacgcaaggtcatagagctgcccaacatccagaaggtcgaagtgtacccagtagaactgctgcttgtccggcacaatgatttgggcaaatctcacactgttcagttcagccataccgattctattggcctagtattgcgcacagctcgggagcggtttctggtggagccccaggaagacactcggctttgggccaagaactcagaaggctctttggataggttgtatgacacacacatcacggttctcgatgcggcccttgagactgggcagttgatcatcatggagacccgcaagaaaagatggcacttggcccagcgcacagctgcatgtcatgaacaacaacatgtcggaagaggatgaggacttcaagggtcagccaggcatctgtggcctcaccaatctgggcaacacgtgcttcatgaactcggccctgcagtgcctcagcaatgtgccacagctcaccgagtacttcctcaacaactgctacctggaggagctcaacttccgcaacccactgggcatgaagggtgagatcgcagaggcctatgcagacctggtgaagcaggcgtggtctggccaccaccgctccattgtgccacatgtgttcaagaacaaggttggccattttgcatcccaatttctgggctaccagcagcatgactctcaggagctgctgtcattcctcctggacgggctgcatgaggaccttaatcgggtgaagaagaaggagtatgtggagctgtgcgatgctgctgggcgaccggatcaggaggtggcacaggaggcatggcaaaaccacaaacggcggaacgattctgtgatcgtggacactttccacggcctcttcaagtccacgctggtgtgccccgattgtggcaatgtatctgtgaccttcgaccccttctgctacctcagtgttccactgcctatcagccacaagagggtcttggaggtcttctttatccccatggatccgcgccgcaagccagagcagcaccggctcgtggtccccaagaaaggcaagatctcggatctatgtgtggctctgtccaaacacacgggcatctcgccagagaggatgatggtggctgatgtcttcagtcaccgcttctataagctctatcagctagaggagcctctgagcagcatcttggaccgtgatgatatcttcgtctatgaggtgtcaggtcgcattgaggccattgagggctcaagagaggacatcgtggttcctgtctacctgcgggagcgcacccctgcccgtgactacaacaactcctactacggcctgatgctttttggacaccccctcctggtatcagtgccccgggaccgcttcacctgggagggcctgtataacgtcctgatgtaccggctctcacgctacgtgaccaaacccaactcagatgatgaggacgatggggatgagaaagaagatgacgaggaggataaagatgacgtccctgggccctcaactgggggcagcctccgagaccctgagccagagcaggctgggcccagctctggagtcacgaacaggtgcccgttcctcctggacaattgccttggcacatctcagtggcccccaaggcgacgacgcaagcagctgttcaccctgcagacggtgaactccaatgggaccagcgaccgcacaacctcccctgaagaagtccatgcccagccgtacattgctatcgactgggagccagagatgaagaagcgttactatgacgaggtagaggctgagggctacgtgaagcatgactgcgtcgggtacgtgatgaagaaggctcccgtgcggctgcaggagtgcattgagctcttcaccactgtggagaccctggagaaggaaaacccctggtactgcccttcctgcaagcagcaccagctggcaaccaagaagctggacctgtggatgctgccggagattctcatcatccacctgaaacgcttttcctacaccaagttctcccgagagaagctggacaccctcgtggagtttcctatccgggacctggacttctctgagtttgtcatccagccacagaatgagtcgaatccggagctgtacaaatatgacctcatcgcggtttccaaccattatgggggcatgcgtgatggacactacacaacatttgcctgcaacaaggacagcggccagtggcactactttgatgacaacagcgtctcccctgtcaatgagaatcagatcgagtccaaggcagcctatgtcctcttctaccaacgccaggacgtggcgcgacgcctgctgtccccggccggctcatctggcgccccagcctcccctgcctgcagctccccacccagctctgagttcatggatgttaattgagagccctgggtcctgccacagaaaaaaaaaaaaaaaagccctctctgcaatctcgcttctcgtgtccgccccgcttctcttattcgtgttaggtgcccccgccaggcattgcaggcttagtcgtggctactgttctcctgtgccgctgcatcgctctctcccgggaaagaacaggtcgtgtctcctcctagcagtgcgcgccccgcctgtgtttgcccttccagcagtgaccctcccttctagtctttatttatggtcgtgcccttccctctcctcagcccagagtgttctgcgtgggtggtgatgggggttcacctgaacacagagtgtattttcttattgaggccctgtaccttctgctgtgtgtgtgtatatataaagcaccagtctgctcccca

SEQ ID NO: 298491 - DNA, 3100 bp, Homo sapiens
gaggggaggtggtgcctatgaggcagaaaatggcgcctgcgaataagcaaagtttatgacgcgccgtggtttttgattctggcggaagccttcccgagtcgagagaacgtgcaggttccttgtggagaagcactggtataagcagtgggaggcatacgtgcagggaggggaccaggactccagcaccttccctggctgcatcaacaatgccacactctttcaagatgagataaactggcgcctcaaggagggactggtggaaggcgaggattatgtgctgctcccagcagctgcttggcattacctggtcagctggtatggtctagagcatggccagccacccattgaacgcaaggtcatagagctgcccaacatccagaaggtcgaagtgtacccagtagaactgctgcttgtccggcacaatgatttgggcaaatctcacactgttcagttcagccataccgattctattggcctagtattgcgcacagctcgggagcggtttctggtggagccccaggaagacactcggctttgggccaagaactcagaaggctctttggataggttgtatgacacacacatcacggttctcgatgcggcccttgagactgggcagttgatcatcatggagacccgcaagaaaagatggcacttggcccagcgcacagctgcatgtcatgaacaacaacatgtcggaagaggatgaggacttcaagggtcagccaggcatctgtggcctcaccaatctgggcaacacgtgcttcatgaactcggccctgcagtgcctcagcaatgtgccacagctcaccgagtacttcctcaacaactgctacctggaggagctcaacttccgcaacccactgggcatgaagggtgagatcgcagaggcctatgcagacctggtgaagcaggcgtggtctggccaccaccgctccattgtgccacatgtgttcaagaacaaggttggccattttgcatcccaatttctgggctaccagcagcatgactctcaggagctgctgtcattcctcctggacgggctgcatgaggaccttaatcgggtgaagaagaaggagtatgtggagctgtgcgatgctgctgggcgaccggatcaggaggtggcacaggaggcatggcaaaaccacaaacggcggaacgattctgtgatcgtggacactttccacggcctcttcaagtccacgctggtgtgccccgattgtggcaatgtatctgtgaccttcgaccccttctgctacctcagtgttccactgcctatcagccacaagagggtcttggaggtcttctttatccccatggatccgcgccgcaagccagagcagcaccggctcgtggtccccaagaaaggcaagatctcggatctatgtgtggctctgtccaaacacacgggcatctcgccagagaggatgatggtggctgatgtcttcagtcaccgcttctataagctctatcagctagaggagcctctgagcagcatcttggaccgtgatgatatcttcgtctatgaggtgtcaggtcgcattgaggccattgagggctcaagagaggacatcgtggttcctgtctacctgcgggagcgcacccctgcccgtgactacaacaactcctactacggcctgatgctttttggacaccccctcctggtatcagtgccccgggaccgcttcacctgggagggcctgtataacgtcctgatgtaccggctctcacgctacgtgaccaaacccaactcagatgatgaggacgatggggatgagaaagaagatgacgaggaggataaagatgacgtccctgggccctcaactgggggcagcctccgagaccctgagccagagcaggctgggcccagctctggagtcacgaacaggtgcccgttcctcctggacaattgccttggcacatctcagtggcccccaaggcgacgacgcaagcagctgttcaccctgcagacggtgaactccaatgggaccagcgaccgcacaacctcccctgaagaagtccatgcccagccgtacattgctatcgactgggagccagagatgaagaagcgttactatgacgaggtagaggctgagggctacgtgaagcatgactgcgtcgggtacgtgatgaagaaggctcccgtgcggctgcaggagtgcattgagctcttcaccactgtggagaccctggagaaggaaaacccctggtactgcccttcctgcaagcagcaccagctggcaaccaagaagctggacctgtggatgctgccggagattctcatcatccacctgaaacgcttttcctacaccaagttctcccgagagaagctggacaccctcgtggagtttcctatccgggacctggacttctctgagtttgtcatccagccacagaatgagtcgaatccggagctgtacaaatatgacctcatcgcggtttccaaccattatgggggcatgcgtgatggacactacacaacatttgcctgcaacaaggacagcggccagtggcactactttgatgacaacagcgtctcccctgtcaatgagaatcagatcgagtccaaggcagcctatgtcctcttctaccaacgccaggacgtggcgcgacgcctgctgtccccggccggctcatctggcgccccagcctcccctgcctgcagctccccacccagctctgagttcatggatgttaattgagagccctgggtcctgccacagaaaaaaaaaaaaaaaagccctctctgcaatctcgcttctcgtgtccgccccgcttctcttattcgtgttaggtgcccccgccaggcattgcaggcttagtcgtggctactgttctcctgtgccgctgcatcgctctctcccgggaaagaacaggtcgtgtctcctcctagcagtgcgcgccccgcctgtgtttgcccttccagcagtgaccctcccttctagtctttatttatggtcgtgcccttccctctcctcagcccagagtgttctgcgtgggtggtgatgggggttcacctgaacacagagtgtattttcttattgaggccctgtaccttctgctgtgtgtgtgtatatataaagcaccagtctgctcccca

SEQ ID NO: 298492 - DNA, 3547 bp, Homo sapiens
agaatccggaagtggctgttgaggggcgtcttccaatctcgcacagctgcgttggctgtagaagagaacggacggcgatggcgacggtcgcagcaaatccagctgctgctgcggcggctgtggcggcggcagcggcggtgactgaggatagagagccacagcacgaggagctgccaggcctggacagccagtggcgccagatagaaaacggcgagagtgggcgagaacgtccactgcgggccggcgaaagctggttccttgtggagaagcactggtataagcagtgggaggcatacgtgcagggaggggaccaggactccagcaccttccctggctgcatcaacaatgccacactctttcaagatgagataaactggcgcctcaaggagggactggtggaaggcgaggattatgtgctgctcccagcagctgcttggcattacctggtcagctggtatggtctagagcatggccagccacccattgaacgcaaggtataatggatggggagggtgcatggcggggagtgcgtagtaagaaagccttgtaggcccagcatgggtacagatccatgtatgctgggtaggtacacatatgtctgctctcttccccctcctagctcatcatacaggtatctttgtctgctgtgtgtgttcccctgtgtggctctctttacagaccattgtatatgtgtgtttgtatgctatgtttgtaaggcagagtgtgtgctcctctcatttgagaggtcacagcgctgtgtctgtgtgagtacacctgtgtctgcacccctctactcttacaggtcatagagctgcccaacatccagaaggtcgaagtgtacccagtagaactgctgcttgtccggcacaatgatttgggcaaatctcacactgttcagttcagccataccgattctattggcctagtattgcgcacagctcgggagcggtttctggtggagccccaggaagacactcggctttgggccaagaactcagaaggctctttggataggttgtatgacacacacatcacggttctcgatgcggcccttgagactgggcagttgatcatcatggagacccgcaagaaaagatggcacttggcccagcgcacagctgcatgtcatgaacaacaacatgtcggaagaggatgaggacttcaagggtcagccaggcatctgtggcctcaccaatctgggcaacacgtgcttcatgaactcggccctgcagtgcctcagcaatgtgccacagctcaccgagtacttcctcaacaactgctacctggaggagctcaacttccgcaacccactgggcatgaagggtgagatcgcagaggcctatgcagacctggtgaagcaggcgtggtctggccaccaccgctccattgtgccacatgtgttcaagaacaaggttggccattttgcatcccaatttctgggctaccagcagcatgactctcaggagctgctgtcattcctcctggacgggctgcatgaggaccttaatcgggtgaagaagaaggagtatgtggagctgtgcgatgctgctgggcgaccggatcaggaggtggcacaggaggcatggcaaaaccacaaacggcggaacgattctgtgatcgtggacactttccacggcctcttcaagtccacgctggtgtgccccgattgtggcaatgtatctgtgaccttcgaccccttctgctacctcagtgttccactgcctatcagccacaagagggtcttggaggtcttctttatccccatggatccgcgccgcaagccagagcagcaccggctcgtggtccccaagaaaggcaagatctcggatctatgtgtggctctgtccaaacacacgggcatctcgccagagaggatgatggtggctgatgtcttcagtcaccgcttctataagctctatcagctagaggagcctctgagcagcatcttggaccgtgatgatatcttcgtctatgaggtgtcaggtcgcattgaggccattgagggctcaagagaggacatcgtggttcctgtctacctgcgggagcgcacccctgcccgtgactacaacaactcctactacggcctgatgctttttggacaccccctcctggtatcagtgccccgggaccgcttcacctgggagggcctgtataacgtcctgatgtaccggctctcacgctacgtgaccaaacccaactcagatgatgaggacgatggggatgagaaagaagatgacgaggaggataaagatgacgtccctgggccctcaactgggggcagcctccgagaccctgagccagagcaggctgggcccagctctggagtcacgaacaggtgcccgttcctcctggacaattgccttggcacatctcagtggcccccaaggcgacgacgcaagcagctgttcaccctgcagacggtgaactccaatgggaccagcgaccgcacaacctcccctgaagaagtccatgcccagccgtacattgctatcgactgggagccagagatgaagaagcgttactatgacgaggtagaggctgagggctacgtgaagcatgactgcgtcgggtacgtgatgaagaaggctcccgtgcggctgcaggagtgcattgagctcttcaccactgtggagaccctggagaaggaaaacccctggtactgcccttcctgcaagcagcaccagctggcaaccaagaagctggacctgtggatgctgccggagattctcatcatccacctgaaacgcttttcctacaccaagttctcccgagagaagctggacaccctcgtggagtttcctatccgggacctggacttctctgagtttgtcatccagccacagaatgagtcgaatccggagctgtacaaatatgacctcatcgcggtttccaaccattatgggggcatgcgtgatggacactacacaacatttgcctgcaacaaggacagcggccagtggcactactttgatgacaacagcgtctcccctgtcaatgagaatcagatcgagtccaaggcagcctatgtcctcttctaccaacgccaggacgtggcgcgacgcctgctgtccccggccggctcatctggcgccccagcctcccctgcctgcagctccccacccagctctgagttcatggatgttaattgagagccctgggtcctgccacagaaaaaaaaaaaaaaaagccctctctgcaatctcgcttctcgtgtccgccccgcttctcttattcgtgttaggtgcccccgccaggcattgcaggcttagtcgtggctactgttctcctgtgccgctgcatcgctctctcccgggaaagaacaggtcgtgtctcctcctagcagtgcgcgccccgcctgtgtttgcccttccagcagtgaccctcccttctagtctttatttatggtcgtgcccttccctctcctcagcccagagtgttctgcgtgggtggtgatgggggttcacctgaacacagagtgtattttcttattgaggccctgtaccttctgctgtgtgtgtgtatatataaagcaccagtctgctcccca

SEQ ID NO: 298493 - DNA, 3139 bp, Homo sapiens
tgtatgcgaagtacgtgcgcgtgtgcgcgtgaggtctactgtgatgatagccacagcacaaatgagtcttcacggctggaacgaatcagtgtccgccacatagatcctggagagactggccgaaaacgtgcactgcctggccggggacggctggttccttgtggagaagcactggtataagcagtgggaggcatacgtgcagggaggggaccaggactccagcaccttccctggctgcatcaacaatgccacactctttcaagatgagataaactggcgcctcaaggagggactggtggaaggcgaggattatgtgctgctcccagcagctgcttggcattacctggtcagctggtatggtctagagcatggccagccacccattgaacgcaaggtcatagagctgcccaacatccagaaggtcgaagtgtacccagtagaactgctgcttgtccggcacaatgatttgggcaaatctcacactgttcagttcagccataccgattctattggcctagtattgcgcacagctcgggagcggtttctggtggagccccaggaagacactcggctttgggccaagaactcagaaggctctttggataggttgtatgacacacacatcacggttctcgatgcggcccttgagactgggcagttgatcatcatggagacccgcaagaaaagatggcacttggcccagcgcacagctgcatgtcatgaacaacaacatgtcggaagaggatgaggacttcaagggtcagccaggcatctgtggcctcaccaatctgggcaacacgtgcttcatgaactcggccctgcagtgcctcagcaatgtgccacagctcaccgagtacttcctcaacaactgctacctggaggagctcaacttccgcaacccactgggcatgaagggtgagatcgcagaggcctatgcagacctggtgaagcaggcgtggtctggccaccaccgctccattgtgccacatgtgttcaagaacaaggttggccattttgcatcccaatttctgggctaccagcagcatgactctcaggagctgctgtcattcctcctggacgggctgcatgaggaccttaatcgggtgaagaagaaggagtatgtggagctgtgcgatgctgctgggcgaccggatcaggaggtggcacaggaggcatggcaaaaccacaaacggcggaacgattctgtgatcgtggacactttccacggcctcttcaagtccacgctggtgtgccccgattgtggcaatgtatctgtgaccttcgaccccttctgctacctcagtgttccactgcctatcagccacaagagggtcttggaggtcttctttatccccatggatccgcgccgcaagccagagcagcaccggctcgtggtccccaagaaaggcaagatctcggatctatgtgtggctctgtccaaacacacgggcatctcgccagagaggatgatggtggctgatgtcttcagtcaccgcttctataagctctatcagctagaggagcctctgagcagcatcttggaccgtgatgatatcttcgtctatgaggtgtcaggtcgcattgaggccattgagggctcaagagaggacatcgtggttcctgtctacctgcgggagcgcacccctgcccgtgactacaacaactcctactacggcctgatgctttttggacaccccctcctggtatcagtgccccgggaccgcttcacctgggagggcctgtataacgtcctgatgtaccggctctcacgctacgtgaccaaacccaactcagatgatgaggacgatggggatgagaaagaagatgacgaggaggataaagatgacgtccctgggccctcaactgggggcagcctccgagaccctgagccagagcaggctgggcccagctctggagtcacgaacaggtgcccgttcctcctggacaattgccttggcacatctcagtggcccccaaggcgacgacgcaagcagctgttcaccctgcagacggtgaactccaatgggaccagcgaccgcacaacctcccctgaagaagtccatgcccagccgtacattgctatcgactgggagccagagatgaagaagcgttactatgacgaggtagaggctgagggctacgtgaagcatgactgcgtcgggtacgtgatgaagaaggctcccgtgcggctgcaggagtgcattgagctcttcaccactgtggagaccctggagaaggaaaacccctggtactgcccttcctgcaagcagcaccagctggcaaccaagaagctggacctgtggatgctgccggagattctcatcatccacctgaaacgcttttcctacaccaagttctcccgagagaagctggacaccctcgtggagtttcctatccgggacctggacttctctgagtttgtcatccagccacagaatgagtcgaatccggagctgtacaaatatgacctcatcgcggtttccaaccattatgggggcatgcgtgatggacactacacaacatttgcctgcaacaaggacagcggccagtggcactactttgatgacaacagcgtctcccctgtcaatgagaatcagatcgagtccaaggcagcctatgtcctcttctaccaacgccaggacgtggcgcgacgcctgctgtccccggccggctcatctggcgccccagcctcccctgcctgcagctccccacccagctctgagttcatggatgttaattgagagccctgggtcctgccacagaaaaaaaaaaaaaaaagccctctctgcaatctcgcttctcgtgtccgccccgcttctcttattcgtgttaggtgcccccgccaggcattgcaggcttagtcgtggctactgttctcctgtgccgctgcatcgctctctcccgggaaagaacaggtcgtgtctcctcctagcagtgcgcgccccgcctgtgtttgcccttccagcagtgaccctcccttctagtctttatttatggtcgtgcccttccctctcctcagcccagagtgttctgcgtgggtggtgatgggggttcacctgaacacagagtgtattttcttattgaggccctgtaccttctgctgtgtgtgtgtatatataaagcaccagtctgctcccca

SEQ ID NO: 298494 - DNA, 3156 bp, Homo sapiens
agaatccggaagtggctgttgaggggcgtcttccaatctcgcacagctgcgttggctgtagaagagaacggacggcgatggcgacggtcgcagcaaatccagctgctgctgcggcggctgtggcggcggcagcggcggtgactgaggatagagagccacagcacgaggagctgccaggcctggacagccagtggcgccagatagaaaacggcgagagtgggcgagaacgtccactgcgggccggcgaaagctggttccttgtggagaagcactggtataagcagtgggaggcatacgtgcagggagggactggtggaaggcgaggattatgtgctgctcccagcagctgcttggcattacctggtcagctggtatggtctagagcatggccagccacccattgaacgcaaggtcatagagctgcccaacatccagaaggtcgaagtgtacccagtagaactgctgcttgtccggcacaatgatttgggcaaatctcacactgttcagttcagccataccgattctattggcctagtattgcgcacagctcgggagcggtttctggtggagccccaggaagacactcggctttgggccaagaactcagaaggctctttggataggttgtatgacacacacatcacggttctcgatgcggcccttgagactgggcagttgatcatcatggagacccgcaagaaaagatggcacttggcccagcgcacagctgcatgtcatgaacaacaacatgtcggaagaggatgaggacttcaagggtcagccaggcatctgtggcctcaccaatctgggcaacacgtgcttcatgaactcggccctgcagtgcctcagcaatgtgccacagctcaccgagtacttcctcaacaactgctacctggaggagctcaacttccgcaacccactgggcatgaagggtgagatcgcagaggcctatgcagacctggtgaagcaggcgtggtctggccaccaccgctccattgtgccacatgtgttcaagaacaaggttggccattttgcatcccaatttctgggctaccagcagcatgactctcaggagctgctgtcattcctcctggacgggctgcatgaggaccttaatcgggtgaagaagaaggagtatgtggagctgtgcgatgctgctgggcgaccggatcaggaggtggcacaggaggcatggcaaaaccacaaacggcggaacgattctgtgatcgtggacactttccacggcctcttcaagtccacgctggtgtgccccgattgtggcaatgtatctgtgaccttcgaccccttctgctacctcagtgttccactgcctatcagccacaagagggtcttggaggtcttctttatccccatggatccgcgccgcaagccagagcagcaccggctcgtggtccccaagaaaggcaagatctcggatctatgtgtggctctgtccaaacacacgggcatctcgccagagaggatgatggtggctgatgtcttcagtcaccgcttctataagctctatcagctagaggagcctctgagcagcatcttggaccgtgatgatatcttcgtctatgaggtgtcaggtcgcattgaggccattgagggctcaagagaggacatcgtggttcctgtctacctgcgggagcgcacccctgcccgtgactacaacaactcctactacggcctgatgctttttggacaccccctcctggtatcagtgccccgggaccgcttcacctgggagggcctgtataacgtcctgatgtaccggctctcacgctacgtgaccaaacccaactcagatgatgaggacgatggggatgagaaagaagatgacgaggaggataaagatgacgtccctgggccctcaactgggggcagcctccgagaccctgagccagagcaggctgggcccagctctggagtcacgaacaggtgcccgttcctcctggacaattgccttggcacatctcagtggcccccaaggcgacgacgcaagcagctgttcaccctgcagacggtgaactccaatgggaccagcgaccgcacaacctcccctgaagaagtccatgcccagccgtacattgctatcgactgggagccagagatgaagaagcgttactatgacgaggtagaggctgagggctacgtgaagcatgactgcgtcgggtacgtgatgaagaaggctcccgtgcggctgcaggagtgcattgagctcttcaccactgtggagaccctggagaaggaaaacccctggtactgcccttcctgcaagcagcaccagctggcaaccaagaagctggacctgtggatgctgccggagattctcatcatccacctgaaacgcttttcctacaccaagttctcccgagagaagctggacaccctcgtggagtttcctatccgggacctggacttctctgagtttgtcatccagccacagaatgagtcgaatccggagctgtacaaatatgacctcatcgcggtttccaaccattatgggggcatgcgtgatggacactacacaacatttgcctgcaacaaggacagcggccagtggcactactttgatgacaacagcgtctcccctgtcaatgagaatcagatcgagtccaaggcagcctatgtcctcttctaccaacgccaggacgtggcgcgacgcctgctgtccccggccggctcatctggcgccccagcctcccctgcctgcagctccccacccagctctgagttcatggatgttaattgagagccctgggtcctgccacagaaaaaaaaaaaaaaaagccctctctgcaatctcgcttctcgtgtccgccccgcttctcttattcgtgttaggtgcccccgccaggcattgcaggcttagtcgtggctactgttctcctgtgccgctgcatcgctctctcccgggaaagaacaggtcgtgtctcctcctagcagtgcgcgccccgcctgtgtttgcccttccagcagtgaccctcccttctagtctttatttatggtcgtgcccttccctctcctcagcccagagtgttctgcgtgggtggtgatgggggttcacctgaacacagagtgtattttcttattgaggccctgtaccttctgctgtgtgtgtgtatatataaagcaccagtctgctcccca

SEQ ID NO: 298495 - DNA, 1735 bp, Homo sapiens
  misc_feature (1696)..(1696): n is a, c, g, or t
  misc_feature (1700)..(1700): n is a, c, g, or t
  misc_feature (1704)..(1704): n is a, c, g, or t
  misc_feature (1716)..(1716): n is a, c, g, or t
  misc_feature (1719)..(1719): n is a, c, g, or t
  misc_feature (1732)..(1732): n is a, c, g, or t
  misc_feature (1734)..(1734): n is a, c, g, or t
agaatccggaagtggctgttgaggggcgtcttccaatctcgcacagctgcgttggctgtagaagagaacggacggcgatggcgacggtcgcagcaaatccagctgctgctgcggcggctgtggcggcggcagcggcggtgactgaggatagagagccacagcacgaggagctgccaggcctggacagccagtggcgccagatagaaaacggcgagagtgggcgagaacgtccactgcgggccggcgaaagctggttccttgtggagaagcactggtataagcagtgggaggcatacgtgcagggaggggaccaggactccagcaccttccctggctgcatcaacaatgccacactctttcaagatgagataaactggcgcctcaaggagggactggtggaaggcgaggattatgtgctgctcccagcagctgcttggcattacctggtcagctggtatggtctagagcatggccagccacccattgaacgcaaggtcatagagctgcccaacatccagaaggtcgaagtgtacccagtagaactgctgcttgtccggcacaatgatttgggcaaatctcacactgttcagttcagccataccgattctattggcctagtattgcgcacagctcgggagcggtttctggtggagccccaggaagacactcggctttgggccaagaactcagaaggctctttggataggttgtatgacacacacatcacggttctcgatgcggcccttgagactgggcagttgatcatcatggagacccgcaagaaaagatggcacttggcccagcgcacagctgcatgtcatgaacaacaacatgtcggaagaggatgaggacttcaagggtcagccaggcatctgtggcctcaccaatctgggcaacacgtgcttcatgaactcggccctgcagtgcctcagcaatgtgccacagctcaccgagtacttcctcaacaactgctacctggaggagctcaacttccgcaacccactgggcatgaagggtgagatcgcagaggcctatgcagacctggtgaagcaggcgtggtctggccaccaccgctccattgtgccacatgtgttcaagaacaaggttggccattttgcatcccaatttctgggctaccagcagcatgactctcaggagctgctgtcattcctcctggacgggctgcatgaggaccttaatcgggtgaagaagaaggagtatgtggagctgtgcgatgctgctgggcgaccggatcaggaggtggcacaggaggcatggcaaaaccacaaacggcggaacgattctgtgatcgtggacactttccacggcctcttcaagtccacgctggtgtgccccgattgtggcaatgtatctgtgaccttcgaccccttctgctacctcagtgttccactgcctatcagccacaagagggtcttggaggtcttctttatccccatggatccgcgccgcaagccagagcagcaccggctcgtggtccccaagaaaggcaagatctcggatctatgtgtggctctgtccaaacacacgggcatctcgccagagaggatgatggtggctgatgtcttcagtcaccgcttctataagctctatcagctagaggagcctctgagcagcatcttggaccgtgatgatatcttcgtctatgaggtgtcagctcgcattgagtccattgagnactngagngagtcaacctgntantgacaaaagaggngng

SEQ ID NO: 298496 - DNA, 3057 bp, Homo sapiens
cgcgtgccggatcaggaggtggcacaggaggcatggcaaaaccacaaacggcggaacgattctgtgatcgtggacactttccacggcctcttcaagtccacgctggtgtgccccgattgtggcaatgtatctgtgaccttcgaccccttctgctacctcagtgttcccctgtgtggctctctttacagaccattgtatatgtgtgtttgtatgctatgtttgtaaggcagagtgtgtgctcctctcatttgagaggtcacagcgctgtgtctgtgtgagtacacctgtgtctgcacccctctactcttacaggtcatagagctgcccaacatccagaaggtcgaagtgtacccagtagaactgctgcttgtccggcacaatgatttgggcaaatctcacactgttcagttcagccataccgattctattggcctagtattgcgcacagctcgggagcggtttctggtggagccccaggaagacactcggctttgggccaagaactcagaaggctctttggataggttgtatgacacacacatcacggttctcgatgcggcccttgagactgggcagttgatcatcatggagacccgcaagaaaagatggcacttggcccagcgcacagctgcatgtcatgaacaacaacatgtcggaagaggatgaggacttcaagggtcagccaggcatctgtggcctcaccaatctgggcaacacgtgcttcatgaactcggccctgcagtgcctcagcaatgtgccacagctcaccgagtacttcctcaacaactgctacctggaggagctcaacttccgcaacccactgggcatgaagggtgagatcgcagaggcctatgcagacctggtgaagcaggcgtggtctggccaccaccgctccattgtgccacatgtgttcaagaacaaggttggccattttgcatcccaatttctgggctaccagcagcatgactctcaggagctgctgtcattcctcctggacgggctgcatgaggaccttaatcgggtgaagaagaaggagtatgtggagctgtgcgatgctgctgggcgaccggatcaggaggtggcacaggaggcatggcaaaaccacaaacggcggaacgattctgtgatcgtggacactttccacggcctcttcaagtccacgctggtgtgccccgattgtggcaatgtatctgtgaccttcgaccccttctgctacctcagtgttccactgcctatcagccacaagagggtcttggaggtcttctttatccccatggatccgcgccgcaagccagagcagcaccggctcgtggtccccaagaaaggcaagatctcggatctatgtgtggctctgtccaaacacacgggcatctcgccagagaggatgatggtggctgatgtcttcagtcaccgcttctataagctctatcagctagaggagcctctgagcagcatcttggaccgtgatgatatcttcgtctatgaggtgtcaggtcgcattgaggccattgagggctcaagagaggacatcgtggttcctgtctacctgcgggagcgcacccctgcccgtgactacaacaactcctactacggcctgatgctttttggacaccccctcctggtatcagtgccccgggaccgcttcacctgggagggcctgtataacgtcctgatgtaccggctctcacgctacgtgaccaaacccaactcagatgatgaggacgatggggatgagaaagaagatgacgaggaggataaagatgacgtccctgggccctcaactgggggcagcctccgagaccctgagccagagcaggctgggcccagctctggagtcacgaacaggtgcccgttcctcctggacaattgccttggcacatctcagtggcccccaaggcgacgacgcaagcagctgttcaccctgcagacggtgaactccaatgggaccagcgaccgcacaacctcccctgaagaagtccatgcccagccgtacattgctatcgactgggagccagagatgaagaagcgttactatgacgaggtagaggctgagggctacgtgaagcatgactgcgtcgggtacgtgatgaagaaggctcccgtgcggctgcaggagtgcattgagctcttcaccactgtggagaccctggagaaggaaaacccctggtactgcccttcctgcaagcagcaccagctggcaaccaagaagctggacctgtggatgctgccggagattctcatcatccacctgaaacgcttttcctacaccaagttctcccgagagaagctggacaccctcgtggagtttcctatccgggacctggacttctctgagtttgtcatccagccacagaatgagtcgaatccggagctgtacaaatatgacctcatcgcggtttccaaccattatgggggcatgcgtgatggacactacacaacatttgcctgcaacaaggacagcggccagtggcactactttgatgacaacagcgtctcccctgtcaatgagaatcagatcgagtccaaggcagcctatgtcctcttctaccaacgccaggacgtggcgcgacgcctgctgtccccggccggctcatctggcgccccagcctcccctgcctgcagctccccacccagctctgagttcatggatgttaattgagagccctgggtcctgccacagaaaaaaaaaaaaaaaagccctctctgcaatctcgcttctcgtgtccgccccgcttctcttattcgtgttaggtgcccccgccaggcattgcaggcttagtcgtggctactgttctcctgtgccgctgcatcgctctctcccgggaaagaacaggtcgtgtctcctcctagcagtgcgcgccccgcctgtgtttgcccttccagcagtgaccctcccttctagtctttatttatggtcgtgcccttccctctcctcagcccagagtgttctgcgtgggtggtgatgggggttcacctgaacacagagtgtattttcttattgaggccctgtaccttctgctgtgtgtgtgtatatataaagcaccagtctgctcccca

SEQ ID NO: 298497 - DNA, 1552 bp, Homo sapiens
agaatccggaagtggctgttgaggggcgtcttccaatctcgcacagctgcgttggctgtagaagagaacggacggcgatggcgacggtcgcagcaaatccagctgctgctgcggcggctgtggcggcggcagcggcggtgactgaggatagagagccacagcacgaggagctgccaggcctggacagccagtggcgccagatagaaaacggcgagagtgggcgagaacgtccactgcgggccggcgaaagctggttccttgtggagaagcactggtataagcagtgggaggcatacgtgcagggaggggaccaggactccagcaccttccctggctgcatcaacaatgccacactctttcaagatgagataaactggcgcctcaaggagggactggtggaaggcgaggattatgtgctgctcccagcagctgcttggcattacctggtcagctggtatggtctagagcatggccagccacccattgaacgcaaggtcatagagctgcccaacatccagaaggtcgaagtgtacccagtagaactgctgcttgtccggcacaatgatttgggcaaatctcacactgttcagttcagccataccgattctattggcctagtattgcgcacagctcgggagcggtttctggtggagccccaggaagacactcggctttgggccaagaactcagaaggctctttggataggttgtatgacacacacatcacggttctcgatgcggcccttgagactgggcagttgatcatcatggagacccgcaagaaaagatggcacttggcccagcgcacagctgcatgtcatgaacaacaacatgtcggaagaggatgaggacttcaagggtcagccaggcatctgtggcctcaccaatctgggcaacacgtgcttcatgaactcggccctgcagtgcctcagcaatgtgccacagctcaccgagtacttcctcaacaactgctacctggaggagctcaacttccgcaacccactgggcatgaagggtgagatcgcagaggcctatgcagacctggtgaagcaggcgtggtctggccaccaccgctccattgtgccacatgtgttcaagaacaaggttggccattttgcatcccaatttctgggctaccagcagcatgactctcaggagctgctgtcattcctcctggacgggctgcatgaggaccttaatcgggtgaagaagaaggagtatgtggagctgtgcgatgctgctgggcgaccggatcaggaggtggcacaggaggcatggcaaaaccacaaacggcggaacgattctgtgatcgtggacactttccacggcctcttcaagtccacgctggtgtgccccgattgtggcaatgtatctgtgaccttcgaccccttctgctacctcagtgttccactgcctatcagccacaagagggtcttggaggtcttctttatccccatggatccgcgccgcaagccagagcagacgggtctggtccaaaaaggaactcggttattgtggcctggcaacacggctcccaaggaaggggggttac

SEQ ID NO: 298498 - DNA, 2188 bp, Homo sapiens
tgtcggtccaatgattgtccacgctcattgtgccacatgtgttcaagaacaaggttggccattttgcatcccaatttctgggctaccagcagcatgactctcaggagctgctgtcattcctcctggacgggctgcatgaggaccttaatcgggtgaagaagaaggagtatgtggagctgtgcgatgctgctgggcgaccggatcaggaggtggcacaggaggcatggcaaaaccacaaacggcggaacgattctgtgatcgtggacactttccacggcctcttcaagtccacgctggtgtgccccgattgtggcaatgtatctgtgaccttcgaccccttctgctacctcagtgttccactgcctatcagccacaagagggtcttggaggtcttctttatccccatggatccgcgccgcaagccagagcagcaccggctcgtggtccccaagaaaggcaagatctcggatctatgtgtggctctgtccaaacacacgggcatctcgccagagaggatgatggtggctgatgtcttcagtcaccgcttctataagctctatcagctagaggagcctctgagcagcatcttggaccgtgatgatatcttcgtctatgaggtgtcaggtcgcattgaggccattgagggctcaagagaggacatcgtggttcctgtctacctgcgggagcgcacccctgcccgtgactacaacaactcctactacggcctgatgctttttggacaccccctcctggtatcagtgccccgggaccgcttcacctgggagggcctgtataacgtcctgatgtaccggctctcacgctacgtgaccaaacccaactcagatgatgaggacgatggggatgagaaagaagatgacgaggaggataaagatgacgtccctgggccctcaactgggggcagcctccgagaccctgagccagagcaggctgggcccagctctggagtcacgaacaggtgcccgttcctcctggacaattgccttggcacatctcagtggcccccaaggcgacgacgcaagcagctgttcaccctgcagacggtgaactccaatgggaccagcgaccgcacaacctcccctgaagaagtccatgcccagccgtacattgctatcgactgggagccagagatgaagaagcgttactatgacgaggtagaggctgagggctacgtgaagcatgactgcgtcgggtacgtgatgaagaaggctcccgtgcggctgcaggagtgcattgagctcttcaccactgtggagaccctggagaaggaaaacccctggtactgcccttcctgcaagcagcaccagctggcaaccaagaagctggacctgtggatgctgccggagattctcatcatccacctgaaacgcttttcctacaccaagttctcccgagagaagctggacaccctcgtggagtttcctatccgggacctggacttctctgagtttgtcatccagccacagaatgagtcgaatccggagctgtacaaatatgacctcatcgcggtttccaaccattatgggggcatgcgtgatggacactacacaacatttgcctgcaacaaggacagcggccagtggcactactttgatgacaacagcgtctcccctgtcaatgagaatcagatcgagtccaaggcagcctatgtcctcttctaccaacgccaggacgtggcgcgacgcctgctgtccccggccggctcatctggcgccccagcctcccctgcctgcagctccccacccagctctgagttcatggatgttaattgagagccctgggtcctgccacagaaaaaaaaaaaaaaaagccctctctgcaatctcgcttctcgtgtccgccccgcttctcttattcgtgttaggtgcccccgccaggcattgcaggcttagtcgtggctactgttctcctgtgccgctgcatcgctctctcccgggaaagaacaggtcgtgtctcctcctagcagtgcgcgccccgcctgtgtttgcccttccagcagtgaccctcccttctagtctttatttatggtcgtgcccttccctctcctcagcccagagtgttctgcgtgggtggtgatgggggttcacctgaacacagagtgtattttcttattgaggccctgtaccttctgctgtgtgtgtgtatatataaagcaccagtctgctcccca

SEQ ID NO: 298499 - DNA, 2228 bp, Homo sapiens
tgactcaaccctgggcacccccgaccccctacgtctcttggctctcctaactccctctctctctgatgaccctgcccatcttcttagaacaaggttggccattttgcatcccaatttctgggctaccagcagcatgactctcaggagctgctgtcattcctcctggacgggctgcatgaggaccttaatcgggtgaagaagaaggagtatgtggagctgtgcgatgctgctgggcgaccggatcaggaggtggcacaggaggcatggcaaaaccacaaacggcggaacgattctgtgatcgtggacactttccacggcctcttcaagtccacgctggtgtgccccgattgtggcaatgtatctgtgaccttcgaccccttctgctacctcagtgttccactgcctatcagccacaagagggtcttggaggtcttctttatccccatggatccgcgccgcaagccagagcagcaccggctcgtggtccccaagaaaggcaagatctcggatctatgtgtggctctgtccaaacacacgggcatctcgccagagaggatgatggtggctgatgtcttcagtcaccgcttctataagctctatcagctagaggagcctctgagcagcatcttggaccgtgatgatatcttcgtctatgaggtgtcaggtcgcattgaggccattgagggctcaagagaggacatcgtggttcctgtctacctgcgggagcgcacccctgcccgtgactacaacaactcctactacggcctgatgctttttggacaccccctcctggtatcagtgccccgggaccgcttcacctgggagggcctgtataacgtcctgatgtaccggctctcacgctacgtgaccaaacccaactcagatgatgaggacgatggggatgagaaagaagatgacgaggaggataaagatgacgtccctgggccctcaactgggggcagcctccgagaccctgagccagagcaggctgggcccagctctggagtcacgaacaggtgcccgttcctcctggacaattgccttggcacatctcagtggcccccaaggcgacgacgcaagcagctgttcaccctgcagacggtgaactccaatgggaccagcgaccgcacaacctcccctgaagaagtccatgcccagccgtacattgctatcgactgggagccagagatgaagaagcgttactatgacgaggtagaggctgagggctacgtgaagcatgactgcgtcgggtacgtgatgaagaaggctcccgtgcggctgcaggagtgcattgagctcttcaccactgtggagaccctggagaaggaaaacccctggtactgcccttcctgcaagcagcaccagctggcaaccaagaagctggacctgtggatgctgccggagattctcatcatccacctgaaacgcttttcctacaccaagttctcccgagagaagctggacaccctcgtggagtttcctatccgggacctggacttctctgagtttgtcatccagccacagaatgagtcgaatccggagctgtacaaatatgacctcatcgcggtttccaaccattatgggggcatgcgtgatggacactacacaacatttgcctgcaacaaggacagcggccagtggcactactttgatgacaacagcgtctcccctgtcaatgagaatcagatcgagtccaaggcagcctatgtcctcttctaccaacgccaggacgtggcgcgacgcctgctgtccccggccggctcatctggcgccccagcctcccctgcctgcagctccccacccagctctgagttcatggatgttaattgagagccctgggtcctgccacagaaaaaaaaaaaaaaaagccctctctgcaatctcgcttctcgtgtccgccccgcttctcttattcgtgttaggtgcccccgccaggcattgcaggcttagtcgtggctactgttctcctgtgccgctgcatcgctctctcccgggaaagaacaggtcgtgtctcctcctagcagtgcgcgccccgcctgtgtttgcccttccagcagtgaccctcccttctagtctttatttatggtcgtgcccttccctctcctcagcccagagtgttctgcgtgggtggtgatgggggttcacctgaacacagagtgtattttcttattgaggccctgtaccttctgctgtgtgtgtgtatatataaagcaccagtctgctcccca

SEQ ID NO: 298500 - DNA, 2042 bp, Homo sapiens
actgcgacttttctaggcaacgccggtttatcgtttgtctgcggggagaaccgcggtcaggaggtggcacaggaggcatggcaaaaccacaaacggcggaacgattctgtgatcgtggacactttccacggcctcttcaagtccacgctggtgtgccccgattgtggcaatgtatctgtgaccttcgaccccttctgctacctcagtgttccactgcctatcagccacaagagggtcttggaggtcttctttatccccatggatccgcgccgcaagccagagcagcaccggctcgtggtccccaagaaaggcaagatctcggatctatgtgtggctctgtccaaacacacgggcatctcgccagagaggatgatggtggctgatgtcttcagtcaccgcttctataagctctatcagctagaggagcctctgagcagcatcttggaccgtgatgatatcttcgtctatgaggtgtcaggtcgcattgaggccattgagggctcaagagaggacatcgtggttcctgtctacctgcgggagcgcacccctgcccgtgactacaacaactcctactacggcctgatgctttttggacaccccctcctggtatcagtgccccgggaccgcttcacctgggagggcctgtataacgtcctgatgtaccggctctcacgctacgtgaccaaacccaactcagatgatgaggacgatggggatgagaaagaagatgacgaggaggataaagatgacgtccctgggccctcaactgggggcagcctccgagaccctgagccagagcaggctgggcccagctctggagtcacgaacaggtgcccgttcctcctggacaattgccttggcacatctcagtggcccccaaggcgacgacgcaagcagctgttcaccctgcagacggtgaactccaatgggaccagcgaccgcacaacctcccctgaagaagtccatgcccagccgtacattgctatcgactgggagccagagatgaagaagcgttactatgacgaggtagaggctgagggctacgtgaagcatgactgcgtcgggtacgtgatgaagaaggctcccgtgcggctgcaggagtgcattgagctcttcaccactgtggagaccctggagaaggaaaacccctggtactgcccttcctgcaagcagcaccagctggcaaccaagaagctggacctgtggatgctgccggagattctcatcatccacctgaaacgcttttcctacaccaagttctcccgagagaagctggacaccctcgtggagtttcctatccgggacctggacttctctgagtttgtcatccagccacagaatgagtcgaatccggagctgtacaaatatgacctcatcgcggtttccaaccattatgggggcatgcgtgatggacactacacaacatttgcctgcaacaaggacagcggccagtggcactactttgatgacaacagcgtctcccctgtcaatgagaatcagatcgagtccaaggcagcctatgtcctcttctaccaacgccaggacgtggcgcgacgcctgctgtccccggccggctcatctggcgccccagcctcccctgcctgcagctccccacccagctctgagttcatggatgttaattgagagccctgggtcctgccacagaaaaaaaaaaaaaaaagccctctctgcaatctcgcttctcgtgtccgccccgcttctcttattcgtgttaggtgcccccgccaggcattgcaggcttagtcgtggctactgttctcctgtgccgctgcatcgctctctcccgggaaagaacaggtcgtgtctcctcctagcagtgcgcgccccgcctgtgtttgcccttccagcagtgaccctcccttctagtctttatttatggtcgtgcccttccctctcctcagcccagagtgttctgcgtgggtggtgatgggggttcacctgaacacagagtgtattttcttattgaggccctgtaccttctgctgtgtgtgtgtatatataaagcaccagtctgctcccca

SEQ ID NO: 298501 - DNA, 2039 bp, Homo sapiens
agaatccggaagtggctgttgaggggcgtcttccaatctcgcacagctgcgttggctgtagaagagaacggacggcgatggcgacggtcgcagcaaatccagctgctgctgcggcggctgtggcggcggcagcggcggtgactgaggatagagagccacagcacgaggagctgccaggcctggacagccagtggcgccagatagaaaacggcgagagtgggcgagaacgtccactgcgggccggcgaaagctggttccttgtggagaagcactggtataagcagtgggaggcatacgtgcagggaggggaccaggactccagcaccttccctggctgcatcaacaatgccacactctttcaagatgagataaactggcgcctcaaggagggactggtggaaggcgaggattatgtgctgctcccagcagctgcttggcattacctggtcagctggtatggtctatgaggtgtcaggtcgcattgaggccattgagggctcaagagaggacatcgtggttcctgtctacctgcgggagcgcacccctgcccgtgactacaacaactcctactacggcctgatgctttttggacaccccctcctggtatcagtgccccgggaccgcttcacctgggagggcctgtataacgtcctgatgtaccggctctcacgctacgtgaccaaacccaactcagatgatgaggacgatggggatgagaaagaagatgacgaggaggataaagatgacgtccctgggccctcaactgggggcagcctccgagaccctgagccagagcaggctgggcccagctctggagtcacgaacaggtgcccgttcctcctggacaattgccttggcacatctcagtggcccccaaggcgacgacgcaagcagctgttcaccctgcagacggtgaactccaatgggaccagcgaccgcacaacctcccctgaagaagtccatgcccagccgtacattgctatcgactgggagccagagatgaagaagcgttactatgacgaggtagaggctgagggctacgtgaagcatgactgcgtcgggtacgtgatgaagaaggctcccgtgcggctgcaggagtgcattgagctcttcaccactgtggagaccctggagaaggaaaacccctggtactgcccttcctgcaagcagcaccagctggcaaccaagaagctggacctgtggatgctgccggagattctcatcatccacctgaaacgcttttcctacaccaagttctcccgagagaagctggacaccctcgtggagtttcctatccgggacctggacttctctgagtttgtcatccagccacagaatgagtcgaatccggagctgtacaaatatgacctcatcgcggtttccaaccattatgggggcatgcgtgatggacactacacaacatttgcctgcaacaaggacagcggccagtggcactactttgatgacaacagcgtctcccctgtcaatgagaatcagatcgagtccaaggcagcctatgtcctcttctaccaacgccaggacgtggcgcgacgcctgctgtccccggccggctcatctggcgccccagcctcccctgcctgcagctccccacccagctctgagttcatggatgttaattgagagccctgggtcctgccacagaaaaaaaaaaaaaaaagccctctctgcaatctcgcttctcgtgtccgccccgcttctcttattcgtgttaggtgcccccgccaggcattgcaggcttagtcgtggctactgttctcctgtgccgctgcatcgctctctcccgggaaagaacaggtcgtgtctcctcctagcagtgcgcgccccgcctgtgtttgcccttccagcagtgaccctcccttctagtctttatttatggtcgtgcccttccctctcctcagcccagagtgttctgcgtgggtggtgatgggggttcacctgaacacagagtgtattttcttattgaggccctgtaccttctgctgtgtgtgtgtatatataaagcaccagtctgctcccca

SEQ ID NO: 298502 - DNA, 1649 bp, Homo sapiens
ggcacgagggctgctcagaggctcctctagctgatagagcttatagaagcggtgactgaagacatcttcgtctatgaggtgtcaggtcgcattgaggccattgagggctcaagagaggacatcgtggttcctgtctacctgcgggagcgcacccctgcccgtgactacaacaactcctactacggcctgatgctttttggacaccccctcctggtatcagtgccccgggaccgcttcacctgggagggcctgtataacgtcctgatgtaccggctctcacgctacgtgaccaaacccaactcagatgatgaggacgatggggatgagaaagaagatgacgaggaggataaagatgacgtccctgggccctcaactgggggcagcctccgagaccctgagccagagcaggctgggcccagctctggagtcacgaacaggtgcccgttcctcctggacaattgccttggcacatctcagtggcccccaaggcgacgacgcaagcagctgttcaccctgcagacggtgaactccaatgggaccagcgaccgcacaacctcccctgaagaagtccatgcccagccgtacattgctatcgactgggagccagagatgaagaagcgttactatgacgaggtagaggctgagggctacgtgaagcatgactgcgtcgggtacgtgatgaagaaggctcccgtgcggctgcaggagtgcattgagctcttcaccactgtggagaccctggagaaggaaaacccctggtactgcccttcctgcaagcagcaccagctggcaaccaagaagctggacctgtggatgctgccggagattctcatcatccacctgaaacgcttttcctacaccaagttctcccgagagaagctggacaccctcgtggagtttcctatccgggacctggacttctctgagtttgtcatccagccacagaatgagtcgaatccggagctgtacaaatatgacctcatcgcggtttccaaccattatgggggcatgcgtgatggacactacacaacatttgcctgcaacaaggacagcggccagtggcactactttgatgacaacagcgtctcccctgtcaatgagaatcagatcgagtccaaggcagcctatgtcctcttctaccaacgccaggacgtggcgcgacgcctgctgtccccggccggctcatctggcgccccagcctcccctgcctgcagctccccacccagctctgagttcatggatgttaattgagagccctgggtcctgccacagaaaaaaaaaaaaaaaagccctctctgcaatctcgcttctcgtgtccgccccgcttctcttattcgtgttaggtgcccccgccaggcattgcaggcttagtcgtggctactgttctcctgtgccgctgcatcgctctctcccgggaaagaacaggtcgtgtctcctcctagcagtgcgcgccccgcctgtgtttgcccttccagcagtgaccctcccttctagtctttatttatggtcgtgcccttccctctcctcagcccagagtgttctgcgtgggtggtgatgggggttcacctgaacacagagtgtattttcttattgaggccctgtaccttctgctgtgtgtgtgtatatataaagcaccagtctgctcccca

SEQ ID NO: 298503 - DNA, 1663 bp, Homo sapiens
gatcgtgcccgaattcgttgtgctcgtgccggaatttctcgtcgtcgtgccggaattcgtcgtcgtgccggaattcgtcgtcgtgctatgaggtgtcaggtcgcattgaggccattgagggctcaagagaggacatcgtggttcctgtctacctgcgggagcgcacccctgcccgtgactacaacaactcctactacggcctgatgctttttggacaccccctcctggtatcagtgccccgggaccgcttcacctgggagggcctgtataacgtcctgatgtaccggctctcacgctacgtgaccaaacccaactcagatgatgaggacgatggggatgagaaagaagatgacgaggaggataaagatgacgtccctgggccctcaactgggggcagcctccgagaccctgagccagagcaggctgggcccagctctggagtcacgaacaggtgcccgttcctcctggacaattgccttggcacatctcagtggcccccaaggcgacgacgcaagcagctgttcaccctgcagacggtgaactccaatgggaccagcgaccgcacaacctcccctgaagaagtccatgcccagccgtacattgctatcgactgggagccagagatgaagaagcgttactatgacgaggtagaggctgagggctacgtgaagcatgactgcgtcgggtacgtgatgaagaaggctcccgtgcggctgcaggagtgcattgagctcttcaccactgtggagaccctggagaaggaaaacccctggtactgcccttcctgcaagcagcaccagctggcaaccaagaagctggacctgtggatgctgccggagattctcatcatccacctgaaacgcttttcctacaccaagttctcccgagagaagctggacaccctcgtggagtttcctatccgggacctggacttctctgagtttgtcatccagccacagaatgagtcgaatccggagctgtacaaatatgacctcatcgcggtttccaaccattatgggggcatgcgtgatggacactacacaacatttgcctgcaacaaggacagcggccagtggcactactttgatgacaacagcgtctcccctgtcaatgagaatcagatcgagtccaaggcagcctatgtcctcttctaccaacgccaggacgtggcgcgacgcctgctgtccccggccggctcatctggcgccccagcctcccctgcctgcagctccccacccagctctgagttcatggatgttaattgagagccctgggtcctgccacagaaaaaaaaaaaaaaaagccctctctgcaatctcgcttctcgtgtccgccccgcttctcttattcgtgttaggtgcccccgccaggcattgcaggcttagtcgtggctactgttctcctgtgccgctgcatcgctctctcccgggaaagaacaggtcgtgtctcctcctagcagtgcgcgccccgcctgtgtttgcccttccagcagtgaccctcccttctagtctttatttatggtcgtgcccttccctctcctcagcccagagtgttctgcgtgggtggtgatgggggttcacctgaacacagagtgtattttcttattgaggccctgtaccttctgctgtgtgtgtgtatatataaagcaccagtctgctcccca

SEQ ID NO: 298504 - DNA, 1882 bp, Homo sapiens
agatggagtcttgctctgttgcccaggctggagtgtagtgacatgatcttggctcactgcaacctccatctcccggattcaagcgattctcctgcctcagcctcccaaatagctgcaattacagccgcgcgccaccacgcccagctaatcacactccacacctctgactgggacacaagttccttcattctcaggccactgctgacagccttggcctcttcatgcatttacgcgtcaccccttcagccctctcacacctcagattcagaacggtttacatgtggatctaccaatggcttcccattatcttaagtaaaatcccgggctctatccccactgtccttgtacccgtcttgggagtctcctctgctctgttgcagacgctacgtgaccaaacccaactcagatgatgaggacgatggggatgagaaaggtgagggggctaacagtcagtgggcgggggctctgggttaggtctgacccacgtagggttcgtctaggtgtgcattgcagcttagcacttgaggctcacaccttcccatctctgacatcctcctgtcctagaagatgacgaggaggataaagatgacgtccctgggccctcaactgggggcagcctccgagaccctgagccagagcaggctgggcccagctctggagtcacgaacaggtgcccgttcctcctggacaattgccttggcacatctcagtggcccccaaggcgacgacgcaagcagctgttcaccctgcagacggtgaactccaatgggaccagcgaccgcacaacctcccctgaagaagtccatgcccagccgtacattgctatcgactgggagccagagatgaagaagcgttactatgacgaggtagaggctgagggctacgtgaagcatgactgcgtcgggtacgtgatgaagaaggctcccgtgcggctgcaggagtgcattgagctcttcaccactgtggagaccctggagaaggaaaacccctggtactgcccttcctgcaagcagcaccagctggcaaccaagaagctggacctgtggatgctgccggagattctcatcatccacctgaaacgcttttcctacaccaagttctcccgagagaagctggacaccctcgtggagtttcctatccgggacctggacttctctgagtttgtcatccagccacagaatgagtcgaatccggagctgtacaaatatgacctcatcgcggtttccaaccattatgggggcatgcgtgatggacactacacaacatttgcctgcaacaaggacagcggccagtggcactactttgatgacaacagcgtctcccctgtcaatgagaatcagatcgagtccaaggcagcctatgtcctcttctaccaacgccaggacgtggcgcgacgcctgctgtccccggccggctcatctggcgccccagcctcccctgcctgcagctccccacccagctctgagttcatggatgttaattgagagccctgggtcctgccacagaaaaaaaaaaaaaaaagccctctctgcaatctcgcttctcgtgtccgccccgcttctcttattcgtgttaggtgcccccgccaggcattgcaggcttagtcgtggctactgttctcctgtgccgctgcatcgctctctcccgggaaagaacaggtcgtgtctcctcctagcagtgcgcgccccgcctgtgtttgcccttccagcagtgaccctcccttctagtctttatttatggtcgtgcccttccctctcctcagcccagagtgttctgcgtgggtggtgatgggggttcacctgaacacagagtgtattttcttattgaggccctgtaccttctgctgtgtgtgtgtatatataaagcaccagtctgctcccca

SEQ ID NO: 298505 - DNA, 1213 bp, Homo sapiens
  misc_feature (59)..(59): n is a, c, g, or t
  misc_feature (63)..(64): n is a, c, g, or t
aacactgcagctggctcagtgccgaaactgaatgttaagacaggtgtggctgagcgcantggnngcctaggtatatacatcaccttcaggtaagtaatttcaagtttgcagtgacaacctcccctgaagaagtccatgcccagccgtacattgctatcgactgggagccagagatgaagaagcgttactatgacgaggtagaggctgagggctacgtgaagcatgactgcgtcgggtacgtgatgaagaaggctcccgtgcggctgcaggagtgcattgagctcttcaccactgtggagaccctggagaaggaaaacccctggtactgcccttcctgcaagcagcaccagctggcaaccaagaagctggacctgtggatgctgccggagattctcatcatccacctgaaacgcttttcctacaccaagttctcccgagagaagctggacaccctcgtggagtttcctatccgggacctggacttctctgagtttgtcatccagccacagaatgagtcgaatccggagctgtacaaatatgacctcatcgcggtttccaaccattatgggggcatgcgtgatggacactacacaacatttgcctgcaacaaggacagcggccagtggcactactttgatgacaacagcgtctcccctgtcaatgagaatcagatcgagtccaaggcagcctatgtcctcttctaccaacgccaggacgtggcgcgacgcctgctgtccccggccggctcatctggcgccccagcctcccctgcctgcagctccccacccagctctgagttcatggatgttaattgagagccctgggtcctgccacagaaaaaaaaaaaaaaaagccctctctgcaatctcgcttctcgtgtccgccccgcttctcttattcgtgttaggtgcccccgccaggcattgcaggcttagtcgtggctactgttctcctgtgccgctgcatcgctctctcccgggaaagaacaggtcgtgtctcctcctagcagtgcgcgccccgcctgtgtttgcccttccagcagtgaccctcccttctagtctttatttatggtcgtgcccttccctctcctcagcccagagtgttctgcgtgggtggtgatgggggttcacctgaacacagagtgtattttcttattgaggccctgtaccttctgctgtgtgtgtgtatatataaagcaccagtctgctcccca

SEQ ID NO: 298506 - DNA, 1090 bp, Homo sapiens
ctgtggcaggacccagggctctcaattaacatccatgaactcagagctgggtgaagaagcgttactatgacgaggtagaggctgagggctacgtgaagcatgactgcgtcgggtacgtgatgaagaaggctcccgtgcggctgcaggagtgcattgagctcttcaccactgtggagaccctggagaaggaaaacccctggtactgcccttcctgcaagcagcaccagctggcaaccaagaagctggacctgtggatgctgccggagattctcatcatccacctgaaacgcttttcctacaccaagttctcccgagagaagctggacaccctcgtggagtttcctatccgggacctggacttctctgagtttgtcatccagccacagaatgagtcgaatccggagctgtacaaatatgacctcatcgcggtttccaaccattatgggggcatgcgtgatggacactacacaacatttgcctgcaacaaggacagcggccagtggcactactttgatgacaacagcgtctcccctgtcaatgagaatcagatcgagtccaaggcagcctatgtcctcttctaccaacgccaggacgtggcgcgacgcctgctgtccccggccggctcatctggcgccccagcctcccctgcctgcagctccccacccagctctgagttcatggatgttaattgagagccctgggtcctgccacagaaaaaaaaaaaaaaaagccctctctgcaatctcgcttctcgtgtccgccccgcttctcttattcgtgttaggtgcccccgccaggcattgcaggcttagtcgtggctactgttctcctgtgccgctgcatcgctctctcccgggaaagaacaggtcgtgtctcctcctagcagtgcgcgccccgcctgtgtttgcccttccagcagtgaccctcccttctagtctttatttatggtcgtgcccttccctctcctcagcccagagtgttctgcgtgggtggtgatgggggttcacctgaacacagagtgtattttcttattgaggccctgtaccttctgctgtgtgtgtgtatatataaagcaccagtctgctcccca

SEQ ID NO: 298507 - DNA, 1122 bp, Homo sapiens
ctactgatggccgcgagacagtttcgagactggacagactgtgcattacaagctgtttaagaaggcgggagaggccgggcgcggtggctcacgcctgtaatcccagcactttgggaggctgaagcaggcagatcacgaggtcaggagatggagaccatcctggctaacacggtgaaacccctgcattgagctcttcaccactgtggagaccctggagaaggaaaacccctggtactgcccttcctgcaagcagcaccagctggcaaccaagaagctggacctgtggatgctgccggagattctcatcatccacctgaaacgcttttcctacaccaagttctcccgagagaagctggacaccctcgtggagtttcctatccgggacctggacttctctgagtttgtcatccagccacagaatgagtcgaatccggagctgtacaaatatgacctcatcgcggtttccaaccattatgggggcatgcgtgatggacactacacaacatttgcctgcaacaaggacagcggccagtggcactactttgatgacaacagcgtctcccctgtcaatgagaatcagatcgagtccaaggcagcctatgtcctcttctaccaacgccaggacgtggcgcgacgcctgctgtccccggccggctcatctggcgccccagcctcccctgcctgcagctccccacccagctctgagttcatggatgttaattgagagccctgggtcctgccacagaaaaaaaaaaaaaaaagccctctctgcaatctcgcttctcgtgtccgccccgcttctcttattcgtgttaggtgcccccgccaggcattgcaggcttagtcgtggctactgttctcctgtgccgctgcatcgctctctcccgggaaagaacaggtcgtgtctcctcctagcagtgcgcgccccgcctgtgtttgcccttccagcagtgaccctcccttctagtctttatttatggtcgtgcccttccctctcctcagcccagagtgttctgcgtgggtggtgatgggggttcacctgaacacagagtgtattttcttattgaggccctgtaccttctgctgtgtgtgtgtatatataaagcaccagtctgctcccca

SEQ ID NO: 298508 - DNA, 672 bp, Homo sapiens
agaatccggaagtggctgttgaggggcgtcttccaatctcgcacagctgcgttggctgtagaagagaacggacggcgatggcgacggtcgcagcaaatccagctgctgctgcggcggctgtggcggcggcagcggcggtgactgaggatagagagccacagcacgaggagctgccaggcctggacagccagtggcgccagatagaaaacggcgagagtgggcgagaacgtccactgcgggccggcgaaagctggttccttgtggagaagcactggtataagcagtgggaggcatacgtgcagggaggggaccaggactccagcaccttccctggctgcatcaacaatgccacactctttcaagatgagataaactggcgcctcaaggagggactggtggaaggcgaggattatgtgctgctcccagcagctgcttggcattacctggtcagctggtatggtctagagcatggccagccacccattgaacgcaaggtcatagagctgcccaacatccagaaggtcgaagtgtactgcccttccctctcctcagcccagagtgttctgcgtgggtggtgatgggggttcacctgaacacagagtgtattttcttattgaggccctgtaccttctgctgtgtgtgtgtatatataaagcaccagtctgctcccca

SEQ ID NO: 298509 - DNA, 901 bp, Homo sapiens
ctccttctccgacatcctctccctctccctcacctccctctccgacatcctctccctctccgacatcctctccctctccgacatcgtatgtgccaggctgtgggtggggcctgccctgggggttctgggcaggggggcgatcaggaccttcccagtgagtgactagggatgtgagccagtggtgaggttatcgtggtgggaggagtgacaagagtgaatctggacacttctgagaggcaggaagggtaggcgaggataactctccttccctttcagacacaacatttgcctgcaacaaggacagcggccagtggcactactttgatgacaacagcgtctcccctgtcaatgagaatcagatcgagtccaaggcagcctatgtcctcttctaccaacgccaggacgtggcgcgacgcctgctgtccccggccggctcatctggcgccccagcctcccctgcctgcagctccccacccagctctgagttcatggatgttaattgagagccctgggtcctgccacagaaaaaaaaaaaaaaaagccctctctgcaatctcgcttctcgtgtccgccccgcttctcttattcgtgttaggtgcccccgccaggcattgcaggcttagtcgtggctactgttctcctgtgccgctgcatcgctctctcccgggaaagaacaggtcgtgtctcctcctagcagtgcgcgccccgcctgtgtttgcccttccagcagtgaccctcccttctagtctttatttatggtcgtgcccttccctctcctcagcccagagtgttctgcgtgggtggtgatgggggttcacctgaacacagagtgtattttcttattgaggccctgtaccttctgctgtgtgtgtgtatatataaagcaccagtctgctcccca

SEQ ID NO: 298510 - DNA, 592 bp, Homo sapiens
tacgggctatcgtcgaccacgccgtcggtctccctgtcaatgagaatcagatcgagtccaaggcagcctatgtcctcttctaccaacgccaggacgtggcgcgacgcctgctgtccccggccggctcatctggcgccccagcctcccctgcctgcagctccccacccagctctgagttcatggatgttaattgagagccctgggtcctgccacagaaaaaaaaaaaaaaaagccctctctgcaatctcgcttctcgtgtccgccccgcttctcttattcgtgttaggtgcccccgccaggcattgcaggcttagtcgtggctactgttctcctgtgccgctgcatcgctctctcccgggaaagaacaggtcgtgtctcctcctagcagtgcgcgccccgcctgtgtttgcccttccagcagtgaccctcccttctagtctttatttatggtcgtgcccttccctctcctcagcccagagtgttctgcgtgggtggtgatgggggttcacctgaacacagagtgtattttcttattgaggccctgtaccttctgctgtgtgtgtgtatatataaagcaccagtctgctcccca

SEQ ID NO: 298511 - DNA, 808 bp, Homo sapiens
agaatccggaagtggctgttgaggggcgtcttccaatctcgcacagctgcgttggctgtagaagagaacggacggcgatggcgacggtcgcagcaaatccagctgctgctgcggcggctgtggcggcggcagcggcggtgactgaggatagagagccacagcacgaggagctgccaggcctggacagccagtggcgccagatagaaaacggcgagagtgggcgagaacgtccactgcgggccggcgaaagctggttccttgtggagaagcactggtataagcagtgggaggcatacgtgcagggaggggaccaggactccagcaccttccctggctgcatcaacaatgccacactctttcaaggtacaaggcctttgcctccttctcaccctagccctggagttcttgtcccttccgtccctacagatgatcataagcccattctgtgtgctaggtcactggtggggtggccagagtcattcgtcagtttcctttgttgattcttcctctgccacctccacccccgccccacagatgagataaactggcgcctcaaggagggactggtggaaggcgaggattatgtgctgctcccagcagctgcttggcattacctggtcagctggtatggtctagagcatggccagccacccattgaacgcaaggtcatagagctgcccaacatccagaaggtcgaagtgtacccagtagaactgctgcttgtccggcacaatgatttgggcaaatctcacactgttcagttcagccataccgattctattggtgagtctaagggtcacgcaatggg

SEQ ID NO: 298512 - DNA, 284 bp, Homo sapiens
gtgcttcatgaactcggccctgcaggttgggccattatagttgtgtctggcacagccacgtggttgggcttcaagagctgaggattggggacagagctggggtcctgaggggactacagggcaaggggtcaggatgaaagctgaggccccacaagtctgaagtggcacgcccacgttcattcctgaactatcagcctcttctctcagcttgccctcattttccctcttctcttccctgttcccacgttcttccttctcgtgaaatcctaatgccttctctcccc

SEQ ID NO: 298513 - DNA, 255 bp, Homo sapiens
tgggaggagtgacaagagtgaatctggacacttctgagaggcaggaagggtaggcgaggataactctccttccctttcagacacaacatttgcctgcaacaaggacagcggccagtggcactactttgatgacaacagcgtctcccctgtcaatgagaatcagatcgaggtgtgacttccatcctacctcctccccttcttcctttctgattccacctccccacccccacaatccacactgactcctgtcctctc

SEQ ID NO: 298514 - DNA, 1022 bp, Homo sapiens
  misc_feature (877)..(877): n is a, c, g, or t
gaggtgaggccggactgaggctcttacagtggtccctgctggcccttggtgacgggtcgcgtcagttccgacccggacccgtacgctgctgcgctgacgtggctcccggaagtagggctggcgtagggccgccatgttgcagcaggatagtaatgatgacactgaagatgtttcactgtttgatgcggaagaggagacgactaatagaccaagaaaagccaaaatcagacatccagtagcatcgtttttccacttattctttcgagtcagtgcaatcatcgtctatcttctctgtgagttgctcagcagcagctttattacctgtatggtgacaattatcttgttgttgtcgtgtgacttttgggcagtgaagaatgtcacaggtagactaatggttggcctacgttggtggaatcacattgatgaagatggaaagagccattgggtgtttgaatctagaaaggagtcctctcaagagaataaaactgtgtcagaggctgaatcaagaatctttggttgggacttattgcctgtccagtactgtgggtgatatttgcctttagtgcactcttctccttcagagtaaagtggttggcggtggttatcatgggtgtggtgctacaaggtgccaacctgtatggttacatcaggtgtaaggtgcgcagcagaaagcatttaaccagcatggctacttcatattttggaaagcagtttttaagacaaacactggagatgatcagacttcctgaatagagaaagcttatgtgcttgttacattggggaacactgaagagattcttgatcaaccttttagagcttagcccatgtgcacgaggagggtggcttgtttttccacttaaaactttttttacacggnaggttcaataagttattccttcccacggctcaattggggcaaccctccacttcggggtgcaccccgttaccgtgacatcacatgaggctataggacctcgcacagcgtttccactatatcggtgagcgccgacttgcgcaatttc

SEQ ID NO: 298515 - DNA, 1568 bp, Homo sapiens
gaggtgaggccggactgaggctcttacagtggtccctgctggcccttggtgacgggtcgcgtcagttccgacccggacccgtacgctgctgcgctgacgtggctcccggaagtagggctggcgtagggccgccatgttgcagcaggatagtaatgatgacactgaagatgtttcactgtttgatgcggaagaggagacgactaatagaccaagaaaagccaaaatcagacatccagtagcatcgtttttccacttattctttcgagtcagtgcaatcatcgtctatcttctctgtgagttgctcagcagcagctttattacctgtatggtgacaattatcttgttgttgtcgtgtgacttttgggcagtgaagaatgtcacaggtagactaatggttggcctacgttggtggaatcacattgatgaagatggaaagagccattgggtgtttgaatctagaaaggagtcctctcaagagaataaaactgtgtcagaggctgaatcaagaatctttggttgggacttattgcctgtccagtactgtgggtgatatttgcctttagtgcactcttctccttcagagtaaagtggttgagacggtctcgccacattgcccagactggtctgaaagtcttgggctcaagagatcctcccgcttccgccttccaaagcgctgggataacaggcgtgagccgctgcccgggccatccctcgaggaagtttcatcaggtagacattaattctttcacgaggatcacggatcgagctctttactggaaacctgcgccccgccttagttctccacctcttcgtgcggctccaggcaactgccaacagatggcgcccgcccgcctatttctctccttgcggctttgggcctggaggggaggtggggagagtcccaatagcagaggaactggtgagcccgggccaaaatttcatctggcatccggaatgcattaaaaacaacccacaaatctgaagctcctcgcaggagagagagagagagagagagaggagagagaggagagaggagagagggagggaagagagtgacggagaaggagagaaagagacgggagagaggagagagaaagagagagagaggagagagagaaagaacgaacgaacagggaacttgtaaaactaaggggaaaagggcagaagagaggcagcagcgtggtccctgcaagcgtccgctttcctggccaagcagcccccagcacgcctgctttgtggggcagggccatgcggccccgaggaaggatgcggtgagccagagggttccagacaaaggaggggatccccaaggctctgggccagccagtccctgttttactggcaccacggtccctcctaggcgaggacgaagagggaaggggtggagacctccaccttctctgcgtgtggctgcgtccctttacagaatgacaggcccttacttccgagggcggggactaatgtgtaaggcttaacagatccaattccagaaattatctgtgtttttttcaatcaccctcttgtgcccccccaccccccattaaatttcatcttttatctttttttgg

SEQ ID NO: 298516 - DNA, 653 bp, Homo sapiens
tatagccccatggctgccttcattaccactacctcttcagtgttgagaacacacatgcgttgaatgtgtaatcagtatataactgtgggtctgtgtggcctgggctgtgcatgatgctgactcaaataaacagcggttttattggaccctctccttcttccagaagaagatcaatggaaagtaccttccaagttttggtccctcaagaagcccctgaaggtcagagggaggggaggaaaataccttcttgatgcaccagaaatcaccttataaacctcatcctccgtggagcacagtggctcacacctgtaatctcagcactttgggaggctgaggagagaggatcatttgaggctaggggtttgagaccaagctgggccaaatagtgagaccttgtctctacaaaaaaattttaaaaatgtgctgggcatggtggtgcgtgcctgtagtcccagcttgagcccaggaagttgtggcttcagtgagctgtgatcaccccactgcactctagcctgggccaaagcacgagaccctgtctcttaaaaaaaaattgtctttattaaaatgattctcagtatccttcatgctactgcagctgatttccaaagctgcctcatcttccgcgctctcaactcttaataaacccatccaaa

SEQ ID NO: 298517 - DNA, 264 bp, Homo sapiens
ccattatggcatgtgaagtcaccgccctgacacataaactctggaataattctgtgaaagcaggaacccttataaccaaatcctttctctccagtgcttagagcatgaaagttttctgccgtctttggaatcttgtttgcaaacagctcaaaggagatgcggcccaagggctccccgttgatggcgatgttgaagaacatggtggggttgaccacggctgatagtgtgttctagtgggttcttggtctcactgacttcaagaat

SEQ ID NO: 298518 - DNA, 439 bp, Homo sapiens
aagtcctaaccccacattacttttcaaggtgactgtatttggagacaggacctttaaagacatgattaagataaaatgaggtcatatgggtaggccttaattcagtctgactggtgttccataagaagaggatattaggacacagacacacagaggaaggaccgtgtgaagacgaagggggaagatgccgtccacaagccaaggagagaggccttagaggaaaccagccctgctgacaccttgatcttgggcttccagtctccagaacttgcttagagcatgaaagttttctgccgtctttggaatcttgtttgcaaacagctcaaaggagatgcggcccaagggctccccgttgatggcgatgttgaagaacatggtggggttgaccacggctgatagtgtgttctagtgggttcttggtctcactgacttcaagaat

SEQ ID NO: 298519 - DNA, 2999 bp, Homo sapiens
gaggtgaggccggactgaggctcttacagtggtccctgctggcccttggtgacgggtcgcgtcagttccgacccggacccgtacgctgctgcgctgacgtggctcccggaagtagggctggcgtagggccgccatgttgcagcaggatagtaatgatgacactgaagatgtttcactgtttgatgcggaagaggagacgactaatagaccaagaaaagccaaaatcagacatccagtagcatcgtttttccacttattctttcgagtcagtgcaatcatcgtctatcttctctgtgagttgctcagcagcagctttattacctgtatggtgacaattatcttgttgttgtcgtgtgacttttgggcagtgaagaatgtcacaggtagactaatggttggcctacgttggtggaatcacattgatgaagatggaaagagccattgggtgtttgaatctagaaaggagtcctctcaagagaataaaactgtgtcagaggctgaatcaagaatctttggttgggacttattgcctgtccagtactgtgggtgatatttgcctttagtgcactcttctccttcagagtaaagtggttgagacggtctcgccacattgcccagactggtctgaaagtcttgggctcaagagatcctcccgcttccgccttccaaagcgctgggataacaggcgtgagccgctgcccgggccatccctcgaggaagtttcatcaggaatctgaacctgtgatgttaagaaatcagtaaatattaaaaagaagatggatgcaagaaggatgaagaaagaagaaggactcacagaaaacactggacttccccggaagctacttgaaaaacatgacccctggcggcctatgtcacctatacctctcagacagtgaaaagactcattgagaaaagcaaaactagagaactggaatgcatgcgtgccctcgaggaaagaccctgggcatcaaggcagaataaaccttccagcgtcattcagccgaaaaggaggaagtcttccaagtcttctggcaaagctgtgttcagggacacgctgtcagaatccacgttatcaatgtggggcgcttattcggtattggccatggctcctaccatgatcccagaacccacacacttacatgcggattccagagactgtccaactgaaaactataacaagatcatctttgcccgcaagcctatgatgaggatgctccctacagttcgctactgaccaacaaggagaaacatgcaaatgttttagccaggggtccctgcagccattccccaagaacgtacaaaagttaagctccatttaccactcacttgacagtgtcctttaaatctgaacttgctcttgctcatgcggagcttggctaagagaaaccagatcagaatgcaagctgtaggtgggtgggtgagtgtgtcccctcccacactgctctctggtgggtttgggcagtccctggctctagtctctgctgcagattctcaggaccaaaatgtgggtgatttgtctgggtccaggcaggagacagaaatcacacaagctcttttattagagataatataaagaatgattaaccaggtgacagtaaagggcaggaagggaatacaaaggtatccatggaggtagcaccacaggaagcaggcatcacacttgaggcttgggaacaaggggaagatgctggactcattgaaaggtggttgcttggagaagggacatggggctgaatctcagacttctgaggtgggggagtggggatgccactcaatgcagctggtatctctgagctctgaggagagtcctgtggggatggtgccccctcctctgaataggggagatgttttgttggtgtctctgaggggacccccatgaggctgcttttgtgagtgttggaaaaaccaaaaactgcattgaaatgtttctgggaggagttgccactgcctgggtgaagaaaaagcactgctagggttagcaacctgtctggcaagggacaggaagctgatagaaagtgaacaggaagcaaacaggaagtgagcaaggggccacttcctacttcctcctttagcctagcagattccttctagctccccctgggggctgagcctatcagggcacaaagccagaatgtggtttgtagaatcccagccccagcatctccaagcataggatggattttgaagccaagagggaattagctctcggccgggttctgagtgatcccatccagctgctcctggacctggtattgagaggtttttcccttggagggcaaacaaagtggcagtggggaccagggtgtcccctgctgagaaatggagagctcttttcccctgtacttctctggggtttgccttgtggaaccaagtgcttgggggaggagctcctggcaggactccagctgttatttgtcagaggacagctaggattggttcacccttgctctgagttggccccaaagcgagctatgctgaactcttctccatctccaagcagacaacctttgtctttacatgcaagagggatccaattatgacaggctgacccagctggtttcatgtttggggtttatctactgagtaaggctgaccttacctgagtttctgtatgtgtatttgcaagacagttaatactaatccatcatccctcacagagatgtagaggatgagatgtagtaacttatagcagtgtcatttggaaaagttgaatttgccctacaaggcatgttctccattcaagggtcttgtgtaaacgtttgcagacacaggtgcagctttggagaactcacctctggctcttgtgcttttatgttgggacagctgcctaaattaggagctctagacctgttattggttcccaactgttggccagaatgaattcttcgaaaaatataggtggtttccagggaatttgaatgattgtattttgtgtccatggaacgtttatagacatggaggcaggcaataaattcctccaataatttttttatctcttt

SEQ ID NO: 298520 - DNA, 2997 bp, Homo sapiens
gtcacgcccacagactcctgacctggtggcaccagatccagtctgaagggacgaggatggaggacggaggttcatatccacagggagagaggggccctgggaggagggggccgccatgttgcagcaggatagtaatgatgacactgaagatgtttcactgtttgatgcggaagaggagacgactaatagaccaagaaaagccaaaatcagacatccagtagcatcgtttttccacttattctttcgagtcagtgcaatcatcgtctatcttctctgtgagttgctcagcagcagctttattacctgtatggtgacaattatcttgttgttgtcgtgtgacttttgggcagtgaagaatgtcacaggtagactaatggttggcctacgttggtggaatcacattgatgaagatggaaagagccattgggtgtttgaatctagaaaggagtcctctcaagagaataaaactgtgtcagaggctgaatcaagaatctttggttgggacttattgcctgtccagtactgtgggtgatatttgcctttagtgcactcttctccttcagagtaaagtggttggaacccagtgaaatgagctgcaccaggaactttaagagagagttttcagctgggagaagaggaaggcaagatatcagaacaagttaagcaaatctggccttgggttttgaccacagtctatccttccagtgggccaagagttgcttggaatgaatctgaacctgtgatgttaagaaatcagtaaatattaaaaagaagatggatgcaagaaggatgaagaaagaagaaggactcacagaaaacactggacttccccggaagctacttgaaaaacatgacccctggcggcctatgtcacctatacctctcagacagtgaaaagactcattgagaaaagcaaaactagagaactggaatgcatgcgtgccctcgaggaaagaccctgggcatcaaggcagaataaaccttccagcgtcattcagccgaaaaggaggaagtcttccaagtcttctggcaaagctgtgttcagggacacgctgtcagaatccacgttatcaatgtggggcgcttattcggtattggccatggctcctaccatgatcccagaacccacacacttacatgcggattccagagactgtccaactgaaaactataacaagatcatctttgcccgcaagcctatgatgaggatgctccctacagttcgctactgaccaacaaggagaaacatgcaaatgttttagccaggggtccctgcagccattccccaagaacgtacaaaagttaagctccatttaccactcacttgacagtgtcctttaaatctgaacttgctcttgctcatgcggagcttggctaagagaaaccagatcagaatgcaagctgtaggtgggtgggtgagtgtgtcccctcccacactgctctctggtgggtttgggcagtccctggctctagtctctgctgcagattctcaggaccaaaatgtgggtgatttgtctgggtccaggcaggagacagaaatcacacaagctcttttattagagataatataaagaatgattaaccaggtgacagtaaagggcaggaagggaatacaaaggtatccatggaggtagcaccacaggaagcaggcatcacacttgaggcttgggaacaaggggaagatgctggactcattgaaaggtggttgcttggagaagggacatggggctgaatctcagacttctgaggtgggggagtggggatgccactcaatgcagctggtatctctgagctctgaggagagtcctgtggggatggtgccccctcctctgaataggggagatgttttgttggtgtctctgaggggacccccatgaggctgcttttgtgagtgttggaaaaaccaaaaactgcattgaaatgtttctgggaggagttgccactgcctgggtgaagaaaaagcactgctagggttagcaacctgtctggcaagggacaggaagctgatagaaagtgaacaggaagcaaacaggaagtgagcaaggggccacttcctacttcctcctttagcctagcagattccttctagctccccctgggggctgagcctatcagggcacaaagccagaatgtggtttgtagaatcccagccccagcatctccaagcataggatggattttgaagccaagagggaattagctctcggccgggttctgagtgatcccatccagctgctcctggacctggtattgagaggtttttcccttggagggcaaacaaagtggcagtggggaccagggtgtcccctgctgagaaatggagagctcttttcccctgtacttctctggggtttgccttgtggaaccaagtgcttgggggaggagctcctggcaggactccagctgttatttgtcagaggacagctaggattggttcacccttgctctgagttggccccaaagcgagctatgctgaactcttctccatctccaagcagacaacctttgtctttacatgcaagagggatccaattatgacaggctgacccagctggtttcatgtttggggtttatctactgagtaaggctgaccttacctgagtttctgtatgtgtatttgcaagacagttaatactaatccatcatccctcacagagatgtagaggatgagatgtagtaacttatagcagtgtcatttggaaaagttgaatttgccctacaaggcatgttctccattcaagggtcttgtgtaaacgtttgcagacacaggtgcagctttggagaactcacctctggctcttgtgcttttatgttgggacagctgcctaaattaggagctctagacctgttattggttcccaactgttggccagaatgaattcttcgaaaaatataggtggtttccagggaatttgaatgattgtattttgtgtccatggaacgtttatagacatggaggcaggcaataaattcctccaataatttttttatctcttt

SEQ ID NO: 298521 - DNA, 2992 bp, Homo sapiens
cttgtcttagaaaggcaagttcttgggccccaccccacatatactgaatcagagaccctgggagtgggacccagcaatctgtcttaatagaccttctaggagattctggcactaaggaaagagaccacaggtcttgtctatctctgtagttggctgcgtctgggccagagtaactgcttgttgaaatgatcagagatctcaaatgaggtcatgcatgttggggtgtgtgtgtgtgcatgtgtgtgtgttgtgtatctttatgtgtgtatgtgtttggtctagggtccagcacatagtaggtgttcactcttgggggtgggaataatcactctaatgtccgtgtttgaggactgcattgctggtgaccgctgagcctgcagaggaggaagagagcagggcagaagattcaggagggggtgcatggcaacttctgatgtcacagtgccccccttcactcctgacttctggctcatgggtcactttggggcaggggcaagaggatggttagctgcagcaaagagagagccaaagagaagtgggattgagagcacaggggacagctggagacaaaatataaacgccgggcaggggaacagccaagatagtgcaggaaggatggggaatcacagaaacttctcaggaacccagtgaaatgagctgcaccaggaactttaagagagagttttcagctgggagaagaggaaggcaagatatcagaacaagaatctgaacctgtgatgttaagaaatcagtaaatattaaaaagaagatggatgcaagaaggatgaagaaagaagaaggactcacagaaaacactggacttccccggaagctacttgaaaaacatgacccctggcggcctatgtcacctatacctctcagacagtgaaaagactcattgagaaaagcaaaactagagaactggaatgcatgcgtgccctcgaggaaagaccctgggcatcaaggcagaataaaccttccagcgtcattcagccgaaaaggaggaagtcttccaagtcttctggcaaagctgtgttcagggacacgctgtcagaatccacgttatcaatgtggggcgcttattcggtattggccatggctcctaccatgatcccagaacccacacacttacatgcggattccagagactgtccaactgaaaactataacaagatcatctttgcccgcaagcctatgatgaggatgctccctacagttcgctactgaccaacaaggagaaacatgcaaatgttttagccaggggtccctgcagccattccccaagaacgtacaaaagttaagctccatttaccactcacttgacagtgtcctttaaatctgaacttgctcttgctcatgcggagcttggctaagagaaaccagatcagaatgcaagctgtaggtgggtgggtgagtgtgtcccctcccacactgctctctggtgggtttgggcagtccctggctctagtctctgctgcagattctcaggaccaaaatgtgggtgatttgtctgggtccaggcaggagacagaaatcacacaagctcttttattagagataatataaagaatgattaaccaggtgacagtaaagggcaggaagggaatacaaaggtatccatggaggtagcaccacaggaagcaggcatcacacttgaggcttgggaacaaggggaagatgctggactcattgaaaggtggttgcttggagaagggacatggggctgaatctcagacttctgaggtgggggagtggggatgccactcaatgcagctggtatctctgagctctgaggagagtcctgtggggatggtgccccctcctctgaataggggagatgttttgttggtgtctctgaggggacccccatgaggctgcttttgtgagtgttggaaaaaccaaaaactgcattgaaatgtttctgggaggagttgccactgcctgggtgaagaaaaagcactgctagggttagcaacctgtctggcaagggacaggaagctgatagaaagtgaacaggaagcaaacaggaagtgagcaaggggccacttcctacttcctcctttagcctagcagattccttctagctccccctgggggctgagcctatcagggcacaaagccagaatgtggtttgtagaatcccagccccagcatctccaagcataggatggattttgaagccaagagggaattagctctcggccgggttctgagtgatcccatccagctgctcctggacctggtattgagaggtttttcccttggagggcaaacaaagtggcagtggggaccagggtgtcccctgctgagaaatggagagctcttttcccctgtacttctctggggtttgccttgtggaaccaagtgcttgggggaggagctcctggcaggactccagctgttatttgtcagaggacagctaggattggttcacccttgctctgagttggccccaaagcgagctatgctgaactcttctccatctccaagcagacaacctttgtctttacatgcaagagggatccaattatgacaggctgacccagctggtttcatgtttggggtttatctactgagtaaggctgaccttacctgagtttctgtatgtgtatttgcaagacagttaatactaatccatcatccctcacagagatgtagaggatgagatgtagtaacttatagcagtgtcatttggaaaagttgaatttgccctacaaggcatgttctccattcaagggtcttgtgtaaacgtttgcagacacaggtgcagctttggagaactcacctctggctcttgtgcttttatgttgggacagctgcctaaattaggagctctagacctgttattggttcccaactgttggccagaatgaattcttcgaaaaatataggtggtttccagggaatttgaatgattgtattttgtgtccatggaacgtttatagacatggaggcaggcaataaattcctccaataatttttttatctcttt

SEQ ID NO: 298522 - DNA, 2879 bp, Homo sapiens
aaccatatacttataagtcaacttgcacagaatctcctgctagcttattttggtgaacacaaaactgaatgcaaaaatccccatccttcaaagaatttgacattctaatgtcaccaatttttcgacatgctaatgccagcaattttttttgaaagttgaaatagaacataataaggcaacaaaacgagactaagagggttctgcaccgtgttccaacaatcttcagtccccttcactgttcatgtctaagcactgaggcgttctaaagcaggtcaccttttgcctcaaggacttttcttgaaatatcatggtcttgctctgtcgcccaggctggagtgcagtggcgtggtcacagctcattgcagcttcgacttcctgggctgaagcgatcctcccatctcggcctgtcaagtagctggaaccacaggcgcgccactacacctggctaatttatttttattttattttttgtagagacggtctcgccacattgcccagactggtctgaaagtcttgggctcaagagatcctcccgcttccgccttccaaagcgctgggataacaggcgtgagccgctgcccgggccatccctcgaggaagtttcatcaggaatctgaacctgtgatgttaagaaatcagtaaatattaaaaagaagatggatgcaagaaggatgaagaaagaagaaggactcacagaaaacactggacttccccggaagctacttgaaaaacatgacccctggcggcctatgtcacctatacctctcagacagtgaaaagactcattgagaaaagcaaaactagagaactggaatgcatgcgtgccctcgaggaaagaccctgggcatcaaggcagaataaaccttccagcgtcattcagccgaaaaggaggaagtcttccaagtcttctggcaaagctgtgttcagggacacgctgtcagaatccacgttatcaatgtggggcgcttattcggtattggccatggctcctaccatgatcccagaacccacacacttacatgcggattccagagactgtccaactgaaaactataacaagatcatctttgcccgcaagcctatgatgaggatgctccctacagttcgctactgaccaacaaggagaaacatgcaaatgttttagccaggggtccctgcagccattccccaagaacgtacaaaagttaagctccatttaccactcacttgacagtgtcctttaaatctgaacttgctcttgctcatgcggagcttggctaagagaaaccagatcagaatgcaagctgtaggtgggtgggtgagtgtgtcccctcccacactgctctctggtgggtttgggcagtccctggctctagtctctgctgcagattctcaggaccaaaatgtgggtgatttgtctgggtccaggcaggagacagaaatcacacaagctcttttattagagataatataaagaatgattaaccaggtgacagtaaagggcaggaagggaatacaaaggtatccatggaggtagcaccacaggaagcaggcatcacacttgaggcttgggaacaaggggaagatgctggactcattgaaaggtggttgcttggagaagggacatggggctgaatctcagacttctgaggtgggggagtggggatgccactcaatgcagctggtatctctgagctctgaggagagtcctgtggggatggtgccccctcctctgaataggggagatgttttgttggtgtctctgaggggacccccatgaggctgcttttgtgagtgttggaaaaaccaaaaactgcattgaaatgtttctgggaggagttgccactgcctgggtgaagaaaaagcactgctagggttagcaacctgtctggcaagggacaggaagctgatagaaagtgaacaggaagcaaacaggaagtgagcaaggggccacttcctacttcctcctttagcctagcagattccttctagctccccctgggggctgagcctatcagggcacaaagccagaatgtggtttgtagaatcccagccccagcatctccaagcataggatggattttgaagccaagagggaattagctctcggccgggttctgagtgatcccatccagctgctcctggacctggtattgagaggtttttcccttggagggcaaacaaagtggcagtggggaccagggtgtcccctgctgagaaatggagagctcttttcccctgtacttctctggggtttgccttgtggaaccaagtgcttgggggaggagctcctggcaggactccagctgttatttgtcagaggacagctaggattggttcacccttgctctgagttggccccaaagcgagctatgctgaactcttctccatctccaagcagacaacctttgtctttacatgcaagagggatccaattatgacaggctgacccagctggtttcatgtttggggtttatctactgagtaaggctgaccttacctgagtttctgtatgtgtatttgcaagacagttaatactaatccatcatccctcacagagatgtagaggatgagatgtagtaacttatagcagtgtcatttggaaaagttgaatttgccctacaaggcatgttctccattcaagggtcttgtgtaaacgtttgcagacacaggtgcagctttggagaactcacctctggctcttgtgcttttatgttgggacagctgcctaaattaggagctctagacctgttattggttcccaactgttggccagaatgaattcttcgaaaaatataggtggtttccagggaatttgaatgattgtattttgtgtccatggaacgtttatagacatggaggcaggcaataaattcctccaataatttttttatctcttt

SEQ ID NO: 298523 - DNA, 2870 bp, Homo sapiens
gaggtgaggccggactgaggctcttacagtggtccctgctggcccttggtgacgggtcgcgtcagttccgacccggacccgtacgctgctgcgctgacgtggctcccggaagtagggctggcgtagggccgccatgttgcagcaggatagtaatgatgacactgaagatgtttcactgtttgatgcggaagaggagacgactaatagaccaagaaaagccaaaatcagaatgtcacaggtagactaatggttggcctacgttggtggaatcacattgatgaagatggaaagagccattgggtgtttgaatctagaaaggagtcctctcaagagaataaaactgtgtcagaggctgaatcaagaatctttggttgggacttattgcctgtccagtactgtgggtgatatttgcctttagtgcactcttctccttcagagtaaagtggttggaacccagtgaaatgagctgcaccaggaactttaagagagagttttcagctgggagaagaggaaggcaagatatcagaacaagttaagcaaatctggccttgggttttgaccacagtctatccttccagtgggccaagagttgcttggaatgaatctgaacctgtgatgttaagaaatcagtaaatattaaaaagaagatggatgcaagaaggatgaagaaagaagaaggactcacagaaaacactggacttccccggaagctacttgaaaaacatgacccctggcggcctatgtcacctatacctctcagacagtgaaaagactcattgagaaaagcaaaactagagaactggaatgcatgcgtgccctcgaggaaagaccctgggcatcaaggcagaataaaccttccagcgtcattcagccgaaaaggaggaagtcttccaagtcttctggcaaagctgtgttcagggacacgctgtcagaatccacgttatcaatgtggggcgcttattcggtattggccatggctcctaccatgatcccagaacccacacacttacatgcggattccagagactgtccaactgaaaactataacaagatcatctttgcccgcaagcctatgatgaggatgctccctacagttcgctactgaccaacaaggagaaacatgcaaatgttttagccaggggtccctgcagccattccccaagaacgtacaaaagttaagctccatttaccactcacttgacagtgtcctttaaatctgaacttgctcttgctcatgcggagcttggctaagagaaaccagatcagaatgcaagctgtaggtgggtgggtgagtgtgtcccctcccacactgctctctggtgggtttgggcagtccctggctctagtctctgctgcagattctcaggaccaaaatgtgggtgatttgtctgggtccaggcaggagacagaaatcacacaagctcttttattagagataatataaagaatgattaaccaggtgacagtaaagggcaggaagggaatacaaaggtatccatggaggtagcaccacaggaagcaggcatcacacttgaggcttgggaacaaggggaagatgctggactcattgaaaggtggttgcttggagaagggacatggggctgaatctcagacttctgaggtgggggagtggggatgccactcaatgcagctggtatctctgagctctgaggagagtcctgtggggatggtgccccctcctctgaataggggagatgttttgttggtgtctctgaggggacccccatgaggctgcttttgtgagtgttggaaaaaccaaaaactgcattgaaatgtttctgggaggagttgccactgcctgggtgaagaaaaagcactgctagggttagcaacctgtctggcaagggacaggaagctgatagaaagtgaacaggaagcaaacaggaagtgagcaaggggccacttcctacttcctcctttagcctagcagattccttctagctccccctgggggctgagcctatcagggcacaaagccagaatgtggtttgtagaatcccagccccagcatctccaagcataggatggattttgaagccaagagggaattagctctcggccgggttctgagtgatcccatccagctgctcctggacctggtattgagaggtttttcccttggagggcaaacaaagtggcagtggggaccagggtgtcccctgctgagaaatggagagctcttttcccctgtacttctctggggtttgccttgtggaaccaagtgcttgggggaggagctcctggcaggactccagctgttatttgtcagaggacagctaggattggttcacccttgctctgagttggccccaaagcgagctatgctgaactcttctccatctccaagcagacaacctttgtctttacatgcaagagggatccaattatgacaggctgacccagctggtttcatgtttggggtttatctactgagtaaggctgaccttacctgagtttctgtatgtgtatttgcaagacagttaatactaatccatcatccctcacagagatgtagaggatgagatgtagtaacttatagcagtgtcatttggaaaagttgaatttgccctacaaggcatgttctccattcaagggtcttgtgtaaacgtttgcagacacaggtgcagctttggagaactcacctctggctcttgtgcttttatgttgggacagctgcctaaattaggagctctagacctgttattggttcccaactgttggccagaatgaattcttcgaaaaatataggtggtttccagggaatttgaatgattgtattttgtgtccatggaacgtttatagacatggaggcaggcaataaattcctccaataatttttttatctcttt

SEQ ID NO: 298524 - DNA, 2262 bp, Homo sapiens
gtgcaccgtgattcgtatagccgttctagagtatcccccggcatgcagctagggatcaagaatgaagaaggactcacagaaaacactggacttccccggaagctacttgaaaaacatgacccctggcggcctatgtcacctatacctctcagacagtgaaaagactcattgagaaaagcaaaactagagaactggaatgcatgcgtgccctcgaggaaagaccctgggcatcaaggcagaataaaccttccagcgtcattcagccgaaaaggaggaagtcttccaagtcttctggcaaagctgtgttcagggacacgctgtcagaatccacgttatcaatgtggggcgcttattcggtattggccatggctcctaccatgatcccagaacccacacacttacatgcggattccagagactgtccaactgaaaactataacaagatcatctttgcccgcaagcctatgatgaggatgctccctacagttcgctactgaccaacaaggagaaacatgcaaatgttttagccaggggtccctgcagccattccccaagaacgtacaaaagttaagctccatttaccactcacttgacagtgtcctttaaatctgaacttgctcttgctcatgcggagcttggctaagagaaaccagatcagaatgcaagctgtaggtgggtgggtgagtgtgtcccctcccacactgctctctggtgggtttgggcagtccctggctctagtctctgctgcagattctcaggaccaaaatgtgggtgatttgtctgggtccaggcaggagacagaaatcacacaagctcttttattagagataatataaagaatgattaaccaggtgacagtaaagggcaggaagggaatacaaaggtatccatggaggtagcaccacaggaagcaggcatcacacttgaggcttgggaacaaggggaagatgctggactcattgaaaggtggttgcttggagaagggacatggggctgaatctcagacttctgaggtgggggagtggggatgccactcaatgcagctggtatctctgagctctgaggagagtcctgtggggatggtgccccctcctctgaataggggagatgttttgttggtgtctctgaggggacccccatgaggctgcttttgtgagtgttggaaaaaccaaaaactgcattgaaatgtttctgggaggagttgccactgcctgggtgaagaaaaagcactgctagggttagcaacctgtctggcaagggacaggaagctgatagaaagtgaacaggaagcaaacaggaagtgagcaaggggccacttcctacttcctcctttagcctagcagattccttctagctccccctgggggctgagcctatcagggcacaaagccagaatgtggtttgtagaatcccagccccagcatctccaagcataggatggattttgaagccaagagggaattagctctcggccgggttctgagtgatcccatccagctgctcctggacctggtattgagaggtttttcccttggagggcaaacaaagtggcagtggggaccagggtgtcccctgctgagaaatggagagctcttttcccctgtacttctctggggtttgccttgtggaaccaagtgcttgggggaggagctcctggcaggactccagctgttatttgtcagaggacagctaggattggttcacccttgctctgagttggccccaaagcgagctatgctgaactcttctccatctccaagcagacaacctttgtctttacatgcaagagggatccaattatgacaggctgacccagctggtttcatgtttggggtttatctactgagtaaggctgaccttacctgagtttctgtatgtgtatttgcaagacagttaatactaatccatcatccctcacagagatgtagaggatgagatgtagtaacttatagcagtgtcatttggaaaagttgaatttgccctacaaggcatgttctccattcaagggtcttgtgtaaacgtttgcagacacaggtgcagctttggagaactcacctctggctcttgtgcttttatgttgggacagctgcctaaattaggagctctagacctgttattggttcccaactgttggccagaatgaattcttcgaaaaatataggtggtttccagggaatttgaatgattgtattttgtgtccatggaacgtttatagacatggaggcaggcaataaattcctccaataatttttttatctcttt

SEQ ID NO: 298525 - DNA, 1851 bp, Homo sapiens
tatagccccatggctgccttcattaccactacctcttcagtgttgagaacacacatgcgttgaatgtgtaatcagtatataactgtgggtctgtgtggcctgggctgtgcatgatgctgactcaaataaacaccattccccaagaacgtacaaaagttaagctccatttaccactcacttgacagtgtcctttaaatctgaacttgctcttgctcatgcggagcttggctaagagaaaccagatcagaatgcaagctgtaggtgggtgggtgagtgtgtcccctcccacactgctctctggtgggtttgggcagtccctggctctagtctctgctgcagattctcaggaccaaaatgtgggtgatttgtctgggtccaggcaggagacagaaatcacacaagctcttttattagagataatataaagaatgattaaccaggtgacagtaaagggcaggaagggaatacaaaggtatccatggaggtagcaccacaggaagcaggcatcacacttgaggcttgggaacaaggggaagatgctggactcattgaaaggtggttgcttggagaagggacatggggctgaatctcagacttctgaggtgggggagtggggatgccactcaatgcagctggtatctctgagctctgaggagagtcctgtggggatggtgccccctcctctgaataggggagatgttttgttggtgtctctgaggggacccccatgaggctgcttttgtgagtgttggaaaaaccaaaaactgcattgaaatgtttctgggaggagttgccactgcctgggtgaagaaaaagcactgctagggttagcaacctgtctggcaagggacaggaagctgatagaaagtgaacaggaagcaaacaggaagtgagcaaggggccacttcctacttcctcctttagcctagcagattccttctagctccccctgggggctgagcctatcagggcacaaagccagaatgtggtttgtagaatcccagccccagcatctccaagcataggatggattttgaagccaagagggaattagctctcggccgggttctgagtgatcccatccagctgctcctggacctggtattgagaggtttttcccttggagggcaaacaaagtggcagtggggaccagggtgtcccctgctgagaaatggagagctcttttcccctgtacttctctggggtttgccttgtggaaccaagtgcttgggggaggagctcctggcaggactccagctgttatttgtcagaggacagctaggattggttcacccttgctctgagttggccccaaagcgagctatgctgaactcttctccatctccaagcagacaacctttgtctttacatgcaagagggatccaattatgacaggctgacccagctggtttcatgtttggggtttatctactgagtaaggctgaccttacctgagtttctgtatgtgtatttgcaagacagttaatactaatccatcatccctcacagagatgtagaggatgagatgtagtaacttatagcagtgtcatttggaaaagttgaatttgccctacaaggcatgttctccattcaagggtcttgtgtaaacgtttgcagacacaggtgcagctttggagaactcacctctggctcttgtgcttttatgttgggacagctgcctaaattaggagctctagacctgttattggttcccaactgttggccagaatgaattcttcgaaaaatataggtggtttccagggaatttgaatgattgtattttgtgtccatggaacgtttatagacatggaggcaggcaataaattcctccaataatttttttatctcttt

SEQ ID NO: 298526 - DNA, 987 bp, Homo sapiens
gtcacgcccacagactcctgacctggtggcaccagatccagtctgaagggacgaggatggaggacggaggttcatatccacagggagagaggggccctgggaggagggggccgccatgttgcagcaggatagtaatgatgacactgaagatgtttcactgtttgatgcggaagaggagacgactaatagaccaagaaaagccaaaatcagacatccagtagcatcgtttttccacttattctttcgagtcagtgcaatcatcgtctatcttctctgtgagttgctcagcagcagctttattacctgtatggtgacaattatcttgttgttgtcgtgtgacttttgggcagtgaagaatgtcacaggtagactaatggttggcctacgttggtggaatcacattgatgaagatggaaagagccattgggtgtttgaatctagaaaggagtcctctcaagagaataaaactgtgtcagaggctgaatcaagaatctttggttgggacttattgcctgtccagtactgtgggtgatatttgcctttagtgcactcttctccttcagagtaaagtggttggtgactgtatttggagacaggacctttaaagacatgattaagataaaatgaggtcatatgggtaggccttaattcagtctgactggtgttccataagaagaggatattaggacacagacacacagaggaaggaccgtgtgaagacgaagggggaagatgccgtccacaagccaaggagagaggccttagaggaaaccagccctgctgacaccttgatcttgggcttccagtctccagaacttgcttagagcatgaaagttttctgccgtctttggaatcttgtttgcaaacagctcaaaggagatgcggcccaagggctccccgttgatggcgatgttgaagaacatggtggggttgaccacggctgatagtgtgttctagtgggttcttggtctcactgacttcaagaat

SEQ ID NO: 298527 - DNA, 962 bp, Homo sapiens
  misc_feature (817)..(817): n is a, c, g, or t
gaggtgaggccggactgaggctcttacagtggtccctgctggcccttggtgacgggtcgcgtcagttccgacccggacccgtacgctgctgcgctgacgtggctcccggaagtagggctggcgtagggccgccatgttgcagcaggatagtaatgatgacactgaagatgtttcactgtttgatgcggaagaggagacgactaatagaccaagaaaagccaaaatcagacatccagtagcatcgtttttccacttattctttcgagtcagtgcaatcatcgtctatcttctctgtgagttgctcagcagcagctttattacctgtatggtgacaattatcttgttgttgtcgtgtgacttttgggcagtgaagaatgtcacaggtagactaatggttggcctacgttggtggaatcacattgatgaagatggaaagagccattgggtgtttgaatctagaaagttattgcctgtccagtactgtgggtgatatttgcctttagtgcactcttctccttcagagtaaagtggttggcggtggttatcatgggtgtggtgctacaaggtgccaacctgtatggttacatcaggtgtaaggtgcgcagcagaaagcatttaaccagcatggctacttcatattttggaaagcagtttttaagacaaacactggagatgatcagacttcctgaatagagaaagcttatgtgcttgttacattggggaacactgaagagattcttgatcaaccttttagagcttagcccatgtgcacgaggagggtggcttgtttttccacttaaaactttttttacacggnaggttcaataagttattccttcccacggctcaattggggcaaccctccacttcggggtgcaccccgttaccgtgacatcacatgaggctataggacctcgcacagcgtttccactatatcggtgagcgccgacttgcgcaatttc

SEQ ID NO: 298528 - DNA, 434 bp, Homo sapiens
tgtgaaggagccagaaaccttgagattatccccagtagcctcggcttgctctgtgacttgggagagaacaggtgaggaggacaggtgttaagttgtagtagcctcatctgcaccccagagttttctcagatggtgcagcctaggggcagggatggaggagctgagacttcgattattctctggggtttttgccagatgatttgaggaggcgggtggaggatctgcatgtgtccttttctaggttttgaattcctgatgctgtaaccacattattttatcttctattttgatgagtatgcagctttgcattgcagtggctgtgtaaacactgaattttgttttgcttcttgaccatttatttttccaaccaggatagtaatgatgacactgaagatgtttcactgtttgatgcggaagaggagacgactaataga

SEQ ID NO: 298529 - DNA, 369 bp, Homo sapiens
gaactttaagagagagttttcagctgggagaagaggaaggcaagatatcagaacaagttaagcaaatctggccttgggttttgaccacagtctatccttccagtgggccaagagttgcttggaatgtaaggatttcacttctgagccttaaaaacacaatttaaggagagagagggagagagagaaagagaaagagaaagagagagagacacatcccaactaaataacacataatgggatagacggccttgatagataaggttcagataagatacttgggagcagagaggagggcctgtctatttcacctagaggcctgggccagcctctcaaaagaagtatcactggagccgtcctggaagggaagga

SEQ ID NO: 298530 - DNA, 1243 bp, Homo sapiens
acaggtttgcgccaccacacccagctaatttttgtattttttttttagtagagaccgggtctcaccatgttggccaggctggtctcacctgactttgtgatccgcccgcctcagcctcccaaagtgctgggattacaggtgtgagccaccacgcctggcctcaagcctggtctgaatatctatatgcaaatatgggacactgacttcagagctattcatttagctccagtcatagcaattctgtagtttcctcacatttactgtgtctttgtccacaaatgaaatatgttgtaaggtcagtgttaatttcgtgagacgatatagatgaacacacttgctcattttttgaaataaatatgcagatttaaaatgagtggcacatatatataaataggttattgaatgggtattctcttttccctttaatttaaaaagtgatatttatttattaaaaggagcattggtagaattattggtttatagtatcttctttaataatccttacaattacatatactaataggatgttaaaattatcatcgtgtttcctatttgtgtttagattcttataaagcatgagatgagtaatcaagggaagggtcgcatctccatgtttgccccatgaatagaatccatttgacaagccatttcatttcctttctggagaaagggagttgtttttttttttctttttacagcaaaaatttaaggttttattgggggagggggtggtgctacttcctctgtaacatgtttttaaaactatgattatggtttttggttgttttttgttttgtttgtttccttttagtctgtttttaatatccttccccttaactcttaaggaaagtcttctttcctacagggctgtgaattaaggaatgggtagcgtttacatttaagtacaccaatgtctgcccaatttcctaatgtatacatttgttttattttaaattattttttgttcttaaaaatactagaagaaaacatagatgtttctagtgcctttgaacttatactgtagtctgactaatttaatgaataacttcagtagcattactataatactgtatgctggccaaaattacaaattacagtttgttgcatcagtttcaaaagccatgctttcattgtattttatgtataaattgtatttgttcaagttgtatatattggtattgtatgtatacatgcagcatggttaaataagaataaaaatcttttacctaatgcctgtagtagt

SEQ ID NO: 298531 - DNA, 1201 bp, Homo sapiens
ggtagagacaaagtctcgctagtgttgccctggctggtctcaaactcgagaccaaagtctctggccaccttgcctcccaaagtgctgggattacaggtgtgagccaccacgcctggcctcaagcctggtctgaatatctatatgcaaatatgggacactgacttcagagctattcatttagctccagtcatagcaattctgtagtttcctcacatttactgtgtctttgtccacaaatgaaatatgttgtaaggtcagtgttaatttcgtgagacgatatagatgaacacacttgctcattttttgaaataaatatgcagatttaaaatgagtggcacatatatataaataggttattgaatgggtattctcttttccctttaatttaaaaagtgatatttatttattaaaaggagcattggtagaattattggtttatagtatcttctttaataatccttacaattacatatactaataggatgttaaaattatcatcgtgtttcctatttgtgtttagattcttataaagcatgagatgagtaatcaagggaagggtcgcatctccatgtttgccccatgaatagaatccatttgacaagccatttcatttcctttctggagaaagggagttgtttttttttttctttttacagcaaaaatttaaggttttattgggggagggggtggtgctacttcctctgtaacatgtttttaaaactatgattatggtttttggttgttttttgttttgtttgtttccttttagtctgtttttaatatccttccccttaactcttaaggaaagtcttctttcctacagggctgtgaattaaggaatgggtagcgtttacatttaagtacaccaatgtctgcccaatttcctaatgtatacatttgttttattttaaattattttttgttcttaaaaatactagaagaaaacatagatgtttctagtgcctttgaacttatactgtagtctgactaatttaatgaataacttcagtagcattactataatactgtatgctggccaaaattacaaattacagtttgttgcatcagtttcaaaagccatgctttcattgtattttatgtataaattgtatttgttcaagttgtatatattggtattgtatgtatacatgcagcatggttaaataagaataaaaatcttttacctaatgcctgtagtagt

SEQ ID NO: 298532 - DNA, 1189 bp, Homo sapiens
acaggtttgcgccaccacacccagctaatttttgtattttttttttagtagagaccgggtctcaccatgttggccaggctggtctcacctgactttgtgatccgcccgcctcagcctcccaaagtgctgggattacaggtgtgagccaccacgcctggcctcaagcctggtctgaatatctatatgcaaatatgggacactgacttcagagctattcatttagctccagtcatagcaattctgtagtttcctcacatttactgtgtctttgtccacaaatgaaatatgttgtaaggtcagtgttaatttcgtgagacgatatagatgaacacacttgctcattttttgaaataaatatgcagatttaaaatgagtggcacatatatataaataggttattgaatgggtattctcttttccctttaatttaaaaagtgatatttatttattaaaaggagcattggtagaattattggtttatagtatcttctttaataatccttacaattacatatactaataggatgttaaaattatcatcgtgtttcctatttgtgtttagattcttataaagcatgagatgagtaatcaagggaagggtcgcatctccatgtttgccccatgaatagaatccatttgacaagccatttcatttcctttctggagaaagggagttgtttttttttttctttttacagcaaaaatttaaggttttattgggggagggggtggtgctacttcctctgtaacatgtttttaaaactatgattatggtttttggttgttttttgttttgtttgtttccttttagtctgtttttaatatccttccccttaactcttaaggaaagtcttctttcctacagggctgtgaattaaggaatgggtagcgtttacatttaagtacaccaatgtctgcccaatttcctaatgtatacatttgttttattttaaattattttttgttcttaaaaatactagaagatgaataacttcagtagcattactataatactgtatgctggccaaaattacaaattacagtttgttgcatcagtttcaaaagccatgctttcattgtattttatgtataaattgtatttgttcaagttgtatatattggtattgtatgtatacatgcagcatggttaaataagaataaaaatcttttacctaatgcctgtagtagt

SEQ ID NO: 298533 - DNA, 1441 bp, Homo sapiens
caacaagactgcaacatcccctcacgcctagtctgtaaagaactttgtttaacccggaggcggggccagccagctccgcccctccagctggacgcgggagcgaggttgaggttcatacccctgggttctctccaggcctgaggcggagagccagccgcctgcctacctctgggctttgaaccccgggtctggtgacttcgcttaaagacctcgggccgaaggcccgccaggctcaacctcggttcacaggacccccgacttgtgtgagtcgtacaccgctctttaccgtctctggacctaggtcatctcggcagtaaaatggggtgaaatgacccgacctccccggaggatgccgcgcacgatgtgtgcctcaagttggcttccactgacctgaactgttaagaaagccctcctcagtgacgccttccctgaatccacagtggagattgccgttttcctggaactaattcacccacacttacccatttcatccctttccaccttttatttctacctttctgccccactgatctctagaataggtgctgggagacgttagagtatttgatctcccactccccagtcatcccacttaccgagcagtaattctctgcctggctgcacattgcaatcacttgggaagcctctaaaaatactgatgccagggctctaccccaagccagttaaaatctccagcgctggacctgggcattggtactttttgtaaagctttcaggtcaaggaagagcaagactgaaaatgtttaccagatttataatcgaggaggtcctggatgaccttggcaaaagcaaccccaatggcatgggaatgaatgtttaccaagatgatgccagtatagctagtgagatgcagcaccccatcctcagccccctcgcctctggaagagacaccagactgcaaagggcaccgcgtacagaagctaacggaacttgaatgacaagacaaaaagagcagaatcagttagtgtgacacaacattctaacatgcctgattcttacatcaaatatggtaactttggggttggtagggggagacaaacaaggagaatccacttgggaacaatttgatgaagtttgcaaatcagcactttacccccaaattaacaacagcttgtatggaaaaaaaaatgctcttttaaaagtatatggtttggacaggtaaatttgttttctcttgtagtttttgtaaaaaagtatcaaaaccttggctttaaatatatatatatatatatatacacacacacacacgtggctttttaaaaattacttttttatagcacaaagtgtttgtaaatgcagagggtttctgctaattcttgactgtgcacatggtgcatagcctgaatgaacagagcttcctgatttttttttaactgaaaaattgaagcagtaattctttaaccttctaaattctccatacc

SEQ ID NO: 298534 - DNA, 683 bp, Homo sapiens
agtttttttttaaatgaatttaatctctctctagaaacagtgcactgattttacaaatgtccacatttggttttcagtttaccaagatgatgccagtatagctagtgagatgcagcaccccatcctcagccccctcgcctctggaagagacaccagactgcaaagggcaccgcgtacagaagctaacggaacttgaatgacaagacaaaaagagcagaatcagttagtgtgacacaacattctaacatgcctgattcttacatcaaatatggtaactttggggttggtagggggagacaaacaaggagaatccacttgggaacaatttgatgaagtttgcaaatcagcactttacccccaaattaacaacagcttgtatggaaaaaaaaatgctcttttaaaagtatatggtttggacaggtaaatttgttttctcttgtagtttttgtaaaaaagtatcaaaaccttggctttaaatatatatatatatatatatacacacacacacacgtggctttttaaaaattacttttttatagcacaaagtgtttgtaaatgcagagggtttctgctaattcttgactgtgcacatggtgcatagcctgaatgaacagagcttcctgatttttttttaactgaaaaattgaagcagtaattctttaaccttctaaattctccatacc

SEQ ID NO: 298535 - DNA, 7789 bp, Homo sapiens
  misc_feature (3812)..(3812): n is a, c, g, or t
  misc_feature (4603)..(4603): n is a, c, g, or t
cgggggagcgcggcgcggccgccgcgtgcgcgagccggggttgcagcccagccgggactttccagccggcggcagccgcggcggccgccggctcttccccgccccccgccatggggcagcccggggagcagaacgctgcggaccgcggcggaggacgcgcccggcgcccctgagccggccgagcggcgacggaccgcgagatgaggaaaatgaggcccaaagaagtgatgccacttggttaaggtcccagagcaggtcagaatcagacctaggatcagaaacctggctcctggctcctggctccctactcttctaaggatcgctgtcctgacagaagagaactcctctttcctaaaatggagtcgagtaaaaagatggactctcctggcgcgctgcagactaacccgccgctaaagctgcacactgaccgcagtgctgggacgccagtttttgtccctgaacaaggaggttacaaggaaaagtttgtgaagaccgtggaggacaagtacaagtgtgagaagtgccacctggtgctgtgcagcccgaagcagaccgagtgtgggcaccgcttctgcgagagctgcatggcggccctgctgagctcttcaagtccaaaatgtacagcgtgtcaagagagcatcgttaaagataaggtgtttaaggataattgctgcaagagagaaattctggctcttcagatctattgtcggaatgaaagcagaggttgtgcagagcagttaacgctgggacatctgctggtgcatttaaaaaatgattgccattttgaagaacttccatgtgtgcgtcctgactgcaaagaaaaggtcttgaggaaagacctgcgagaccacgtggagaaggcgtgtaaataccgggaagccacatgcagccactgcaagagtcaggttccgatgatcgcgctgcagaaacacgaagacaccgactgtccctgcgtggtggtgtcctgccctcacaagtgcagcgtccagactctcctgaggagcgagttgagtgcacacttgtcagagtgtgtcaatgcccccagcacctgtagttttaagcgctatggctgcgtttttcaggggacaaaccagcagatcaaggcccacgaggccagctccgccgtgcagcacgtcaacctgctgaaggagtggagcaactcgctcgaaaagaaggtttccttgttgcagaatgaaagtgtagaaaaaaacaagagcatacaaagtttgcacaatcagatatgtagctttgaaattgaaattgagagacaaaaggaaatgcttcgaaataatgaatccaaaatccttcatttacagcgagtgatagacagccaagcagagaaactgaaggagcttgacaaggagatccggcccttccggcagaactgggaggaagcagacagcatgaagagcagcgtggagtccctccagaaccgcgtgaccgagctggagagcgtggacaagagcgcggggcaagtggctcggaacacaggcctgctggagtcccagctgagccggcatgaccagatgctgagtgtgcacgacatccgcctagccgacatggacctgcgcttccaggtcctggagaccgccagctacaatggagtgctcatctggaagattcgcgactacaagcggcggaagcaggaggccgtcatggggaagaccctgtccctttacagccagcctttctacactggttactttggctataagatgtgtgccagggtctacctgaacggggacgggatggggaaggggacgcacttgtcgctgttttttgtcatcatgcgtggagaatatgatgccctgcttccttggccgtttaagcagaaagtgacactcatgctgatggatcaggggtcctctcgacgtcatttgggagatgcattcaagcccgaccccaacagcagcagcttcaagaagcccactggagagatgaatatcgcctctggctgcccagtctttgtggcccaaactgttctagaaaatgggacatatattaaagatgatacaatttttattaaagtcatagtggatacttcggatctgcccgatccctgataagtagctggggaggtggatttagcagaaggcaactcctctgggggatttgaaccggtctgtcttcactgaggtcctcgcgctcagaaaaggaccttgtgagacggaggaagcggcagaaggcggacgcgtgccggcgggaggagccacgcgtgagcacacctgacacgttttataatagactagccacacttcactctgaagaattatttatccttcaacaagataaatattgctgtcagagaaggttttcattttcatttttaaagatctagttaattaaggtggaaaacatatatgctaaacaaaagaaacatgatttttcttccttaaacttgaacaccaaaaaaacacacacacacacacacgtggggatagctggacatgtcagcatgttaagtaaaaggagaatttatgaaatagtaatgcaattctgatatcttctttctaaaattcaagagtgcaattttgtttcaaatacagtatattgtctatttttaaggcctcatctggtctctgttttaataatttgtttgtcagaagaccctgaagtatatacctaggtcttttttttgaaagtctctaaattcagaatcattttttaatttaaagttctacaaataattgttactgcaaacattttattttaaaacgttgatagactgatatttcttggaagaaaatataaaatatcaaacactggttatcacttgtgataggaaagagaatattcaacctgttgttatttctcgttagaaatgtaaaccttcaaatatctgtcgtagttaatgacacgacttcacaattctgaacggagcctcgctcatggatgctgtgcatcattttcagatttataattgttttcaccctaaaatagggcatccgttgaactttggagttctaaacaaaatcctgtaggtgtttggattctgccccatgtgttcggacgagctctctgttgctgacagcaccggccttcggtctccatgtcaggggtgggcgggtgactgctgagggaggcccgcaggtgtgtttctccatcccgtcatcttgctgcatgccgtcaacggtctccgaaagcaacgttgtgcgtagagctggtggcatacggcccacgtgccttagatgggacatgctgcttctccaccctgggtttgcattgagcatcattctagaaagtgctagtttaaccagacttttctctccaccactagatctttgtctctacaagggccctcagacacctctgcacctgctgaggggaagccaggctccaccgtcggcttctggagcctccgctgcttaattaccacagattccaaatctctaggccccacgagtgagccgcctggtccaagtacggcctggtcccaccctgagggaggcaggtgtggaacagaagccgagcctctccgtgtccccaccggggccgtgggcacccccacagcccgaagcagaaccctctgagcattccagagaccgctgctcgggggcctgcccaggctgaccaacgggcgctcctgaccaccaccctggcgggaagggtggccacggggcccgtcgtcccagcctgtgcctgcccagatggcattttctcaactcactgtttactgtctctcagtgtccaactgtgattagaagcctggagcctgccccctgcaccccttttgctatgcaccacgcttcatggtgctcttaccactgatgggtgctacacgcgacgggtgcttcttaggcaaaaccaatgtntgcgaactgtcacacctgtgccactcgcccacaagccgcgcccacaattggccagctgggccgtgcacgtcagactgcctgcctcggctctccccgtggccgcgcggggacagcttggtgggtgcccggtggcccacctgtctctggtgctgccatctgtcctgggtgtgccttcgccccagtgcctgctggaagtgccctccgtcgcacccctgtgccctgagctcccgtgaggggcccgccgcgccctttcgcggtcgaagcgttccgttgttcttatctgcctttcctttccccgctctcctgggattactttgggggaatgagtatccttggttctgccctgtgagggagtcgtgtgtccctgctcataaaggaaggacttcctgcagaagctgcggaaaactactgttccctcgaaggtgtcccccacctgaggcctgtcccctacctgccctcaggtagttttcctgaggccaggggttaacaacagggacatccctgcaacttccccttcacaaaatgtataatattagatgaaggatatgcaacatcttggtctagtaagaaccgtttcctcccctctgggttgaagtcctggtgtggcccccagaagcagcagtgcgtgtcactgggacgtctccagtagcccttcccaggcagacgctcctggcgggacgccatggggcccacctgagggtcccacagacgtaacctgagtgacaggagtccttgaggatgggatggcctatgtcacacactttgtccttgaacctgagtgatgggggtcnttgaggatgggatggcctgtgtcacgcgctttgtctttgtgtttggttgtatcggggtctctgttctgagtgtgtcttcctctcatgtactcaacacagtgggcagcagcctgggacggcgtcccctctcccggcggcgggcaagccttgcgctgctccaccctcggcctgggcaccctcacttggcgctggccacctgggccagcctggggccatggtctctctgcagctgaggcccagtggccccttgggcagtgatcggccctccccgcatcacagggccctggcagcaagcgggaaatgggggcgcacactgtgtgcttgggggtgctgcttgtttaccacacatgaccagactcccagcaggacagagctgctcagtactttacagaaaccaactgagtcgtttgtgcatgaattaagccggtctgcttccccgtcaccttcgtaacaaaacaacgtcccctctcccctcgcctcgagcagtttcttcaggacaccgtggctcgggctgctccctgctgccaggcacgctggttggctggcctgggcccggctcacgtgaagggcactggctcttgtgaccacactgagccacgtgcaagccgcagccgggcctggaagcctgaccctctggttctagggcttgtcccgcggagcctgcagagctagacgttggggtgtgtccgtgatgatatgggggccaggctgggagtagggcctttctagcagggttgggtggctcagtgagggtgtggaagtgggggacccacggggcctggctttgggactagacatgccagccccagctgggctggagggagcctgagtgagccccgacatacgctgggcctttcagctcgccgtgctctggtgacacacaggcggccaggttgggatttgtgtcaattctaggagccatcaagcatgaaagtggttctgtctcctgagcgcaagcctcgccggacccctgggcgaaggcctggacttgcagatgtgtgttccctgtgcgggtggacagagggggcccttatgacccacattgcagccccattccaccaccccttcctccccagagcagtctctgccgagggacagcacctgtgtcccttcgatgccacaacagccagttgaacaggggagccctttgctcaggcagcttctcctgcctctccctcctttctccttccctgccccatccccgtgcccttcttggcctgtggcgctggggagccatggtgtggcatactggggctcctgctccttgggccacttcctcagcccgggccccacaggcccaccacctgccagggctcccactgcactggctgtggcaggaggcttccccatgaccccgtgtggcccagctcggtgaggatgcagttctaggcacagcccctgggacagccagctgcctcccagaccacgtcagcctgctccagggtcctcagtcaccctgggccaggggccacgtgtcccatggatgtcgaccatgccaacgtcacattccagcaccccttttgcttgatggcgtctggtggtagtcagcatggtggacccacatcctacagccagaggtgatgttggacaaaggaaggggagtctggatgggtccttaaacgaccattctgtccgcagcggggtcattccttgtcagcccaagggagggccggggagtacactgatcccaacagctgggctgacacctcctttctcccctgcacggggaggattggcctgaggaccgtcaccctgtgcacagccccagtagggtggcagtgccactgtctccttgggccgttgcaggattgggcgggtgcagactccccttgcgggccccttgctcaatccccggccctcccagactcctccctctactgggggtaatttgtgtgtcagaagggctctggcagagctgtaaaatactgttttttaaaaattttagtccagatctttacttattagactgcagaaggagagctagggagagtgggggaagcccccttgcttttgtatctgtgaggtgaatgagggtctgtcacccaaatctacttctcagcccatgaccatagttctgttttccgtttgcaaatctcagtagctctgttttctccaaagtagaatgtgcgcaccggggtcctagccaggcgaggtcagtgtcggcaggctacctggtcattattgctgcctcgtccaggctgatgctgatggtcacaggcacggtggcatcagggagccgggccagcaggcggcgtgaggcggggccagcagctcactgcaagggcattttccacctgatcctggtgtgccccacatgcggtggcagggcagacgtgtgaagcctcggccgtctcggggctggcaggtgtgcgggtgaggaggccccggtggccaagcagagcctgcgtttcatttctcctgctgcactgtgtctagtctgtcttgtgaactctcaccgtgaaaagaggctagaagtccaggatcgctgtaccgctcctgtaattaggtgatgactggatttgacaacttagtcccctcagacaagtaagataccctccaacagcaaattcaatgacttaattggaaaacacacaagctggcatgatgtccggtgatttctgtaagaaatgcctgtaggagaaggtctgtgaagtgtggagggcagtgtcgacgctgcacagcatctgcagattcgcagcctcttctctgccggtgcctctgttcggttctgttacccaaaaacaaagaccaaagaaggccaatctctcatttgaccctgtctttttaatctgcctgttttaaaagttgcgtctgtagtagccgcttgctgtgaagacacatcttgacagtccaagtgattttgtgaccagtgatttgggtcctgttttccgctcttctaagaaaaaacaaaaagaccgtgagttattgcccagcaataatcatgttgttactgtgagttagcaacatgcctgacttcctgatagcattactgttttctagttttgtttattgtatattatgtgtggttttatttggtatttatttgtgttttgaggtcttgcaatgtttttgtgtttctgatgctaataactaaagtttgtaagactgtagaatgcaaaactcggagatgctaaactgtcttattagaggaaaataaatctgattatggagtctcaaaaatgatca

SEQ ID NO: 298536 - DNA, 7650 bp, Homo sapiens
  misc_feature (3673)..(3673): n is a, c, g, or t
  misc_feature (4464)..(4464): n is a, c, g, or t
cgggggagcgcggcgcggccgccgcgtgcgcgagccggggttgcagcccagccgggactttccagccggcggcagccgcggcggccgccggctcttccccgccccccgccatggggcagcccggggagcagaacgctgcggaccgcggcggaggacgcgcccggcgcccctgagccggccgagcggcgacggaccgcgagaactcctctttcctaaaatggagtcgagtaaaaagatggactctcctggcgcgctgcagactaacccgccgctaaagctgcacactgaccgcagtgctgggacgccagtttttgtccctgaacaaggaggttacaaggaaaagtttgtgaagaccgtggaggacaagtacaagtgtgagaagtgccacctggtgctgtgcagcccgaagcagaccgagtgtgggcaccgcttctgcgagagctgcatggcggccctgctgagctcttcaagtccaaaatgtacagcgtgtcaagagagcatcgttaaagataaggtgtttaaggataattgctgcaagagagaaattctggctcttcagatctattgtcggaatgaaagcagaggttgtgcagagcagttaacgctgggacatctgctggtgcatttaaaaaatgattgccattttgaagaacttccatgtgtgcgtcctgactgcaaagaaaaggtcttgaggaaagacctgcgagaccacgtggagaaggcgtgtaaataccgggaagccacatgcagccactgcaagagtcaggttccgatgatcgcgctgcagaaacacgaagacaccgactgtccctgcgtggtggtgtcctgccctcacaagtgcagcgtccagactctcctgaggagcgagttgagtgcacacttgtcagagtgtgtcaatgcccccagcacctgtagttttaagcgctatggctgcgtttttcaggggacaaaccagcagatcaaggcccacgaggccagctccgccgtgcagcacgtcaacctgctgaaggagtggagcaactcgctcgaaaagaaggtttccttgttgcagaatgaaagtgtagaaaaaaacaagagcatacaaagtttgcacaatcagatatgtagctttgaaattgaaattgagagacaaaaggaaatgcttcgaaataatgaatccaaaatccttcatttacagcgagtgatagacagccaagcagagaaactgaaggagcttgacaaggagatccggcccttccggcagaactgggaggaagcagacagcatgaagagcagcgtggagtccctccagaaccgcgtgaccgagctggagagcgtggacaagagcgcggggcaagtggctcggaacacaggcctgctggagtcccagctgagccggcatgaccagatgctgagtgtgcacgacatccgcctagccgacatggacctgcgcttccaggtcctggagaccgccagctacaatggagtgctcatctggaagattcgcgactacaagcggcggaagcaggaggccgtcatggggaagaccctgtccctttacagccagcctttctacactggttactttggctataagatgtgtgccagggtctacctgaacggggacgggatggggaaggggacgcacttgtcgctgttttttgtcatcatgcgtggagaatatgatgccctgcttccttggccgtttaagcagaaagtgacactcatgctgatggatcaggggtcctctcgacgtcatttgggagatgcattcaagcccgaccccaacagcagcagcttcaagaagcccactggagagatgaatatcgcctctggctgcccagtctttgtggcccaaactgttctagaaaatgggacatatattaaagatgatacaatttttattaaagtcatagtggatacttcggatctgcccgatccctgataagtagctggggaggtggatttagcagaaggcaactcctctgggggatttgaaccggtctgtcttcactgaggtcctcgcgctcagaaaaggaccttgtgagacggaggaagcggcagaaggcggacgcgtgccggcgggaggagccacgcgtgagcacacctgacacgttttataatagactagccacacttcactctgaagaattatttatccttcaacaagataaatattgctgtcagagaaggttttcattttcatttttaaagatctagttaattaaggtggaaaacatatatgctaaacaaaagaaacatgatttttcttccttaaacttgaacaccaaaaaaacacacacacacacacacgtggggatagctggacatgtcagcatgttaagtaaaaggagaatttatgaaatagtaatgcaattctgatatcttctttctaaaattcaagagtgcaattttgtttcaaatacagtatattgtctatttttaaggcctcatctggtctctgttttaataatttgtttgtcagaagaccctgaagtatatacctaggtcttttttttgaaagtctctaaattcagaatcattttttaatttaaagttctacaaataattgttactgcaaacattttattttaaaacgttgatagactgatatttcttggaagaaaatataaaatatcaaacactggttatcacttgtgataggaaagagaatattcaacctgttgttatttctcgttagaaatgtaaaccttcaaatatctgtcgtagttaatgacacgacttcacaattctgaacggagcctcgctcatggatgctgtgcatcattttcagatttataattgttttcaccctaaaatagggcatccgttgaactttggagttctaaacaaaatcctgtaggtgtttggattctgccccatgtgttcggacgagctctctgttgctgacagcaccggccttcggtctccatgtcaggggtgggcgggtgactgctgagggaggcccgcaggtgtgtttctccatcccgtcatcttgctgcatgccgtcaacggtctccgaaagcaacgttgtgcgtagagctggtggcatacggcccacgtgccttagatgggacatgctgcttctccaccctgggtttgcattgagcatcattctagaaagtgctagtttaaccagacttttctctccaccactagatctttgtctctacaagggccctcagacacctctgcacctgctgaggggaagccaggctccaccgtcggcttctggagcctccgctgcttaattaccacagattccaaatctctaggccccacgagtgagccgcctggtccaagtacggcctggtcccaccctgagggaggcaggtgtggaacagaagccgagcctctccgtgtccccaccggggccgtgggcacccccacagcccgaagcagaaccctctgagcattccagagaccgctgctcgggggcctgcccaggctgaccaacgggcgctcctgaccaccaccctggcgggaagggtggccacggggcccgtcgtcccagcctgtgcctgcccagatggcattttctcaactcactgtttactgtctctcagtgtccaactgtgattagaagcctggagcctgccccctgcaccccttttgctatgcaccacgcttcatggtgctcttaccactgatgggtgctacacgcgacgggtgcttcttaggcaaaaccaatgtntgcgaactgtcacacctgtgccactcgcccacaagccgcgcccacaattggccagctgggccgtgcacgtcagactgcctgcctcggctctccccgtggccgcgcggggacagcttggtgggtgcccggtggcccacctgtctctggtgctgccatctgtcctgggtgtgccttcgccccagtgcctgctggaagtgccctccgtcgcacccctgtgccctgagctcccgtgaggggcccgccgcgccctttcgcggtcgaagcgttccgttgttcttatctgcctttcctttccccgctctcctgggattactttgggggaatgagtatccttggttctgccctgtgagggagtcgtgtgtccctgctcataaaggaaggacttcctgcagaagctgcggaaaactactgttccctcgaaggtgtcccccacctgaggcctgtcccctacctgccctcaggtagttttcctgaggccaggggttaacaacagggacatccctgcaacttccccttcacaaaatgtataatattagatgaaggatatgcaacatcttggtctagtaagaaccgtttcctcccctctgggttgaagtcctggtgtggcccccagaagcagcagtgcgtgtcactgggacgtctccagtagcccttcccaggcagacgctcctggcgggacgccatggggcccacctgagggtcccacagacgtaacctgagtgacaggagtccttgaggatgggatggcctatgtcacacactttgtccttgaacctgagtgatgggggtcnttgaggatgggatggcctgtgtcacgcgctttgtctttgtgtttggttgtatcggggtctctgttctgagtgtgtcttcctctcatgtactcaacacagtgggcagcagcctgggacggcgtcccctctcccggcggcgggcaagccttgcgctgctccaccctcggcctgggcaccctcacttggcgctggccacctgggccagcctggggccatggtctctctgcagctgaggcccagtggccccttgggcagtgatcggccctccccgcatcacagggccctggcagcaagcgggaaatgggggcgcacactgtgtgcttgggggtgctgcttgtttaccacacatgaccagactcccagcaggacagagctgctcagtactttacagaaaccaactgagtcgtttgtgcatgaattaagccggtctgcttccccgtcaccttcgtaacaaaacaacgtcccctctcccctcgcctcgagcagtttcttcaggacaccgtggctcgggctgctccctgctgccaggcacgctggttggctggcctgggcccggctcacgtgaagggcactggctcttgtgaccacactgagccacgtgcaagccgcagccgggcctggaagcctgaccctctggttctagggcttgtcccgcggagcctgcagagctagacgttggggtgtgtccgtgatgatatgggggccaggctgggagtagggcctttctagcagggttgggtggctcagtgagggtgtggaagtgggggacccacggggcctggctttgggactagacatgccagccccagctgggctggagggagcctgagtgagccccgacatacgctgggcctttcagctcgccgtgctctggtgacacacaggcggccaggttgggatttgtgtcaattctaggagccatcaagcatgaaagtggttctgtctcctgagcgcaagcctcgccggacccctgggcgaaggcctggacttgcagatgtgtgttccctgtgcgggtggacagagggggcccttatgacccacattgcagccccattccaccaccccttcctccccagagcagtctctgccgagggacagcacctgtgtcccttcgatgccacaacagccagttgaacaggggagccctttgctcaggcagcttctcctgcctctccctcctttctccttccctgccccatccccgtgcccttcttggcctgtggcgctggggagccatggtgtggcatactggggctcctgctccttgggccacttcctcagcccgggccccacaggcccaccacctgccagggctcccactgcactggctgtggcaggaggcttccccatgaccccgtgtggcccagctcggtgaggatgcagttctaggcacagcccctgggacagccagctgcctcccagaccacgtcagcctgctccagggtcctcagtcaccctgggccaggggccacgtgtcccatggatgtcgaccatgccaacgtcacattccagcaccccttttgcttgatggcgtctggtggtagtcagcatggtggacccacatcctacagccagaggtgatgttggacaaaggaaggggagtctggatgggtccttaaacgaccattctgtccgcagcggggtcattccttgtcagcccaagggagggccggggagtacactgatcccaacagctgggctgacacctcctttctcccctgcacggggaggattggcctgaggaccgtcaccctgtgcacagccccagtagggtggcagtgccactgtctccttgggccgttgcaggattgggcgggtgcagactccccttgcgggccccttgctcaatccccggccctcccagactcctccctctactgggggtaatttgtgtgtcagaagggctctggcagagctgtaaaatactgttttttaaaaattttagtccagatctttacttattagactgcagaaggagagctagggagagtgggggaagcccccttgcttttgtatctgtgaggtgaatgagggtctgtcacccaaatctacttctcagcccatgaccatagttctgttttccgtttgcaaatctcagtagctctgttttctccaaagtagaatgtgcgcaccggggtcctagccaggcgaggtcagtgtcggcaggctacctggtcattattgctgcctcgtccaggctgatgctgatggtcacaggcacggtggcatcagggagccgggccagcaggcggcgtgaggcggggccagcagctcactgcaagggcattttccacctgatcctggtgtgccccacatgcggtggcagggcagacgtgtgaagcctcggccgtctcggggctggcaggtgtgcgggtgaggaggccccggtggccaagcagagcctgcgtttcatttctcctgctgcactgtgtctagtctgtcttgtgaactctcaccgtgaaaagaggctagaagtccaggatcgctgtaccgctcctgtaattaggtgatgactggatttgacaacttagtcccctcagacaagtaagataccctccaacagcaaattcaatgacttaattggaaaacacacaagctggcatgatgtccggtgatttctgtaagaaatgcctgtaggagaaggtctgtgaagtgtggagggcagtgtcgacgctgcacagcatctgcagattcgcagcctcttctctgccggtgcctctgttcggttctgttacccaaaaacaaagaccaaagaaggccaatctctcatttgaccctgtctttttaatctgcctgttttaaaagttgcgtctgtagtagccgcttgctgtgaagacacatcttgacagtccaagtgattttgtgaccagtgatttgggtcctgttttccgctcttctaagaaaaaacaaaaagaccgtgagttattgcccagcaataatcatgttgttactgtgagttagcaacatgcctgacttcctgatagcattactgttttctagttttgtttattgtatattatgtgtggttttatttggtatttatttgtgttttgaggtcttgcaatgtttttgtgtttctgatgctaataactaaagtttgtaagactgtagaatgcaaaactcggagatgctaaactgtcttattagaggaaaataaatctgattatggagtctcaaaaatgatca

SEQ ID NO: 298537 - DNA, 7714 bp, Homo sapiens
  misc_feature (3737)..(3737): n is a, c, g, or t
  misc_feature (4528)..(4528): n is a, c, g, or t
cgggggagcgcggcgcggccgccgcgtgcgcgagccggggttgcagcccagccgggactttccagccggcggcagccgcggcggccgccggctcttccccgccccccgccatggggcagcccggggagcagaacgctgcggaccgcggcggaggacgcgcccggcgcccctgagccggccgagcggcgacggaccgcgagatgaggaaaatgaggcccaaagaagtgatgccacttggttaaggtcccagagcaggtcagaatcagacctaggatcagaaacctggctcctggctcctggctccctactcttctaaggatcgctgtcctgacagaagagaactcctctttcctaaaatggagtcgagtaaaaagatggactctcctggcgcgctgcagactaacccgccgctaaagctgcacactgaccgcagtgctgggacgccagtttttgtccctgaacaaggaggttacaaggaaaagtttgtgaagaccgtggaggacaagtacaagtgtgagaagtgccacctggtgctgtgcagcccgaagcagaccgagtgtgggcaccgcttctgcgagagctgcatggcggccctgctgagctcttcaagtccaaaatgtacagcgtgtcaagagagcatcgttaaagataaggtgtttaaggataattgctgcaagagagaaattctggctcttcagatctattgtcggaatgaaagcagaggttgtgcagagcagttaacgctgggacatctgctggtgcatttaaaaaatgattgccattttgaagaacttccatgtgtgcgtcctgactgcaaagaaaaggtcttgaggaaagacctgcgagaccacgtggagaaggcgtgtaaataccgggaagccacatgcagccactgcaagagtcaggttccgatgatcgcgctgcagaaacacgaagacaccgactgtccctgcgtggtggtgtcctgccctcacaagtgcagcgtccagactctcctgaggagcgaggggacaaaccagcagatcaaggcccacgaggccagctccgccgtgcagcacgtcaacctgctgaaggagtggagcaactcgctcgaaaagaaggtttccttgttgcagaatgaaagtgtagaaaaaaacaagagcatacaaagtttgcacaatcagatatgtagctttgaaattgaaattgagagacaaaaggaaatgcttcgaaataatgaatccaaaatccttcatttacagcgagtgatagacagccaagcagagaaactgaaggagcttgacaaggagatccggcccttccggcagaactgggaggaagcagacagcatgaagagcagcgtggagtccctccagaaccgcgtgaccgagctggagagcgtggacaagagcgcggggcaagtggctcggaacacaggcctgctggagtcccagctgagccggcatgaccagatgctgagtgtgcacgacatccgcctagccgacatggacctgcgcttccaggtcctggagaccgccagctacaatggagtgctcatctggaagattcgcgactacaagcggcggaagcaggaggccgtcatggggaagaccctgtccctttacagccagcctttctacactggttactttggctataagatgtgtgccagggtctacctgaacggggacgggatggggaaggggacgcacttgtcgctgttttttgtcatcatgcgtggagaatatgatgccctgcttccttggccgtttaagcagaaagtgacactcatgctgatggatcaggggtcctctcgacgtcatttgggagatgcattcaagcccgaccccaacagcagcagcttcaagaagcccactggagagatgaatatcgcctctggctgcccagtctttgtggcccaaactgttctagaaaatgggacatatattaaagatgatacaatttttattaaagtcatagtggatacttcggatctgcccgatccctgataagtagctggggaggtggatttagcagaaggcaactcctctgggggatttgaaccggtctgtcttcactgaggtcctcgcgctcagaaaaggaccttgtgagacggaggaagcggcagaaggcggacgcgtgccggcgggaggagccacgcgtgagcacacctgacacgttttataatagactagccacacttcactctgaagaattatttatccttcaacaagataaatattgctgtcagagaaggttttcattttcatttttaaagatctagttaattaaggtggaaaacatatatgctaaacaaaagaaacatgatttttcttccttaaacttgaacaccaaaaaaacacacacacacacacacgtggggatagctggacatgtcagcatgttaagtaaaaggagaatttatgaaatagtaatgcaattctgatatcttctttctaaaattcaagagtgcaattttgtttcaaatacagtatattgtctatttttaaggcctcatctggtctctgttttaataatttgtttgtcagaagaccctgaagtatatacctaggtcttttttttgaaagtctctaaattcagaatcattttttaatttaaagttctacaaataattgttactgcaaacattttattttaaaacgttgatagactgatatttcttggaagaaaatataaaatatcaaacactggttatcacttgtgataggaaagagaatattcaacctgttgttatttctcgttagaaatgtaaaccttcaaatatctgtcgtagttaatgacacgacttcacaattctgaacggagcctcgctcatggatgctgtgcatcattttcagatttataattgttttcaccctaaaatagggcatccgttgaactttggagttctaaacaaaatcctgtaggtgtttggattctgccccatgtgttcggacgagctctctgttgctgacagcaccggccttcggtctccatgtcaggggtgggcgggtgactgctgagggaggcccgcaggtgtgtttctccatcccgtcatcttgctgcatgccgtcaacggtctccgaaagcaacgttgtgcgtagagctggtggcatacggcccacgtgccttagatgggacatgctgcttctccaccctgggtttgcattgagcatcattctagaaagtgctagtttaaccagacttttctctccaccactagatctttgtctctacaagggccctcagacacctctgcacctgctgaggggaagccaggctccaccgtcggcttctggagcctccgctgcttaattaccacagattccaaatctctaggccccacgagtgagccgcctggtccaagtacggcctggtcccaccctgagggaggcaggtgtggaacagaagccgagcctctccgtgtccccaccggggccgtgggcacccccacagcccgaagcagaaccctctgagcattccagagaccgctgctcgggggcctgcccaggctgaccaacgggcgctcctgaccaccaccctggcgggaagggtggccacggggcccgtcgtcccagcctgtgcctgcccagatggcattttctcaactcactgtttactgtctctcagtgtccaactgtgattagaagcctggagcctgccccctgcaccccttttgctatgcaccacgcttcatggtgctcttaccactgatgggtgctacacgcgacgggtgcttcttaggcaaaaccaatgtntgcgaactgtcacacctgtgccactcgcccacaagccgcgcccacaattggccagctgggccgtgcacgtcagactgcctgcctcggctctccccgtggccgcgcggggacagcttggtgggtgcccggtggcccacctgtctctggtgctgccatctgtcctgggtgtgccttcgccccagtgcctgctggaagtgccctccgtcgcacccctgtgccctgagctcccgtgaggggcccgccgcgccctttcgcggtcgaagcgttccgttgttcttatctgcctttcctttccccgctctcctgggattactttgggggaatgagtatccttggttctgccctgtgagggagtcgtgtgtccctgctcataaaggaaggacttcctgcagaagctgcggaaaactactgttccctcgaaggtgtcccccacctgaggcctgtcccctacctgccctcaggtagttttcctgaggccaggggttaacaacagggacatccctgcaacttccccttcacaaaatgtataatattagatgaaggatatgcaacatcttggtctagtaagaaccgtttcctcccctctgggttgaagtcctggtgtggcccccagaagcagcagtgcgtgtcactgggacgtctccagtagcccttcccaggcagacgctcctggcgggacgccatggggcccacctgagggtcccacagacgtaacctgagtgacaggagtccttgaggatgggatggcctatgtcacacactttgtccttgaacctgagtgatgggggtcnttgaggatgggatggcctgtgtcacgcgctttgtctttgtgtttggttgtatcggggtctctgttctgagtgtgtcttcctctcatgtactcaacacagtgggcagcagcctgggacggcgtcccctctcccggcggcgggcaagccttgcgctgctccaccctcggcctgggcaccctcacttggcgctggccacctgggccagcctggggccatggtctctctgcagctgaggcccagtggccccttgggcagtgatcggccctccccgcatcacagggccctggcagcaagcgggaaatgggggcgcacactgtgtgcttgggggtgctgcttgtttaccacacatgaccagactcccagcaggacagagctgctcagtactttacagaaaccaactgagtcgtttgtgcatgaattaagccggtctgcttccccgtcaccttcgtaacaaaacaacgtcccctctcccctcgcctcgagcagtttcttcaggacaccgtggctcgggctgctccctgctgccaggcacgctggttggctggcctgggcccggctcacgtgaagggcactggctcttgtgaccacactgagccacgtgcaagccgcagccgggcctggaagcctgaccctctggttctagggcttgtcccgcggagcctgcagagctagacgttggggtgtgtccgtgatgatatgggggccaggctgggagtagggcctttctagcagggttgggtggctcagtgagggtgtggaagtgggggacccacggggcctggctttgggactagacatgccagccccagctgggctggagggagcctgagtgagccccgacatacgctgggcctttcagctcgccgtgctctggtgacacacaggcggccaggttgggatttgtgtcaattctaggagccatcaagcatgaaagtggttctgtctcctgagcgcaagcctcgccggacccctgggcgaaggcctggacttgcagatgtgtgttccctgtgcgggtggacagagggggcccttatgacccacattgcagccccattccaccaccccttcctccccagagcagtctctgccgagggacagcacctgtgtcccttcgatgccacaacagccagttgaacaggggagccctttgctcaggcagcttctcctgcctctccctcctttctccttccctgccccatccccgtgcccttcttggcctgtggcgctggggagccatggtgtggcatactggggctcctgctccttgggccacttcctcagcccgggccccacaggcccaccacctgccagggctcccactgcactggctgtggcaggaggcttccccatgaccccgtgtggcccagctcggtgaggatgcagttctaggcacagcccctgggacagccagctgcctcccagaccacgtcagcctgctccagggtcctcagtcaccctgggccaggggccacgtgtcccatggatgtcgaccatgccaacgtcacattccagcaccccttttgcttgatggcgtctggtggtagtcagcatggtggacccacatcctacagccagaggtgatgttggacaaaggaaggggagtctggatgggtccttaaacgaccattctgtccgcagcggggtcattccttgtcagcccaagggagggccggggagtacactgatcccaacagctgggctgacacctcctttctcccctgcacggggaggattggcctgaggaccgtcaccctgtgcacagccccagtagggtggcagtgccactgtctccttgggccgttgcaggattgggcgggtgcagactccccttgcgggccccttgctcaatccccggccctcccagactcctccctctactgggggtaatttgtgtgtcagaagggctctggcagagctgtaaaatactgttttttaaaaattttagtccagatctttacttattagactgcagaaggagagctagggagagtgggggaagcccccttgcttttgtatctgtgaggtgaatgagggtctgtcacccaaatctacttctcagcccatgaccatagttctgttttccgtttgcaaatctcagtagctctgttttctccaaagtagaatgtgcgcaccggggtcctagccaggcgaggtcagtgtcggcaggctacctggtcattattgctgcctcgtccaggctgatgctgatggtcacaggcacggtggcatcagggagccgggccagcaggcggcgtgaggcggggccagcagctcactgcaagggcattttccacctgatcctggtgtgccccacatgcggtggcagggcagacgtgtgaagcctcggccgtctcggggctggcaggtgtgcgggtgaggaggccccggtggccaagcagagcctgcgtttcatttctcctgctgcactgtgtctagtctgtcttgtgaactctcaccgtgaaaagaggctagaagtccaggatcgctgtaccgctcctgtaattaggtgatgactggatttgacaacttagtcccctcagacaagtaagataccctccaacagcaaattcaatgacttaattggaaaacacacaagctggcatgatgtccggtgatttctgtaagaaatgcctgtaggagaaggtctgtgaagtgtggagggcagtgtcgacgctgcacagcatctgcagattcgcagcctcttctctgccggtgcctctgttcggttctgttacccaaaaacaaagaccaaagaaggccaatctctcatttgaccctgtctttttaatctgcctgttttaaaagttgcgtctgtagtagccgcttgctgtgaagacacatcttgacagtccaagtgattttgtgaccagtgatttgggtcctgttttccgctcttctaagaaaaaacaaaaagaccgtgagttattgcccagcaataatcatgttgttactgtgagttagcaacatgcctgacttcctgatagcattactgttttctagttttgtttattgtatattatgtgtggttttatttggtatttatttgtgttttgaggtcttgcaatgtttttgtgtttctgatgctaataactaaagtttgtaagactgtagaatgcaaaactcggagatgctaaactgtcttattagaggaaaataaatctgattatggagtctcaaaaatgatca

SEQ ID NO: 298538 - DNA, 7916 bp, Homo sapiens
  misc_feature (3939)..(3939): n is a, c, g, or t
  misc_feature (4730)..(4730): n is a, c, g, or t
cgggggagcgcggcgcggccgccgcgtgcgcgagccggggttgcagcccagccgggactttccagccggcggcagccgcggcggccgccggctcttccccgccccccgccatggggcagcccggggagcagaacgctgcggaccgcggcggaggacgcgcccggcgcccctgagccggccgagcggcgacggaccgcgagatgaggaaaatgaggcccaaagaagtgatgccacttggttaaggtcccagagcaggtcagaatcagacctaggatcagaaacctggctcctggctcctggctccctactcttctaaggatcgctgtcctgacagaagagaactcctctttcctaaaatggagtcgagtaaaaagatggactctcctggcgcgctgcagactaacccgccgctaaagctgcacactgaccgcagtgctgggacgccagtttttgtccctgaacaaggaggttacaaggaaaagtttgtgaagaccgtggaggacaagtacaagtgtgagaagtgccacctggtgctgtgcagcccgaagcagaccgagtgtgggcaccgcttctgcgagagctgcatggcggccctgctgagctcttcaagtccaaaatgtacagcgtgtcaagagagcatcgttaaagataaggtgtttaaggataattgctgcaagagagaaattctggctcttcagatctattgtcggaatgaaagcagaggttgtgcagagcagttaacgctgggacatctgctggtgcatttaaaaaatgattgccattttgaagaacttccatgtgtgcgtcctgactgcaaagaaaaggtcttgaggaaagacctgcgagaccacgtggagaaggcgtgtaaataccgggaagccacatgcagccactgcaagagtcaggttccgatgatcgcgctgcagaaacacgaagacaccgactgtccctgcgtggtggtgtcctgccctcacaagtgcagcgtccagactctcctgaggagcgagttgagtgcacacttgtcagagtgtgtcaatgcccccagcacctgtagttttaagcgctatggctgcgtttttcaggggacaaaccagcagatcaaggcccacgaggccagctccgccgtgcagcacgtcaacctgctgaaggagtggagcaactcgctcgaaaagaagggatatgagaataaagagtctgagaattctgtcccgtctttgacagatggaaatgaatgaattgttactttcagagggacacaactaccacgcgatgctgcatatggcccgctccacattcgtgcaggtttccttgttgcagaatgaaagtgtagaaaaaaacaagagcatacaaagtttgcacaatcagatatgtagctttgaaattgaaattgagagacaaaaggaaatgcttcgaaataatgaatccaaaatccttcatttacagcgagtgatagacagccaagcagagaaactgaaggagcttgacaaggagatccggcccttccggcagaactgggaggaagcagacagcatgaagagcagcgtggagtccctccagaaccgcgtgaccgagctggagagcgtggacaagagcgcggggcaagtggctcggaacacaggcctgctggagtcccagctgagccggcatgaccagatgctgagtgtgcacgacatccgcctagccgacatggacctgcgcttccaggtcctggagaccgccagctacaatggagtgctcatctggaagattcgcgactacaagcggcggaagcaggaggccgtcatggggaagaccctgtccctttacagccagcctttctacactggttactttggctataagatgtgtgccagggtctacctgaacggggacgggatggggaaggggacgcacttgtcgctgttttttgtcatcatgcgtggagaatatgatgccctgcttccttggccgtttaagcagaaagtgacactcatgctgatggatcaggggtcctctcgacgtcatttgggagatgcattcaagcccgaccccaacagcagcagcttcaagaagcccactggagagatgaatatcgcctctggctgcccagtctttgtggcccaaactgttctagaaaatgggacatatattaaagatgatacaatttttattaaagtcatagtggatacttcggatctgcccgatccctgataagtagctggggaggtggatttagcagaaggcaactcctctgggggatttgaaccggtctgtcttcactgaggtcctcgcgctcagaaaaggaccttgtgagacggaggaagcggcagaaggcggacgcgtgccggcgggaggagccacgcgtgagcacacctgacacgttttataatagactagccacacttcactctgaagaattatttatccttcaacaagataaatattgctgtcagagaaggttttcattttcatttttaaagatctagttaattaaggtggaaaacatatatgctaaacaaaagaaacatgatttttcttccttaaacttgaacaccaaaaaaacacacacacacacacacgtggggatagctggacatgtcagcatgttaagtaaaaggagaatttatgaaatagtaatgcaattctgatatcttctttctaaaattcaagagtgcaattttgtttcaaatacagtatattgtctatttttaaggcctcatctggtctctgttttaataatttgtttgtcagaagaccctgaagtatatacctaggtcttttttttgaaagtctctaaattcagaatcattttttaatttaaagttctacaaataattgttactgcaaacattttattttaaaacgttgatagactgatatttcttggaagaaaatataaaatatcaaacactggttatcacttgtgataggaaagagaatattcaacctgttgttatttctcgttagaaatgtaaaccttcaaatatctgtcgtagttaatgacacgacttcacaattctgaacggagcctcgctcatggatgctgtgcatcattttcagatttataattgttttcaccctaaaatagggcatccgttgaactttggagttctaaacaaaatcctgtaggtgtttggattctgccccatgtgttcggacgagctctctgttgctgacagcaccggccttcggtctccatgtcaggggtgggcgggtgactgctgagggaggcccgcaggtgtgtttctccatcccgtcatcttgctgcatgccgtcaacggtctccgaaagcaacgttgtgcgtagagctggtggcatacggcccacgtgccttagatgggacatgctgcttctccaccctgggtttgcattgagcatcattctagaaagtgctagtttaaccagacttttctctccaccactagatctttgtctctacaagggccctcagacacctctgcacctgctgaggggaagccaggctccaccgtcggcttctggagcctccgctgcttaattaccacagattccaaatctctaggccccacgagtgagccgcctggtccaagtacggcctggtcccaccctgagggaggcaggtgtggaacagaagccgagcctctccgtgtccccaccggggccgtgggcacccccacagcccgaagcagaaccctctgagcattccagagaccgctgctcgggggcctgcccaggctgaccaacgggcgctcctgaccaccaccctggcgggaagggtggccacggggcccgtcgtcccagcctgtgcctgcccagatggcattttctcaactcactgtttactgtctctcagtgtccaactgtgattagaagcctggagcctgccccctgcaccccttttgctatgcaccacgcttcatggtgctcttaccactgatgggtgctacacgcgacgggtgcttcttaggcaaaaccaatgtntgcgaactgtcacacctgtgccactcgcccacaagccgcgcccacaattggccagctgggccgtgcacgtcagactgcctgcctcggctctccccgtggccgcgcggggacagcttggtgggtgcccggtggcccacctgtctctggtgctgccatctgtcctgggtgtgccttcgccccagtgcctgctggaagtgccctccgtcgcacccctgtgccctgagctcccgtgaggggcccgccgcgccctttcgcggtcgaagcgttccgttgttcttatctgcctttcctttccccgctctcctgggattactttgggggaatgagtatccttggttctgccctgtgagggagtcgtgtgtccctgctcataaaggaaggacttcctgcagaagctgcggaaaactactgttccctcgaaggtgtcccccacctgaggcctgtcccctacctgccctcaggtagttttcctgaggccaggggttaacaacagggacatccctgcaacttccccttcacaaaatgtataatattagatgaaggatatgcaacatcttggtctagtaagaaccgtttcctcccctctgggttgaagtcctggtgtggcccccagaagcagcagtgcgtgtcactgggacgtctccagtagcccttcccaggcagacgctcctggcgggacgccatggggcccacctgagggtcccacagacgtaacctgagtgacaggagtccttgaggatgggatggcctatgtcacacactttgtccttgaacctgagtgatgggggtcnttgaggatgggatggcctgtgtcacgcgctttgtctttgtgtttggttgtatcggggtctctgttctgagtgtgtcttcctctcatgtactcaacacagtgggcagcagcctgggacggcgtcccctctcccggcggcgggcaagccttgcgctgctccaccctcggcctgggcaccctcacttggcgctggccacctgggccagcctggggccatggtctctctgcagctgaggcccagtggccccttgggcagtgatcggccctccccgcatcacagggccctggcagcaagcgggaaatgggggcgcacactgtgtgcttgggggtgctgcttgtttaccacacatgaccagactcccagcaggacagagctgctcagtactttacagaaaccaactgagtcgtttgtgcatgaattaagccggtctgcttccccgtcaccttcgtaacaaaacaacgtcccctctcccctcgcctcgagcagtttcttcaggacaccgtggctcgggctgctccctgctgccaggcacgctggttggctggcctgggcccggctcacgtgaagggcactggctcttgtgaccacactgagccacgtgcaagccgcagccgggcctggaagcctgaccctctggttctagggcttgtcccgcggagcctgcagagctagacgttggggtgtgtccgtgatgatatgggggccaggctgggagtagggcctttctagcagggttgggtggctcagtgagggtgtggaagtgggggacccacggggcctggctttgggactagacatgccagccccagctgggctggagggagcctgagtgagccccgacatacgctgggcctttcagctcgccgtgctctggtgacacacaggcggccaggttgggatttgtgtcaattctaggagccatcaagcatgaaagtggttctgtctcctgagcgcaagcctcgccggacccctgggcgaaggcctggacttgcagatgtgtgttccctgtgcgggtggacagagggggcccttatgacccacattgcagccccattccaccaccccttcctccccagagcagtctctgccgagggacagcacctgtgtcccttcgatgccacaacagccagttgaacaggggagccctttgctcaggcagcttctcctgcctctccctcctttctccttccctgccccatccccgtgcccttcttggcctgtggcgctggggagccatggtgtggcatactggggctcctgctccttgggccacttcctcagcccgggccccacaggcccaccacctgccagggctcccactgcactggctgtggcaggaggcttccccatgaccccgtgtggcccagctcggtgaggatgcagttctaggcacagcccctgggacagccagctgcctcccagaccacgtcagcctgctccagggtcctcagtcaccctgggccaggggccacgtgtcccatggatgtcgaccatgccaacgtcacattccagcaccccttttgcttgatggcgtctggtggtagtcagcatggtggacccacatcctacagccagaggtgatgttggacaaaggaaggggagtctggatgggtccttaaacgaccattctgtccgcagcggggtcattccttgtcagcccaagggagggccggggagtacactgatcccaacagctgggctgacacctcctttctcccctgcacggggaggattggcctgaggaccgtcaccctgtgcacagccccagtagggtggcagtgccactgtctccttgggccgttgcaggattgggcgggtgcagactccccttgcgggccccttgctcaatccccggccctcccagactcctccctctactgggggtaatttgtgtgtcagaagggctctggcagagctgtaaaatactgttttttaaaaattttagtccagatctttacttattagactgcagaaggagagctagggagagtgggggaagcccccttgcttttgtatctgtgaggtgaatgagggtctgtcacccaaatctacttctcagcccatgaccatagttctgttttccgtttgcaaatctcagtagctctgttttctccaaagtagaatgtgcgcaccggggtcctagccaggcgaggtcagtgtcggcaggctacctggtcattattgctgcctcgtccaggctgatgctgatggtcacaggcacggtggcatcagggagccgggccagcaggcggcgtgaggcggggccagcagctcactgcaagggcattttccacctgatcctggtgtgccccacatgcggtggcagggcagacgtgtgaagcctcggccgtctcggggctggcaggtgtgcgggtgaggaggccccggtggccaagcagagcctgcgtttcatttctcctgctgcactgtgtctagtctgtcttgtgaactctcaccgtgaaaagaggctagaagtccaggatcgctgtaccgctcctgtaattaggtgatgactggatttgacaacttagtcccctcagacaagtaagataccctccaacagcaaattcaatgacttaattggaaaacacacaagctggcatgatgtccggtgatttctgtaagaaatgcctgtaggagaaggtctgtgaagtgtggagggcagtgtcgacgctgcacagcatctgcagattcgcagcctcttctctgccggtgcctctgttcggttctgttacccaaaaacaaagaccaaagaaggccaatctctcatttgaccctgtctttttaatctgcctgttttaaaagttgcgtctgtagtagccgcttgctgtgaagacacatcttgacagtccaagtgattttgtgaccagtgatttgggtcctgttttccgctcttctaagaaaaaacaaaaagaccgtgagttattgcccagcaataatcatgttgttactgtgagttagcaacatgcctgacttcctgatagcattactgttttctagttttgtttattgtatattatgtgtggttttatttggtatttatttgtgttttgaggtcttgcaatgtttttgtgtttctgatgctaataactaaagtttgtaagactgtagaatgcaaaactcggagatgctaaactgtcttattagaggaaaataaatctgattatggagtctcaaaaatgatca

SEQ ID NO: 298539 - DNA, 7184 bp, Homo sapiens
  misc_feature (3207)..(3207): n is a, c, g, or t
  misc_feature (3998)..(3998): n is a, c, g, or t
attcaatcagccgctgcactttgcctcaccctaattactggaagagattctgagaaacactgtttatagcattccctattaaattaggactggctgggtatggtgactcacacctctaatcccaactctttgagaggctgaggtagtaggatcactttaggccaggagtttgagaccagcctgggcaacatagcaagaccctatctctaaaaaaattatttttttaaagcctaaccagacatggtggtggcatgtacctgtaggcctagcttactcaagaggctgaagtgggaggatcacttgagcccaggaggtcaaggctgcagtgagctatgattgcaccactgcactccagcctggggacagagcaagaccctgtctctagaggggaaaaaaaagaaagaaagaaaagtaccaggactgtcattttctgtgtgaagggatttttttcttctgaaactctgtcaataagctaacagaaggcctatattgtgaaaatttaattgatattgttgttaattaatatgaaaaccacttttggttacattaattaaagaatttcttttttaggtttccttgttgcagaatgaaagtgtagaaaaaaacaagagcatacaaagtttgcacaatcagatatgtagctttgaaattgaaattgagagacaaaaggaaatgcttcgaaataatgaatccaaaatccttcatttacagcgagtgatagacagccaagcagagaaactgaaggagcttgacaaggagatccggcccttccggcagaactgggaggaagcagacagcatgaagagcagcgtggagtccctccagaaccgcgtgaccgagctggagagcgtggacaagagcgcggggcaagtggctcggaacacaggcctgctggagtcccagctgagccggcatgaccagatgctgagtgtgcacgacatccgcctagccgacatggacctgcgcttccaggtcctggagaccgccagctacaatggagtgctcatctggaagattcgcgactacaagcggcggaagcaggaggccgtcatggggaagaccctgtccctttacagccagcctttctacactggttactttggctataagatgtgtgccagggtctacctgaacggggacgggatggggaaggggacgcacttgtcgctgttttttgtcatcatgcgtggagaatatgatgccctgcttccttggccgtttaagcagaaagtgacactcatgctgatggatcaggggtcctctcgacgtcatttgggagatgcattcaagcccgaccccaacagcagcagcttcaagaagcccactggagagatgaatatcgcctctggctgcccagtctttgtggcccaaactgttctagaaaatgggacatatattaaagatgatacaatttttattaaagtcatagtggatacttcggatctgcccgatccctgataagtagctggggaggtggatttagcagaaggcaactcctctgggggatttgaaccggtctgtcttcactgaggtcctcgcgctcagaaaaggaccttgtgagacggaggaagcggcagaaggcggacgcgtgccggcgggaggagccacgcgtgagcacacctgacacgttttataatagactagccacacttcactctgaagaattatttatccttcaacaagataaatattgctgtcagagaaggttttcattttcatttttaaagatctagttaattaaggtggaaaacatatatgctaaacaaaagaaacatgatttttcttccttaaacttgaacaccaaaaaaacacacacacacacacacgtggggatagctggacatgtcagcatgttaagtaaaaggagaatttatgaaatagtaatgcaattctgatatcttctttctaaaattcaagagtgcaattttgtttcaaatacagtatattgtctatttttaaggcctcatctggtctctgttttaataatttgtttgtcagaagaccctgaagtatatacctaggtcttttttttgaaagtctctaaattcagaatcattttttaatttaaagttctacaaataattgttactgcaaacattttattttaaaacgttgatagactgatatttcttggaagaaaatataaaatatcaaacactggttatcacttgtgataggaaagagaatattcaacctgttgttatttctcgttagaaatgtaaaccttcaaatatctgtcgtagttaatgacacgacttcacaattctgaacggagcctcgctcatggatgctgtgcatcattttcagatttataattgttttcaccctaaaatagggcatccgttgaactttggagttctaaacaaaatcctgtaggtgtttggattctgccccatgtgttcggacgagctctctgttgctgacagcaccggccttcggtctccatgtcaggggtgggcgggtgactgctgagggaggcccgcaggtgtgtttctccatcccgtcatcttgctgcatgccgtcaacggtctccgaaagcaacgttgtgcgtagagctggtggcatacggcccacgtgccttagatgggacatgctgcttctccaccctgggtttgcattgagcatcattctagaaagtgctagtttaaccagacttttctctccaccactagatctttgtctctacaagggccctcagacacctctgcacctgctgaggggaagccaggctccaccgtcggcttctggagcctccgctgcttaattaccacagattccaaatctctaggccccacgagtgagccgcctggtccaagtacggcctggtcccaccctgagggaggcaggtgtggaacagaagccgagcctctccgtgtccccaccggggccgtgggcacccccacagcccgaagcagaaccctctgagcattccagagaccgctgctcgggggcctgcccaggctgaccaacgggcgctcctgaccaccaccctggcgggaagggtggccacggggcccgtcgtcccagcctgtgcctgcccagatggcattttctcaactcactgtttactgtctctcagtgtccaactgtgattagaagcctggagcctgccccctgcaccccttttgctatgcaccacgcttcatggtgctcttaccactgatgggtgctacacgcgacgggtgcttcttaggcaaaaccaatgtntgcgaactgtcacacctgtgccactcgcccacaagccgcgcccacaattggccagctgggccgtgcacgtcagactgcctgcctcggctctccccgtggccgcgcggggacagcttggtgggtgcccggtggcccacctgtctctggtgctgccatctgtcctgggtgtgccttcgccccagtgcctgctggaagtgccctccgtcgcacccctgtgccctgagctcccgtgaggggcccgccgcgccctttcgcggtcgaagcgttccgttgttcttatctgcctttcctttccccgctctcctgggattactttgggggaatgagtatccttggttctgccctgtgagggagtcgtgtgtccctgctcataaaggaaggacttcctgcagaagctgcggaaaactactgttccctcgaaggtgtcccccacctgaggcctgtcccctacctgccctcaggtagttttcctgaggccaggggttaacaacagggacatccctgcaacttccccttcacaaaatgtataatattagatgaaggatatgcaacatcttggtctagtaagaaccgtttcctcccctctgggttgaagtcctggtgtggcccccagaagcagcagtgcgtgtcactgggacgtctccagtagcccttcccaggcagacgctcctggcgggacgccatggggcccacctgagggtcccacagacgtaacctgagtgacaggagtccttgaggatgggatggcctatgtcacacactttgtccttgaacctgagtgatgggggtcnttgaggatgggatggcctgtgtcacgcgctttgtctttgtgtttggttgtatcggggtctctgttctgagtgtgtcttcctctcatgtactcaacacagtgggcagcagcctgggacggcgtcccctctcccggcggcgggcaagccttgcgctgctccaccctcggcctgggcaccctcacttggcgctggccacctgggccagcctggggccatggtctctctgcagctgaggcccagtggccccttgggcagtgatcggccctccccgcatcacagggccctggcagcaagcgggaaatgggggcgcacactgtgtgcttgggggtgctgcttgtttaccacacatgaccagactcccagcaggacagagctgctcagtactttacagaaaccaactgagtcgtttgtgcatgaattaagccggtctgcttccccgtcaccttcgtaacaaaacaacgtcccctctcccctcgcctcgagcagtttcttcaggacaccgtggctcgggctgctccctgctgccaggcacgctggttggctggcctgggcccggctcacgtgaagggcactggctcttgtgaccacactgagccacgtgcaagccgcagccgggcctggaagcctgaccctctggttctagggcttgtcccgcggagcctgcagagctagacgttggggtgtgtccgtgatgatatgggggccaggctgggagtagggcctttctagcagggttgggtggctcagtgagggtgtggaagtgggggacccacggggcctggctttgggactagacatgccagccccagctgggctggagggagcctgagtgagccccgacatacgctgggcctttcagctcgccgtgctctggtgacacacaggcggccaggttgggatttgtgtcaattctaggagccatcaagcatgaaagtggttctgtctcctgagcgcaagcctcgccggacccctgggcgaaggcctggacttgcagatgtgtgttccctgtgcgggtggacagagggggcccttatgacccacattgcagccccattccaccaccccttcctccccagagcagtctctgccgagggacagcacctgtgtcccttcgatgccacaacagccagttgaacaggggagccctttgctcaggcagcttctcctgcctctccctcctttctccttccctgccccatccccgtgcccttcttggcctgtggcgctggggagccatggtgtggcatactggggctcctgctccttgggccacttcctcagcccgggccccacaggcccaccacctgccagggctcccactgcactggctgtggcaggaggcttccccatgaccccgtgtggcccagctcggtgaggatgcagttctaggcacagcccctgggacagccagctgcctcccagaccacgtcagcctgctccagggtcctcagtcaccctgggccaggggccacgtgtcccatggatgtcgaccatgccaacgtcacattccagcaccccttttgcttgatggcgtctggtggtagtcagcatggtggacccacatcctacagccagaggtgatgttggacaaaggaaggggagtctggatgggtccttaaacgaccattctgtccgcagcggggtcattccttgtcagcccaagggagggccggggagtacactgatcccaacagctgggctgacacctcctttctcccctgcacggggaggattggcctgaggaccgtcaccctgtgcacagccccagtagggtggcagtgccactgtctccttgggccgttgcaggattgggcgggtgcagactccccttgcgggccccttgctcaatccccggccctcccagactcctccctctactgggggtaatttgtgtgtcagaagggctctggcagagctgtaaaatactgttttttaaaaattttagtccagatctttacttattagactgcagaaggagagctagggagagtgggggaagcccccttgcttttgtatctgtgaggtgaatgagggtctgtcacccaaatctacttctcagcccatgaccatagttctgttttccgtttgcaaatctcagtagctctgttttctccaaagtagaatgtgcgcaccggggtcctagccaggcgaggtcagtgtcggcaggctacctggtcattattgctgcctcgtccaggctgatgctgatggtcacaggcacggtggcatcagggagccgggccagcaggcggcgtgaggcggggccagcagctcactgcaagggcattttccacctgatcctggtgtgccccacatgcggtggcagggcagacgtgtgaagcctcggccgtctcggggctggcaggtgtgcgggtgaggaggccccggtggccaagcagagcctgcgtttcatttctcctgctgcactgtgtctagtctgtcttgtgaactctcaccgtgaaaagaggctagaagtccaggatcgctgtaccgctcctgtaattaggtgatgactggatttgacaacttagtcccctcagacaagtaagataccctccaacagcaaattcaatgacttaattggaaaacacacaagctggcatgatgtccggtgatttctgtaagaaatgcctgtaggagaaggtctgtgaagtgtggagggcagtgtcgacgctgcacagcatctgcagattcgcagcctcttctctgccggtgcctctgttcggttctgttacccaaaaacaaagaccaaagaaggccaatctctcatttgaccctgtctttttaatctgcctgttttaaaagttgcgtctgtagtagccgcttgctgtgaagacacatcttgacagtccaagtgattttgtgaccagtgatttgggtcctgttttccgctcttctaagaaaaaacaaaaagaccgtgagttattgcccagcaataatcatgttgttactgtgagttagcaacatgcctgacttcctgatagcattactgttttctagttttgtttattgtatattatgtgtggttttatttggtatttatttgtgttttgaggtcttgcaatgtttttgtgtttctgatgctaataactaaagtttgtaagactgtagaatgcaaaactcggagatgctaaactgtcttattagaggaaaataaatctgattatggagtctcaaaaatgatca

SEQ ID NO: 298540 - DNA, 7366 bp, Homo sapiens
  misc_feature (3389)..(3389): n is a, c, g, or t
  misc_feature (4180)..(4180): n is a, c, g, or t
ggggtctgaggagtgggagtcttctcctgggaccctggggtcgttctggggaaccccctgcagccacagagacaggactgtgcttctgccccagacccagcagcagggtaggaggcctttagacgttccaagggaagatgaggccacatgggcatgattctggcatcctaaacctgagaccctgtggcagccatgcagggccacctgtcccgtgggacctgcacttacaggggtgaggcctctctgggaagcagggaccctctgtattatggcccccgaggtatacgagggctgcagaggagatgtccatgggagccttgtggccccgcacaggtgctgtggcctgggagaagagctgggagggacacatgggagtgtgagggtgaggtcggatcctggtatctgaacaggagagctggtggggttggctgatgccagggtgtgggtgtgtgagaaacaggcgggcaggcggcaccagtgccactgtgaaacagggaagcctgctgtgggcagcagaagcatgagctgctgcctgccccagagacagtggagacctctcccctggtcttctgaacacttgccacctgtcactttgctttcctgatggctctctgttgacaaagcaagctgacttagtggagcctcctgttgttttcttccatgtggcttcatgtcacctcgagtgctccctgccggcacaagcacttgatcccagggagctcccaggaggcctgatgcagagccccactcctggagtcagagccgcgggtggcaggcctcatacaggggcctctgactgttctgctcctagcctgtctgtatttgatggaaggtggtgcagcattttccgagtcctaactgtgttttgctttttaacacctttggtttggaagcgagtgatagacagccaagcagagaaactgaaggagcttgacaaggagatccggcccttccggcagaactgggaggaagcagacagcatgaagagcagcgtggagtccctccagaaccgcgtgaccgagctggagagcgtggacaagagcgcggggcaagtggctcggaacacaggcctgctggagtcccagctgagccggcatgaccagatgctgagtgtgcacgacatccgcctagccgacatggacctgcgcttccaggtcctggagaccgccagctacaatggagtgctcatctggaagattcgcgactacaagcggcggaagcaggaggccgtcatggggaagaccctgtccctttacagccagcctttctacactggttactttggctataagatgtgtgccagggtctacctgaacggggacgggatggggaaggggacgcacttgtcgctgttttttgtcatcatgcgtggagaatatgatgccctgcttccttggccgtttaagcagaaagtgacactcatgctgatggatcaggggtcctctcgacgtcatttgggagatgcattcaagcccgaccccaacagcagcagcttcaagaagcccactggagagatgaatatcgcctctggctgcccagtctttgtggcccaaactgttctagaaaatgggacatatattaaagatgatacaatttttattaaagtcatagtggatacttcggatctgcccgatccctgataagtagctggggaggtggatttagcagaaggcaactcctctgggggatttgaaccggtctgtcttcactgaggtcctcgcgctcagaaaaggaccttgtgagacggaggaagcggcagaaggcggacgcgtgccggcgggaggagccacgcgtgagcacacctgacacgttttataatagactagccacacttcactctgaagaattatttatccttcaacaagataaatattgctgtcagagaaggttttcattttcatttttaaagatctagttaattaaggtggaaaacatatatgctaaacaaaagaaacatgatttttcttccttaaacttgaacaccaaaaaaacacacacacacacacacgtggggatagctggacatgtcagcatgttaagtaaaaggagaatttatgaaatagtaatgcaattctgatatcttctttctaaaattcaagagtgcaattttgtttcaaatacagtatattgtctatttttaaggcctcatctggtctctgttttaataatttgtttgtcagaagaccctgaagtatatacctaggtcttttttttgaaagtctctaaattcagaatcattttttaatttaaagttctacaaataattgttactgcaaacattttattttaaaacgttgatagactgatatttcttggaagaaaatataaaatatcaaacactggttatcacttgtgataggaaagagaatattcaacctgttgttatttctcgttagaaatgtaaaccttcaaatatctgtcgtagttaatgacacgacttcacaattctgaacggagcctcgctcatggatgctgtgcatcattttcagatttataattgttttcaccctaaaatagggcatccgttgaactttggagttctaaacaaaatcctgtaggtgtttggattctgccccatgtgttcggacgagctctctgttgctgacagcaccggccttcggtctccatgtcaggggtgggcgggtgactgctgagggaggcccgcaggtgtgtttctccatcccgtcatcttgctgcatgccgtcaacggtctccgaaagcaacgttgtgcgtagagctggtggcatacggcccacgtgccttagatgggacatgctgcttctccaccctgggtttgcattgagcatcattctagaaagtgctagtttaaccagacttttctctccaccactagatctttgtctctacaagggccctcagacacctctgcacctgctgaggggaagccaggctccaccgtcggcttctggagcctccgctgcttaattaccacagattccaaatctctaggccccacgagtgagccgcctggtccaagtacggcctggtcccaccctgagggaggcaggtgtggaacagaagccgagcctctccgtgtccccaccggggccgtgggcacccccacagcccgaagcagaaccctctgagcattccagagaccgctgctcgggggcctgcccaggctgaccaacgggcgctcctgaccaccaccctggcgggaagggtggccacggggcccgtcgtcccagcctgtgcctgcccagatggcattttctcaactcactgtttactgtctctcagtgtccaactgtgattagaagcctggagcctgccccctgcaccccttttgctatgcaccacgcttcatggtgctcttaccactgatgggtgctacacgcgacgggtgcttcttaggcaaaaccaatgtntgcgaactgtcacacctgtgccactcgcccacaagccgcgcccacaattggccagctgggccgtgcacgtcagactgcctgcctcggctctccccgtggccgcgcggggacagcttggtgggtgcccggtggcccacctgtctctggtgctgccatctgtcctgggtgtgccttcgccccagtgcctgctggaagtgccctccgtcgcacccctgtgccctgagctcccgtgaggggcccgccgcgccctttcgcggtcgaagcgttccgttgttcttatctgcctttcctttccccgctctcctgggattactttgggggaatgagtatccttggttctgccctgtgagggagtcgtgtgtccctgctcataaaggaaggacttcctgcagaagctgcggaaaactactgttccctcgaaggtgtcccccacctgaggcctgtcccctacctgccctcaggtagttttcctgaggccaggggttaacaacagggacatccctgcaacttccccttcacaaaatgtataatattagatgaaggatatgcaacatcttggtctagtaagaaccgtttcctcccctctgggttgaagtcctggtgtggcccccagaagcagcagtgcgtgtcactgggacgtctccagtagcccttcccaggcagacgctcctggcgggacgccatggggcccacctgagggtcccacagacgtaacctgagtgacaggagtccttgaggatgggatggcctatgtcacacactttgtccttgaacctgagtgatgggggtcnttgaggatgggatggcctgtgtcacgcgctttgtctttgtgtttggttgtatcggggtctctgttctgagtgtgtcttcctctcatgtactcaacacagtgggcagcagcctgggacggcgtcccctctcccggcggcgggcaagccttgcgctgctccaccctcggcctgggcaccctcacttggcgctggccacctgggccagcctggggccatggtctctctgcagctgaggcccagtggccccttgggcagtgatcggccctccccgcatcacagggccctggcagcaagcgggaaatgggggcgcacactgtgtgcttgggggtgctgcttgtttaccacacatgaccagactcccagcaggacagagctgctcagtactttacagaaaccaactgagtcgtttgtgcatgaattaagccggtctgcttccccgtcaccttcgtaacaaaacaacgtcccctctcccctcgcctcgagcagtttcttcaggacaccgtggctcgggctgctccctgctgccaggcacgctggttggctggcctgggcccggctcacgtgaagggcactggctcttgtgaccacactgagccacgtgcaagccgcagccgggcctggaagcctgaccctctggttctagggcttgtcccgcggagcctgcagagctagacgttggggtgtgtccgtgatgatatgggggccaggctgggagtagggcctttctagcagggttgggtggctcagtgagggtgtggaagtgggggacccacggggcctggctttgggactagacatgccagccccagctgggctggagggagcctgagtgagccccgacatacgctgggcctttcagctcgccgtgctctggtgacacacaggcggccaggttgggatttgtgtcaattctaggagccatcaagcatgaaagtggttctgtctcctgagcgcaagcctcgccggacccctgggcgaaggcctggacttgcagatgtgtgttccctgtgcgggtggacagagggggcccttatgacccacattgcagccccattccaccaccccttcctccccagagcagtctctgccgagggacagcacctgtgtcccttcgatgccacaacagccagttgaacaggggagccctttgctcaggcagcttctcctgcctctccctcctttctccttccctgccccatccccgtgcccttcttggcctgtggcgctggggagccatggtgtggcatactggggctcctgctccttgggccacttcctcagcccgggccccacaggcccaccacctgccagggctcccactgcactggctgtggcaggaggcttccccatgaccccgtgtggcccagctcggtgaggatgcagttctaggcacagcccctgggacagccagctgcctcccagaccacgtcagcctgctccagggtcctcagtcaccctgggccaggggccacgtgtcccatggatgtcgaccatgccaacgtcacattccagcaccccttttgcttgatggcgtctggtggtagtcagcatggtggacccacatcctacagccagaggtgatgttggacaaaggaaggggagtctggatgggtccttaaacgaccattctgtccgcagcggggtcattccttgtcagcccaagggagggccggggagtacactgatcccaacagctgggctgacacctcctttctcccctgcacggggaggattggcctgaggaccgtcaccctgtgcacagccccagtagggtggcagtgccactgtctccttgggccgttgcaggattgggcgggtgcagactccccttgcgggccccttgctcaatccccggccctcccagactcctccctctactgggggtaatttgtgtgtcagaagggctctggcagagctgtaaaatactgttttttaaaaattttagtccagatctttacttattagactgcagaaggagagctagggagagtgggggaagcccccttgcttttgtatctgtgaggtgaatgagggtctgtcacccaaatctacttctcagcccatgaccatagttctgttttccgtttgcaaatctcagtagctctgttttctccaaagtagaatgtgcgcaccggggtcctagccaggcgaggtcagtgtcggcaggctacctggtcattattgctgcctcgtccaggctgatgctgatggtcacaggcacggtggcatcagggagccgggccagcaggcggcgtgaggcggggccagcagctcactgcaagggcattttccacctgatcctggtgtgccccacatgcggtggcagggcagacgtgtgaagcctcggccgtctcggggctggcaggtgtgcgggtgaggaggccccggtggccaagcagagcctgcgtttcatttctcctgctgcactgtgtctagtctgtcttgtgaactctcaccgtgaaaagaggctagaagtccaggatcgctgtaccgctcctgtaattaggtgatgactggatttgacaacttagtcccctcagacaagtaagataccctccaacagcaaattcaatgacttaattggaaaacacacaagctggcatgatgtccggtgatttctgtaagaaatgcctgtaggagaaggtctgtgaagtgtggagggcagtgtcgacgctgcacagcatctgcagattcgcagcctcttctctgccggtgcctctgttcggttctgttacccaaaaacaaagaccaaagaaggccaatctctcatttgaccctgtctttttaatctgcctgttttaaaagttgcgtctgtagtagccgcttgctgtgaagacacatcttgacagtccaagtgattttgtgaccagtgatttgggtcctgttttccgctcttctaagaaaaaacaaaaagaccgtgagttattgcccagcaataatcatgttgttactgtgagttagcaacatgcctgacttcctgatagcattactgttttctagttttgtttattgtatattatgtgtggttttatttggtatttatttgtgttttgaggtcttgcaatgtttttgtgtttctgatgctaataactaaagtttgtaagactgtagaatgcaaaactcggagatgctaaactgtcttattagaggaaaataaatctgattatggagtctcaaaaatgatca

SEQ ID NO: 298541 - DNA, 1078 bp, Homo sapiens
cgggggagcgcggcgcggccgccgcgtgcgcgagccggggttgcagcccagccgggactttccagccggcggcagccgcggcggccgccggctcttccccgccccccgccatggggcagcccggggagcagaacgctgcggaccgcggcggaggacgcgcccggcgcccctgagccggccgagcggcgacggaccgcgagatgaggaaaatgaggcccaaagaagtgatgccacttggttaaggtcccagagcaggtcagaatcagacctaggatcagaaacctggctcctggctcctggctccctactcttctaaggatcgctgtcctgacagaagagaactcctctttcctaaaatggagtcgagtaaaaagatggactctcctggcgcgctgcagactaacccgccgctaaagctgcacactgaccgcagtgctgggacgccagtttttgtccctgaacaaggaggttacaaggaaaagtttgtgaagaccgtggaggacaagtacaagtgtgagaagtgccacctggtgctgtgcagcccgaagcagaccgagtgtgggcaccgcttctgcgagagctgcatggcggccctgctgagctcttcaagtccaaaatgtacagcgtgtcaagagagcatcgttaaagataaggtgtttaaggataattgctgcaagagagaaattctggctcttcagatctattgtcggaatgaaagcagaggttgtgcagagcagttaacgctgggacatctgctggtgcatttaaaaaatgattgccattttgaagaacttccatgtgtgcgtcctgactgcaaagaaaaggtcttgaggaaagacctgcgagaccacgtggagaaggcgtgtaaataccgggaagccacatgcagccactgcaagagtcaggttccgatgatcgcgctgcaggtgcgggtcctcccattccacaggccttccactcaattcctatatgatacattccacaggccttccgctcaattcgtagataatccgttccacaggccttccctcaactcatagataatccgttccacaggccttccactcagttcatagat

SEQ ID NO: 298542 - DNA, 384 bp, Homo sapiens
caggtggccctgagcacagccctccttaggcgcagagattccctgttcacttgacgcaaataggtctcccctctttgtgtttagtgctgcttttagggtcgtatgttagccgttctgccctttgaaatgcagcgaggttcgctgaatgcctcacatgtttgctctcgcaggggacaaaccagcagatcaaggcccacgaggccagctccgccgtgcagcacgtcaacctgctgaaggagtggagcaactcgctcgaaaagaaggtgggctgcacactttcctgctgctatgggatttgtatcatctcttcagattatttaaagacaaaacctttttgtagttattaatgggttttggataaaagaaactatcaagagaatgtca

SEQ ID NO: 298543 - DNA, 690 bp, Homo sapiens
tactgagccactcatatatgccagacactgtgctaggagtgtgtgaaagccagagaaatactcattagaggaaaattgctgacctgaagccataccatatgaccttattagcacaactcagtgtattcgataatgaaaatgttcactgactttgattttggaaatcccccctacagagtagcataaacgagacattgatattgtctcttttctcatttaaagctatgcctttaaaggccacccatgttgctgtatatacttggaatgtgtttccacattttaccagtccgcttctccagcgataggaacctagaatgcttctaattcctgtaatcacagatgtagcttcagggtatatcttcatacatgttgttcatacgggaatttctttgctatctatgcccaaaagtaggattgctagatcatgagatgtgcaaatagtttgcctaagtagtgctgccggactgttcttccgaacagttactccactctgcaatcccaccagcagtgccagttccaaaaaagaactcactgacacttggtgttatccagctttcttattctaccaaactgatagcataatgtgatcatattgttcatgccttgggattttctcttctataatttggatatctttgtccattgctcatttctttattgaagttgctttcttaaaaattgatttaactt

SEQ ID NO: 298544 - DNA, 1047 bp, Homo sapiens
cagaacagacgtttgaacagagcaggcttctgaggtctccaaaatgcctgtcccagcctcctggccccatcctcctggtcctttcctgcttctgactctactgctgggacttacagaagtggcaggtgaggaggagctacagatgattcagcctgagaagctcctgttggtcacagttggaaagacagccactctgcactgcactgtgacctccctgcttcccgtgggacccgtcctgtggttcagaggagttggaccaggccgagaattaatctacaatcaaaaagaaggccacttccccagggtaacaacagtttcagacctcacaaagagaaacaacatggacttttccatccgcatcagtagcatcaccccagcagatgtcggcacatactactgtgtgaagtttcgaaaagggagccctgagaacgtggagtttaagtctggaccaggcactgagatggctttgggtggcccggcatcatctcttactgcgctgctcctcatagctgtcctcctgggccccatctacgtcccctggaagcagaagacctgactctccttccttcctcccctgccacgtgggaccctcatctctgctgcctccttcctttcctgagaggctcagcttgagagaatgagccagtgagaagcttctctagacttggctccaaacatctcccctcccaagacatctgcctgcccacaggctcctgttgctccttcacacagacctggatgccccagagcaaggtcttcattcatggtcctgagcaggggccatgggattgggctctgggcactgacttaacggcacctccctagaaggcgagaaacatgccaaatctaaacacaccaggactcccatccatcgccttgagactgaccgtaaaccacagacgctctccaggttctcaagagttatcctgccttccagattcctgcctatcccaactccccagccttgttgaggttctctattgcctcttgaatacaaatgcactcccaaagtggttttaagaaaataaaaagattatccttccaaac

SEQ ID NO: 298545 - DNA, 806 bp, Homo sapiens
gtttccctagcagaatggaatgacaatccctgctcccataggcttgtgagggtcaagtgaggaaccccgttgccacatgtatgaatacctgagtacacaccccctccacctcttccctccaggagaataagctggcaacctgggacaggatgagtgagaatggggagcctctttctgtggcttctgccttgtgctggagtgaagatagcctgggcaggatgcaggttcaaaggcccggcatcatctcttactgcgctgctcctcatagctgtcctcctgggccccatctacgtcccctggaagcagaagacctgactctccttccttcctcccctgccacgtgggaccctcatctctgctgcctccttcctttcctgagaggctcagcttgagagaatgagccagtgagaagcttctctagacttggctccaaacatctcccctcccaagacatctgcctgcccacaggctcctgttgctccttcacacagacctggatgccccagagcaaggtcttcattcatggtcctgagcaggggccatgggattgggctctgggcactgacttaacggcacctccctagaaggcgagaaacatgccaaatctaaacacaccaggactcccatccatcgccttgagactgaccgtaaaccacagacgctctccaggttctcaagagttatcctgccttccagattcctgcctatcccaactccccagccttgttgaggttctctattgcctcttgaatacaaatgcactcccaaagtggttttaagaaaataaaaagattatccttccaaac

SEQ ID NO: 298546 - DNA, 716 bp, Homo sapiens
ctctcattgtgaagccatcctcaagccacctgcctacccttttatagtcattaaaatgtccctaggaatttggacttgttttgttccaaaggacatggtctcagggatcaacctaaggaacactagtgatgagcttctttaggcccggcatcatctcttactgcgctgctcctcatagctgtcctcctgggccccatctacgtcccctggaagcagaagacctgactctccttccttcctcccctgccacgtgggaccctcatctctgctgcctccttcctttcctgagaggctcagcttgagagaatgagccagtgagaagcttctctagacttggctccaaacatctcccctcccaagacatctgcctgcccacaggctcctgttgctccttcacacagacctggatgccccagagcaaggtcttcattcatggtcctgagcaggggccatgggattgggctctgggcactgacttaacggcacctccctagaaggcgagaaacatgccaaatctaaacacaccaggactcccatccatcgccttgagactgaccgtaaaccacagacgctctccaggttctcaagagttatcctgccttccagattcctgcctatcccaactccccagccttgttgaggttctctattgcctcttgaatacaaatgcactcccaaagtggttttaagaaaataaaaagattatccttccaaac

SEQ ID NO: 298547 - DNA, 1736 bp, Homo sapiens
aagcatgatgggttttactagaacgtttcagtgtcactaagtcacagaagaggaggacaagaagaggaattatggcagggaccagctttatcacagtggtgtgcctggtttggcagggtgctcacaacttgtttgtgggatgtggaggtatcagaagtggcaggtgaggaggagctacagatgattcagcctgagaagctcctgttggtcacagttggaaagacagccactctgcactgcactgtgacctccctgcttcccgtgggacccgtcctgtggttcagaggagttggaccaggccgagaattaatctacaatcaaaaagaaggccacttccccagggtaacaacagtttcagacctcacaaagagaaacaacatggacttttccatccgcatcagtagcatcaccccagcagatgtcggcacatactactgtgtgaagtttcgaaaagggagccctgagaacgtggagtttaagtctggaccaggcactgagatggctttgggtgccaaaccctctgcccccgtggtattgggccctgcggcgaggaccacacctgagcatacagtgagtttcacctgtgagtcccatggcttctctcccagagacatcaccctgaaatggttcaaaaatgggaatgagctctcagacttccagaccaacgtggaccccacaggacagagtgtggcctacagcatccgcagcacagccagggtggtactggacccctgggacgttcgctctcaggtcatctgcgaggtggcccatgtcaccttgcagggggaccctcttcgtgggactgccaacttgtctgaggccatccgagttccacccaccttggaggttactcaacagcccatgagggcggggaaccaggtaaacgtcacctgccaggtgaggaagttctacccccagagcctacagctgacctggttggagaatggaaacgtgtgccagagagaaacagcctcgacccttacagagaacaaggatggtacctacaactggacaagctggttcctggtgaacatatctgaccaaagggatgatgtggtcctcacctgccaggtgaagcatgatgggcagctggcggtcagcaaacgccttgccctggaggtcacagtccaccagaaggaccagagctcagatgctacccctggcccggcatcatctcttactgcgctgctcctcatagctgtcctcctgggccccatctacgtcccctggaagcagaagacctgactctccttccttcctcccctgccacgtgggaccctcatctctgctgcctccttcctttcctgagaggctcagcttgagagaatgagccagtgagaagcttctctagacttggctccaaacatctcccctcccaagacatctgcctgcccacaggctcctgttgctccttcacacagacctggatgccccagagcaaggtcttcattcatggtcctgagcaggggccatgggattgggctctgggcactgacttaacggcacctccctagaaggcgagaaacatgccaaatctaaacacaccaggactcccatccatcgccttgagactgaccgtaaaccacagacgctctccaggttctcaagagttatcctgccttccagattcctgcctatcccaactccccagccttgttgaggttctctattgcctcttgaatacaaatgcactcccaaagtggttttaagaaaataaaaagattatccttccaaac

SEQ ID NO: 298548 - DNA, 630 bp, Homo sapiens
  misc_feature (39)..(39): n is a, c, g, or t
gtgacatacacaaccaacagttatacacgacggtcaacnaaaaaacgccacttgaggcccggcatcatctcttactgcgctgctcctcatagctgtcctcctgggccccatctacgtcccctggaagcagaagacctgactctccttccttcctcccctgccacgtgggaccctcatctctgctgcctccttcctttcctgagaggctcagcttgagagaatgagccagtgagaagcttctctagacttggctccaaacatctcccctcccaagacatctgcctgcccacaggctcctgttgctccttcacacagacctggatgccccagagcaaggtcttcattcatggtcctgagcaggggccatgggattgggctctgggcactgacttaacggcacctccctagaaggcgagaaacatgccaaatctaaacacaccaggactcccatccatcgccttgagactgaccgtaaaccacagacgctctccaggttctcaagagttatcctgccttccagattcctgcctatcccaactccccagccttgttgaggttctctattgcctcttgaatacaaatgcactcccaaagtggttttaagaaaataaaaagattatccttccaaac

SEQ ID NO: 298549 - DNA, 3489 bp, Homo sapiens
cttcttctttacctccgccttgttcctgtcctcaccacacggactgagactgatttgattaaagcaccagagtgtaatggccctcagagcagggctggtcctggggttccacaccctgatgaccctcctgagcccgcaggaggcaggggccaccaaggctgaccacatgggctcctacggacccgccttctaccagtcttacggcgcctcgggccagttcacccatgaatttgatgaggaacagctgttctctgtggacctgaagaaaagcgaggccgtgtggcgtctgcctgagtttggtgactttgcccgctttgacccgcagggcgggctggccggcatcgccgcaatcaaagcccatctggacatcctggtggagcgctccaaccgcagcagagccatcaacgtgcctccacgggtgaccgtgctccccaagtctcgggtggagctgggccagcccaacatcctcatctgcatcgtggacaacatcttcccccctgtgatcaatatcacctggctgcgcaacggccaaactgtcactgagggagtggcccagaccagcttctattcccagcctgaccatttgttccgcaagttccactacctgcccttcgtgccctcagccgaggacgtctatgactgccaggtggagcactggggcctggatgcgccactcctcaggcattgggagctccaggtgcctattccaccaccagatgccatggagaccctggtctgtgccctgggcctggccatcggcctggtgggcttcctcgtgggcaccgtcctcatcatcatgggcacatatgtgtccagtgtccccaggtaatgatccttctgagagaaatgacttgtgggagacaccctgcagatcctcatgggtttgtgacagcccctgcgtgctcagtgccctttaagtgcatcccgctgtgctgactttgagtgggatcaacatctgtcctacgggtcccctcttttttggccccagtattcatggcagggtttgttggacacctactagcttcccttcccattcaacacacacacacattcttgctctacccaaagctctggctggcagcactaaatgctttggtggtgtttgcactgtgtcctttccaggccttggccagttcttccaggggtgaggcatgtggtgctggggattggcagccatcctggggcccacacaggtgtgtcttgctccatttggcccattgtgtgttactttgtgaatgagccatttcacatggacttcatgaaatttgcctcctgagttcaggtttaccctgaaagggatgcagattatcctgttcctcacgaccccctcagctaacaacagttctgaagggtgctgggacaggacaggctcatggggactccactcctgcctgggtttactctgtatgaagaggccactggtatcctgccatgatgttatctcctttttctactttccctagagtcccatgcatgataaagagaggcccaaggcttggataaggtggccacttccctcagtggagtcagtcatgttaggtaggaggtggtagagtcggtctgcaaggtatctcgtaagaggggaggtccacctagacacactctaaatatgtggcctagaagattttggtctacttttctgtgaacagaatttaaaacatacaaagagataaatcaccataccacatagtttatgtcaagaccaaaatgagcaatacagattacggttttcaaaccagaatgcacataagaactgcttgggatccttttaaaagtacaggcattggcctggtgcagtggctcattcctgtaatcccagcactttgggaggccaaggggacaggactgcttgaggccaagaggtggaaaccatcttgggctacatagagagaccccatctctacaaagaaagatttaaaaattaaccagccatggtggctcgcacctgtattcccagccactggggaggctgaggccggaggagtgcttgagcccaggagttcaaggctgcagtgagccaagattgcgccactgcactccagcctaggtgacagagtgagaccctgtctctaaataaataaataaataaaatataaaaataacagtcatcacccagacctactgaattagaatctcgggagtgcagggggcagcaacaggggggctgtcttttctgagaaggggtctcactctgtcaccaggctggagtgccatggcatgatctcagctcactgcaacctccacctcctgagttcaagccattctcctgcctcagcctcctgagtagctgggactacaggtgtgcgccactacactcagctaatttttgtattttaagtagagacggggtttcatcatgttggccaggatggcctccatctcttgacctcgtgatccacccaccttccctcccaaagtactggaattacaggcattagccactgtgcccagccgaggctgtcatttttaaccggctctggatgactctgatgcagccatcctggaccttggctgtggtctggtaactggaacccagtgacgtaatcaggtgccatcgggggtcatgggaaagggggatccccaaggtctgaggtggactaggaaggctttctgaagaacctgggtctgttagggcatcagccaatcaaggtacaagtaaatagaggcaaaatgagggtttgaactgtgagcagttggtcctggaaaagaaagaaaccaagagattatggggactcaatgggcttcttaagagagaataagttgaaatcaatgaccagaagaccctgatggaagtggaggagaatcatctcaggcaaactttttgtgtgccagtaacagaaaccctctttgtgtgatcacatgcaaagtataggatatttgcaatatagccatggggaggagtgcagggcccaagggtagattttagccaggcctcccaggaacagaactcggatccgaaaagcccagagaagctagagctgcccctccaacactctcggatccacatggtctgtgttctctagacccccctgcatgttagcggtgttctctctctgtggactgactgtccttctcagtgaacatgtccacccgacagctcctgagtttatatcatctcaaccctcacaacccacagaggctgtgtctcctagtcacagctttaaattactggaaaaataaatgactggccaaacttggagcaggtgtccatcccagccctgtgtagttagagcaggaatcaagatctcaacacaaatgtggctgccaagcactcagccccggggcgaggggtcaagttcttctcagagaaagaggaataagttggttctcagaagacatcacaagatacgtgtgtacccaacaatctctgatctctgctgatcttttgcttagacgttaacttgatgcatcattggaaaggtgtttctctcatctctgtcctaaggcttgataaagtcattaaaattgtgttcttttgactaaagaaaa

SEQ ID NO: 298550 - DNA, 3018 bp, Homo sapiens
cttcttctttacctccgccttgttcctgtcctcaccacacggactgagactgatttgattaaagcaccagagtgtaatggccctcagagcagggctggtcctggggttccacaccctgatgaccctcctgagcccgcaggaggcaggggccaccaaggctgaccacatgggctcctacggacccgccttctaccagtcttacggcgcctcgggccagttcacccatgaatttgatgaggaacagctgttctctgtggacctgaagaaaagcgaggccgtgtggcgtctgcctgagtttggtgactttgcccgctttgacccgcagggcgggctggccggcatcgccgcaatcaaagcccatctggacatcctggtggagcgctccaaccgcagcagagccatcaacgtgcctccacgggtgaccgtgctccccaagtctcgggtggagctgggccagcccaacatcctcatctgcatcgtggacaacatcttcccccctgtgatcaatatcacctggctgcgcaacggccaaactgtcactgagggagtggcccagaccagcttctattcccagcctgaccatttgttccgcaagttccactacctgcccttcgtgccctcagccgaggacgtctatgactgccaggtggagcactggggcctggatgcgccactcctcaggcattgggagctccaggtgcctattccaccaccagatgccatggagaccctggtctgtgccctgggcctggccatcggcctggtgggcttcctcgtgggcaccgtcctcatcatcatgggcacatatgtgtccagtgtccccaggtaatgatccttctgagagaaatgacttgtgggagacaccctgcagatcctcatgggtttgtgacagcccctgcgtgctcagtgccctttaagtgcatcccgctgtgctgactttgagtgggatcaacatctgtcctacgggtcccctcttttttggccccagtattcatggcagggtttgttggacacctactagcttcccttcccattcaacacacacacacattcttgctctacccaaagctctggctggcagcactaaatgctttggtggtgtttgcactgtgtcctttccaggccttggccagttcttccaggggtgaggcatgtggtgctggggattggcagccatcctggggcccacacaggtgtgtcttgctccatttggcccattgtgtgttactttgtgaatgagccatttcacatggacttcatgaaatttgcctcctgagttcaggtttaccctgaaagggatgcagattatcctgttcctcacgaccccctcagctaacaacagttctgaagggtgctgggacaggacaggctcatggggactccactcctgcctgggtttactctgtatgaagaggccactggtatcctgccatgatgttatctcctttttctactttccctagagtcccatgcatgataaagagaggcccaaggcttggataaggtggccacttccctcagtggagtcagtcatgttaggtaggaggtggtagagtcggtctgcaaggtatctcgtaagaggggaggtccacctagacacactctaaatatgtggcctagaagattttggtctacttttctgtgaacagaatttaaaacatacaaagagataaatcaccataccacatagtttatgtcaagaccaaaatgagcaatacagattacggttttcaaaccagaatgcacataagaactgcttgggatccttttaaaagtacaggcattggcctggtgcagtggctcattcctgtaatcccagcactttgggaggccaaggggacaggactgcttgaggccaagaggtggaaaccatcttgggctacatagagagaccccatctctacaaagaaagatttaaaaattaaccagccatggtggctcgcacctgtattcccagccactggggaggctgaggccggaggagtgcttgagcccaggagttcaaggctgcagtgagccaagattgcgccactgcactccagcctaggtgacagagtgagaccctgtctctaaataaataaataaataaaatataaaaataacagtcatcacccagacctactgaattagaatctcgggagtgcagggggcagcaacaggggggctgtcttttctgagaaggggtctcactctgtcaccaggctggagtgccatggcatgatctcagctcactgcaacctccacctcctgagttcaagccattctcctgcctcagcctcctgagtagctgggactacaggtgtgcgccactacactcagctaatttttgtattttaagtagagacggggtttcatcatgttggccaggatggcctccatctcttgacctcgtgatccacccaccttccctcccaaagtactggaattacaggcattagccactgtgcccagccgaggctgtcatttttaaccggctctggatgactctgatgcagccatcctggaccttggctgtggtctggtaactggaacccagtgacgtaatcaggtgccatcgggggtcatgggaaagggggatccccaaggtctgaggtggactaggaaggctttctgaagaacctgggtctgttagggcatcagccaatcaaggtacaagtaaatagaggcaaaatgagggtttgaactgtgagcagttggtcctggaaaagaaagaaaccaagagattatggggactcaatgggcttcttaagagagaataagttgagaatcaagatctcaacacaaatgtggctgccaagcactcagccccggggcgaggggtcaagttcttctcagagaaagaggaataagttggttctcagaagacatcacaagatacgtgtgtacccaacaatctctgatctctgctgatcttttgcttagacgttaacttgatgcatcattggaaaggtgtttctctcatctctgtcctaaggcttgataaagtcattaaaattgtgttcttttgactaaagaaaa

SEQ ID NO: 298551 - DNA, 3173 bp, Homo sapiens
cttcttctttacctccgccttgttcctgtcctcaccacacggactgagactgatttgattaaagcaccagagtgtaatggccctcagagcagggctggtcctggggttccacaccctgatgaccctcctgagcccgcaggaggcaggggccaccaaggctgaccacatgggctcctacggacccgccttctaccagtcttacggcgcctcgggccagttcacccatgaatttgatgaggaacagctgttctctgtggacctgaagaaaagcgaggccgtgtggcgtctgcctgagtttggtgactttgcccgctttgacccgcagggcgggctggccggcatcgccgcaatcaaagcccatctggacatcctggtggagcgctccaaccgcagcagagccatcaacgtgcctccacgggtgaccgtgctccccaagtctcgggtggagctgggccagcccaacatcctcatctgcatcgtggacaacatcttcccccctgtgatcaatatcacctggctgcgcaacggccaaactgtcactgagggagtggcccagaccagcttctattcccagcctgaccatttgttccgcaagttccactacctgcccttcgtgccctcagccgaggacgtctatgactgccaggtggagcactggggcctggatgcgccactcctcaggcattgggagctccaggtgcctattccaccaccagatgccatggagaccctggtctgtgccctgggcctggccatcggcctggtgggcttcctcgtgggcaccgtcctcatcatcatgggcacatatgtgtccagtgtccccaggtaatgatccttctgagagaaatgacttgtgggagacaccctgcagatcctcatgggtttgtgacagcccctgcgtgctcagtgccctttaagtgcatcccgctgtgctgactttgagtgggatcaacatctgtcctacgggtcccctcttttttggccccagtattcatggcagggtttgttggacacctactagcttcccttcccattcaacacacacacacattcttgctctacccaaagctctggctggcagcactaaatgctttggtggtgtttgcactgtgtcctttccaggccttggccagttcttccaggggtgaggcatgtggtgctggggattggcagccatcctggggcccacacaggtgtgtcttgctccatttggcccattgtgtgttactttgtgaatgagccatttcacatggacttcatgaaatttgcctcctgagttcaggtttaccctgaaagggatgcagattatcctgttcctcacgaccccctcagctaacaacagttctgaagggtgctgggacaggacaggctcatggggactccactcctgcctgggtttactctgtatgaagaggccactggtatcctgccatgatgttatctcctttttctactttccctagagtcccatgcatgataaagagaggcccaaggcttggataaggtggccacttccctcagtggagtcagtcatgttaggtaggaggtggtagagtcggtctgcaaggtatctcgtaagaggggaggtccacctagacacactctaaatatgtggcctagaagattttggtctacttttctgtgaacagaatttaaaacatacaaagagataaatcaccataccacatagtttatgtcaagaccaaaatgagcaatacagattacggttttcaaaccagaatgcacataagaactgcttgggatccttttaaaagtacaggcattggcctggtgcagtggctcattcctgtaatcccagcactttgggaggccaaggggacaggactgcttgaggccaagaggtggaaaccatcttgggctacatagagagaccccatctctacaaagaaagatttaaaaattaaccagccatggtggctcgcacctgtattcccagccactggggaggctgaggccggaggagtgcttgagcccaggagttcaaggctgcagtgagccaagattgcgccactgcactccagcctaggtgacagagtgagaccctgtctctaaataaataaataaataaaatataaaaataacagtcatcacccagacctactgaattagaatctcgggagtgcagggggcagcaacaggggggctgtcttttctgagaaggggtctcactctgtcaccaggctggagtgccatggcatgatctcagctcactgcaacctccacctcctgagttcaagccattctcctgcctcagcctcctgagtagctgggactacaggtgtgcgccactacactcagctaatttttgtattttaagtagagacggggtttcatcatgttggccaggatggcctccatctcttgacctcgtgatccacccaccttccctcccaaagtactggaattacaggcattagccactgtgcccagccgaggctgtcatttttaaccggctctggatgactctgatgcagccatcctggaccttggctgtggtctggtaactggaacccagtgacgtaatcaggtgccatcgggggtcatgggaaagggggatccccaaggtctgaggtggactaggaaggctttctgaagaacctgggtctgttagggcatcagccaatcaaggtacaagtaaatagaggcaaaatgagggtttgaactgtgagcagttggtcctggaaaagaaagaaaccaagagattatggggactcaatgggcttcttaagagagaataagttgaaatcaatgaccagaagaccctgatggaagtggaggagaatcatctcaggcaaactttttgtgtgccagtaacagaaaccctctttgtgtgatcacatgcaaagtataggatatttgcaatatagccatggggaggagtgcagggcccaagggtagattttagccaggcctcccaggaacagaactcggatccgaaaagcccagagaagctagagctgcccctccaacactctcggatccacatggtctgtgttctctagacccccctgcatgttagcggtgttctctctctgtggactgactgtccttctcagtgaacatgtccacccgacagctcctgagtttatatcatctcgtctcttctcttgtacatctcgtctcttctcttgtacatctcgtctcttctcttg

SEQ ID NO: 298552 - DNA, 3632 bp, Homo sapiens
cttcttctttacctccgccttgttcctgtcctcaccacacggactgagactgatttgattaaagcaccagagtgtaatggccctcagagcagggctggtcctggggttccacaccctgatgaccctcctgagcccgcaggaggcaggggccaccaaggggccagcccagtgtcagaacaggactctgtccccacacagaacccaggacggggcccaggctcagggactcaacaatcacatattgtggatgagacagacacatttttttctctctccttgaccctgaactcgccaaacacagctgaccacatgggctcctacggacccgccttctaccagtcttacggcgcctcgggccagttcacccatgaatttgatgaggaacagctgttctctgtggacctgaagaaaagcgaggccgtgtggcgtctgcctgagtttggtgactttgcccgctttgacccgcagggcgggctggccggcatcgccgcaatcaaagcccatctggacatcctggtggagcgctccaaccgcagcagagccatcaacgtgcctccacgggtgaccgtgctccccaagtctcgggtggagctgggccagcccaacatcctcatctgcatcgtggacaacatcttcccccctgtgatcaatatcacctggctgcgcaacggccaaactgtcactgagggagtggcccagaccagcttctattcccagcctgaccatttgttccgcaagttccactacctgcccttcgtgccctcagccgaggacgtctatgactgccaggtggagcactggggcctggatgcgccactcctcaggcattgggagctccaggtgcctattccaccaccagatgccatggagaccctggtctgtgccctgggcctggccatcggcctggtgggcttcctcgtgggcaccgtcctcatcatcatgggcacatatgtgtccagtgtccccaggtaatgatccttctgagagaaatgacttgtgggagacaccctgcagatcctcatgggtttgtgacagcccctgcgtgctcagtgccctttaagtgcatcccgctgtgctgactttgagtgggatcaacatctgtcctacgggtcccctcttttttggccccagtattcatggcagggtttgttggacacctactagcttcccttcccattcaacacacacacacattcttgctctacccaaagctctggctggcagcactaaatgctttggtggtgtttgcactgtgtcctttccaggccttggccagttcttccaggggtgaggcatgtggtgctggggattggcagccatcctggggcccacacaggtgtgtcttgctccatttggcccattgtgtgttactttgtgaatgagccatttcacatggacttcatgaaatttgcctcctgagttcaggtttaccctgaaagggatgcagattatcctgttcctcacgaccccctcagctaacaacagttctgaagggtgctgggacaggacaggctcatggggactccactcctgcctgggtttactctgtatgaagaggccactggtatcctgccatgatgttatctcctttttctactttccctagagtcccatgcatgataaagagaggcccaaggcttggataaggtggccacttccctcagtggagtcagtcatgttaggtaggaggtggtagagtcggtctgcaaggtatctcgtaagaggggaggtccacctagacacactctaaatatgtggcctagaagattttggtctacttttctgtgaacagaatttaaaacatacaaagagataaatcaccataccacatagtttatgtcaagaccaaaatgagcaatacagattacggttttcaaaccagaatgcacataagaactgcttgggatccttttaaaagtacaggcattggcctggtgcagtggctcattcctgtaatcccagcactttgggaggccaaggggacaggactgcttgaggccaagaggtggaaaccatcttgggctacatagagagaccccatctctacaaagaaagatttaaaaattaaccagccatggtggctcgcacctgtattcccagccactggggaggctgaggccggaggagtgcttgagcccaggagttcaaggctgcagtgagccaagattgcgccactgcactccagcctaggtgacagagtgagaccctgtctctaaataaataaataaataaaatataaaaataacagtcatcacccagacctactgaattagaatctcgggagtgcagggggcagcaacaggggggctgtcttttctgagaaggggtctcactctgtcaccaggctggagtgccatggcatgatctcagctcactgcaacctccacctcctgagttcaagccattctcctgcctcagcctcctgagtagctgggactacaggtgtgcgccactacactcagctaatttttgtattttaagtagagacggggtttcatcatgttggccaggatggcctccatctcttgacctcgtgatccacccaccttccctcccaaagtactggaattacaggcattagccactgtgcccagccgaggctgtcatttttaaccggctctggatgactctgatgcagccatcctggaccttggctgtggtctggtaactggaacccagtgacgtaatcaggtgccatcgggggtcatgggaaagggggatccccaaggtctgaggtggactaggaaggctttctgaagaacctgggtctgttagggcatcagccaatcaaggtacaagtaaatagaggcaaaatgagggtttgaactgtgagcagttggtcctggaaaagaaagaaaccaagagattatggggactcaatgggcttcttaagagagaataagttgaaatcaatgaccagaagaccctgatggaagtggaggagaatcatctcaggcaaactttttgtgtgccagtaacagaaaccctctttgtgtgatcacatgcaaagtataggatatttgcaatatagccatggggaggagtgcagggcccaagggtagattttagccaggcctcccaggaacagaactcggatccgaaaagcccagagaagctagagctgcccctccaacactctcggatccacatggtctgtgttctctagacccccctgcatgttagcggtgttctctctctgtggactgactgtccttctcagtgaacatgtccacccgacagctcctgagtttatatcatctcaaccctcacaacccacagaggctgtgtctcctagtcacagctttaaattactggaaaaataaatgactggccaaacttggagcaggtgtccatcccagccctgtgtagttagagcaggaatcaagatctcaacacaaatgtggctgccaagcactcagccccggggcgaggggtcaagttcttctcagagaaagaggaataagttggttctcagaagacatcacaagatacgtgtgtacccaacaatctctgatctctgctgatcttttgcttagacgttaacttgatgcatcattggaaaggtgtttctctcatctctgtcctaaggcttgataaagtcattaaaattgtgttcttttgactaaagaaaa

SEQ ID NO: 298553 - DNA, 3917 bp, Homo sapiens
cttcttctttacctccgccttgttcctgtcctcaccacacggactgagactgatttgattaaagcaccagagtgtaatggccctcagagcagggctggtcctggggttccacaccctgatgaccctcctgagcccgcaggaggcaggggccaccaaggggccagcccagtgtcagaacaggactctgtccccacacagaacccaggacggggcccaggctcagggactcaacaatcacatattgtggatgagacagacacatttttttctctctccttgaccctgaactcgccaaacacagctgaccacatgggctcctacggacccgccttctaccagtcttacggcgcctcgggccagttcacccatgaatttgatgaggaacagctgttctctgtggacctgaagaaaagcgaggccgtgtggcgtctgcctgagtttggtgactttgcccgctttgacccgcagggcgggctggccggcatcgccgcaatcaaagcccatctggacatcctggtggagcgctccaaccgcagcagagccatcaacggaggctccaggtcttcccagacccctttggcacccctctccttgaggaatgacacctctcacccggactcccgcccagggaccagtcaaatataggagctcctggcgtccccactccctccccagtctcctctccctctgtttccctcctctcctgccccagtggataccccagagcatcccctgcccacagatggctacaaagggggaacgtcccttaatcccagtcctagtaaggccctggggtgagggatgagcctgtggactcagggcccgttcctcctagtgcctccacgggtgaccgtgctccccaagtctcgggtggagctgggccagcccaacatcctcatctgcatcgtggacaacatcttcccccctgtgatcaatatcacctggctgcgcaacggccaaactgtcactgagggagtggcccagaccagcttctattcccagcctgaccatttgttccgcaagttccactacctgcccttcgtgccctcagccgaggacgtctatgactgccaggtggagcactggggcctggatgcgccactcctcaggcattgggagctccaggtgcctattccaccaccagatgccatggagaccctggtctgtgccctgggcctggccatcggcctggtgggcttcctcgtgggcaccgtcctcatcatcatgggcacatatgtgtccagtgtccccaggtaatgatccttctgagagaaatgacttgtgggagacaccctgcagatcctcatgggtttgtgacagcccctgcgtgctcagtgccctttaagtgcatcccgctgtgctgactttgagtgggatcaacatctgtcctacgggtcccctcttttttggccccagtattcatggcagggtttgttggacacctactagcttcccttcccattcaacacacacacacattcttgctctacccaaagctctggctggcagcactaaatgctttggtggtgtttgcactgtgtcctttccaggccttggccagttcttccaggggtgaggcatgtggtgctggggattggcagccatcctggggcccacacaggtgtgtcttgctccatttggcccattgtgtgttactttgtgaatgagccatttcacatggacttcatgaaatttgcctcctgagttcaggtttaccctgaaagggatgcagattatcctgttcctcacgaccccctcagctaacaacagttctgaagggtgctgggacaggacaggctcatggggactccactcctgcctgggtttactctgtatgaagaggccactggtatcctgccatgatgttatctcctttttctactttccctagagtcccatgcatgataaagagaggcccaaggcttggataaggtggccacttccctcagtggagtcagtcatgttaggtaggaggtggtagagtcggtctgcaaggtatctcgtaagaggggaggtccacctagacacactctaaatatgtggcctagaagattttggtctacttttctgtgaacagaatttaaaacatacaaagagataaatcaccataccacatagtttatgtcaagaccaaaatgagcaatacagattacggttttcaaaccagaatgcacataagaactgcttgggatccttttaaaagtacaggcattggcctggtgcagtggctcattcctgtaatcccagcactttgggaggccaaggggacaggactgcttgaggccaagaggtggaaaccatcttgggctacatagagagaccccatctctacaaagaaagatttaaaaattaaccagccatggtggctcgcacctgtattcccagccactggggaggctgaggccggaggagtgcttgagcccaggagttcaaggctgcagtgagccaagattgcgccactgcactccagcctaggtgacagagtgagaccctgtctctaaataaataaataaataaaatataaaaataacagtcatcacccagacctactgaattagaatctcgggagtgcagggggcagcaacaggggggctgtcttttctgagaaggggtctcactctgtcaccaggctggagtgccatggcatgatctcagctcactgcaacctccacctcctgagttcaagccattctcctgcctcagcctcctgagtagctgggactacaggtgtgcgccactacactcagctaatttttgtattttaagtagagacggggtttcatcatgttggccaggatggcctccatctcttgacctcgtgatccacccaccttccctcccaaagtactggaattacaggcattagccactgtgcccagccgaggctgtcatttttaaccggctctggatgactctgatgcagccatcctggaccttggctgtggtctggtaactggaacccagtgacgtaatcaggtgccatcgggggtcatgggaaagggggatccccaaggtctgaggtggactaggaaggctttctgaagaacctgggtctgttagggcatcagccaatcaaggtacaagtaaatagaggcaaaatgagggtttgaactgtgagcagttggtcctggaaaagaaagaaaccaagagattatggggactcaatgggcttcttaagagagaataagttgaaatcaatgaccagaagaccctgatggaagtggaggagaatcatctcaggcaaactttttgtgtgccagtaacagaaaccctctttgtgtgatcacatgcaaagtataggatatttgcaatatagccatggggaggagtgcagggcccaagggtagattttagccaggcctcccaggaacagaactcggatccgaaaagcccagagaagctagagctgcccctccaacactctcggatccacatggtctgtgttctctagacccccctgcatgttagcggtgttctctctctgtggactgactgtccttctcagtgaacatgtccacccgacagctcctgagtttatatcatctcaaccctcacaacccacagaggctgtgtctcctagtcacagctttaaattactggaaaaataaatgactggccaaacttggagcaggtgtccatcccagccctgtgtagttagagcaggaatcaagatctcaacacaaatgtggctgccaagcactcagccccggggcgaggggtcaagttcttctcagagaaagaggaataagttggttctcagaagacatcacaagatacgtgtgtacccaacaatctctgatctctgctgatcttttgcttagacgttaacttgatgcatcattggaaaggtgtttctctcatctctgtcctaaggcttgataaagtcattaaaattgtgttcttttgactaaagaaaa

SEQ ID NO: 298554 - DNA, 3322 bp, Homo sapiens
cttcttctttacctccgccttgttcctgtcctcaccacacggactgagactgatttgattaaagcaccagagtgtaatggccctcagagcagggctggtcctggggttccacaccctgatgaccctcctgagcccgcaggaggcaggggccaccaaggggcgggctggccggcatcgccgcaatcaaagcccatctggacatcctggtggagcgctccaaccgcagcagagccatcaacgtgcctccacgggtgaccgtgctccccaagtctcgggtggagctgggccagcccaacatcctcatctgcatcgtggacaacatcttcccccctgtgatcaatatcacctggctgcgcaacggccaaactgtcactgagggagtggcccagaccagcttctattcccagcctgaccatttgttccgcaagttccactacctgcccttcgtgccctcagccgaggacgtctatgactgccaggtggagcactggggcctggatgcgccactcctcaggcattgggagctccaggtgcctattccaccaccagatgccatggagaccctggtctgtgccctgggcctggccatcggcctggtgggcttcctcgtgggcaccgtcctcatcatcatgggcacatatgtgtccagtgtccccaggtaatgatccttctgagagaaatgacttgtgggagacaccctgcagatcctcatgggtttgtgacagcccctgcgtgctcagtgccctttaagtgcatcccgctgtgctgactttgagtgggatcaacatctgtcctacgggtcccctcttttttggccccagtattcatggcagggtttgttggacacctactagcttcccttcccattcaacacacacacacattcttgctctacccaaagctctggctggcagcactaaatgctttggtggtgtttgcactgtgtcctttccaggccttggccagttcttccaggggtgaggcatgtggtgctggggattggcagccatcctggggcccacacaggtgtgtcttgctccatttggcccattgtgtgttactttgtgaatgagccatttcacatggacttcatgaaatttgcctcctgagttcaggtttaccctgaaagggatgcagattatcctgttcctcacgaccccctcagctaacaacagttctgaagggtgctgggacaggacaggctcatggggactccactcctgcctgggtttactctgtatgaagaggccactggtatcctgccatgatgttatctcctttttctactttccctagagtcccatgcatgataaagagaggcccaaggcttggataaggtggccacttccctcagtggagtcagtcatgttaggtaggaggtggtagagtcggtctgcaaggtatctcgtaagaggggaggtccacctagacacactctaaatatgtggcctagaagattttggtctacttttctgtgaacagaatttaaaacatacaaagagataaatcaccataccacatagtttatgtcaagaccaaaatgagcaatacagattacggttttcaaaccagaatgcacataagaactgcttgggatccttttaaaagtacaggcattggcctggtgcagtggctcattcctgtaatcccagcactttgggaggccaaggggacaggactgcttgaggccaagaggtggaaaccatcttgggctacatagagagaccccatctctacaaagaaagatttaaaaattaaccagccatggtggctcgcacctgtattcccagccactggggaggctgaggccggaggagtgcttgagcccaggagttcaaggctgcagtgagccaagattgcgccactgcactccagcctaggtgacagagtgagaccctgtctctaaataaataaataaataaaatataaaaataacagtcatcacccagacctactgaattagaatctcgggagtgcagggggcagcaacaggggggctgtcttttctgagaaggggtctcactctgtcaccaggctggagtgccatggcatgatctcagctcactgcaacctccacctcctgagttcaagccattctcctgcctcagcctcctgagtagctgggactacaggtgtgcgccactacactcagctaatttttgtattttaagtagagacggggtttcatcatgttggccaggatggcctccatctcttgacctcgtgatccacccaccttccctcccaaagtactggaattacaggcattagccactgtgcccagccgaggctgtcatttttaaccggctctggatgactctgatgcagccatcctggaccttggctgtggtctggtaactggaacccagtgacgtaatcaggtgccatcgggggtcatgggaaagggggatccccaaggtctgaggtggactaggaaggctttctgaagaacctgggtctgttagggcatcagccaatcaaggtacaagtaaatagaggcaaaatgagggtttgaactgtgagcagttggtcctggaaaagaaagaaaccaagagattatggggactcaatgggcttcttaagagagaataagttgaaatcaatgaccagaagaccctgatggaagtggaggagaatcatctcaggcaaactttttgtgtgccagtaacagaaaccctctttgtgtgatcacatgcaaagtataggatatttgcaatatagccatggggaggagtgcagggcccaagggtagattttagccaggcctcccaggaacagaactcggatccgaaaagcccagagaagctagagctgcccctccaacactctcggatccacatggtctgtgttctctagacccccctgcatgttagcggtgttctctctctgtggactgactgtccttctcagtgaacatgtccacccgacagctcctgagtttatatcatctcaaccctcacaacccacagaggctgtgtctcctagtcacagctttaaattactggaaaaataaatgactggccaaacttggagcaggtgtccatcccagccctgtgtagttagagcaggaatcaagatctcaacacaaatgtggctgccaagcactcagccccggggcgaggggtcaagttcttctcagagaaagaggaataagttggttctcagaagacatcacaagatacgtgtgtacccaacaatctctgatctctgctgatcttttgcttagacgttaacttgatgcatcattggaaaggtgtttctctcatctctgtcctaaggcttgataaagtcattaaaattgtgttcttttgactaaagaaaa

SEQ ID NO: 298555 - DNA, 3584 bp, Homo sapiens
cttcttctttacctccgccttgttcctgtcctcaccacacggactgagactgatttgattaaagcaccagagtgtaatggccctcagagcagggctggtcctggggttccacaccctgatgaccctcctgagcccgcaggaggcaggggccaccaaggctgaccacatgggctcctacggacccgccttctaccagtcttacggcgcctcgggccagttcacccatgaatttgatgaggaacagctgttctctgtggacctgaagaaaagcgaggccgtgtggcgtctgcctgagtttggtgactttgcccgctttgacccgcagggcgggctggccggcatcgccgcaatcaaagcccatctggacatcctggtggagcgctccaaccgcagcagagccatcaacgtgcctccacgggtgaccgtgctccccaagtctcgggtggagctgggccagcccaacatcctcatctgcatcgtggacaacatcttcccccctgtgatcaatatcacctggctgcgcaacggccaaactgtcactgagggagtggcccagaccagcttctattcccagcctgaccatttgttccgcaagttccactacctgcccttcgtgccctcagccgaggacgtctatgactgccaggtggagcactggggcctggatgcgccactcctcaggcattggggtacggagccccctccccatgcaccctcctggccccaggtttcctttactctagaatcctttcatataccaccgactccttcctttctctcctagagctccaggtgcctattccaccaccagatgccatggagaccctggtctgtgccctgggcctggccatcggcctggtgggcttcctcgtgggcaccgtcctcatcatcatgggcacatatgtgtccagtgtccccaggtaatgatccttctgagagaaatgacttgtgggagacaccctgcagatcctcatgggtttgtgacagcccctgcgtgctcagtgccctttaagtgcatcccgctgtgctgactttgagtgggatcaacatctgtcctacgggtcccctcttttttggccccagtattcatggcagggtttgttggacacctactagcttcccttcccattcaacacacacacacattcttgctctacccaaagctctggctggcagcactaaatgctttggtggtgtttgcactgtgtcctttccaggccttggccagttcttccaggggtgaggcatgtggtgctggggattggcagccatcctggggcccacacaggtgtgtcttgctccatttggcccattgtgtgttactttgtgaatgagccatttcacatggacttcatgaaatttgcctcctgagttcaggtttaccctgaaagggatgcagattatcctgttcctcacgaccccctcagctaacaacagttctgaagggtgctgggacaggacaggctcatggggactccactcctgcctgggtttactctgtatgaagaggccactggtatcctgccatgatgttatctcctttttctactttccctagagtcccatgcatgataaagagaggcccaaggcttggataaggtggccacttccctcagtggagtcagtcatgttaggtaggaggtggtagagtcggtctgcaaggtatctcgtaagaggggaggtccacctagacacactctaaatatgtggcctagaagattttggtctacttttctgtgaacagaatttaaaacatacaaagagataaatcaccataccacatagtttatgtcaagaccaaaatgagcaatacagattacggttttcaaaccagaatgcacataagaactgcttgggatccttttaaaagtacaggcattggcctggtgcagtggctcattcctgtaatcccagcactttgggaggccaaggggacaggactgcttgaggccaagaggtggaaaccatcttgggctacatagagagaccccatctctacaaagaaagatttaaaaattaaccagccatggtggctcgcacctgtattcccagccactggggaggctgaggccggaggagtgcttgagcccaggagttcaaggctgcagtgagccaagattgcgccactgcactccagcctaggtgacagagtgagaccctgtctctaaataaataaataaataaaatataaaaataacagtcatcacccagacctactgaattagaatctcgggagtgcagggggcagcaacaggggggctgtcttttctgagaaggggtctcactctgtcaccaggctggagtgccatggcatgatctcagctcactgcaacctccacctcctgagttcaagccattctcctgcctcagcctcctgagtagctgggactacaggtgtgcgccactacactcagctaatttttgtattttaagtagagacggggtttcatcatgttggccaggatggcctccatctcttgacctcgtgatccacccaccttccctcccaaagtactggaattacaggcattagccactgtgcccagccgaggctgtcatttttaaccggctctggatgactctgatgcagccatcctggaccttggctgtggtctggtaactggaacccagtgacgtaatcaggtgccatcgggggtcatgggaaagggggatccccaaggtctgaggtggactaggaaggctttctgaagaacctgggtctgttagggcatcagccaatcaaggtacaagtaaatagaggcaaaatgagggtttgaactgtgagcagttggtcctggaaaagaaagaaaccaagagattatggggactcaatgggcttcttaagagagaataagttgaaatcaatgaccagaagaccctgatggaagtggaggagaatcatctcaggcaaactttttgtgtgccagtaacagaaaccctctttgtgtgatcacatgcaaagtataggatatttgcaatatagccatggggaggagtgcagggcccaagggtagattttagccaggcctcccaggaacagaactcggatccgaaaagcccagagaagctagagctgcccctccaacactctcggatccacatggtctgtgttctctagacccccctgcatgttagcggtgttctctctctgtggactgactgtccttctcagtgaacatgtccacccgacagctcctgagtttatatcatctcaaccctcacaacccacagaggctgtgtctcctagtcacagctttaaattactggaaaaataaatgactggccaaacttggagcaggtgtccatcccagccctgtgtagttagagcaggaatcaagatctcaacacaaatgtggctgccaagcactcagccccggggcgaggggtcaagttcttctcagagaaagaggaataagttggttctcagaagacatcacaagatacgtgtgtacccaacaatctctgatctctgctgatcttttgcttagacgttaacttgatgcatcattggaaaggtgtttctctcatctctgtcctaaggcttgataaagtcattaaaattgtgttcttttgactaaagaaaa

SEQ ID NO: 298556 - DNA, 2778 bp, Homo sapiens
acctggatggaactagtgccagcgaggctgtcatttttaaccggtctggatgactctgatgcagccatcctggaccttggctgtggtctggtaactggaacccagtgtccccaggtaatgatccttctgagagaaatgacttgtgggagacaccctgcagatcctcatgggtttgtgacagcccctgcgtgctcagtgccctttaagtgcatcccgctgtgctgactttgagtgggatcaacatctgtcctacgggtcccctcttttttggccccagtattcatggcagggtttgttggacacctactagcttcccttcccattcaacacacacacacattcttgctctacccaaagctctggctggcagcactaaatgctttggtggtgtttgcactgtgtcctttccaggccttggccagttcttccaggggtgaggcatgtggtgctggggattggcagccatcctggggcccacacaggtgtgtcttgctccatttggcccattgtgtgttactttgtgaatgagccatttcacatggacttcatgaaatttgcctcctgagttcaggtttaccctgaaagggatgcagattatcctgttcctcacgaccccctcagctaacaacagttctgaagggtgctgggacaggacaggctcatggggactccactcctgcctgggtttactctgtatgaagaggccactggtatcctgccatgatgttatctcctttttctactttccctagagtcccatgcatgataaagagaggcccaaggcttggataaggtggccacttccctcagtggagtcagtcatgttaggtaggaggtggtagagtcggtctgcaaggtatctcgtaagaggggaggtccacctagacacactctaaatatgtggcctagaagattttggtctacttttctgtgaacagaatttaaaacatacaaagagataaatcaccataccacatagtttatgtcaagaccaaaatgagcaatacagattacggttttcaaaccagaatgcacataagaactgcttgggatccttttaaaagtacaggcattggcctggtgcagtggctcattcctgtaatcccagcactttgggaggccaaggggacaggactgcttgaggccaagaggtggaaaccatcttgggctacatagagagaccccatctctacaaagaaagatttaaaaattaaccagccatggtggctcgcacctgtattcccagccactggggaggctgaggccggaggagtgcttgagcccaggagttcaaggctgcagtgagccaagattgcgccactgcactccagcctaggtgacagagtgagaccctgtctctaaataaataaataaataaaatataaaaataacagtcatcacccagacctactgaattagaatctcgggagtgcagggggcagcaacaggggggctgtcttttctgagaaggggtctcactctgtcaccaggctggagtgccatggcatgatctcagctcactgcaacctccacctcctgagttcaagccattctcctgcctcagcctcctgagtagctgggactacaggtgtgcgccactacactcagctaatttttgtattttaagtagagacggggtttcatcatgttggccaggatggcctccatctcttgacctcgtgatccacccaccttccctcccaaagtactggaattacaggcattagccactgtgcccagccgaggctgtcatttttaaccggctctggatgactctgatgcagccatcctggaccttggctgtggtctggtaactggaacccagtgacgtaatcaggtgccatcgggggtcatgggaaagggggatccccaaggtctgaggtggactaggaaggctttctgaagaacctgggtctgttagggcatcagccaatcaaggtacaagtaaatagaggcaaaatgagggtttgaactgtgagcagttggtcctggaaaagaaagaaaccaagagattatggggactcaatgggcttcttaagagagaataagttgaaatcaatgaccagaagaccctgatggaagtggaggagaatcatctcaggcaaactttttgtgtgccagtaacagaaaccctctttgtgtgatcacatgcaaagtataggatatttgcaatatagccatggggaggagtgcagggcccaagggtagattttagccaggcctcccaggaacagaactcggatccgaaaagcccagagaagctagagctgcccctccaacactctcggatccacatggtctgtgttctctagacccccctgcatgttagcggtgttctctctctgtggactgactgtccttctcagtgaacatgtccacccgacagctcctgagtttatatcatctcaaccctcacaacccacagaggctgtgtctcctagtcacagctttaaattactggaaaaataaatgactggccaaacttggagcaggtgtccatcccagccctgtgtagttagagcaggaatcaagatctcaacacaaatgtggctgccaagcactcagccccggggcgaggggtcaagttcttctcagagaaagaggaataagttggttctcagaagacatcacaagatacgtgtgtacccaacaatctctgatctctgctgatcttttgcttagacgttaacttgatgcatcattggaaaggtgtttctctcatctctgtcctaaggcttgataaagtcattaaaattgtgttcttttgactaaagaaaa

SEQ ID NO: 298557 - DNA, 823 bp, Homo sapiens
cttcttctttacctccgccttgttcctgtcctcaccacacggactgagactgatttgattaaagcaccagagtgtaatggccctcagagcagggctggtcctggggttccacaccctgatgaccctcctgagcccgcaggaggcaggggccaccaaggggccagcccagtgtcagaacaggactctgtccccacacagaacccaggacggggcccaggctcagggactcaacaatcacatattgtggatgagacagacacatttttttctctctccttgaccctgaactcgccaaacacagctgaccacatgggctcctacggacccgccttctaccagtcttacggcgcctcgggccagttcacccatgaatttgatgaggaacagctgttctctgtggacctgaagaaaagcgaggccgtgtggcgtctgcctgagtttggtgactttgcccgctttgacccgcagggcgggctggccggcatcgccgcaatcaaagcccatctggacatcctggtggagcgctccaaccgcagcagagccatcaacgccctgtgtagttagagcaggaatcaagatctcaacacaaatgtggctgccaagcactcagccccggggcgaggggtcaagttcttctcagagaaagaggaataagttggttctcagaagacatcacaagatacgtgtgtacccaacaatctctgatctctgctgatcttttgcttagacgttaacttgatgcatcattggaaaggtgtttctctcatctctgtcctaaggcttgataaagtcattaaaattgtgttcttttgactaaagaaaa

SEQ ID NO: 298558 - DNA, 684 bp, Homo sapiens
agaagcttaagctctttaagaaatgtggatttgtaaagagatgatccaaaagggagaaacaagcaaaggaggattttgagagcttcaggaggtggccacacagtgaggttagctttgtatcctaggggattcttaccaagaaaaaccttgtattgcaaggcctggaaacaatgtaatatgtaaccaaatggtaacagtaacagctgggaaagagagaaaggctggctttggcagatgaaccaggagaattgtgttcctttttatcccctggggacactaaattcccaaacgcatattatttagttatttttagatatgcagcctgcagggaaaccgctgagaacattcccgtgtaaatcctcattcagctttctgaagtcagcattgtctgatgagtacctgttacagaggagggtttggggtggctgcgctgtgttccttcataggaaccgttgacatgtgtttaggggtgtctgggcactgtgacctcgaggcagtgtccgctgagagtgccagaggatggatggcgccttgaagttactccgttttctctgccatccaatgaattgcttgtaaatttcctgccacattactattgcatttcccaaaaataagataaacatcctcaaaatgtcataagctatatttttaatttgaatgttggtctgtatttctgtcatatgc

SEQ ID NO: 298559 - DNA, 685 bp, Homo sapiens
aggcacatgtcaccatacctggctagttttttttttatttttgttgagacaaggtttcaccacgttgcccaaactggtcttaaattcttgagatcaagtgatccatgtcgacctcccaaagtgctgagattacaagcatgagccactgcacctgaccagtggctttttttaatgtttacctttgttctattgaatatacatctactacttgatatgtcagctgtaagtattatctttgactgccagctactgagacagtcaacaagcttgttctacttttctcccttttcctcctcattcctttcccagtttttgttggttatattgtttctacactgtcagaacatataacactttacaactcatatccgcagctttgttactggcttatatctccagttaagtatgttattaataattgtttatctctggtccttttaccaaaaatttccccatctcttggttggctggagcttgtcttctagtttattcagaaaggctcgtgaaaaatataccccatatttgtgcacattcaaaattggttgaataaagcatttggtttctacatgtaagagctaagattgtaaaattatatcgttttctcaaagtgcagcttaagttgcatctcacaaaattttaatatgttgtattttcattaacatttagttcaaaatgttatctagtt

SEQ ID NO: 298560 - DNA, 1086 bp, Homo sapiens
atggggtttcaccatgttagtcaagctgctcttgttttgttgttgttgttgttgtgttgtaagcgtccttatctttcagagctacatagtggaatgtttatggaatatttaggataaatgatataggcatttgggatttgctgcaaaatgacccagaggcaggggtcagggggagaggtagagatgagacaagaggtagaggggagaggtagaggtagccacgagctgataattacagacaagagatgcggagtatgtgggggctcattatcctgcatagtctatctttgtatatctttgaacttttcaagaataaaaaagcttaaaaagtatacatggcctggtcctaccagagactcacccaatgccagcctccagccagggagagccaagtttgcattttcacacgcatctcacactcctctgcactctcaacttggagagctccaaacagggaaaccccaagccttgctggcttctgccaaccccctgagcagaagcatgggtccccctgatcaccacctcaccaccctcatcctgatctcactgtacactccctttcctggtctgctaagtagcgggtgtttttccttgacactaacgctacagctagaccacggtgggcttggcaacaggtgtcttcccagatgctggcgttaccgctagaccaaggagccctctggtggccccgtccgggcataacagaaagctcgcactcttgtcttctggtcactcctcactgtccccttcagcctcctatctctgtatggcctggtgtttcctaggttatgattgtagagcgaggattattataatattggaataaagaataattactacaaactaatgattaatgattcatatataatcatatctaagatctatatctagtataactattcttattttatatattttattatactggaacagctcgtgccctcggtctcttgcctcggcacctgggtggcttgctgcccacatccaccaagtgcactttgggaggctgaggctggaggactgctggaggccaggagttcaataccagcctgggcaacatagggagaccccccccccaccatctcc

SEQ ID NO: 298561 - DNA, 954 bp, Homo sapiens
aattcgcggccgcgtcgacgaagacgacagaagggggggggagaggtagagatgagacaagaggtagaggggagaggtagaggtagccacgagctgataattacagacaagagatgcggagtatgtgggggctcattatcctgcatagtctatctttgtatatctttgaacttttcaagaataaaaaagcttaaaaagtatacatggcctggtcctaccagagactcacccaatgccagcctccagccagggagagccaagtttgcattttcacacgcatctcacactcctctgcactctcaacttggagagctccaaacagggaaaccccaagccttgctggcttctgccaaccccctgagcagaagcatgggtccccctgatcaccacctcaccaccctcatcctgatctcactgtacactccctttcctggtctgctaagtagcgggtgtttttccttgacactaacgctacagctagaccacggtgggcttggcaacaggtgtcttcccagatgctggcgttaccgctagaccaaggagccctctggtggccccgtccgggcataacagaaagctcgcactcttgtcttctggtcactcctcactgtccccttcagcctcctatctctgtatggcctggtgtttcctaggttatgattgtagagcgaggattattataatattggaataaagaataattactacaaactaatgattaatgattcatatataatcatatctaagatctatatctagtataactattcttattttatatattttattatactggaacagctcgtgccctcggtctcttgcctcggcacctgggtggcttgctgcccacatccaccaagtgcactttgggaggctgaggctggaggactgctggaggccaggagttcaataccagcctgggcaacatagggagaccccccccccaccatctcc

SEQ ID NO: 298562 - DNA, 2115 bp, Homo sapiens
ctttgcaactactggccagtgggaggttaccactgaaagggatggtaaaaaagaaactgcccagacggttggacaggacgtagacacacagaagaaaagaagacaaagaacgggtaggaaaattagggttaccatggggaagaaagtggccatcattggagctggtgtgagtggcttggcctccatcaggagctgtctggaagaggggctggagcccacctgctttgagaagagcaatgacattgggggcctgtggaaattttcagaccatgcagaggagggcagggctagcatttacaaatcagtcttttccaactcttccaaagagatgatgtgtttcccagacttcccatttcccgatgacttccccaactttatgcacaacagcaagatccaggaatatatcattgcatttgccaaagaaaagaacctcctgaagtacatacaatttaagacatttgtatccagtgtaaataaacatcctgattttgcaactactggccagtgggatgttaccactgaaagggatggtaaaaaagaatcggctgtctttgatgctgtaatggtttgttccggacatcatgtgtatcccaacctaccaaaagagtcctttccaggactaaaccactttaaaggcaaatgcttccacagcagggactataaagaaccaggtgtattcaatggaaagcgtgtcctggtggttggcctggggaattcgggctgtgatattgccacagaactcagccgcacagcagaacaggtcatgatcagttccagaagtggctcctgggtgatgagccgggtctgggacaatggttatccttgggacatgctgctcgtcactcgatttggaaccttcctcaagaacaatttaccgacagccatctctgactggttgtacgtgaagcagatgaatgcaagattcaagcatgaaaactatggcttgatgcctttaaatggagtcctgaggaaagagcctgtatttaacgatgagctcccagcaagcattctgtgtggcattgtgtccgtaaagcctaacgtgaaggaattcacagagacctcggccatttttgaggatgggaccatatttgagggcattgactgtgtaatctttgcaacagggtatagttttgcctaccccttccttgatgagtctatcatcaaaagcagaaacaatgagatcattttatttaaaggagtatttcctcctctacttgagaagtcaaccatagcagtgattggctttgtccagtcccttggggctgccattcccacagttgacctccagtcccgctgggcagcacaagtaataaagggaacttgtactttgccttctatggaagacatgatgaatgatattaatgagaaaatggagaaaaagcgcaaatggtttggcaaaagcgagaccatacagacagattacattgtttatatggatgaactctcctccttcattggggcaaagcccaacatcccatggctgtttctcacagatcccaaattggccatggaagtttattttggcccttgtagtccctaccagtttaggctggtgggcccagggcagtggccaggagccagaaatgccatactgacccagtgggaccggtcgttgaaacccatgcagacacgagtggtcgggagacttcagaagccttgcttctttttccattggctgaagctctttgcaattcctattctgttaatcgctgttttccttgtgttgacctaatcatcattttctctaggatttctgaaagttactgacaatacccagacaggggctttgctatttaaaaattaaaattttcacaccacctgcttttctattcagcatcttttgcagtactctgtagacattagtcagtaatacagtgttatttctaggctctgaaatagccactttaagaatcatgtcatgatcttaagagagcactaatcatttctgtttgagttccactaacacttcaaaatcagaactatgttctttatatctaacttaaatcatttcctgaaacattttgacatgattcctttttccttttaaacaatgtatgaaagatgtattttaaatctaaataaagagcaaattaagcagaataattataatatgat

SEQ ID NO: 298563 - DNA, 850 bp, Homo sapiens
cagttatatataatgtattaagaaagaaaaagagaacccgagagaagctcagaacttgtactttgccttctatggaagacatgatgaatgatattaatgagaaaatggagaaaaagcgcaaatggtttggcaaaagcgagaccatacagacagattacattgtttatatggatgaactctcctccttcattggggcaaagcccaacatcccatggctgtttctcacagatcccaaattggccatggaagtttattttggcccttgtagtccctaccagtttaggctggtgggcccagggcagtggccaggagccagaaatgccatactgacccagtgggaccggtcgttgaaacccatgcagacacgagtggtcgggagacttcagaagccttgcttctttttccattggctgaagctctttgcaattcctattctgttaatcgctgttttccttgtgttgacctaatcatcattttctctaggatttctgaaagttactgacaatacccagacaggggctttgctatttaaaaattaaaattttcacaccacctgcttttctattcagcatcttttgcagtactctgtagacattagtcagtaatacagtgttatttctaggctctgaaatagccactttaagaatcatgtcatgatcttaagagagcactaatcatttctgtttgagttccactaacacttcaaaatcagaactatgttctttatatctaacttaaatcatttcctgaaacattttgacatgattcctttttccttttaaacaatgtatgaaagatgtattttaaatctaaataaagagcaaattaagcagaataattataatatgat

SEQ ID NO: 298564 - DNA, 2025 bp, Homo sapiens
actagaacattttctctttcaaactgcccagacggttggacaggacgtagacacacagaagaaaagaagacaaagaacgggtaggaaaattagggttaccatggggaagaaagtggccatcattggagctggtgtgagtggcttggcctccatcaggagctgtctggaagaggggctggagcccacctgctttgagaagagcaatgacattgggggcctgtggaaattttcagaccatgcagaggagggcagggctagcatttacaaatcagtcttttccaactcttccaaagagatgatgtgtttcccagacttcccatttcccgatgacttccccaactttatgcacaacagcaagatccaggaatatatcattgcatttgccaaagatcctgattttgcaactactggccagtgggatgttaccactgaaagggatggtaaaaaagaatcggctgtctttgatgctgtaatggtttgttccggacatcatgtgtatcccaacctaccaaaagagtcctttccaggactaaaccactttaaaggcaaatgcttccacagcagggactataaagaaccaggtgtattcaatggaaagcgtgtcctggtggttggcctggggaattcgggctgtgatattgccacagaactcagccgcacagcagaacaggtcatgatcagttccagaagtggctcctgggtgatgagccgggtctgggacaatggttatccttgggacatgctgctcgtcactcgatttggaaccttcctcaagaacaatttaccgacagccatctctgactggttgtacgtgaagcagatgaatgcaagattcaagcatgaaaactatggcttgatgcctttaaatggagtcctgaggaaagagcctgtatttaacgatgagctcccagcaagcattctgtgtggcattgtgtccgtaaagcctaacgtgaaggaattcacagagacctcggccatttttgaggatgggaccatatttgagggcattgactgtgtaatctttgcaacagggtatagttttgcctaccccttccttgatgagtctatcatcaaaagcagaaacaatgagatcattttatttaaaggagtatttcctcctctacttgagaagtcaaccatagcagtgattggctttgtccagtcccttggggctgccattcccacagttgacctccagtcccgctgggcagcacaagtaataaagggaacttgtactttgccttctatggaagacatgatgaatgatattaatgagaaaatggagaaaaagcgcaaatggtttggcaaaagcgagaccatacagacagattacattgtttatatggatgaactctcctccttcattggggcaaagcccaacatcccatggctgtttctcacagatcccaaattggccatggaagtttattttggcccttgtagtccctaccagtttaggctggtgggcccagggcagtggccaggagccagaaatgccatactgacccagtgggaccggtcgttgaaacccatgcagacacgagtggtcgggagacttcagaagccttgcttctttttccattggctgaagctctttgcaattcctattctgttaatcgctgttttccttgtgttgacctaatcatcattttctctaggatttctgaaagttactgacaatacccagacaggggctttgctatttaaaaattaaaattttcacaccacctgcttttctattcagcatcttttgcagtactctgtagacattagtcagtaatacagtgttatttctaggctctgaaatagccactttaagaatcatgtcatgatcttaagagagcactaatcatttctgtttgagttccactaacacttcaaaatcagaactatgttctttatatctaacttaaatcatttcctgaaacattttgacatgattcctttttccttttaaacaatgtatgaaagatgtattttaaatctaaataaagagcaaattaagcagaataattataatatgat

SEQ ID NO: 298565 - DNA, 1971 bp, Homo sapiens
actagaacattttctctttcaaactgcccagacggttggacaggacgtagacacacagaagaaaagaagacaaagaacgggtaggaaaattagggttaccatggggaagaaagtggccatcattggagctggtgtgagtggcttggcctccatcaggagctgtctggaagaggggctggagcccacctgctttgagaagagcaatgacattgggggcctgtggaaattttcagaccatgcagaggagggcagggctagcatttacaaatcagtcttttccaactcttccaaagagatgatgtgtttcccagacttcccatttcccgatgacttccccaactttatgcacaacagcaagatccaggaatatatcattgcatttgccaaagatcctgattttgcaactactggccagtgggatgttaccactgaaagggatggtaaaaaagaatcggctgtctttgatgctgtaatggtttgttccggacatcatgtgtatcccaacctaccaaaagagtcctttccaggactaaaccactttaaaggcaaatgcttccacagcagggactataaagaaccaggtgtattcaatggaaagcgtgtcctggtggttggcctggggaattcgggctgtgatattgccacagaactcagccgcacagcagaacaggtcatgatcagttccagaagtggctcctgggtgatgagccgggtctgggacaatggttatccttgggacatgctgctcgtcactcgatttggaaccttcctcaagaacaatttaccgacagccatctctgactggttgtacgtgaagcagatgaatgcaagattcaagcatgaaaactatggcttgatgcctttaaatggagtcctgaggaaagagcctgtatttaacgatgagctcccagcaagcattctgtgtggcattgtgtccgtaaagcctaacgtgaaggaattcacagagacctcggccatttttgaggatgggaccatatttgagggcattgactgtgtaatctttgcaacagggtatagttttgcctaccccttccttgatgagtctatcattgagaagtcaaccatagcagtgattggctttgtccagtcccttggggctgccattcccacagttgacctccagtcccgctgggcagcacaagtaataaagggaacttgtactttgccttctatggaagacatgatgaatgatattaatgagaaaatggagaaaaagcgcaaatggtttggcaaaagcgagaccatacagacagattacattgtttatatggatgaactctcctccttcattggggcaaagcccaacatcccatggctgtttctcacagatcccaaattggccatggaagtttattttggcccttgtagtccctaccagtttaggctggtgggcccagggcagtggccaggagccagaaatgccatactgacccagtgggaccggtcgttgaaacccatgcagacacgagtggtcgggagacttcagaagccttgcttctttttccattggctgaagctctttgcaattcctattctgttaatcgctgttttccttgtgttgacctaatcatcattttctctaggatttctgaaagttactgacaatacccagacaggggctttgctatttaaaaattaaaattttcacaccacctgcttttctattcagcatcttttgcagtactctgtagacattagtcagtaatacagtgttatttctaggctctgaaatagccactttaagaatcatgtcatgatcttaagagagcactaatcatttctgtttgagttccactaacacttcaaaatcagaactatgttctttatatctaacttaaatcatttcctgaaacattttgacatgattcctttttccttttaaacaatgtatgaaagatgtattttaaatctaaataaagagcaaattaagcagaataattataatatgat

SEQ ID NO: 298566 - DNA, 2045 bp, Homo sapiens
actagaacattttctctttcaaactgcccagacggttggacaggacgtagacacacagaagaaaagaagacaaagaacgggtaggaaaattagggttaccatggggaagaaagtggccatcattggagctggtgtgagtggcttggcctccatcaggagctgtctggaagaggggctggagcccacctgctttgagaagagcaatgacattgggggcctgtggaaattttcagaccatgcagaggagggcagggctagcatttacaaatcagtcttttccaactcttccaaagagatgatgtgtttcccagacttcccatttcccgatgacttccccaactttatgcacaacagcaagatccaggaatatatcattgcatttgccaaagaaaagaacctcctgaagtacatacaatttaagacatttgtatccagtgtaaataaacatcctgattttgcaactactggccagtgggatgttaccactgaaagggatggtaaaaaagaatcggctgtctttgatgctgtaatggtttgttccggacatcatgtgtatcccaacctaccaaaagagtcctttccagggactataaagaaccaggtgtattcaatggaaagcgtgtcctggtggttggcctggggaattcgggctgtgatattgccacagaactcagccgcacagcagaacaggtcatgatcagttccagaagtggctcctgggtgatgagccgggtctgggacaatggttatccttgggacatgctgctcgtcactcgatttggaaccttcctcaagaacaatttaccgacagccatctctgactggttgtacgtgaagcagatgaatgcaagattcaagcatgaaaactatggcttgatgcctttaaatggagtcctgaggaaagagcctgtatttaacgatgagctcccagcaagcattctgtgtggcattgtgtccgtaaagcctaacgtgaaggaattcacagagacctcggccatttttgaggatgggaccatatttgagggcattgactgtgtaatctttgcaacagggtatagttttgcctaccccttccttgatgagtctatcatcaaaagcagaaacaatgagatcattttatttaaaggagtatttcctcctctacttgagaagtcaaccatagcagtgattggctttgtccagtcccttggggctgccattcccacagttgacctccagtcccgctgggcagcacaagtaataaagggaacttgtactttgccttctatggaagacatgatgaatgatattaatgagaaaatggagaaaaagcgcaaatggtttggcaaaagcgagaccatacagacagattacattgtttatatggatgaactctcctccttcattggggcaaagcccaacatcccatggctgtttctcacagatcccaaattggccatggaagtttattttggcccttgtagtccctaccagtttaggctggtgggcccagggcagtggccaggagccagaaatgccatactgacccagtgggaccggtcgttgaaacccatgcagacacgagtggtcgggagacttcagaagccttgcttctttttccattggctgaagctctttgcaattcctattctgttaatcgctgttttccttgtgttgacctaatcatcattttctctaggatttctgaaagttactgacaatacccagacaggggctttgctatttaaaaattaaaattttcacaccacctgcttttctattcagcatcttttgcagtactctgtagacattagtcagtaatacagtgttatttctaggctctgaaatagccactttaagaatcatgtcatgatcttaagagagcactaatcatttctgtttgagttccactaacacttcaaaatcagaactatgttctttatatctaacttaaatcatttcctgaaacattttgacatgattcctttttccttttaaacaatgtatgaaagatgtattttaaatctaaataaagagcaaattaagcagaataattataatatgat

SEQ ID NO: 298567 - DNA, 2366 bp, Homo sapiens
agggattctcctgcctcagcctcccgaatagttgggattacagatgggatggatgtgaatccttgggaaccagaggatggcctgtaataggctgaacaatttaacaatgcccctcctcaaagatatcacatccaaattcctggaacctgtaaatgttatcttacttacaagagaaaagggtatttgcaaatataattaagttaaaaatcttaagatggagagatttttctgcattatgtgggtgagccccaaacgctataatgaatgcatcgttaaaagagagaggcagagggagatttaacacaaagagaagagagaaggtgatgtgatgacctcaacagaaagagagaaatttgaagatgctatgctctatctttgatgatggccagaggagccatgagtgaaggcgtacaagaggggtcttgccactgaaaaaaataagaaatgccagcatccaccagaagccagaagcggcaaggaatggattctctcctggagcctctgaaaatgaacatggaccatgcagaggagggcagggctagcatttacaaatcagtcttttccaactcttccaaagagatgatgtgtttcccagacttcccatttcccgatgacttccccaactttatgcacaacagcaagatccaggaatatatcattgcatttgccaaagaaaagaacctcctgaagtacatacaatttaagacatttgtatccagtgtaaataaacatcctgattttgcaactactggccagtgggatgttaccactgaaagggatggtaaaaaagaatcggctgtctttgatgctgtaatggtttgttccggacatcatgtgtatcccaacctaccaaaagagtcctttccaggactaaaccactttaaaggcaaatgcttccacagcagggactataaagaaccaggtgtattcaatggaaagcgtgtcctggtggttggcctggggaattcgggctgtgatattgccacagaactcagccgcacagcagaacaggtcatgatcagttccagaagtggctcctgggtgatgagccgggtctgggacaatggttatccttgggacatgctgctcgtcactcgatttggaaccttcctcaagaacaatttaccgacagccatctctgactggttgtacgtgaagcagatgaatgcaagattcaagcatgaaaactatggcttgatgcctttaaatggagtcctgaggaaagagcctgtatttaacgatgagctcccagcaagcattctgtgtggcattgtgtccgtaaagcctaacgtgaaggaattcacagagacctcggccatttttgaggatgggaccatatttgagggcattgactgtgtaatctttgcaacagggtatagttttgcctaccccttccttgatgagtctatcatcaaaagcagaaacaatgagatcattttatttaaaggagtatttcctcctctacttgagaagtcaaccatagcagtgattggctttgtccagtcccttggggctgccattcccacagttgacctccagtcccgctgggcagcacaagtaataaagggaacttgtactttgccttctatggaagacatgatgaatgatattaatgagaaaatggagaaaaagcgcaaatggtttggcaaaagcgagaccatacagacagattacattgtttatatggatgaactctcctccttcattggggcaaagcccaacatcccatggctgtttctcacagatcccaaattggccatggaagtttattttggcccttgtagtccctaccagtttaggctggtgggcccagggcagtggccaggagccagaaatgccatactgacccagtgggaccggtcgttgaaacccatgcagacacgagtggtcgggagacttcagaagccttgcttctttttccattggctgaagctctttgcaattcctattctgttaatcgctgttttccttgtgttgacctaatcatcattttctctaggatttctgaaagttactgacaatacccagacaggggctttgctatttaaaaattaaaattttcacaccacctgcttttctattcagcatcttttgcagtactctgtagacattagtcagtaatacagtgttatttctaggctctgaaatagccactttaagaatcatgtcatgatcttaagagagcactaatcatttctgtttgagttccactaacacttcaaaatcagaactatgttctttatatctaacttaaatcatttcctgaaacattttgacatgattcctttttccttttaaacaatgtatgaaagatgtattttaaatctaaataaagagcaaattaagcagaataattataatatgat

SEQ ID NO: 298568 - DNA, 2029 bp, Homo sapiens
caggacgtagacacacagaagaaaagaagacaaagaacggggttaccatggggaagaaagtggccatcattggagctggtgtgagtggcttggcctccatcaggagctgtctggaagaggggctggagcccacctgctttgagaagagcaatgacattgggggcctgtggaaattttcagaccatgcagaggagggcagggctagcatttacaaatcagtcttttccaactcttccaaagagatgatgtgtttcccagacttcccatttcccgatgacttccccaactttatgcacaacagcaagatccaggaatatatcattgcatttgccaaagaaaagaacctcctgaagtacatacaatttaagacatttgtatccagtgtaaataaacatcctgattttgcaactactggccagtgggatgttaccactgaaagggatggtaaaaaagaatcggctgtctttgatgctgtaatggtttgttccggacatcatgtgtatcccaacctaccaaaagagtcctttccaggactaaaccactttaaaggcaaatgcttccacagcagggactataaagaaccaggtgtattcaatggaaagcgtgtcctggtggttggcctggggaattcgggctgtgatattgccacagaactcagccgcacagcagaacaggtcatgatcagttccagaagtggctcctgggtgatgagccgggtctgggacaatggttatccttgggacatgctgctcgtcactcgatttggaaccttcctcaagaacaatttaccgacagccatctctgactggttgtacgtgaagcagatgaatgcaagattcaagcatgaaaactatggcttgatgcctttaaatggagtcctgaggaaagagcctgtatttaacgatgagctcccagcaagcattctgtgtggcattgtgtccgtaaagcctaacgtgaaggaattcacagagacctcggccatttttgaggatgggaccatatttgagggcattgactgtgtaatctttgcaacagggtatagttttgcctaccccttccttgatgagtctatcatcaaaagcagaaacaatgagatcattttatttaaaggagtatttcctcctctacttgagaagtcaaccatagcagtgattggctttgtccagtcccttggggctgccattcccacagttgacctccagtcccgctgggcagcacaagtaataaagggaacttgtactttgccttctatggaagacatgatgaatgatattaatgagaaaatggagaaaaagcgcaaatggtttggcaaaagcgagaccatacagacagattacattgtttatatggatgaactctcctccttcattggggcaaagcccaacatcccatggctgtttctcacagatcccaaattggccatggaagtttattttggcccttgtagtccctaccagtttaggctggtgggcccagggcagtggccaggagccagaaatgccatactgacccagtgggaccggtcgttgaaacccatgcagacacgagtggtcgggagacttcagaagccttgcttctttttccattggctgaagctctttgcaattcctattctgttaatcgctgttttccttgtgttgacctaatcatcattttctctaggatttctgaaagttactgacaatacccagacaggggctttgctatttaaaaattaaaattttcacaccacctgcttttctattcagcatcttttgcagtactctgtagacattagtcagtaatacagtgttatttctaggctctgaaatagccactttaagaatcatgtcatgatcttaagagagcactaatcatttctgtttgagttccactaacacttcaaaatcagaactatgttctttatatctaacttaaatcatttcctgaaacattttgacatgattcctttttccttttaaacaatgtatgaaagatgtattttaaatctaaataaagagcaaattaagcagaataattataatatgat

SEQ ID NO: 298569 - DNA, 2242 bp, Homo sapiens
ctttgcaactactggccagtgggaggttaccactgaaagggatggtaaaaaagaaactgcccagacggttggacaggacgtagacacacagaagaaaagaagacaaagaacgggtaggaaaattagggttaccatggggaagaaagtggccatcattggagctggtgtgagtggcttggcctccatcaggagctgtctggaagaggggctggagcccacctgctttgagaagagcaatgacattgggggcctgtggaaattttcaaggagccatgagtgaaggcgtacaagaggggtcttgccactgaaaaaaataagaaatgccagcatccaccagaagccagaagcggcaaggaatggattctctcctggagcctctgaaaatgaacatggaccatgcagaggagggcagggctagcatttacaaatcagtcttttccaactcttccaaagagatgatgtgtttcccagacttcccatttcccgatgacttccccaactttatgcacaacagcaagatccaggaatatatcattgcatttgccaaagaaaagaacctcctgaagtacatacaatttaagacatttgtatccagtgtaaataaacatcctgattttgcaactactggccagtgggatgttaccactgaaagggatggtaaaaaagaatcggctgtctttgatgctgtaatggtttgttccggacatcatgtgtatcccaacctaccaaaagagtcctttccaggactaaaccactttaaaggcaaatgcttccacagcagggactataaagaaccaggtgtattcaatggaaagcgtgtcctggtggttggcctggggaattcgggctgtgatattgccacagaactcagccgcacagcagaacaggtcatgatcagttccagaagtggctcctgggtgatgagccgggtctgggacaatggttatccttgggacatgctgctcgtcactcgatttggaaccttcctcaagaacaatttaccgacagccatctctgactggttgtacgtgaagcagatgaatgcaagattcaagcatgaaaactatggcttgatgcctttaaatggagtcctgaggaaagagcctgtatttaacgatgagctcccagcaagcattctgtgtggcattgtgtccgtaaagcctaacgtgaaggaattcacagagacctcggccatttttgaggatgggaccatatttgagggcattgactgtgtaatctttgcaacagggtatagttttgcctaccccttccttgatgagtctatcatcaaaagcagaaacaatgagatcattttatttaaaggagtatttcctcctctacttgagaagtcaaccatagcagtgattggctttgtccagtcccttggggctgccattcccacagttgacctccagtcccgctgggcagcacaagtaataaagggaacttgtactttgccttctatggaagacatgatgaatgatattaatgagaaaatggagaaaaagcgcaaatggtttggcaaaagcgagaccatacagacagattacattgtttatatggatgaactctcctccttcattggggcaaagcccaacatcccatggctgtttctcacagatcccaaattggccatggaagtttattttggcccttgtagtccctaccagtttaggctggtgggcccagggcagtggccaggagccagaaatgccatactgacccagtgggaccggtcgttgaaacccatgcagacacgagtggtcgggagacttcagaagccttgcttctttttccattggctgaagctctttgcaattcctattctgttaatcgctgttttccttgtgttgacctaatcatcattttctctaggatttctgaaagttactgacaatacccagacaggggctttgctatttaaaaattaaaattttcacaccacctgcttttctattcagcatcttttgcagtactctgtagacattagtcagtaatacagtgttatttctaggctctgaaatagccactttaagaatcatgtcatgatcttaagagagcactaatcatttctgtttgagttccactaacacttcaaaatcagaactatgttctttatatctaacttaaatcatttcctgaaacattttgacatgattcctttttccttttaaacaatgtatgaaagatgtattttaaatctaaataaagagcaaattaagcagaataattataatatgat

SEQ ID NO: 298570 - DNA, 1926 bp, Homo sapiens
ctttgcaactactggccagtgggaggttaccactgaaagggatggtaaaaaagaaactgcccagacggttggacaggacgtagacacacagaagaaaagaagacaaagaacgggtaggaaaattagggttaccatggggaagaaagtggccatcattggagctggtgtgagtggcttggcctccatcaggagctgtctggaagaggggctggagcccacctgctttgagaagagcaatgacattgggggcctgtggaaattttcaacatttgtatccagtgtaaataaacatcctgattttgcaactactggccagtgggatgttaccactgaaagggatggtaaaaaagaatcggctgtctttgatgctgtaatggtttgttccggacatcatgtgtatcccaacctaccaaaagagtcctttccaggactaaaccactttaaaggcaaatgcttccacagcagggactataaagaaccaggtgtattcaatggaaagcgtgtcctggtggttggcctggggaattcgggctgtgatattgccacagaactcagccgcacagcagaacaggtcatgatcagttccagaagtggctcctgggtgatgagccgggtctgggacaatggttatccttgggacatgctgctcgtcactcgatttggaaccttcctcaagaacaatttaccgacagccatctctgactggttgtacgtgaagcagatgaatgcaagattcaagcatgaaaactatggcttgatgcctttaaatggagtcctgaggaaagagcctgtatttaacgatgagctcccagcaagcattctgtgtggcattgtgtccgtaaagcctaacgtgaaggaattcacagagacctcggccatttttgaggatgggaccatatttgagggcattgactgtgtaatctttgcaacagggtatagttttgcctaccccttccttgatgagtctatcatcaaaagcagaaacaatgagatcattttatttaaaggagtatttcctcctctacttgagaagtcaaccatagcagtgattggctttgtccagtcccttggggctgccattcccacagttgacctccagtcccgctgggcagcacaagtaataaagggaacttgtactttgccttctatggaagacatgatgaatgatattaatgagaaaatggagaaaaagcgcaaatggtttggcaaaagcgagaccatacagacagattacattgtttatatggatgaactctcctccttcattggggcaaagcccaacatcccatggctgtttctcacagatcccaaattggccatggaagtttattttggcccttgtagtccctaccagtttaggctggtgggcccagggcagtggccaggagccagaaatgccatactgacccagtgggaccggtcgttgaaacccatgcagacacgagtggtcgggagacttcagaagccttgcttctttttccattggctgaagctctttgcaattcctattctgttaatcgctgttttccttgtgttgacctaatcatcattttctctaggatttctgaaagttactgacaatacccagacaggggctttgctatttaaaaattaaaattttcacaccacctgcttttctattcagcatcttttgcagtactctgtagacattagtcagtaatacagtgttatttctaggctctgaaatagccactttaagaatcatgtcatgatcttaagagagcactaatcatttctgtttgagttccactaacacttcaaaatcagaactatgttctttatatctaacttaaatcatttcctgaaacattttgacatgattcctttttccttttaaacaatgtatgaaagatgtattttaaatctaaataaagagcaaattaagcagaataattataatatgat

SEQ ID NO: 298571 - DNA, 1094 bp, Homo sapiens
cgtcgtgctagaggatcccgcaatgtgtcctggtggttggcctggggaattcgggctgtgatattgccacagaactcagccgcacagcagaacaggtcatgatcagttccagaagtggctcctgggtgatgagccgggtctgggacaatggttatccttgggacatgctgctcgtcactcgatttggaaccttcctcaagaacaatttaccgacagccatctctgactggttgtacgtgaagcagatgaatgcaagattcaagcatgaaaactatggcttgatgcctttaaatgggaacttgtactttgccttctatggaagacatgatgaatgatattaatgagaaaatggagaaaaagcgcaaatggtttggcaaaagcgagaccatacagacagattacattgtttatatggatgaactctcctccttcattggggcaaagcccaacatcccatggctgtttctcacagatcccaaattggccatggaagtttattttggcccttgtagtccctaccagtttaggctggtgggcccagggcagtggccaggagccagaaatgccatactgacccagtgggaccggtcgttgaaacccatgcagacacgagtggtcgggagacttcagaagccttgcttctttttccattggctgaagctctttgcaattcctattctgttaatcgctgttttccttgtgttgacctaatcatcattttctctaggatttctgaaagttactgacaatacccagacaggggctttgctatttaaaaattaaaattttcacaccacctgcttttctattcagcatcttttgcagtactctgtagacattagtcagtaatacagtgttatttctaggctctgaaatagccactttaagaatcatgtcatgatcttaagagagcactaatcatttctgtttgagttccactaacacttcaaaatcagaactatgttctttatatctaacttaaatcatttcctgaaacattttgacatgattcctttttccttttaaacaatgtatgaaagatgtattttaaatctaaataaagagcaaattaagcagaataattataatatgat

SEQ ID NO: 298572 - DNA, 1971 bp, Homo sapiens
actagaacattttctctttcaaactgcccagacggttggacaggacgtagacacacagaagaaaagaagacaaagaacgggtaggaaaattagggttaccatggggaagaaagtggccatcattggagctggtgtgagtggcttggcctccatcaggagctgtctggaagaggggctggagcccacctgctttgagaagagcaatgacattgggggcctgtggaaattttcagaccatgcagaggagggcagggctagcatttacaaatcagtcttttccaactcttccaaagagatgatgtgtttcccagacttcccatttcccgatgacttccccaactttatgcacaacagcaagatccaggaatatatcattgcatttgccaaagatcctgattttgcaactactggccagtgggatgttaccactgaaagggatggtaaaaaagaatcggctgtctttgatgctgtaatggtttgttccggacatcatgtgtatcccaacctaccaaaagagtcctttccaggactaaaccactttaaaggcaaatgcttccacagcagggactataaagaaccaggtgtattcaatggaaagcgtgtcctggtggttggcctggggaattcgggctgtgatattgccacagaactcagccgcacagcagaacaggtcatgatcagttccagaagtggctcctgggtgatgagccgggtctgggacaatggttatccttgggacatgctgctcgtcactcgatttggaaccttcctcaagaacaatttaccgacagccatctctgactggttgtacgtgaagcagatgaatgcaagattcaagcatgaaaactatggcttgatgcctttaaatggagtcctgaggaaagagcctgtatttaacgatgagctcccagcaagcattctgtgtggcattgtgtccgtaaagcctaacgtgaaggaattcacagagacctcggccatttttgaggatgggaccatatttgagggcattgactgtgtaatctttgcaacagggtatagttttgcctaccccttccttgatgagtctatcatcaaaagcagaaacaatgagatcattttatttaaaggagtatttcctcctctacttgagaagtcaaccatagcagtgattggctttgtccagtcccttggggctgccattcccacagttgacctccagtcccgctgggcagcacaagtaataaagggaacttgtactttgccttctatggaagacatgatgaatgatattaatgagaaaatggagaaaaagcgcaaatggtttggcaaaagcgagaccatacagacagattacattgtttatatggatgaactctcctccttcattggggcaaagcccaacatcccatggctgtttctcacagatcccaaattggccatggaagtttattttggcccttgtagtccctaccagtttaggctggtgggcccagggcagtggccaggagccagaaatgccatactgacccagtgggaccggtcgttgaaacccatgcagacacgagtggtcgggagacttcagaagccttgcttctttttccattggctgaagctctttgcaattcctattctgttaatcgctgttttccttgtgttgacctaatcatcattttctctaggatttctgaaagttactgacaatacccagacaggggctttgctatttaaaaattacattagtcagtaatacagtgttatttctaggctctgaaatagccactttaagaatcatgtcatgatcttaagagagcactaatcatttctgtttgagttccactaacacttcaaaatcagaactatgttctttatatctaacttaaatcatttcctgaaacattttgacatgattcctttttccttttaaacaatgtatgaaagatgtattttaaatctaaataaagagcaaattaagcagaataattataatatgat

SEQ ID NO: 298573 - DNA, 866 bp, Homo sapiens
atttggtgtctgtctgaaaatgaacaccaattaatgtaattcataactcattattaaaaagggaaaattacaggctggtcctatgccagactcattaattaccatcgtgtctttccttctttatcaggaacttgtactttgccttctatggaagacatgatgaatgatattaatgagaaaatggagaaaaagcgcaaatgcttcattggggcaaagcccaacatcccatggctgtttctcacagatcccaaattggccatggaagtttattttggcccttgtagtccctaccagtttaggctggtgggcccagggcagtggccaggagccagaaatgccatactgacccagtgggaccggtcgttgaaacccatgcagacacgagtggtcgggagacttcagaagccttgcttctttttccattggctgaagctctttgcaattcctattctgttaatcgctgttttccttgtgttgacctaatcatcattttctctaggatttctgaaagttactgacaatacccagacaggggctttgctatttaaaaattaaaattttcacaccacctgcttttctattcagcatcttttgcagtactctgtagacattagtcagtaatacagtgttatttctaggctctgaaatagccactttaagaatcatgtcatgatcttaagagagcactaatcatttctgtttgagttccactaacacttcaaaatcagaactatgttctttatatctaacttaaatcatttcctgaaacattttgacatgattcctttttccttttaaacaatgtatgaaagatgtattttaaatctaaataaagagcaaattaagcagaataattataatatgat

SEQ ID NO: 298574 - DNA, 329 bp, Homo sapiens
ttcctccatgggcacaacaggcgggacagatccacaggcagcaagagcactggacaaggtctcaggtgtggtgagcactgaggcaggagaccagggtcagggggaggtgtccacaatgctgatctggctaaaagtcccttctctgcttaaagctcaacaaaagcaaataacagtgttgaaggaaaatgtacgccagataagataaagctcatacccaactaaaaggttaagacccctgtagataaatgggcaaagaacctgaaaacactgcatactgcaggaaggagggaatgcggtggcctaacaaatatttgggggaaggttcaact

SEQ ID NO: 298575 - DNA, 2452 bp, Homo sapiens
agaaagcgagcagccacccagctccccgccaccgccatggtccccgacaccgcctgcgttcttctgctcaccctggctgccctcggcgcgtccggacagggccagagcccgttgggctcagacctgggcccgcagatgcttcgggaactgcaggaaaccaacgcggcgctgcaggacgtgcgggagctgctgcggcagcaggtcagggagatcacgttcctgaaaaacacggtgatggagtgtgacgcgtgcgggatgcagcagtcagtacgcaccggcctacccagcgtgcggcccctgctccactgcgcgcccggcttctgcttccccggcgtggcctgcatccagacggagagcggcgcgcgctgcggcccctgccccgcgggcttcacgggcaacggctcgcactgcaccgacgtcaacgagtgcaacgcccacccctgcttcccccgagtccgctgtatcaacaccagcccggggttccgctgcgaggcttgcccgccggggtacagcggccccacccaccagggcgtggggctggctttcgccaaggccaacaagcaggtttgcacggacatcaacgagtgtgagaccgggcaacataactgcgtccccaactccgtgtgcatcaacacccggggctccttccagtgcggcccgtgccagcccggcttcgtgggcgaccaggcgtccggctgccagcggcgcgcacagcgcttctgccccgacggctcgcccagcgagtgccacgagcatgcagactgcgtcctagagcgcgatggctcgcggtcgtgcgtgtgtgccgttggctgggccggcaacgggatcctctgtggtcgcgacactgacctagacggcttcccggacgagaagctgcgctgcccggagcgccagtgccgtaaggacaactgcgtgactgtgcccaactcagggcaggaggatgtggaccgcgatggcatcggagacgcctgcgatccggatgccgacggggacggggtccccaatgaaaaggacaactgcccgctggtgcggaacccagaccagcgcaacacggacgaggacaagtggggcgatgcgtgcgacaactgccggtcccagaagaacgacgaccaaaaggacacagaccaggacggccggggcgatgcgtgcgacgacgacatcgacggcgaccggatccgcaaccaggccgacaactgccctagggtacccaactcagaccagaaggacagtgatggcgatggtataggggatgcctgtgacaactgtccccagaagagcaacccggatcaggcggatgtggaccacgactttgtgggagatgcttgtgacagcgatcaagaccaggatggagacggacatcaggactctcgggacaactgtcccacggtgcctaacagtgcccaggaggactcagaccacgatggccagggtgatgcctgcgacgacgacgacgacaatgacggagtccctgacagtcgggacaactgccgcctggtgcctaaccccggccaggaggacgcggacagggacggcgtgggcgacgtgtgccaggacgactttgatgcagacaaggtggtagacaagatcgacgtgtgtccggagaacgctgaagtcacgctcaccgacttcagggccttccagacagtcgtgctggacccggagggtgacgcgcagattgaccccaactgggtggtgctcaaccagggaagggagatcgtgcagacaatgaacagcgacccaggcctggctgtgggttacactgccttcaatggcgtggacttcgagggcacgttccatgtgaacacggtcacggatgacgactatgcgggcttcatctttggctaccaggacagctccagcttctacgtggtcatgtggaagcagatggagcaaacgtattggcaggcgaaccccttccgtgctgtggccgagcctggcatccaactcaaggctgtgaagtcttccacaggccccggggaacagctgcggaacgctctgtggcatacaggagacacagagtcccaggtgcggctgctgtggaaggacccgcgaaacgtgggttggaaggacaagaagtcctatcgttggttcctgcagcaccggccccaagtgggctacatcagggtgcgattctatgagggccctgagctggtggccgacagcaacgtggtcttggacacaaccatgcggggtggccgcctgggggtcttctgcttctcccaggagaacatcatctgggccaacctgcgttaccgctgcaatgacaccatcccagaggactatgagacccatcagctgcggcaagcctagggaccagggtgaggacccgccggatgacagccaccctcaccgcggctggatgggggctctgcacccagccccaaggggtggccgtcctgagggggaagtgagaagggctcagagaggacaaaataaagtgtgtgtgcaggga

SEQ ID NO: 298576 - DNA, 865 bp, Homo sapiens
agaaagcgagcagccacccagctccccgccaccgccatggtccccgacaccgcctgcgttcttctgctcaccctggctgccctcggcgcgtccggacagggccagagcccgttgggtaagccgcgttagcacccgcgccgtgcccacggccccacaacggactgtaggacccgtgagaggcccgggatccaggctgtttggggctcacggactgttcgtaggggacgtgccgggcgcagaaagcaggtggcgggaccgagactagaggagcgcagtggggcctcggaggtccgggttcgctgcaacggtgggagttggtggtgggattccccggccccatgacgcctcaccaggtcccctgccgccgcaggctcagacctgggcccgcagatgcttcgggaactgcaggaaaccaacgcggcgctgcaggacgtgcgggagctgctgcggcagcaggtcaagggagatcacggttcctgaacaaacacggtgatggcgagtggtgaacagcgtgaggaacttgcacgcagaacagataagcacaccgggcattacaccagaagttgacggccctgtttccaagtgcgccggccccaggagcatacgagcattccaccaggaaagaatggacaccatgcagatcccacgaaagcgacagaggacagagacagctgccagaaatgaagagcaccaccatggacaccagacagggagcaaataaaaccaggagcaaaccaggaggatccgaaaccgtgcgaaccagaaccggtacaaaaggaacgttggaaaacaggacaaaaagcacagtgagatacgcaccgcgagaaatcacgaatggcactccaaacaacccagaaaccacggg

SEQ ID NO: 298577 - DNA, 386 bp, Homo sapiens
gaacgggtgactgtcgtgggggcggggaacaggtaactgtcacaggccaggggtaggtgacagtggtcaagggtgtcaattctggagccggtctgccaagcctcagggccagcctctgcttctttctagttatgagaccttggccatttgcttaacccttactgacgtaacacaccctattttactgtaataattatatgtttatttcaatgtgccatagagagacgtaatcagcacatcaattcccatcattgatattattgttaggacaaagctaacctgggtatttaagggatttttaagtaagtctgtttaaagaaaagtactaagtaaataatagtgcaggttccagttgggaagctgattcataagtgatgaaagttaag

SEQ ID NO: 298578 - DNA, 7884 bp, Homo sapiens
tgtgcgtcgcgctctcgccctcctcttcccgctgcagtgtctatggagcgaggctacgtttcattgccgccctggcttaacccttccggcgcctaaaaggacggccggccggccggtcccttgcaccaggaagaagtcttagcagccagcgggccctggtcaggaaactctaaggtacaaggaaaacagttgaggaaggagccagagcgctccggtttggtcctcgggcttcgctggggcggggcgcaggcgttggctttaagaaaggggaggggacagtgcaatccgggttgcccgcggattcggccaaggaatcttccgctcgctccggagcgaggagcctgtaaagaggctgttcccagctccagctctaacctcgcctacaccttgggcgggcccaatgtcacgtttgcaattgctcaggaaggatccggcccgtctccggaggcaagtcgggctgcggtttttgctgcttatctgggaaggcgatgcctaagggacatgctgcttgctaggcagcaccctgccgggatccgactgcgatagttagctctccctggccctgaagccatcgccggggcgcctgttctctgtccggaccagccagcgctcctcaggagtctcactgaaacagaaccatgggtcatcccccgctggagttcagcgactgctacctggacagccccgatttccgcgagaggctcaagtgttatgagcaggaactggagaggaccaacaaattcatcaaagacgtaatcaaagacggcaacgcgcttatcagcgctatgagaaattattcttctgctgttcagaaattttcccagacgctgcagtcatttcagtttgatttcattggagacactctgactgatgatgaaattaacatcgctgaatccttcaaggaatttgctgaattgctcaacgaggtagaaaatgagaggatgatgatggtacacaatgctagtgatttgctgattaaacccttggaaaatttccggaaggaacaaataggcttcaccaaggagcggaaaaagaaatttgaaaaggatggtgagaggttttattctttactggatcggcacttacacctgtcttcaaaaaagaaagaatctcagttacaagaggcagacctacaggtggacaaggagaggcacaattttttcgagtcctctcttgattatgtttatcaaatccaggaagttcaggagtccaagaagttcaatattgtggagcctgtcttggcctttcttcatagtctgttcatttctaacagcctgactgtggagctcacacaggatttcctcccatacaaacaacagctccaactcagtttacagaatacaagaaatcatttctccagtacccgggaagagatggaagaacttaagaaaaggatgaaagaagctccccagacatgcaaacttccaggacagccaactattgaaggctatctctatacacaagagaaatgggctttaggaatatcctgggtgaaatactattgccagtatgagaaagagaccaaaacactgaccatgacgcctatggagcagaagccaggtgctaagcaggggcccttggacttaacactgaagtactgtgtgagaaggaagacggagtctatcgacaagaggttctgttttgacatagaaactaatgaaaggccaggaaccatcactctgcaggccctttcagaagctaacagaaggctatggatggaagccatggatgggaaagaacctatctaccacagccctataacaaaacagcaagaaatggagctaaatgaagtgggcttcaagtttgtcaggaagtgcatcaatattattgagaccaaagggatcaagacagaagggttgtaccgcactgtgggcagcaatattcaggttcagaagctgctgaatgccttttttgatcctaaatgcccaggagatgttgattttcataatagtgactgggacattaagacaatcaccagctccttgaaattctacctcaggaatctttctgaacctgtcatgacctatagacttcacaaagagctggtctctgctgccaagtctgacaacctggattaccgcctaggagctattcactccctggtatataagctaccagaaaagaaccgagagatgctggaacttctgataagacacttggtcaatgtgtgtgagcacagcaaagagaatcttatgaccccctccaacatgggagtaatctttgggcccaccctgatgagagctcaggaggacactgtggccgccatgatgaacatcaaattccagaacatagtggtggaaatactaatcgagcactttggcaagatctatttaggtccacctgaggaaagcgctgcaccgccagtgcctccgcctcgggtgacagcaagaaggcacaaaccaatcacgatttcaaagcgcttgctgcgagaaaggacggttttctatacttcttccctggatgaaagcgaagatgaaatccaacatcaaacaccgaatggtactatcaccagcagcatagaaccccccaagccaccacaacaccccaaactacctattcagaggagtggggaaactgatcctgggaggaagtccccaagcaggcctattttggatggcaagttggagccctgcccagaggtggacgtggggaagttggtgtctaggctgcaggatggagggaccaagatcaccccaaaggccaccaatggacccatgccaggctctgggcccaccaagaccccctctttccacataaagagaccagctccccggcccctggcccaccacaaggagggggatgctgacagtttcagcaaagtgcggcctccaggagaaaagccaaccatcatccgccccccagtgaggcccccagatcctccctgccgggcagctactccccaaaagccagaaccaaagccagatattgtggctggcaatgcgggggaaatcacatcatctgtggtggcttccaggaccaggttttttgaaacagcttcccggaaaacaggaagttctcaaggcagacttcctggagatgaaagttgaggctacaggttttaaaagccttggcctcagaggaccctttccaggttctgaaagagtctttcttcttcaaacctttgtgtgcggagtcattttgtgttgaagagcagctccttcctagccttgcactttcagactctctctgggaggccataaaataaggagcatatgtcctagacaggtgtttatatctcctttgtattctgtcttcatcccctcagaaggtctgttttgagttcctataacactgtgaagagctggactccctcaagccagactctgccaaaaccaagatatccacttacctgagttgaagaggggagctcagttttcaactcttccctgaacttcctgcttcctcagagggccattgaactctgagagatttggggctaaagactgatctcaggggtcttaccttgaactgaaggccacttgagttggggccattgcttaccttggttggaagggaatagaaatgtttgctgaacattggagaatctcaacatgtctcctactgaggatatggacactggtgccatgtcagcgctctggtgctgcagtatgttgccaagagcccgtctgctcctgcgaggctatgagtgggatgagtgatgcccccacagcacctccatgtggacttaggaaggtggccttcctgctgttacatgcagccacttaggacaaatctgcaaagcatgttttgcatgtaaaagcctaggtctatttggattattctttctccttttttttgacagcttcctgtcaagcaatcaagaaacaaacaaaagctgaacacatttctttttaaaaaaaggagactgtgtttggtcctgtaggagttctattttggggtcaaatgctagaaaaattgttaaggtggattgaggccaggcagctgtcactgctgcttcatgtttgccttctgcacataaactcttttatctcctgaaaaaagcagttcttaacccagtgtccatggactcagaaactccatgatgcccctgagatggtatgcacaattccatgacaatatgccctttctggggagatagtccataatgttctgctaaatttcaaatgggctcgtgacccaaaaaagtcaagaaccacagcacttgagttaaaatactctttttacaatccatataagcccttgattggaagggcttttcaaaatcatttagtctaacaactgcccagtttccagtcgggggaactgaggcagagcaaggtagtgatcacaccagtacaagatttcaggtcccaggctcctatgcaagttttttttccccattatatcacacttatttagcaagggaccttgtggtttgtggctttagtggccatcatttctgggggttggcttttaccctttttcttgaatatttgccaccaagtgaaaaatgttaggacataaacccttgccaggtccctttcatttgctatctctattattggaaaggacctaaaaattggtgtaatggggcagaaatctgaggaatggacatttctaattcctgtttgttgaagggaagttgctggaaagagcatcagtacttgtttctatgcagatgcctgggccgtagcttgtctgtagcgtctgtataattataatgttgcccagtgtgagggaaagagctttcctacttgcactcttctaccaaggccctgttagtgcactgattatagtactgacagataaagcctagatgagagagatagagagtgagtacatgcacactcatgtgcaaacccactcagagatgcatttggaacagtgctactgaaaggcagtagtcattttcaagactgaattccaaacatggtttattggtgagttaggaacatgtaaggccaagtacactgagagcctttttgaaagtaattgagtggaaacttgatgccattctaaatcaaggcatatccaggtggcccggttgaactcactccactgtacccagtctcaaaggccaggttgctaagaaaccaggagtaaaagagtcaagtgaccatcatttcacctgctgcttgcccccaatagtagtctctgtgaggccttactgacctcacctaggaagtgatttttgagcccttgtttcagggctgtggcctccctgctctatcctgaataaagcagacaggtgtgcagattttggccatgaaagcatggctaatagggccacagtccctttaaagaaacatggtttgactctggttttcttgggggaaaataccacaatcaccgatgcaaacattggaagattattgagagccctagaaagctgctgtgatcccagtagaaaatatgtcccagaaatgtcatgagattgctgtgtgttgcctgggacacagatcaagggcctatcttggagagctggggaccagcagtctgcctggaggccagggagcagtggctgagtagctctgcctttgctctggtctataccttaagaatgccaaagaatgaatttcaacgcctgcctttggcactctgacttaaagtgcaaaaagcttctgtggcgaggcatgctatcatggaatgagactggcttgccctaggcttaatggatgggcagtcattttgcagaggctatgggaagagggtgataatagaagagtggcagctataggaaattatcaacataccttggccagcaagttagagaatctggcaatggatgaactgaaagtgatgaactggcagggataacaaagaacctaacatttattaagcacgtatttattaactgctcagtgtttcatattcatgcaagtattctcattttacagagaaagaaattatggcccagggggctaaagtaaacaactcaagggcacatagaaagtaaataaaaggactgtgatttgaatccaggccactcttagcccatgctgttttccctttgccacactgtggtaggtgtttgaacagaggccacattactagagttggcatgactcttgactcttgcctgcctaacaaaatattgaaaggcaaacatttgaaggagggagggggtgcaggttcagtttatatggaaatgcaaactgggctggaagatattcctgagttaggctttctcttcatattcagcttgcacatttggtaatgtttttaagatgatcatctaattttattttgtgaagtgaaggatttgtgttttagttggcagttgttaagtccttggcttgccatttttcaaaaagtaaaaaggtcctcacaggtgtctccatacttcgccaaggttgtagcatgggcagtttcagtttcagcctaagagactggtgacatccacaaatgcagttttagaagcagaaaaggtcttggtgcctctgcagtacttgatgtattggggtcaaatctctacaaatttttctgtggtgatagcaaaatcaagagatggcttacaaaaagaaatattgaatttttatttttgaagtttttgttttttaaaaggttgggggtgttcagccactgagggacaaaacttagcatctaatttcaattatagtgtcatgcagagtatttctaaagtaattggttatcatgggaaagtattctcttttcaagaagttctttgattctgtaataactagaacaaataaagtagtaaaagaagaaatagttctgtgactaggaaaaaattgcttttgagagaacatagatcaattatactacttctaaggtagctgcagataagtggccttgacacattacaagcctggaaaaaaacatcagaaataataaaaaatttcagagagaatcaagatacctttttttttcttttttttttcttttttttattatactctaagttttagggtacatgtgcacattgtgcaggttagttacatatgtatacatgtgccatgctggtgcgctgcacccactaatgtgtcatctagcattaggtatatctcccagtgctatccctcccccctcccccgaccccaccacagtccccagagtgtgatattccccttcctgtgtccatgtgatctcattgttcaattcccacctatgagtgagaatatgcggtgtttggttttttgttcttgcgatagtttactgagaatgatggtttccaatttcatccatgtccctacaaaggatatgaactcatcattttttatggctgcatagtattccatggtgtatatgtgccacattttcttaatccagtctatcattgttggacatttgggttggttccaagtctttgctattgtgaatagtgccgcaataaacatacgtgtgcatgtgtctttatagcagcatgatttatactcatttgggtatatacccagtaatgggatggctgggtcaaatggtatttctagttctagatccctgaggaatcgccacactgacttccacaatggttgaactagtttacagtccaaccaacagtgtaaaagtgttcctatttctccgcatcctctccagcacctgttgtttcctgactttttaatgattgccattctaactggtgtgagatgatatctcatagtggttttgatttgcatttctctgatggccagtgatgatgagcatttcttcatgtgttttttggctgcataaatgtcttcttttgagaagtgtctgttcatgtccttcgcgaaggacaagataccttaaagataagttttcgataaagaaaagccttcattttcctgggggaaatgaagcacttgatgccaaggacattagtagagggctagaaagattgcctgtgtgaaagacatatgctatatccaaataataaaacaaacgagatcctggggctcattcatgtgactttcaataaagtatgtagactgtctaatataagtggcc

SEQ ID NO: 298579 - DNA, 5869 bp, Homo sapiens
aaggaaggtggatgggaataggtttccagctggaagtttatctagtctgacaacctggattaccgcctaggagctattcactccctggtatataagctaccagaaaagaaccgagagatgctggaacttctgataagacacttggtcaatgtgtgtgagcacagcaaagagaatcttatgaccccctccaacatgggagtaatctttgggcccaccctgatgagagctcaggaggacactgtggccgccatgatgaacatcaaattccagaacatagtggtggaaatactaatcgagcactttggcaagatctatttaggtccacctgaggaaagcgctgcaccgccagtgcctccgcctcgggtgacagcaagaaggcacaaaccaatcacgatttcaaagcgcttgctgcgagaaaggacggttttctatacttcttccctggatgaaagcgaagatgaaatccaacatcaaacaccgaatggtactatcaccagcagcatagaaccccccaagccaccacaacaccccaaactacctattcagaggagtggggaaactgatcctgggaggaagtccccaagcaggcctattttggatggcaagttggagccctgcccagaggtggacgtggggaagttggtgtctaggctgcaggatggagggaccaagatcaccccaaaggccaccaatggacccatgccaggctctgggcccaccaagaccccctctttccacataaagagaccagctccccggcccctggcccaccacaaggagggggatgctgacagtttcagcaaagtgcggcctccaggagaaaagccaaccatcatccgccccccagtgaggcccccagatcctccctgccgggcagctactccccaaaagccagaaccaaagccagatattgtggctggcaatgcgggggaaatcacatcatctgtggtggcttccaggaccaggttttttgaaacagcttcccggaaaacaggaagttctcaaggcagacttcctggagatgaaagttgaggctacaggttttaaaagccttggcctcagaggaccctttccaggttctgaaagagtctttcttcttcaaacctttgtgtgcggagtcattttgtgttgaagagcagctccttcctagccttgcactttcagactctctctgggaggccataaaataaggagcatatgtcctagacaggtgtttatatctcctttgtattctgtcttcatcccctcagaaggtctgttttgagttcctataacactgtgaagagctggactccctcaagccagactctgccaaaaccaagatatccacttacctgagttgaagaggggagctcagttttcaactcttccctgaacttcctgcttcctcagagggccattgaactctgagagatttggggctaaagactgatctcaggggtcttaccttgaactgaaggccacttgagttggggccattgcttaccttggttggaagggaatagaaatgtttgctgaacattggagaatctcaacatgtctcctactgaggatatggacactggtgccatgtcagcgctctggtgctgcagtatgttgccaagagcccgtctgctcctgcgaggctatgagtgggatgagtgatgcccccacagcacctccatgtggacttaggaaggtggccttcctgctgttacatgcagccacttaggacaaatctgcaaagcatgttttgcatgtaaaagcctaggtctatttggattattctttctccttttttttgacagcttcctgtcaagcaatcaagaaacaaacaaaagctgaacacatttctttttaaaaaaaggagactgtgtttggtcctgtaggagttctattttggggtcaaatgctagaaaaattgttaaggtggattgaggccaggcagctgtcactgctgcttcatgtttgccttctgcacataaactcttttatctcctgaaaaaagcagttcttaacccagtgtccatggactcagaaactccatgatgcccctgagatggtatgcacaattccatgacaatatgccctttctggggagatagtccataatgttctgctaaatttcaaatgggctcgtgacccaaaaaagtcaagaaccacagcacttgagttaaaatactctttttacaatccatataagcccttgattggaagggcttttcaaaatcatttagtctaacaactgcccagtttccagtcgggggaactgaggcagagcaaggtagtgatcacaccagtacaagatttcaggtcccaggctcctatgcaagttttttttccccattatatcacacttatttagcaagggaccttgtggtttgtggctttagtggccatcatttctgggggttggcttttaccctttttcttgaatatttgccaccaagtgaaaaatgttaggacataaacccttgccaggtccctttcatttgctatctctattattggaaaggacctaaaaattggtgtaatggggcagaaatctgaggaatggacatttctaattcctgtttgttgaagggaagttgctggaaagagcatcagtacttgtttctatgcagatgcctgggccgtagcttgtctgtagcgtctgtataattataatgttgcccagtgtgagggaaagagctttcctacttgcactcttctaccaaggccctgttagtgcactgattatagtactgacagataaagcctagatgagagagatagagagtgagtacatgcacactcatgtgcaaacccactcagagatgcatttggaacagtgctactgaaaggcagtagtcattttcaagactgaattccaaacatggtttattggtgagttaggaacatgtaaggccaagtacactgagagcctttttgaaagtaattgagtggaaacttgatgccattctaaatcaaggcatatccaggtggcccggttgaactcactccactgtacccagtctcaaaggccaggttgctaagaaaccaggagtaaaagagtcaagtgaccatcatttcacctgctgcttgcccccaatagtagtctctgtgaggccttactgacctcacctaggaagtgatttttgagcccttgtttcagggctgtggcctccctgctctatcctgaataaagcagacaggtgtgcagattttggccatgaaagcatggctaatagggccacagtccctttaaagaaacatggtttgactctggttttcttgggggaaaataccacaatcaccgatgcaaacattggaagattattgagagccctagaaagctgctgtgatcccagtagaaaatatgtcccagaaatgtcatgagattgctgtgtgttgcctgggacacagatcaagggcctatcttggagagctggggaccagcagtctgcctggaggccagggagcagtggctgagtagctctgcctttgctctggtctataccttaagaatgccaaagaatgaatttcaacgcctgcctttggcactctgacttaaagtgcaaaaagcttctgtggcgaggcatgctatcatggaatgagactggcttgccctaggcttaatggatgggcagtcattttgcagaggctatgggaagagggtgataatagaagagtggcagctataggaaattatcaacataccttggccagcaagttagagaatctggcaatggatgaactgaaagtgatgaactggcagggataacaaagaacctaacatttattaagcacgtatttattaactgctcagtgtttcatattcatgcaagtattctcattttacagagaaagaaattatggcccagggggctaaagtaaacaactcaagggcacatagaaagtaaataaaaggactgtgatttgaatccaggccactcttagcccatgctgttttccctttgccacactgtggtaggtgtttgaacagaggccacattactagagttggcatgactcttgactcttgcctgcctaacaaaatattgaaaggcaaacatttgaaggagggagggggtgcaggttcagtttatatggaaatgcaaactgggctggaagatattcctgagttaggctttctcttcatattcagcttgcacatttggtaatgtttttaagatgatcatctaattttattttgtgaagtgaaggatttgtgttttagttggcagttgttaagtccttggcttgccatttttcaaaaagtaaaaaggtcctcacaggtgtctccatacttcgccaaggttgtagcatgggcagtttcagtttcagcctaagagactggtgacatccacaaatgcagttttagaagcagaaaaggtcttggtgcctctgcagtacttgatgtattggggtcaaatctctacaaatttttctgtggtgatagcaaaatcaagagatggcttacaaaaagaaatattgaatttttatttttgaagtttttgttttttaaaaggttgggggtgttcagccactgagggacaaaacttagcatctaatttcaattatagtgtcatgcagagtatttctaaagtaattggttatcatgggaaagtattctcttttcaagaagttctttgattctgtaataactagaacaaataaagtagtaaaagaagaaatagttctgtgactaggaaaaaattgcttttgagagaacatagatcaattatactacttctaaggtagctgcagataagtggccttgacacattacaagcctggaaaaaaacatcagaaataataaaaaatttcagagagaatcaagatacctttttttttcttttttttttcttttttttattatactctaagttttagggtacatgtgcacattgtgcaggttagttacatatgtatacatgtgccatgctggtgcgctgcacccactaatgtgtcatctagcattaggtatatctcccagtgctatccctcccccctcccccgaccccaccacagtccccagagtgtgatattccccttcctgtgtccatgtgatctcattgttcaattcccacctatgagtgagaatatgcggtgtttggttttttgttcttgcgatagtttactgagaatgatggtttccaatttcatccatgtccctacaaaggatatgaactcatcattttttatggctgcatagtattccatggtgtatatgtgccacattttcttaatccagtctatcattgttggacatttgggttggttccaagtctttgctattgtgaatagtgccgcaataaacatacgtgtgcatgtgtctttatagcagcatgatttatactcatttgggtatatacccagtaatgggatggctgggtcaaatggtatttctagttctagatccctgaggaatcgccacactgacttccacaatggttgaactagtttacagtccaaccaacagtgtaaaagtgttcctatttctccgcatcctctccagcacctgttgtttcctgactttttaatgattgccattctaactggtgtgagatgatatctcatagtggttttgatttgcatttctctgatggccagtgatgatgagcatttcttcatgtgttttttggctgcataaatgtcttcttttgagaagtgtctgttcatgtccttcgcgaaggacaagataccttaaagataagttttcgataaagaaaagccttcattttcctgggggaaatgaagcacttgatgccaaggacattagtagagggctagaaagattgcctgtgtgaaagacatatgctatatccaaataataaaacaaacgagatcctggggctcattcatgtgactttcaataaagtatgtagactgtctaatataagtggcc

SEQ ID NO: 298580 - DNA, 5815 bp, Homo sapiens
aaggaaggtggatgggaataggtttccagctggaagtttatctagtctgacaacctggattaccgcctaggagctattcactccctggtatataagctaccagaaaagaaccgagagatgctggaacttctgataagacacttggtcaatgtgtgtgagcacagcaaagagaatcttatgaccccctccaacatgggagtaatctttgggcccaccctgatgagagctcaggaggacactgtggccgccatgatgaacatcaaattccagaacatagtggtggaaatactaatcgagcactttggcaagatctatttaggtccacctgaggaaagcgctgcaccgccagtgcctccgcctcgggtgacagcaagaaggcacaaaccaatcacgatttcaaagcgcttgctgcgagaaaggacggttttctatacttcttccctggatgaaagcgaagatgaaatccaacatcaaacaccgaatggtactatcaccagcagcatagaaccccccaagccaccacaacaccccaaactacctattcagaggagtggggaaactgatcctgggaggaagtccccaagcaggcctattttggatggcaagttggagccctgcccagaggtggacgtggggaagttggtgtctaggctgcaggatggagggaccaagatcaccccaaaggccaccaatggacccatgccaggctctgggcccaccaagaccccctctttccacataaagagaccagctccccggcccctggcccaccacaaggagggggatgctgacagtttcagcaaagtgcggcctccaggagaaaagccaaccatcatccgccccccagtgaggcccccagatcctccctgccgggcagctactccccaaaagccagaaccaaagccagatattgtggctggcaatgcgggggaaatcacatcatctgtggtggcttccaggaccaggttttttgaaacagcttcccggaaaacaggaagttctcaaggcagacttcctggagatgaaagttgaggctacaggttttaaaagccttggcctcagaggaccctttccaggttctgaaagagtctttcttcttcaaacctttgtgtgcggagtcattttgtgttgaagagcagctccttcctagccttgcactttcagactctctctgggaggccataaaataaggagcatatgtcctagacaggtgtttatatctcctttgtattctgtcttcatcccctcagaaggtctgttttgagttcctataacactgtgaagagctggactccctcaagccagactctgccaaaaccaagatatccacttacctgagttgaagaggggagctcagttttcaactcttccctgaacttcctgcttcctcagagggccattgaactctgagagatttggggctaaagactgatctcaggggtcttaccttgaactgaaggccacttgagttggggccattgcttaccttggttggaagggaatagaaatgtttgctgaacattggagaatctcaacatgtctcctactgaggatatggacactggtgccatgtcagcgctctggtgctgcagtatgttgccaagagcccgtctgctcctgcgaggctatgagtgggatgagtgatgcccccacagcacctccatgtggacttaggaaggtggccttcctgctgttacatgcagccacttaggacaaatctgcaaagcatgttttgcatgtaaaagcctaggtctatttggattattctttctccttttttttgacagcttcctgtcaagcaatcaagaaacaaacaaaagctgaacacatttctttttaaaaaaaggagactgtgtttggtcctgtaggagttctattttggggtcaaatgctagaaaaattgttaaggtggattgaggccaggcagctgtcactgctgcttcatgtttgccttctgcacataaactcttttatctcctgaaaaaagcagttcttaacccagtgtccatggactcagaaactccatgatgcccctgagatggtatgcacaattccatgacaatatgccctttctggggagatagtccataatgttctgctaaatttcaaatgggctcgtgacccaaaaaagtcaagaaccacagcacttgagttaaaatactctttttacaatccatataagcccttgattggaagggcttttcaaaatcatttagtctaacaactgcccagtttccagtcgggggaactgaggcagagcaaggtagtgatcacaccagtacaagatttcaggtcccaggctcctatgcaagttttttttccccattatatcacacttatttagcaagggaccttgtggtttgtggctttagtggccatcatttctgggggttggcttttaccctttttcttgaatatttgccaccaagtgaaaaatgttaggacataaacccttgccaggtccctttcatttgctatctctattattggaaaggacctaaaaattggtgtaatggggcagaaatctgaggaatggacatttctaattcctgtttgttgaagggaagttgctggaaagagcatcagtacttgtttctatgcagatgcctgggccgtagcttgtctgtagcgtctgtataattataatgttgcccagtgtgagggaaagagctttcctacttgcactcttctaccaaggccctgttagtgcactgattatagtactgacagataaagcctagatgagagagatagagagtgagtacatgcacactcatgtgcaaacccactcagagatgcatttggaacagtgctactgaaaggcagtagtcattttcaagactgaattccaaacatggtttattggtgagttaggaacatgtaaggccaagtacactgagagcctttttgaaagtaattgagtggaaacttgatgccattctaaatcaaggcatatccaggtggcccggttgaactcactccactgtacccagtctcaaaggccaggttgctaagaaaccaggagtaaaagagtcaagtgaccatcatttcacctgctgcttgcccccaatagtagtctctgtgaggccttactgacctcacctaggaagtgatttttgagcccttgtttcagggctgtggcctccctgctctatcctgaataaagcagacaggtgtgcagattttggccatgaaagcatggctaatagggccacagtccctttaaagaaacatggtttgactctggttttcttgggggaaaataccacaatcaccgatgcaaacattggaagattattgagagccctagaaagctgctgtgatcccagtatcaagggcctatcttggagagctggggaccagcagtctgcctggaggccagggagcagtggctgagtagctctgcctttgctctggtctataccttaagaatgccaaagaatgaatttcaacgcctgcctttggcactctgacttaaagtgcaaaaagcttctgtggcgaggcatgctatcatggaatgagactggcttgccctaggcttaatggatgggcagtcattttgcagaggctatgggaagagggtgataatagaagagtggcagctataggaaattatcaacataccttggccagcaagttagagaatctggcaatggatgaactgaaagtgatgaactggcagggataacaaagaacctaacatttattaagcacgtatttattaactgctcagtgtttcatattcatgcaagtattctcattttacagagaaagaaattatggcccagggggctaaagtaaacaactcaagggcacatagaaagtaaataaaaggactgtgatttgaatccaggccactcttagcccatgctgttttccctttgccacactgtggtaggtgtttgaacagaggccacattactagagttggcatgactcttgactcttgcctgcctaacaaaatattgaaaggcaaacatttgaaggagggagggggtgcaggttcagtttatatggaaatgcaaactgggctggaagatattcctgagttaggctttctcttcatattcagcttgcacatttggtaatgtttttaagatgatcatctaattttattttgtgaagtgaaggatttgtgttttagttggcagttgttaagtccttggcttgccatttttcaaaaagtaaaaaggtcctcacaggtgtctccatacttcgccaaggttgtagcatgggcagtttcagtttcagcctaagagactggtgacatccacaaatgcagttttagaagcagaaaaggtcttggtgcctctgcagtacttgatgtattggggtcaaatctctacaaatttttctgtggtgatagcaaaatcaagagatggcttacaaaaagaaatattgaatttttatttttgaagtttttgttttttaaaaggttgggggtgttcagccactgagggacaaaacttagcatctaatttcaattatagtgtcatgcagagtatttctaaagtaattggttatcatgggaaagtattctcttttcaagaagttctttgattctgtaataactagaacaaataaagtagtaaaagaagaaatagttctgtgactaggaaaaaattgcttttgagagaacatagatcaattatactacttctaaggtagctgcagataagtggccttgacacattacaagcctggaaaaaaacatcagaaataataaaaaatttcagagagaatcaagatacctttttttttcttttttttttcttttttttattatactctaagttttagggtacatgtgcacattgtgcaggttagttacatatgtatacatgtgccatgctggtgcgctgcacccactaatgtgtcatctagcattaggtatatctcccagtgctatccctcccccctcccccgaccccaccacagtccccagagtgtgatattccccttcctgtgtccatgtgatctcattgttcaattcccacctatgagtgagaatatgcggtgtttggttttttgttcttgcgatagtttactgagaatgatggtttccaatttcatccatgtccctacaaaggatatgaactcatcattttttatggctgcatagtattccatggtgtatatgtgccacattttcttaatccagtctatcattgttggacatttgggttggttccaagtctttgctattgtgaatagtgccgcaataaacatacgtgtgcatgtgtctttatagcagcatgatttatactcatttgggtatatacccagtaatgggatggctgggtcaaatggtatttctagttctagatccctgaggaatcgccacactgacttccacaatggttgaactagtttacagtccaaccaacagtgtaaaagtgttcctatttctccgcatcctctccagcacctgttgtttcctgactttttaatgattgccattctaactggtgtgagatgatatctcatagtggttttgatttgcatttctctgatggccagtgatgatgagcatttcttcatgtgttttttggctgcataaatgtcttcttttgagaagtgtctgttcatgtccttcgcgaaggacaagataccttaaagataagttttcgataaagaaaagccttcattttcctgggggaaatgaagcacttgatgccaaggacattagtagagggctagaaagattgcctgtgtgaaagacatatgctatatccaaataataaaacaaacgagatcctggggctcattcatgtgactttcaataaagtatgtagactgtctaatataagtggcc

SEQ ID NO: 298581 - DNA, 4795 bp, Homo sapiens
aaggaaggtggatgggaataggtttccagctggaagtttatctagtctgacaacctggattaccgcctaggagctattcactccctggtatataagctaccagaaaagaaccgagagatgctggaacttctgataagacacttggtcaatgtgtgtgagcacagcaaagagaatcttatgaccccctccaacatgggagtaatctttgggcccaccctgatgagagctcaggaggacactgtggccgccatgatgaacatcaaattccagaacatagtggtggaaatactaatcgagcactttggcaagatctatttaggtccacctgaggaaagcgctgcaccgccagtgcctccgcctcgggtgacagcaagaaggcacaaaccaatcacgatttcaaagcgcttgctgcgagaaaggacggttttctatacttcttccctggatgaaagcgaagatgaaatccaacatcaaacaccgaatggtactatcaccagcagcatagaaccccccaagccaccacaacaccccaaactacctattcagaggagtggggaaactgatcctgggaggaagtccccaagcaggcctattttggatggcaagttggagccctgcccagaggtggacgtggggaagttggtgtctaggctgcaggatggagggaccaagatcaccccaaaggccaccaatggacccatgccaggctctgggcccaccaagaccccctctttccacataaagagaccagctccccggcccctggcccaccacaaggagggggatgctgacagtttcagcaaagtgcggcctccaggagaaaagccaaccatcatccgccccccagtgaggcccccagatcctccctgccgggcagctactccccaaaagccagaaccaaagccagatattgtggctggcaatgcgggggaaatcacatcatctgtggtggcttccaggaccaggttttttgaaacagcttcccggaaaacaggaagttctcaaggcagacttcctggagatgaaagttgaggctacaggttttaaaagccttggcctcagaggaccctttccaggttctgaaagagtctttcttcttcaaacctttgtgtgcggagtcattttgtgttgaagagcagctccttcctagccttgcactttcagactctctctgggaggccataaaataaggagcatatgtcctagacaggtgtttatatctcctttgtattctgtcttcatcccctcagaaggtctgttttgagttcctataacactgtgaagagctggactccctcaagccagactctgccaaaaccaagatatccacttacctgagttgaagaggggagctcagttttcaactcttccctgaacttcctgcttcctcagagggccattgaactctgagagatttggggctaaagactgatctcaggggtcttaccttgaactgaaggccacttgagttggggccattgcttaccttggttggaagggaatagaaatgtttgctgaacattggagaatctcaacatgtctcctactgaggatatggacactggtgccatgtcagcgctctggtgctgcagtatgttgccaagagcccgtctgctcctgcgaggctatgagtgggatgagtgatgcccccacagcacctccatgtggacttaggaaggtggccttcctgctgttacatgcagccacttaggacaaatctgcaaagcatgttttgcatgtaaaagcctaggtctatttggattattctttctccttttttttgacagcttcctgtcaagcaatcaagaaacaaacaaaagctgaacacatttctttttaaaaaaaggagactgtgtttggtcctgtaggagttctattttggggtcaaatgctagaaaaattgttaaggtggattgaggccaggcagctgtcactgctgcttcatgtttgccttctgcacataaactcttttatctcctgaaaaaagcagttcttaacccagtgtccatggactcagaaactccatgatgcccctgagatggtatgcacaattccatgacaatatgccctttctggggagatagtccataatgttctgctaaatttcaaatgggctcgtgacccaaaaaagtcaagaaccacagcacttgagttaaaatactctttttacaatccatataagcccttgattggaagggcttttcaaaatcatttagtctaacaactgcccagtttccagtcgggggaactgaggcagagcaaggtagtgatcacaccagtacaagatttcaggtcccaggctcctatgcaagttttttttccccattatatcacacttatttagcaagggaccttgtggtttgtggctttagtggccatcatttctgggggttggcttttaccctttttcttgaatatttgccaccaagtgaaaaatgttaggacataaacccttgccaggtccctttcatttgctatctctattattggaaaggacctaaaaattggtgtaatggggcagaaatctgaggaatggacatttctaattcctgtttgttgaagggaagttgctggaaagagcatcagtacttgtttctatgcagatgcctgggccgtagcttgtctgtagcgtctgtataattataatgttgcccagtgtgagggaaagagctttcctacttgcactcttctaccaaggccctgttagtgcactgattatagtactgacagataaagcctagatgagagagatagagagtgagtacatgcacactcatgtgcaaacccactcagagatgcatttggaacagtgctactgaaaggcagtagtcattttcaagactgaattccaaacatggtttattggtgagttaggaacatgtaaggccaagtacactgagagcctttttgaaagtaattgagtggaaacttgatgccattctaaatcaaggcatatccaggtggcccggttgaactcactccactgtacccagtctcaaaggccaggttgctaagaaaccaggagtaaaagagtcaagtgaccatcatttcacctgctgcttgcccccaatagtagtctctgtgaggccttactgacctcacctaggaagtgatttttgagcccttgtttcagggctgtggcctccctgctctatcctgaataaagcagacaggtgtgcagattttggccatgaaagcatggctaatagggccacagtccctttaaagaaacatggtttgactctggttttcttgggggaaaataccacaatcaccgatgcaaacattggaagattattgagagccctagaaagctgctgtgatcccagtagaaaatatgtcccagaaatgtcatgagattgctgtgtgttgcctgggacacagatcaagggcctatcttggagagctggggaccagcagtctgcctggaggccagggagcagtggctgagtagctctgcctttgctctggtctataccttaagaatgccaaagaatgaatttcaacgcctgcctttggcactctgacttaaagtgcaaaaagcttctgtggcgaggcatgctatcatggaatgagactggcttgccctaggcttaatggatgggcagtcattttgcagaggctatgggaagagggtgataatagaagagtggcagctataggaaattatcaacataccttggccagcaagttagagaatctggcaatggatgaactgaaagtgatgaactggcagggataacaaagaacctaacatttattaagcacgtatttattaactgctcagtgtttcatattcatgcaagtattctcattttacagagaaagaaattatggcccagggggctaaagtaaacaactcaagggcacatagaaagtaaataaaaggactgtgatttgaatccaggccactcttagcccatgctgttttccctttgccacactgtggtaggtgtttgaacagaggccacattactagagttggcatgactcttgactcttgcctgcctaacaaaatattgaaaggcaaacatttgaaggagggagggggtgcaggttcagtttatatggaaatgcaaactgggctggaagatattcctgagttaggctttctcttcatattcagcttgcacatttggtaatgtttttaagatgatcatctaattttattttgtgaagtgaaggatttgtgttttagttggcagttgttaagtccttggcttgccatttttcaaaaagtaaaaaggtcctcacaggtgtctccatacttcgccaaggttgtagcatgggcagtttcagtttcagcctaagagactggtgacatccacaaatgcagttttagaagcagaaaaggtcttggtgcctctgcagtacttgatgtattggggtcaaatctctacaaatttttctgtggtgatagcaaaatcaagagatggcttacaaaaagaaatattgaatttttatttttgaagtttttgttttttaaaaggttgggggtgttcagccactgagggacaaaacttagcatctaatttcaattatagtgtcatgcagagtatttctaaagtaattggttatcatgggaaagtattctcttttcaagaagttctttgattctgtaataactagaacaaataaagtagtaaaagaagaaatagttctgtgactaggaaaaaattgcttttgagagaacatagatcaattatactacttctaaggtagctgcagataagtggccttgacacattacaagcctggaaaaaaacatcagaaataataaaaaatttcagagaga

SEQ ID NO: 298582 - DNA, 1277 bp, Homo sapiens
gcgcatgtgcaaggtgtccaaactgacaatgctggagagatagcgagtgtggattgagagaaagggagagagggagggagagagagtgaaagaagaaaatacagagagtgagtgtgtggaagagagagagaaacaggagagaaacaggagggggggagagagagagagagagagagagagagagagagagagagagagagagagacaggagagagagggagggagcgagagggagagcaaaagaaggaaaggatccaagaaaaaaaagccccaaccacacaccagaggctgcaggactgggcacagcatgagatccaaaggcagggcaaggaaactggccacaaataatgagtgtgtatatggcaactaccctgaaatacctttggaagaaatgccagatgcagatggagtagccagcactccctccctcaatattcaagagccatgctctcctgccacatccagtgaagcattcactccaaaggagggttctccttacaaagcccccatctacatccctgatgatatccccattcctgctgagtttgaacttcgagagtcaaatatgcctggggcaggactaggaatatggaccaaaaggaagatcgaagtaggtgaaaagtttgggccttatgtgggagagcagaggtcaaacctgaaagaccccagttatggatgggaggtacatcttccaaggtctcggagggtaagcgttcactcttggttgtatttggggaagagaagctcagacgtaggaatagccttctctcaggctgatgtctacatgcctggactgcagtgtgccttcctctcgtagctcggaaggacgcggaacctgggtggctggagccgcccgctgcgctttatttcggagcgcaatgccatctaccggcgtcctgccgtacctgcaagtatccagaccttgaaagtcgctccgcctccccccacccgaagccaatataggggaaaaaactcggaggccctttccacgaaatcctaatttagccaggacctgccaatgattccagacgaccttttgttttcctaccgacgtttcctcgttttgaaagcagttttgtaaagggcaaggaggtgggggccgcagggttggggcgctgagctcccagaccccctgatcaggcgcactgtctgaagcaatcggttccccagattacttgatatttaatacacaatgcatcataaaacaaatccctcatcctgacaggaagaaaatagaacagctcatagctcgagccagtccaatttatggctaaatt

SEQ ID NO: 298583 - DNA, 7194 bp, Homo sapiens
tttccaggcactctcattcatagagccagcgggcgcgggcgggacgggcgccccgcggccggacccagccagggcaccacgctgcccggccctgcgccgccaggcacttctttccggggctcctagggacgccagaaggaagtcaacctctgctgcttctccttggcctgcgttggaccttcctttttttgttgtttttttttgtttttcccctttcttccttttgaattaactggcttcttggctggatgttttcaacttctttcctggctgcgaactttttccccaattgttttccttttacaacagggggagaaagtgctctgtggtccgaggcgagccgtgaagttgcgtgtgcgtggcagtgtgcgtggcaggatgtgcgtgcgtgtgtaacccgagccgcccgatctgtttcgatctgcgccgcggagccctccctcaaggcccgctccacctgcttggcggttacgcggcgctcgtgggtgttcgtgccttcggagcagctaaccggcgggtgctgggcgacggtggaggagtatcgttctcgctgcttgcccgagtcagggctgagtcaccccagctgatgtagacagtggctgccttccgaagagtgcgtgtttgcatgtgtgtgactctgcggctgctcaactcccaacaaaccagaggaccagccacaaacttaaccaacatccccaaacccgagttcacagatgtgggagagctgtagaaccctgagtgtcatcgactgggccttcttatgattgttgttttaagattagctgaagatctctgaaacgctgaattttctgcactgagcgtttgacagaattcattgagagaacagagaacatgacaagtacttctagctcagcactgctccaactactgaagctgattttcaaggctacttaaaaaaatctgcagcgtacattaatggatttctgttgtgtttaaattctccacagattgtattgtaaatattttatgaagtagagcatatgtatatatttatatatacgtgcacatacattagtagcactacctttggaagtctcagctcttgcttttcgggactgaagccagttttgcatgataaaagtggccttgttacgggagataattgtgttctgttgggactttagacaaaactcacctgcaaaaaactgacaggcattaactactggaacttccaaataatgtgtttgctgatcgttttactcttcgcataaatattttaggaagtgtatgagaattttgccttcaggaacttttctaacagccaaagacagaacttaacctctgcaagcaagattcgtggaagatagtctccactttttaatgcactaagcaatcggttgctaggagcccatcctgggtcagaggccgatccgcagaaccagaacgttttcccctcctggactgttagtaacttagtctccctcctcccctaaccacccccgcccccccccaccccccgcagtaataaaggcccctgaacgtgtatgttggtctcccgggagctgcttgctgaagatccgcgcccctgtcgccgtctggtaggagctgtttgcagggtcctaactcaatcggcttgttgtgatgcgtatccccgtagatgccagcacgagccgccgcttcacgccgccttccaccgcgctgagcccaggcaagatgagcgaggcgttgccgctgggcgccccggacgccggcgctgccctggccggcaagctgaggagcggcgaccgcagcatggtggaggtgctggccgaccacccgggcgagctggtgcgcaccgacagccccaacttcctctgctccgtgctgcctacgcactggcgctgcaacaagaccctgcccatcgctttcaaggtggtggccctaggggatgttccagatggcactctggtcactgtgatggctggcaatgatgaaaactactcggctgagctgagaaatgctaccgcagccatgaagaaccaggttgcaagatttaatgacctcaggtttgtcggtcgaagtggaagagggaaaagcttcactctgaccatcactgtcttcacaaacccaccgcaagtcgccacctaccacagagccatcaaaatcacagtggatgggccccgagaacctcgaaataatgagtgtgtatatggcaactaccctgaaatacctttggaagaaatgccagatgcagatggagtagccagcactccctccctcaatattcaagagccatgctctcctgccacatccagtgaagcattcactccaaaggagggttctccttacaaagcccccatctacatccctgatgatatccccattcctgctgagtttgaacttcgagagtcaaatatgcctggggcaggactaggaatatggaccaaaaggaagatcgaagtaggtgaaaagtttgggccttatgtgggagagcagaggtcaaacctgaaagaccccagttatggatgggagatcttagacgaattttacaatgtgaagttctgcatagatgccagtcaaccagatgttggaagctggctcaagtacattagattcgctggctgttatgatcagcacaaccttgttgcatgccagataaatgatcagatattctatagagtagttgcagacattgcgccgggagaggagcttctgctgttcatgaagagcgaagactatccccatgaaactatggcgccggatatccacgaagaacggcaatatcgctgcgaagactgtgaccagctctttgaatctaaggctgaactagcagatcaccaaaagtttccatgcagtactcctcactcagcattttcaatggttgaagaggactttcagcaaaaactcgaaagcgagaatgatctccaagagatacacacgatccaggagtgtaaggaatgtgaccaagtttttcctgatttgcaaagcctggagaaacacatgctgtcacatactgaagagagggaatacaagtgtgatcagtgtcccaaggcatttaactggaagtccaatttaattcgccaccagatgtcacatgacagtggaaagcactatgaatgtgaaaactgtgccaaggttttcacggaccctagcaaccttcagcggcacattcgctctcagcatgtcggtgcccgggcccatgcatgcccggagtgtggcaaaacgtttgccacttcgtcgggcctcaaacaacacaagcacatccacagcagtgtgaagccctttatctgtgaggtctgccataaatcctatactcagttttcaaacctttgccgtcataagcgcatgcatgctgattgcagaacccaaatcaagtgcaaagactgtggacaaatgttcagcactacgtcttccttaaataaacacaggaggttttgtgagggcaagaaccattttgcggcaggtggattttttggccaaggcatttcacttcctggaaccccagctatggataaaacgtccatggttaatatgagtcatgccaacccgggccttgctgactattttggcgccaataggcatcctgctggtcttacctttccaacagctcctggattttcttttagcttccctggtctgtttccttccggcttgtaccacaggcctcctttgatacctgctagttctcctgttaaaggactatcaagtactgaacagacaaacaaaagtcaaagtcccctcatgacacatcctcagatactgccagctacacaggatattttgaaggcactatctaaacacccatctgtaggggacaataagccagtggagctccagcccgagaggtcctctgaagagaggccctttgagaaaatcagtgaccagtcagagagtagtgaccttgatgatgtcagtacaccaagtggcagtgacctggaaacaacctcgggctctgatctggaaagtgacattgaaagtgataaagagaaatttaaagaaaatggtaaaatgttcaaagacaaagtaagccctcttcagaatctggcttcaataaataataagaaagaatacagcaatcattccattttctcaccatctttagaggagcagactgcggtgtcaggagctgtgaatgattctataaaggctattgcttctattgctgaaaaatactttggttcaacaggactggtggggctgcaagacaaaaaagttggagctttaccttacccttccatgtttcccctcccattttttccagcattctctcaatcaatgtacccatttcctgatagagacttgagatcgttacctttgaaaatggaaccccaatcaccaggtgaagtaaagaaactgcagaagggcagctctgagtccccctttgatctcaccactaagcgaaaggatgagaagcccttgactccagtcccctccaagcctccagtgacacctgccacaagccaagaccagcccctggatctaagtatgggcagtaggagtagagccagtgggacaaagctgactgagcctcgaaaaaaccacgtgtttgggggaaaaaaaggaagcaacgtcgaatcaagacctgcttcagatggttccttgcagcatgcaagacccactcctttctttatggaccctatttacagagtagagaaaagaaaactaactgacccacttgaagctttaaaagagaaatacttgaggccttctccaggattcttgtttcacccacaaatgtcagctattgaaaacatggcagaaaagctagagagcttcagtgccctgaaacctgaggccagtgagctcttacagtcagtgccctctatgttcaacttcagggcgcctcccaatgccctgccagagaaccttctgcggaagggaaaggagcgctatacctgcagatactgtggcaagatttttccaaggtctgcaaacctaacacggcacttgagaacccacacaggagagcagccttacagatgcaaatactgtgacagatcatttagcatatcttctaacttgcaaaggcatgttcgcaacatccacaataaagagaagccatttaagtgtcacttatgtgataggtgttttggtcaacaaaccaatttagacagacacctaaagaaacatgagaatgggaacatgtccggtacagcaacatcgtcgcctcattctgaactggaaagtacaggtgcgattctggatgacaaagaagatgcttacttcacagaaattcgaaatttcattgggaacagcaaccatggcagccaatctcccaggaatgtggaggagagaatgaatggcagtcattttaaagatgaaaaggctttggtgaccagtcaaaattcagacttgctggatgatgaagaagttgaagatgaggtgttgttagatgaggaggatgaagacaatgatattactggaaaaacaggaaaggaaccagtgacaagtaatttacatgaaggaaaccctgaggatgactatgaagaaaccagtgccctggagatgagttgcaagacatccccagtgaggtataaagaggaagaatataaaagtggactttctgctctagatcatataaggcacttcacagatagcctcaaaatgaggaaaatggaagataatcaatattctgaagctgagctgtcttcttttagtacttcccatgtgccagaggaacttaagcagccgttacacagaaagtccaaatcgcaggcatatgctatgatgctgtcactgtctgacaaggagtccctccattctacatcccacagttcttccaacgtgtggcacagtatggccagggctgcggcggaatccagtgctatccagtccataagccacgtatgacgttatcaaggttgaccagagtgggaccaagtccaacagtagcatggctctttcatataggactatttacaagactgctgagcagaatgccttataaacctgcagggtcactcatctaaagtctagtgaccttaaactgaatgatttaaaaaagaaaagaaagaaaaaagaaactatttattctcgatattttgttttgcacagcaaaggcagctgctgacttctggaagatcaatcaatgcgacttaaagtgattcagtgaaaacaaaaaacttggtgggctgaaggcatcttccagtttaccccaccttagggtatgggtgggtgagaagggcagttgagatggcagcattgatatgaatgaacactccatagaaactgaattctcttttgtacaagatcacctgacatgattgggaacagttgcttttaattacagatttaatttttttcttcgttaaagttttatgtaatttaaccctttgaagacagaagtagttggatgaaatgcacagtcaattattatagaaactgataacagggagtacttgttcccccttttgccttcttaagtacattgtttaaaactagggaaaaagggtatgtgtatattgtaaactatggatgttaacactcaaagaggttaagtcagtgaagtaacctattcatcaccagtaccgctgtaccactaataaattgtttgccaaatccttgtaataacatcttaattttagacaatcatgtcactgtttttaatgtttatttttttgtgtgtgttgcgtgtatcatgtatttatttgttggcaaactattgtttgttgattaaaatagcactgttccagtcagccactactttatgacgtctgaggcacacccctttccgaatttcaaggaccaaggtgacccgacctgtgtatgagagtgccaaatggtgtttggcttttcttaacattcctttttgtttgtttgttttgttttccttcttaatgaactaaatacgaatagatgcaacttagtttttgtaatactgaaatcgattcaattgtataaacgattataatttctttcatggaagcatgattcttctgattaaaaactgtactccatattttatgctggttgtctgcaagcttgtgcgatgttatgttcatgttaatcctatttgtaaaatgaagtgttcccaaccttatgttaaaagagagaagtaaataacagactgtattcagttattttgccctttattgaggaaccagatttgttttctttttgtttgtaatctcattttgaaataatcagcaagttgaggtactttcttcaaatgctttgtacaatataaactgttatgcctttcagtgcattactatgggaggagcaactaaaaaataaagacttacaaaaaggagt

SEQ ID NO: 298584 - DNA, 5949 bp, Homo sapiens
  misc_feature (994)..(994): n is a, c, g, or t
tccttttgctgttggttttttgaaagggcctttctctaaagtctacctaaacggtttttttttaagctatctttggaggtttgacagcttttaaaaacacaggagtgtgttatatgaaatgactgaagatgtgtcgttactttattttattcgagatttccgacacgattaagacatttgggagacaaatgcagttctgctagcaaatcaaaagtgaataattcacccagggggcaaacgtttctggagaaagctaagcttttgtcttggggcaagaatattgagaggaagaatgttaatatgatggtgaaatctttgaataatcgtataacagattagtaaaaagacattctttggaaatgaacctttttaaaaattaattttgctgttgacagtggcaatgctaataatgttaacacggaataaaattacacctacaatttttatgtgcagtgtatgtaatacttaactccctgcccctgtgaaagggtatgcttgaaagctagggggatggatgcttcttgactttgaaattaacaagttttccacgtctctctgcaaatatgaaatggaattagtattgcatttcactggctttattctatgtcctttattaaatatttctttggtgtgtcaggagaactgccttttcttttttcttttttttcttttttttcttttttttgccagtcaaggaaacaaacaacaaaagatcagccagaaaccaaacagactgaacaaaccaacaaaacccagcaacaaactccaacctttttactatttaaaaatgtgcattgctattatttatgtaccttctcaacatctgggatggggggaaatctcaagttgccatttgagttactcagcactgagagttgaagaaacatcttaaagtttgtaattttattgataacaaatttttagaatttgtcctcttaatagaaaggatgtttaagtgtacacttctgtcgttgttagtgtgaagaggcatccntgaaaaagaagagtttgatttctgtgtgtgtgtgtgtgtgtgtgtgtgtgtgtgtgtgtttaataatatccctatcttatgttcgatttttcttttttaaattttgggacgacttattgcccttcaatttcctcatggccaaaggtttattcatagggcttcttgactaaagcccttggagcactgggtttttcttgaagtatatgatcttagacgaattttacaatgtgaagttctgcatagatgccagtcaaccagatgttggaagctggctcaagtacattagattcgctggctgttatgatcagcacaaccttgttgcatgccagataaatgatcagatattctatagagtagttgcagacattgcgccgggagaggagcttctgctgttcatgaagagcgaagactatccccatgaaactatggcgccggatatccacgaagaacggcaatatcgctgcgaagactgtgaccagctctttgaatctaaggctgaactagcagatcaccaaaagtttccatgcagtactcctcactcagcattttcaatggttgaagaggactttcagcaaaaactcgaaagcgagaatgatctccaagagatacacacgatccaggagtgtaaggaatgtgaccaagtttttcctgatttgcaaagcctggagaaacacatgctgtcacatactgaagagagggaatacaagtgtgatcagtgtcccaaggcatttaactggaagtccaatttaattcgccaccagatgtcacatgacagtggaaagcactatgaatgtgaaaactgtgccaaggttttcacggaccctagcaaccttcagcggcacattcgctctcagcatgtcggtgcccgggcccatgcatgcccggagtgtggcaaaacgtttgccacttcgtcgggcctcaaacaacacaagcacatccacagcagtgtgaagccctttatctgtgaggtctgccataaatcctatactcagttttcaaacctttgccgtcataagcgcatgcatgctgattgcagaacccaaatcaagtgcaaagactgtggacaaatgttcagcactacgtcttccttaaataaacacaggaggttttgtgagggcaagaaccattttgcggcaggtggattttttggccaaggcatttcacttcctggaaccccagctatggataaaacgtccatggttaatatgagtcatgccaacccgggccttgctgactattttggcgccaataggcatcctgctggtcttacctttccaacagctcctggattttcttttagcttccctggtctgtttccttccggcttgtaccacaggcctcctttgatacctgctagttctcctgttaaaggactatcaagtactgaacagacaaacaaaagtcaaagtcccctcatgacacatcctcagatactgccagctacacaggatattttgaaggcactatctaaacacccatctgtaggggacaataagccagtggagctccagcccgagaggtcctctgaagagaggccctttgagaaaatcagtgaccagtcagagagtagtgaccttgatgatgtcagtacaccaagtggcagtgacctggaaacaacctcgggctctgatctggaaagtgacattgaaagtgataaagagaaatttaaagaaaatggtaaaatgttcaaagacaaagtaagccctcttcagaatctggcttcaataaataataagaaagaatacagcaatcattccattttctcaccatctttagaggagcagactgcggtgtcaggagctgtgaatgattctataaaggctattgcttctattgctgaaaaatactttggttcaacaggactggtggggctgcaagacaaaaaagttggagctttaccttacccttccatgtttcccctcccattttttccagcattctctcaatcaatgtacccatttcctgatagagacttgagatcgttacctttgaaaatggaaccccaatcaccaggtgaagtaaagaaactgcagaagggcagctctgagtccccctttgatctcaccactaagcgaaaggatgagaagcccttgactccagtcccctccaagcctccagtgacacctgccacaagccaagaccagcccctggatctaagtatgggcagtaggagtagagccagtgggacaaagctgactgagcctcgaaaaaaccacgtgtttgggggaaaaaaaggaagcaacgtcgaatcaagacctgcttcagatggttccttgcagcatgcaagacccactcctttctttatggaccctatttacagagtagagaaaagaaaactaactgacccacttgaagctttaaaagagaaatacttgaggccttctccaggattcttgtttcacccacaattccaactgcctgatcagagaacttggatgtcagctattgaaaacatggcagaaaagctagagagcttcagtgccctgaaacctgaggccagtgagctcttacagtcagtgccctctatgttcaacttcagggcgcctcccaatgccctgccagagaaccttctgcggaagggaaaggagcgctatacctgcagatactgtggcaagatttttccaaggtctgcaaacctaacacggcacttgagaacccacacaggagagcagccttacagatgcaaatactgtgacagatcatttagcatatcttctaacttgcaaaggcatgttcgcaacatccacaataaagagaagccatttaagtgtcacttatgtgataggtgttttggtcaacaaaccaatttagacagacacctaaagaaacatgagaatgggaacatgtccggtacagcaacatcgtcgcctcattctgaactggaaagtacaggtgcgattctggatgacaaagaagatgcttacttcacagaaattcgaaatttcattgggaacagcaaccatggcagccaatctcccaggaatgtggaggagagaatgaatggcagtcattttaaagatgaaaaggctttggtgaccagtcaaaattcagacttgctggatgatgaagaagttgaagatgaggtgttgttagatgaggaggatgaagacaatgatattactggaaaaacaggaaaggaaccagtgacaagtaatttacatgaaggaaaccctgaggatgactatgaagaaaccagtgccctggagatgagttgcaagacatccccagtgaggtataaagaggaagaatataaaagtggactttctgctctagatcatataaggcacttcacagatagcctcaaaatgaggaaaatggaagataatcaatattctgaagctgagctgtcttcttttagtacttcccatgtgccagaggaacttaagcagccgttacacagaaagtccaaatcgcaggcatatgctatgatgctgtcactgtctgacaaggagtccctccattctacatcccacagttcttccaacgtgtggcacagtatggccagggctgcggcggaatccagtgctatccagtccataagccacgtatgacgttatcaaggttgaccagagtgggaccaagtccaacagtagcatggctctttcatataggactatttacaagactgctgagcagaatgccttataaacctgcagggtcactcatctaaagtctagtgaccttaaactgaatgatttaaaaaagaaaagaaagaaaaaagaaactatttattctcgatattttgttttgcacagcaaaggcagctgctgacttctggaagatcaatcaatgcgacttaaagtgattcagtgaaaacaaaaaacttggtgggctgaaggcatcttccagtttaccccaccttagggtatgggtgggtgagaagggcagttgagatggcagcattgatatgaatgaacactccatagaaactgaattctcttttgtacaagatcacctgacatgattgggaacagttgcttttaattacagatttaatttttttcttcgttaaagttttatgtaatttaaccctttgaagacagaagtagttggatgaaatgcacagtcaattattatagaaactgataacagggagtacttgttcccccttttgccttcttaagtacattgtttaaaactagggaaaaagggtatgtgtatattgtaaactatggatgttaacactcaaagaggttaagtcagtgaagtaacctattcatcaccagtaccgctgtaccactaataaattgtttgccaaatccttgtaataacatcttaattttagacaatcatgtcactgtttttaatgtttatttttttgtgtgtgttgcgtgtatcatgtatttatttgttggcaaactattgtttgttgattaaaatagcactgttccagtcagccactactttatgacgtctgaggcacacccctttccgaatttcaaggaccaaggtgacccgacctgtgtatgagagtgccaaatggtgtttggcttttcttaacattcctttttgtttgtttgttttgttttccttcttaatgaactaaatacgaatagatgcaacttagtttttgtaatactgaaatcgattcaattgtataaacgattataatttctttcatggaagcatgattcttctgattaaaaactgtactccatattttatgctggttgtctgcaagcttgtgcgatgttatgttcatgttaatcctatttgtaaaatgaagtgttcccaaccttatgttaaaagagagaagtaaataacagactgtattcagttattttgccctttattgaggaaccagatttgttttctttttgtttgtaatctcattttgaaataatcagcaagttgaggtactttcttcaaatgctttgtacaatataaactgttatgcctttcagtgcattactatgggaggagcaactaaaaaataaagacttacaaaaaggagt

SEQ ID NO: 298585 - DNA, 5704 bp, Homo sapiens
tccttttgctgttggttttttgaaagggcctttctctaaagtctacctaaacggtttttttttaagctatctttggaggtttgacagcttttaaaaacacaggagtgtgttatatgaaatgactgaagatgtgtcgttactttattttattcgagatttccgacacgattaagacatttgggagacaaatgcagttctgctagcaaatcaaaagtgaataattcacccagggggcaaacgtttctggagaaagctaagcttttgtcttggggcaagaatattgagaggaagaatgttaatatgatggtgaaatctttgaataatcgtataacagattagtaaaaagacattctttggaaatgaacctttttaaaaattaattttgctgttgacagtggcaatgctaataatgttaacacggaataaaattacacctacaatttttatgtgcagtgtatgtaatacttaactccctgcccctgtgaaagggtatgcttgaaagctagggggatggatgcttcttgactttgaaattaacaagttttccacgtctctctgcaaatatgaaatggaattagtattgcatttcactggctttattctatgtcctttattaaatatttctttggtgtgtcaggagaactgccttttcttttttcttttttttcttttttttcttttttttgccagtcaaggaaacaaacaacaaaagatcagccagaaaccaaacagactgaacaaaccaacaaaacccagcaacaaactccaacctttttactatttaaaaatgtgcattgctattatttatgtaccttctcaacatctgggatggggggaaatctcaagttgccatttgagttactcagcactgagagttgaagaaacatcttaaagtttattcatagggcttcttgactaaagcccttggagcactgggtttttcttgaagtatatgatcttagacgaattttacaatgtgaagttctgcatagatgccagtcaaccagatgttggaagctggctcaagtacattagattcgctggctgttatgatcagcacaaccttgttgcatgccagataaatgatcagatattctatagagtagttgcagacattgcgccgggagaggagcttctgctgttcatgaagagcgaagactatccccatgaaactatggcgccggatatccacgaagaacggcaatatcgctgcgaagactgtgaccagctctttgaatctaaggctgaactagcagatcaccaaaagtttccatgcagtactcctcactcagcattttcaatggttgaagaggactttcagcaaaaactcgaaagcgagaatgatctccaagagatacacacgatccaggagtgtaaggaatgtgaccaagtttttcctgatttgcaaagcctggagaaacacatgctgtcacatactgaagagagggaatacaagtgtgatcagtgtcccaaggcatttaactggaagtccaatttaattcgccaccagatgtcacatgacagtggaaagcactatgaatgtgaaaactgtgccaaggttttcacggaccctagcaaccttcagcggcacattcgctctcagcatgtcggtgcccgggcccatgcatgcccggagtgtggcaaaacgtttgccacttcgtcgggcctcaaacaacacaagcacatccacagcagtgtgaagccctttatctgtgaggtctgccataaatcctatactcagttttcaaacctttgccgtcataagcgcatgcatgctgattgcagaacccaaatcaagtgcaaagactgtggacaaatgttcagcactacgtcttccttaaataaacacaggaggttttgtgagggcaagaaccattttgcggcaggtggattttttggccaaggcatttcacttcctggaaccccagctatggataaaacgtccatggttaatatgagtcatgccaacccgggccttgctgactattttggcgccaataggcatcctgctggtcttacctttccaacagctcctggattttcttttagcttccctggtctgtttccttccggcttgtaccacaggcctcctttgatacctgctagttctcctgttaaaggactatcaagtactgaacagacaaacaaaagtcaaagtcccctcatgacacatcctcagatactgccagctacacaggatattttgaaggcactatctaaacacccatctgtaggggacaataagccagtggagctccagcccgagaggtcctctgaagagaggccctttgagaaaatcagtgaccagtcagagagtagtgaccttgatgatgtcagtacaccaagtggcagtgacctggaaacaacctcgggctctgatctggaaagtgacattgaaagtgataaagagaaatttaaagaaaatggtaaaatgttcaaagacaaagtaagccctcttcagaatctggcttcaataaataataagaaagaatacagcaatcattccattttctcaccatctttagaggagcagactgcggtgtcaggagctgtgaatgattctataaaggctattgcttctattgctgaaaaatactttggttcaacaggactggtggggctgcaagacaaaaaagttggagctttaccttacccttccatgtttcccctcccattttttccagcattctctcaatcaatgtacccatttcctgatagagacttgagatcgttacctttgaaaatggaaccccaatcaccaggtgaagtaaagaaactgcagaagggcagctctgagtccccctttgatctcaccactaagcgaaaggatgagaagcccttgactccagtcccctccaagcctccagtgacacctgccacaagccaagaccagcccctggatctaagtatgggcagtaggagtagagccagtgggacaaagctgactgagcctcgaaaaaaccacgtgtttgggggaaaaaaaggaagcaacgtcgaatcaagacctgcttcagatggttccttgcagcatgcaagacccactcctttctttatggaccctatttacagagtagagaaaagaaaactaactgacccacttgaagctttaaaagagaaatacttgaggccttctccaggattcttgtttcacccacaattccaactgcctgatcagagaacttggatgtcagctattgaaaacatggcagaaaagctagagagcttcagtgccctgaaacctgaggccagtgagctcttacagtcagtgccctctatgttcaacttcagggcgcctcccaatgccctgccagagaaccttctgcggaagggaaaggagcgctatacctgcagatactgtggcaagatttttccaaggtctgcaaacctaacacggcacttgagaacccacacaggagagcagccttacagatgcaaatactgtgacagatcatttagcatatcttctaacttgcaaaggcatgttcgcaacatccacaataaagagaagccatttaagtgtcacttatgtgataggtgttttggtcaacaaaccaatttagacagacacctaaagaaacatgagaatgggaacatgtccggtacagcaacatcgtcgcctcattctgaactggaaagtacaggtgcgattctggatgacaaagaagatgcttacttcacagaaattcgaaatttcattgggaacagcaaccatggcagccaatctcccaggaatgtggaggagagaatgaatggcagtcattttaaagatgaaaaggctttggtgaccagtcaaaattcagacttgctggatgatgaagaagttgaagatgaggtgttgttagatgaggaggatgaagacaatgatattactggaaaaacaggaaaggaaccagtgacaagtaatttacatgaaggaaaccctgaggatgactatgaagaaaccagtgccctggagatgagttgcaagacatccccagtgaggtataaagaggaagaatataaaagtggactttctgctctagatcatataaggcacttcacagatagcctcaaaatgaggaaaatggaagataatcaatattctgaagctgagctgtcttcttttagtacttcccatgtgccagaggaacttaagcagccgttacacagaaagtccaaatcgcaggcatatgctatgatgctgtcactgtctgacaaggagtccctccattctacatcccacagttcttccaacgtgtggcacagtatggccagggctgcggcggaatccagtgctatccagtccataagccacgtatgacgttatcaaggttgaccagagtgggaccaagtccaacagtagcatggctctttcatataggactatttacaagactgctgagcagaatgccttataaacctgcagggtcactcatctaaagtctagtgaccttaaactgaatgatttaaaaaagaaaagaaagaaaaaagaaactatttattctcgatattttgttttgcacagcaaaggcagctgctgacttctggaagatcaatcaatgcgacttaaagtgattcagtgaaaacaaaaaacttggtgggctgaaggcatcttccagtttaccccaccttagggtatgggtgggtgagaagggcagttgagatggcagcattgatatgaatgaacactccatagaaactgaattctcttttgtacaagatcacctgacatgattgggaacagttgcttttaattacagatttaatttttttcttcgttaaagttttatgtaatttaaccctttgaagacagaagtagttggatgaaatgcacagtcaattattatagaaactgataacagggagtacttgttcccccttttgccttcttaagtacattgtttaaaactagggaaaaagggtatgtgtatattgtaaactatggatgttaacactcaaagaggttaagtcagtgaagtaacctattcatcaccagtaccgctgtaccactaataaattgtttgccaaatccttgtaataacatcttaattttagacaatcatgtcactgtttttaatgtttatttttttgtgtgtgttgcgtgtatcatgtatttatttgttggcaaactattgtttgttgattaaaatagcactgttccagtcagccactactttatgacgtctgaggcacacccctttccgaatttcaaggaccaaggtgacccgacctgtgtatgagagtgccaaatggtgtttggcttttcttaacattcctttttgtttgtttgttttgttttccttcttaatgaactaaatacgaatagatgcaacttagtttttgtaatactgaaatcgattcaattgtataaacgattataatttctttcatggaagcatgattcttctgattaaaaactgtactccatattttatgctggttgtctgcaagcttgtgcgatgttatgttcatgttaatcctatttgtaaaatgaagtgttcccaaccttatgttaaaagagagaagtaaataacagactgtattcagttattttgccctttattgaggaaccagatttgttttctttttgtttgtaatctcattttgaaataatcagcaagttgaggtactttcttcaaatgctttgtacaatataaactgttatgcctttcagtgcattactatgggaggagcaactaaaaaataaagacttacaaaaaggagt

SEQ ID NO: 298586 - DNA, 4977 bp, Homo sapiens
  misc_feature (994)..(994): n is a, c, g, or t
tccttttgctgttggttttttgaaagggcctttctctaaagtctacctaaacggtttttttttaagctatctttggaggtttgacagcttttaaaaacacaggagtgtgttatatgaaatgactgaagatgtgtcgttactttattttattcgagatttccgacacgattaagacatttgggagacaaatgcagttctgctagcaaatcaaaagtgaataattcacccagggggcaaacgtttctggagaaagctaagcttttgtcttggggcaagaatattgagaggaagaatgttaatatgatggtgaaatctttgaataatcgtataacagattagtaaaaagacattctttggaaatgaacctttttaaaaattaattttgctgttgacagtggcaatgctaataatgttaacacggaataaaattacacctacaatttttatgtgcagtgtatgtaatacttaactccctgcccctgtgaaagggtatgcttgaaagctagggggatggatgcttcttgactttgaaattaacaagttttccacgtctctctgcaaatatgaaatggaattagtattgcatttcactggctttattctatgtcctttattaaatatttctttggtgtgtcaggagaactgccttttcttttttcttttttttcttttttttcttttttttgccagtcaaggaaacaaacaacaaaagatcagccagaaaccaaacagactgaacaaaccaacaaaacccagcaacaaactccaacctttttactatttaaaaatgtgcattgctattatttatgtaccttctcaacatctgggatggggggaaatctcaagttgccatttgagttactcagcactgagagttgaagaaacatcttaaagtttgtaattttattgataacaaatttttagaatttgtcctcttaatagaaaggatgtttaagtgtacacttctgtcgttgttagtgtgaagaggcatccntgaaaaagaagagtttgatttctgtgtgtgtgtgtgtgtgtgtgtgtgtgtgtgtgtgtttaataatatccctatcttatgttcgatttttcttttttaaattttgggacgacttattgcccttcaatttcctcatggccaaaggtttattcatagggcttcttgactaaagcccttggagcactgggtttttcttgaagtatatgatcttagacgaattttacaatgtgaagttctgcatagatgccagtcaaccagatgttggaagctggctcaagtacattagattcgctggctgttatgatcagcacaaccttgttgcatgccagataaatgatcagatattctatagagtagttgcagacattgcgccgggagaggagcttctgctgttcatgaagagcgaagactatccccatgaaactatggcgccggatatccacgaagaacggcaatatcgctgcgaagactgtgaccagctctttgaatctaaggctgaactagcagatcaccaaaagtttccatgcagtactcctcactcagcattttcaatggttgaagaggactttcagcaaaaactcgaaagcgagaatgatctccaagagatacacacgatccaggagtgtaaggaatgtgaccaagtttttcctgatttgcaaagcctggagaaacacatgctgtcacatactgaagagagggaatacaagtgtgatcagtgtcccaaggcatttaactggaagtccaatttaattcgccaccagatgtcacatgacagtggaaagcactatgaatgtgaaaactgtgccaaggttttcacggaccctagcaaccttcagcggcacattcgctctcagcatgtcggtgcccgggcccatgcatgcccggagtgtggcaaaacgtttgccacttcgtcgggcctcaaacaacacaagcacatccacagcagtgtgaagccctttatctcattctctcaatcaatgtacccatttcctgatagagacttgagatcgttacctttgaaaatggaaccccaatcaccaggtgaagtaaagaaactgcagaagggcagctctgagtccccctttgatctcaccactaagcgaaaggatgagaagcccttgactccagtcccctccaagcctccagtgacacctgccacaagccaagaccagcccctggatctaagtatgggcagtaggagtagagccagtgggacaaagctgactgagcctcgaaaaaaccacgtgtttgggggaaaaaaaggaagcaacgtcgaatcaagacctgcttcagatggttccttgcagcatgcaagacccactcctttctttatggaccctatttacagagtagagaaaagaaaactaactgacccacttgaagctttaaaagagaaatacttgaggccttctccaggattcttgtttcacccacaattccaactgcctgatcagagaacttggatgtcagctattgaaaacatggcagaaaagctagagagcttcagtgccctgaaacctgaggccagtgagctcttacagtcagtgccctctatgttcaacttcagggcgcctcccaatgccctgccagagaaccttctgcggaagggaaaggagcgctatacctgcagatactgtggcaagatttttccaaggtctgcaaacctaacacggcacttgagaacccacacaggagagcagccttacagatgcaaatactgtgacagatcatttagcatatcttctaacttgcaaaggcatgttcgcaacatccacaataaagagaagccatttaagtgtcacttatgtgataggtgttttggtcaacaaaccaatttagacagacacctaaagaaacatgagaatgggaacatgtccggtacagcaacatcgtcgcctcattctgaactggaaagtacaggtgcgattctggatgacaaagaagatgcttacttcacagaaattcgaaatttcattgggaacagcaaccatggcagccaatctcccaggaatgtggaggagagaatgaatggcagtcattttaaagatgaaaaggctttggtgaccagtcaaaattcagacttgctggatgatgaagaagttgaagatgaggtgttgttagatgaggaggatgaagacaatgatattactggaaaaacaggaaaggaaccagtgacaagtaatttacatgaaggaaaccctgaggatgactatgaagaaaccagtgccctggagatgagttgcaagacatccccagtgaggtataaagaggaagaatataaaagtggactttctgctctagatcatataaggcacttcacagatagcctcaaaatgaggaaaatggaagataatcaatattctgaagctgagctgtcttcttttagtacttcccatgtgccagaggaacttaagcagccgttacacagaaagtccaaatcgcaggcatatgctatgatgctgtcactgtctgacaaggagtccctccattctacatcccacagttcttccaacgtgtggcacagtatggccagggctgcggcggaatccagtgctatccagtccataagccacgtatgacgttatcaaggttgaccagagtgggaccaagtccaacagtagcatggctctttcatataggactatttacaagactgctgagcagaatgccttataaacctgcagggtcactcatctaaagtctagtgaccttaaactgaatgatttaaaaaagaaaagaaagaaaaaagaaactatttattctcgatattttgttttgcacagcaaaggcagctgctgacttctggaagatcaatcaatgcgacttaaagtgattcagtgaaaacaaaaaacttggtgggctgaaggcatcttccagtttaccccaccttagggtatgggtgggtgagaagggcagttgagatggcagcattgatatgaatgaacactccatagaaactgaattctcttttgtacaagatcacctgacatgattgggaacagttgcttttaattacagatttaatttttttcttcgttaaagttttatgtaatttaaccctttgaagacagaagtagttggatgaaatgcacagtcaattattatagaaactgataacagggagtacttgttcccccttttgccttcttaagtacattgtttaaaactagggaaaaagggtatgtgtatattgtaaactatggatgttaacactcaaagaggttaagtcagtgaagtaacctattcatcaccagtaccgctgtaccactaataaattgtttgccaaatccttgtaataacatcttaattttagacaatcatgtcactgtttttaatgtttatttttttgtgtgtgttgcgtgtatcatgtatttatttgttggcaaactattgtttgttgattaaaatagcactgttccagtcagccactactttatgacgtctgaggcacacccctttccgaatttcaaggaccaaggtgacccgacctgtgtatgagagtgccaaatggtgtttggcttttcttaacattcctttttgtttgtttgttttgttttccttcttaatgaactaaatacgaatagatgcaacttagtttttgtaatactgaaatcgattcaattgtataaacgattataatttctttcatggaagcatgattcttctgattaaaaactgtactccatattttatgctggttgtctgcaagcttgtgcgatgttatgttcatgttaatcctatttgtaaaatgaagtgttcccaaccttatgttaaaagagagaagtaaataacagactgtattcagttattttgccctttattgaggaaccagatttgttttctttttgtttgtaatctcattttgaaataatcagcaagttgaggtactttcttcaaatgctttgtacaatataaactgttatgcctttcagtgcattactatgggaggagcaactaaaaaataaagacttacaaaaaggagt

SEQ ID NO: 298587 - DNA, 5265 bp, Homo sapiens
tccttttgctgttggttttttgaaagggcctttctctaaagtctacctaaacggtttttttttaagctatctttggaggtttgacagcttttaaaaacacaggagtgtgttatatgaaatgactgaagatgtgtcgttactttattttattcgagatttccgacacgattaagacatttgggagacaaatgcagttctgctagcaaatcaaaagtgaataattcacccagggggcaaacgtttctggagaaagctaagcttttgtcttggggcaagaatattgagaggaagaatgttaatatgatggtgaaatctttgaataatcgtataacagattagtaaaaagacattctttggaaatgaacctttttaaaaattaattttgctgttgacagtggcaatgctaataatgttaacacggaataaaattacacctacaatttttatgtgcagtgtttattcatagggcttcttgactaaagcccttggagcactgggtttttcttgaagtatatgatcttagacgaattttacaatgtgaagttctgcatagatgccagtcaaccagatgttggaagctggctcaagtacattagattcgctggctgttatgatcagcacaaccttgttgcatgccagataaatgatcagatattctatagagtagttgcagacattgcgccgggagaggagcttctgctgttcatgaagagcgaagactatccccatgaaactatggcgccggatatccacgaagaacggcaatatcgctgcgaagactgtgaccagctctttgaatctaaggctgaactagcagatcaccaaaagtttccatgcagtactcctcactcagcattttcaatggttgaagaggactttcagcaaaaactcgaaagcgagaatgatctccaagagatacacacgatccaggagtgtaaggaatgtgaccaagtttttcctgatttgcaaagcctggagaaacacatgctgtcacatactgaagagagggaatacaagtgtgatcagtgtcccaaggcatttaactggaagtccaatttaattcgccaccagatgtcacatgacagtggaaagcactatgaatgtgaaaactgtgccaaggttttcacggaccctagcaaccttcagcggcacattcgctctcagcatgtcggtgcccgggcccatgcatgcccggagtgtggcaaaacgtttgccacttcgtcgggcctcaaacaacacaagcacatccacagcagtgtgaagccctttatctgtgaggtctgccataaatcctatactcagttttcaaacctttgccgtcataagcgcatgcatgctgattgcagaacccaaatcaagtgcaaagactgtggacaaatgttcagcactacgtcttccttaaataaacacaggaggttttgtgagggcaagaaccattttgcggcaggtggattttttggccaaggcatttcacttcctggaaccccagctatggataaaacgtccatggttaatatgagtcatgccaacccgggccttgctgactattttggcgccaataggcatcctgctggtcttacctttccaacagctcctggattttcttttagcttccctggtctgtttccttccggcttgtaccacaggcctcctttgatacctgctagttctcctgttaaaggactatcaagtactgaacagacaaacaaaagtcaaagtcccctcatgacacatcctcagatactgccagctacacaggatattttgaaggcactatctaaacacccatctgtaggggacaataagccagtggagctccagcccgagaggtcctctgaagagaggccctttgagaaaatcagtgaccagtcagagagtagtgaccttgatgatgtcagtacaccaagtggcagtgacctggaaacaacctcgggctctgatctggaaagtgacattgaaagtgataaagagaaatttaaagaaaatggtaaaatgttcaaagacaaagtaagccctcttcagaatctggcttcaataaataataagaaagaatacagcaatcattccattttctcaccatctttagaggagcagactgcggtgtcaggagctgtgaatgattctataaaggctattgcttctattgctgaaaaatactttggttcaacaggactggtggggctgcaagacaaaaaagttggagctttaccttacccttccatgtttcccctcccattttttccagcattctctcaatcaatgtacccatttcctgatagagacttgagatcgttacctttgaaaatggaaccccaatcaccaggtgaagtaaagaaactgcagaagggcagctctgagtccccctttgatctcaccactaagcgaaaggatgagaagcccttgactccagtcccctccaagcctccagtgacacctgccacaagccaagaccagcccctggatctaagtatgggcagtaggagtagagccagtgggacaaagctgactgagcctcgaaaaaaccacgtgtttgggggaaaaaaaggaagcaacgtcgaatcaagacctgcttcagatggttccttgcagcatgcaagacccactcctttctttatggaccctatttacagagtagagaaaagaaaactaactgacccacttgaagctttaaaagagaaatacttgaggccttctccaggattcttgtttcacccacaattccaactgcctgatcagagaacttggatgtcagctattgaaaacatggcagaaaagctagagagcttcagtgccctgaaacctgaggccagtgagctcttacagtcagtgccctctatgttcaacttcagggcgcctcccaatgccctgccagagaaccttctgcggaagggaaaggagcgctatacctgcagatactgtggcaagatttttccaaggtctgcaaacctaacacggcacttgagaacccacacaggagagcagccttacagatgcaaatactgtgacagatcatttagcatatcttctaacttgcaaaggcatgttcgcaacatccacaataaagagaagccatttaagtgtcacttatgtgataggtgttttggtcaacaaaccaatttagacagacacctaaagaaacatgagaatgggaacatgtccggtacagcaacatcgtcgcctcattctgaactggaaagtacaggtgcgattctggatgacaaagaagatgcttacttcacagaaattcgaaatttcattgggaacagcaaccatggcagccaatctcccaggaatgtggaggagagaatgaatggcagtcattttaaagatgaaaaggctttggtgaccagtcaaaattcagacttgctggatgatgaagaagttgaagatgaggtgttgttagatgaggaggatgaagacaatgatattactggaaaaacaggaaaggaaccagtgacaagtaatttacatgaaggaaaccctgaggatgactatgaagaaaccagtgccctggagatgagttgcaagacatccccagtgaggtataaagaggaagaatataaaagtggactttctgctctagatcatataaggcacttcacagatagcctcaaaatgaggaaaatggaagataatcaatattctgaagctgagctgtcttcttttagtacttcccatgtgccagaggaacttaagcagccgttacacagaaagtccaaatcgcaggcatatgctatgatgctgtcactgtctgacaaggagtccctccattctacatcccacagttcttccaacgtgtggcacagtatggccagggctgcggcggaatccagtgctatccagtccataagccacgtatgacgttatcaaggttgaccagagtgggaccaagtccaacagtagcatggctctttcatataggactatttacaagactgctgagcagaatgccttataaacctgcagggtcactcatctaaagtctagtgaccttaaactgaatgatttaaaaaagaaaagaaagaaaaaagaaactatttattctcgatattttgttttgcacagcaaaggcagctgctgacttctggaagatcaatcaatgcgacttaaagtgattcagtgaaaacaaaaaacttggtgggctgaaggcatcttccagtttaccccaccttagggtatgggtgggtgagaagggcagttgagatggcagcattgatatgaatgaacactccatagaaactgaattctcttttgtacaagatcacctgacatgattgggaacagttgcttttaattacagatttaatttttttcttcgttaaagttttatgtaatttaaccctttgaagacagaagtagttggatgaaatgcacagtcaattattatagaaactgataacagggagtacttgttcccccttttgccttcttaagtacattgtttaaaactagggaaaaagggtatgtgtatattgtaaactatggatgttaacactcaaagaggttaagtcagtgaagtaacctattcatcaccagtaccgctgtaccactaataaattgtttgccaaatccttgtaataacatcttaattttagacaatcatgtcactgtttttaatgtttatttttttgtgtgtgttgcgtgtatcatgtatttatttgttggcaaactattgtttgttgattaaaatagcactgttccagtcagccactactttatgacgtctgaggcacacccctttccgaatttcaaggaccaaggtgacccgacctgtgtatgagagtgccaaatggtgtttggcttttcttaacattcctttttgtttgtttgttttgttttccttcttaatgaactaaatacgaatagatgcaacttagtttttgtaatactgaaatcgattcaattgtataaacgattataatttctttcatggaagcatgattcttctgattaaaaactgtactccatattttatgctggttgtctgcaagcttgtgcgatgttatgttcatgttaatcctatttgtaaaatgaagtgttcccaaccttatgttaaaagagagaagtaaataacagactgtattcagttattttgccctttattgaggaaccagatttgttttctttttgtttgtaatctcattttgaaataatcagcaagttgaggtactttcttcaaatgctttgtacaatataaactgttatgcctttcagtgcattactatgggaggagcaactaaaaaataaagacttacaaaaaggagt

SEQ ID NO: 298588 - DNA, 4873 bp, Homo sapiens
tttgcgtccaacatcgtgtgctgcttcgcgagaaagtcacattcggaccctttggctagattgtttattcatagggcttcttgactaaagcccttggagcactgggtttttcttgaagtatatgatcttagacgaattttacaatgtgaagttctgcatagatgccagtcaaccagatgttggaagctggctcaagtacattagattcgctggctgttatgatcagcacaaccttgttgcatgccagataaatgatcagatattctatagagtagttgcagacattgcgccgggagaggagcttctgctgttcatgaagagcgaagactatccccatgaaactatggcgccggatatccacgaagaacggcaatatcgctgcgaagactgtgaccagctctttgaatctaaggctgaactagcagatcaccaaaagtttccatgcagtactcctcactcagcattttcaatggttgaagaggactttcagcaaaaactcgaaagcgagaatgatctccaagagatacacacgatccaggagtgtaaggaatgtgaccaagtttttcctgatttgcaaagcctggagaaacacatgctgtcacatactgaagagagggaatacaagtgtgatcagtgtcccaaggcatttaactggaagtccaatttaattcgccaccagatgtcacatgacagtggaaagcactatgaatgtgaaaactgtgccaaggttttcacggaccctagcaaccttcagcggcacattcgctctcagcatgtcggtgcccgggcccatgcatgcccggagtgtggcaaaacgtttgccacttcgtcgggcctcaaacaacacaagcacatccacagcagtgtgaagccctttatctgtgaggtctgccataaatcctatactcagttttcaaacctttgccgtcataagcgcatgcatgctgattgcagaacccaaatcaagtgcaaagactgtggacaaatgttcagcactacgtcttccttaaataaacacaggaggttttgtgagggcaagaaccattttgcggcaggtggattttttggccaaggcatttcacttcctggaaccccagctatggataaaacgtccatggttaatatgagtcatgccaacccgggccttgctgactattttggcgccaataggcatcctgctggtcttacctttccaacagctcctggattttcttttagcttccctggtctgtttccttccggcttgtaccacaggcctcctttgatacctgctagttctcctgttaaaggactatcaagtactgaacagacaaacaaaagtcaaagtcccctcatgacacatcctcagatactgccagctacacaggatattttgaaggcactatctaaacacccatctgtaggggacaataagccagtggagctccagcccgagaggtcctctgaagagaggccctttgagaaaatcagtgaccagtcagagagtagtgaccttgatgatgtcagtacaccaagtggcagtgacctggaaacaacctcgggctctgatctggaaagtgacattgaaagtgataaagagaaatttaaagaaaatggtaaaatgttcaaagacaaagtaagccctcttcagaatctggcttcaataaataataagaaagaatacagcaatcattccattttctcaccatctttagaggagcagactgcggtgtcaggagctgtgaatgattctataaaggctattgcttctattgctgaaaaatactttggttcaacaggactggtggggctgcaagacaaaaaagttggagctttaccttacccttccatgtttcccctcccattttttccagcattctctcaatcaatgtacccatttcctgatagagacttgagatcgttacctttgaaaatggaaccccaatcaccaggtgaagtaaagaaactgcagaagggcagctctgagtccccctttgatctcaccactaagcgaaaggatgagaagcccttgactccagtcccctccaagcctccagtgacacctgccacaagccaagaccagcccctggatctaagtatgggcagtaggagtagagccagtgggacaaagctgactgagcctcgaaaaaaccacgtgtttgggggaaaaaaaggaagcaacgtcgaatcaagacctgcttcagatggttccttgcagcatgcaagacccactcctttctttatggaccctatttacagagtagagaaaagaaaactaactgacccacttgaagctttaaaagagaaatacttgaggccttctccaggattcttgtttcacccacaattccaactgcctgatcagagaacttggatgtcagctattgaaaacatggcagaaaagctagagagcttcagtgccctgaaacctgaggccagtgagctcttacagtcagtgccctctatgttcaacttcagggcgcctcccaatgccctgccagagaaccttctgcggaagggaaaggagcgctatacctgcagatactgtggcaagatttttccaaggtctgcaaacctaacacggcacttgagaacccacacaggagagcagccttacagatgcaaatactgtgacagatcatttagcatatcttctaacttgcaaaggcatgttcgcaacatccacaataaagagaagccatttaagtgtcacttatgtgataggtgttttggtcaacaaaccaatttagacagacacctaaagaaacatgagaatgggaacatgtccggtacagcaacatcgtcgcctcattctgaactggaaagtacaggtgcgattctggatgacaaagaagatgcttacttcacagaaattcgaaatttcattgggaacagcaaccatggcagccaatctcccaggaatgtggaggagagaatgaatggcagtcattttaaagatgaaaaggctttggtgaccagtcaaaattcagacttgctggatgatgaagaagttgaagatgaggtgttgttagatgaggaggatgaagacaatgatattactggaaaaacaggaaaggaaccagtgacaagtaatttacatgaaggaaaccctgaggatgactatgaagaaaccagtgccctggagatgagttgcaagacatccccagtgaggtataaagaggaagaatataaaagtggactttctgctctagatcatataaggcacttcacagatagcctcaaaatgaggaaaatggaagataatcaatattctgaagctgagctgtcttcttttagtacttcccatgtgccagaggaacttaagcagccgttacacagaaagtccaaatcgcaggcatatgctatgatgctgtcactgtctgacaaggagtccctccattctacatcccacagttcttccaacgtgtggcacagtatggccagggctgcggcggaatccagtgctatccagtccataagccacgtatgacgttatcaaggttgaccagagtgggaccaagtccaacagtagcatggctctttcatataggactatttacaagactgctgagcagaatgccttataaacctgcagggtcactcatctaaagtctagtgaccttaaactgaatgatttaaaaaagaaaagaaagaaaaaagaaactatttattctcgatattttgttttgcacagcaaaggcagctgctgacttctggaagatcaatcaatgcgacttaaagtgattcagtgaaaacaaaaaacttggtgggctgaaggcatcttccagtttaccccaccttagggtatgggtgggtgagaagggcagttgagatggcagcattgatatgaatgaacactccatagaaactgaattctcttttgtacaagatcacctgacatgattgggaacagttgcttttaattacagatttaatttttttcttcgttaaagttttatgtaatttaaccctttgaagacagaagtagttggatgaaatgcacagtcaattattatagaaactgataacagggagtacttgttcccccttttgccttcttaagtacattgtttaaaactagggaaaaagggtatgtgtatattgtaaactatggatgttaacactcaaagaggttaagtcagtgaagtaacctattcatcaccagtaccgctgtaccactaataaattgtttgccaaatccttgtaataacatcttaattttagacaatcatgtcactgtttttaatgtttatttttttgtgtgtgttgcgtgtatcatgtatttatttgttggcaaactattgtttgttgattaaaatagcactgttccagtcagccactactttatgacgtctgaggcacacccctttccgaatttcaaggaccaaggtgacccgacctgtgtatgagagtgccaaatggtgtttggcttttcttaacattcctttttgtttgtttgttttgttttccttcttaatgaactaaatacgaatagatgcaacttagtttttgtaatactgaaatcgattcaattgtataaacgattataatttctttcatggaagcatgattcttctgattaaaaactgtactccatattttatgctggttgtctgcaagcttgtgcgatgttatgttcatgttaatcctatttgtaaaatgaagtgttcccaaccttatgttaaaagagagaagtaaataacagactgtattcagttattttgccctttattgaggaaccagatttgttttctttttgtttgtaatctcattttgaaataatcagcaagttgaggtactttcttcaaatgctttgtacaatataaactgttatgcctttcagtgcattactatgggaggagcaactaaaaaataaagacttacaaaaaggagt

SEQ ID NO: 298589 - DNA, 5431 bp, Homo sapiens
gcgcatgtgcaaggtgtccaaactgacaatgctggagagatagcgagtgtggattgagagaaagggagagagggagggagagagagtgaaagaagaaaatacagagagtgagtgtgtggaagagagagagaaacaggagagaaacaggagggggggagagagagagagagagagagagagagagagagagagagagagagagagacaggagagagagggagggagcgagagggagagcaaaagaaggaaaggatccaagaaaaaaaagccccaaccacacaccagaggctgcaggactgggcacagcatgagatccaaaggcagggcaaggaaactggccacaaataatgagtgtgtatatggcaactaccctgaaatacctttggaagaaatgccagatgcagatggagtagccagcactccctccctcaatattcaagagccatgctctcctgccacatccagtgaagcattcactccaaaggagggttctccttacaaagcccccatctacatccctgatgatatccccattcctgctgagtttgaacttcgagagtcaaatatgcctggggcaggactaggaatatggaccaaaaggaagatcgaagtaggtgaaaagtttgggccttatgtgggagagcagaggtcaaacctgaaagaccccagttatggatgggagatcttagacgaattttacaatgtgaagttctgcatagatgccagtcaaccagatgttggaagctggctcaagtacattagattcgctggctgttatgatcagcacaaccttgttgcatgccagataaatgatcagatattctatagagtagttgcagacattgcgccgggagaggagcttctgctgttcatgaagagcgaagactatccccatgaaactatggcgccggatatccacgaagaacggcaatatcgctgcgaagactgtgaccagctctttgaatctaaggctgaactagcagatcaccaaaagtttccatgcagtactcctcactcagcattttcaatggttgaagaggactttcagcaaaaactcgaaagcgagaatgatctccaagagatacacacgatccaggagtgtaaggaatgtgaccaagtttttcctgatttgcaaagcctggagaaacacatgctgtcacatactgaagagagggaatacaagtgtgatcagtgtcccaaggcatttaactggaagtccaatttaattcgccaccagatgtcacatgacagtggaaagcactatgaatgtgaaaactgtgccaaggttttcacggaccctagcaaccttcagcggcacattcgctctcagcatgtcggtgcccgggcccatgcatgcccggagtgtggcaaaacgtttgccacttcgtcgggcctcaaacaacacaagcacatccacagcagtgtgaagccctttatctgtgaggtctgccataaatcctatactcagttttcaaacctttgccgtcataagcgcatgcatgctgattgcagaacccaaatcaagtgcaaagactgtggacaaatgttcagcactacgtcttccttaaataaacacaggaggttttgtgagggcaagaaccattttgcggcaggtggattttttggccaaggcatttcacttcctggaaccccagctatggataaaacgtccatggttaatatgagtcatgccaacccgggccttgctgactattttggcgccaataggcatcctgctggtcttacctttccaacagctcctggattttcttttagcttccctggtctgtttccttccggcttgtaccacaggcctcctttgatacctgctagttctcctgttaaaggactatcaagtactgaacagacaaacaaaagtcaaagtcccctcatgacacatcctcagatactgccagctacacaggatattttgaaggcactatctaaacacccatctgtaggggacaataagccagtggagctccagcccgagaggtcctctgaagagaggccctttgagaaaatcagtgaccagtcagagagtagtgaccttgatgatgtcagtacaccaagtggcagtgacctggaaacaacctcgggctctgatctggaaagtgacattgaaagtgataaagagaaatttaaagaaaatggtaaaatgttcaaagacaaagtaagccctcttcagaatctggcttcaataaataataagaaagaatacagcaatcattccattttctcaccatctttagaggagcagactgcggtgtcaggagctgtgaatgattctataaaggctattgcttctattgctgaaaaatactttggttcaacaggactggtggggctgcaagacaaaaaagttggagctttaccttacccttccatgtttcccctcccattttttccagcattctctcaatcaatgtacccatttcctgatagagacttgagatcgttacctttgaaaatggaaccccaatcaccaggtgaagtaaagaaactgcagaagggcagctctgagtccccctttgatctcaccactaagcgaaaggatgagaagcccttgactccagtcccctccaagcctccagtgacacctgccacaagccaagaccagcccctggatctaagtatgggcagtaggagtagagccagtgggacaaagctgactgagcctcgaaaaaaccacgtgtttgggggaaaaaaaggaagcaacgtcgaatcaagacctgcttcagatggttccttgcagcatgcaagacccactcctttctttatggaccctatttacagagtagagaaaagaaaactaactgacccacttgaagctttaaaagagaaatacttgaggccttctccaggattcttgtttcacccacaattccaactgcctgatcagagaacttggatgtcagctattgaaaacatggcagaaaagctagagagcttcagtgccctgaaacctgaggccagtgagctcttacagtcagtgccctctatgttcaacttcagggcgcctcccaatgccctgccagagaaccttctgcggaagggaaaggagcgctatacctgcagatactgtggcaagatttttccaaggtctgcaaacctaacacggcacttgagaacccacacaggagagcagccttacagatgcaaatactgtgacagatcatttagcatatcttctaacttgcaaaggcatgttcgcaacatccacaataaagagaagccatttaagtgtcacttatgtgataggtgttttggtcaacaaaccaatttagacagacacctaaagaaacatgagaatgggaacatgtccggtacagcaacatcgtcgcctcattctgaactggaaagtacaggtgcgattctggatgacaaagaagatgcttacttcacagaaattcgaaatttcattgggaacagcaaccatggcagccaatctcccaggaatgtggaggagagaatgaatggcagtcattttaaagatgaaaaggctttggtgaccagtcaaaattcagacttgctggatgatgaagaagttgaagatgaggtgttgttagatgaggaggatgaagacaatgatattactggaaaaacaggaaaggaaccagtgacaagtaatttacatgaaggaaaccctgaggatgactatgaagaaaccagtgccctggagatgagttgcaagacatccccagtgaggtataaagaggaagaatataaaagtggactttctgctctagatcatataaggcacttcacagatagcctcaaaatgaggaaaatggaagataatcaatattctgaagctgagctgtcttcttttagtacttcccatgtgccagaggaacttaagcagccgttacacagaaagtccaaatcgcaggcatatgctatgatgctgtcactgtctgacaaggagtccctccattctacatcccacagttcttccaacgtgtggcacagtatggccagggctgcggcggaatccagtgctatccagtccataagccacgtatgacgttatcaaggttgaccagagtgggaccaagtccaacagtagcatggctctttcatataggactatttacaagactgctgagcagaatgccttataaacctgcagggtcactcatctaaagtctagtgaccttaaactgaatgatttaaaaaagaaaagaaagaaaaaagaaactatttattctcgatattttgttttgcacagcaaaggcagctgctgacttctggaagatcaatcaatgcgacttaaagtgattcagtgaaaacaaaaaacttggtgggctgaaggcatcttccagtttaccccaccttagggtatgggtgggtgagaagggcagttgagatggcagcattgatatgaatgaacactccatagaaactgaattctcttttgtacaagatcacctgacatgattgggaacagttgcttttaattacagatttaatttttttcttcgttaaagttttatgtaatttaaccctttgaagacagaagtagttggatgaaatgcacagtcaattattatagaaactgataacagggagtacttgttcccccttttgccttcttaagtacattgtttaaaactagggaaaaagggtatgtgtatattgtaaactatggatgttaacactcaaagaggttaagtcagtgaagtaacctattcatcaccagtaccgctgtaccactaataaattgtttgccaaatccttgtaataacatcttaattttagacaatcatgtcactgtttttaatgtttatttttttgtgtgtgttgcgtgtatcatgtatttatttgttggcaaactattgtttgttgattaaaatagcactgttccagtcagccactactttatgacgtctgaggcacacccctttccgaatttcaaggaccaaggtgacccgacctgtgtatgagagtgccaaatggtgtttggcttttcttaacattcctttttgtttgtttgttttgttttccttcttaatgaactaaatacgaatagatgcaacttagtttttgtaatactgaaatcgattcaattgtataaacgattataatttctttcatggaagcatgattcttctgattaaaaactgtactccatattttatgctggttgtctgcaagcttgtgcgatgttatgttcatgttaatcctatttgtaaaatgaagtgttcccaaccttatgttaaaagagagaagtaaataacagactgtattcagttattttgccctttattgaggaaccagatttgttttctttttgtttgtaatctcattttgaaataatcagcaagttgaggtactttcttcaaatgctttgtacaatataaactgttatgcctttcagtgcattactatgggaggagcaactaaaaaataaagacttacaaaaaggagt

SEQ ID NO: 298590 - DNA, 2339 bp, Homo sapiens
gtactaccagctgatgtgtggcctgtgtgggaactacaacggcgaccccaaggatgacttccagatgcaaatactgtgacagatcatttagcatatcttctaacttgcaaaggcatgttcgcaacatccacaataaagagaagccatttaagtgtcacttatgtgataggtgttttggtcaacaaaccaatttagacagacacctaaagaaacatgagaatgggaacatgtccggtacagcaacatcgtcgcctcattctgaactggaaagtacaggtgcgattctggatgacaaagaagatgcttacttcacagaaattcgaaatttcattgggaacagcaaccatggcagccaatctcccaggaatgtggaggagagaatgaatggcagtcattttaaagatgaaaaggctttggtgaccagtcaaaattcagacttgctggatgatgaagaagttgaagatgaggtgttgttagatgaggaggatgaagacaatgatattactggaaaaacaggaaaggaaccagtgacaagtaatttacatgaaggaaaccctgaggatgactatgaagaaaccagtgccctggagatgagttgcaagacatccccagtgaggtataaagaggaagaatataaaagtggactttctgctctagatcatataaggcacttcacagatagcctcaaaatgaggaaaatggaagataatcaatattctgaagctgagctgtcttcttttagtacttcccatgtgccagaggaacttaagcagccgttacacagaaagtccaaatcgcaggcatatgctatgatgctgtcactgtctgacaaggagtccctccattctacatcccacagttcttccaacgtgtggcacagtatggccagggctgcggcggaatccagtgctatccagtccataagccacgtatgacgttatcaaggttgaccagagtgggaccaagtccaacagtagcatggctctttcatataggactatttacaagactgctgagcagaatgccttataaacctgcagggtcactcatctaaagtctagtgaccttaaactgaatgatttaaaaaagaaaagaaagaaaaaagaaactatttattctcgatattttgttttgcacagcaaaggcagctgctgacttctggaagatcaatcaatgcgacttaaagtgattcagtgaaaacaaaaaacttggtgggctgaaggcatcttccagtttaccccaccttagggtatgggtgggtgagaagggcagttgagatggcagcattgatatgaatgaacactccatagaaactgaattctcttttgtacaagatcacctgacatgattgggaacagttgcttttaattacagatttaatttttttcttcgttaaagttttatgtaatttaaccctttgaagacagaagtagttggatgaaatgcacagtcaattattatagaaactgataacagggagtacttgttcccccttttgccttcttaagtacattgtttaaaactagggaaaaagggtatgtgtatattgtaaactatggatgttaacactcaaagaggttaagtcagtgaagtaacctattcatcaccagtaccgctgtaccactaataaattgtttgccaaatccttgtaataacatcttaattttagacaatcatgtcactgtttttaatgtttatttttttgtgtgtgttgcgtgtatcatgtatttatttgttggcaaactattgtttgttgattaaaatagcactgttccagtcagccactactttatgacgtctgaggcacacccctttccgaatttcaaggaccaaggtgacccgacctgtgtatgagagtgccaaatggtgtttggcttttcttaacattcctttttgtttgtttgttttgttttccttcttaatgaactaaatacgaatagatgcaacttagtttttgtaatactgaaatcgattcaattgtataaacgattataatttctttcatggaagcatgattcttctgattaaaaactgtactccatattttatgctggttgtctgcaagcttgtgcgatgttatgttcatgttaatcctatttgtaaaatgaagtgttcccaaccttatgttaaaagagagaagtaaataacagactgtattcagttattttgccctttattgaggaaccagatttgttttctttttgtttgtaatctcattttgaaataatcagcaagttgaggtactttcttcaaatgctttgtacaatataaactgttatgcctttcagtgcattactatgggaggagcaactaaaaaataaagacttacaaaaaggagt

SEQ ID NO: 298591 - DNA, 5184 bp, Homo sapiens
  misc_feature (994)..(994): n is a, c, g, or t
  misc_feature (5181)..(5183): n is a, c, g, or t
tccttttgctgttggttttttgaaagggcctttctctaaagtctacctaaacggtttttttttaagctatctttggaggtttgacagcttttaaaaacacaggagtgtgttatatgaaatgactgaagatgtgtcgttactttattttattcgagatttccgacacgattaagacatttgggagacaaatgcagttctgctagcaaatcaaaagtgaataattcacccagggggcaaacgtttctggagaaagctaagcttttgtcttggggcaagaatattgagaggaagaatgttaatatgatggtgaaatctttgaataatcgtataacagattagtaaaaagacattctttggaaatgaacctttttaaaaattaattttgctgttgacagtggcaatgctaataatgttaacacggaataaaattacacctacaatttttatgtgcagtgtatgtaatacttaactccctgcccctgtgaaagggtatgcttgaaagctagggggatggatgcttcttgactttgaaattaacaagttttccacgtctctctgcaaatatgaaatggaattagtattgcatttcactggctttattctatgtcctttattaaatatttctttggtgtgtcaggagaactgccttttcttttttcttttttttcttttttttcttttttttgccagtcaaggaaacaaacaacaaaagatcagccagaaaccaaacagactgaacaaaccaacaaaacccagcaacaaactccaacctttttactatttaaaaatgtgcattgctattatttatgtaccttctcaacatctgggatggggggaaatctcaagttgccatttgagttactcagcactgagagttgaagaaacatcttaaagtttgtaattttattgataacaaatttttagaatttgtcctcttaatagaaaggatgtttaagtgtacacttctgtcgttgttagtgtgaagaggcatccntgaaaaagaagagtttgatttctgtgtgtgtgtgtgtgtgtgtgtgtgtgtgtgtgtgtttaataatatccctatcttatgttcgatttttcttttttaaattttgggacgacttattgcccttcaatttcctcatggccaaaggtttattcatagggcttcttgactaaagcccttggagcactgggtttttcttgaagtatatgatcttagacgaattttacaatgtgaagttctgcatagatgccagtcaaccagatgttggaagctggctcaagtacattagattcgctggctgttatgatcagcacaaccttgttgcatgccagataaatgatcagatattctatagagtagttgcagacattgcgccgggagaggagcttctgctgttcatgaagagcgaagactatccccatgaaactatggcgccggatatccacgaagaacggcaatatcgctgcgaagactgtgaccagctctttgaatctaaggctgaactagcagatcaccaaaagtttccatgcagtactcctcactcagcattttcaatggttgaagaggactttcagcaaaaactcgaaagcgagaatgatctccaagagatacacacgatccaggagtgtaaggaatgtgaccaagtttttcctgatttgcaaagcctggagaaacacatgctgtcacatactgaagagagggaatacaagtgtgatcagtgtcccaaggcatttaactggaagtccaatttaattcgccaccagatgtcacatgacagtggaaagcactatgaatgtgaaaactgtgccaaggttttcacggaccctagcaaccttcagcggcacattcgctctcagcatgtcggtgcccgggcccatgcatgcccggagtgtggcaaaacgtttgccacttcgtcgggcctcaaacaacacaagcacatccacagcagtgtgaagccctttatctgtgaggtctgccataaatcctatactcagttttcaaacctttgccgtcataagcgcatgcatgctgattgcagaacccaaatcaagtgcaaagactgtggacaaatgttcagcactacgtcttccttaaataaacacaggaggttttgtgagggcaagaaccattttgcggcaggtggattttttggccaaggcatttcacttcctggaaccccagctatggataaaacgtccatggttaatatgagtcatgccaacccgggccttgctgactattttggcgccaataggcatcctgctggtcttacctttccaacagctcctggattttcttttagcttccctggtctgtttccttccggcttgtaccacaggcctcctttgatacctgctagttctcctgttaaaggactatcaagtactgaacagacaaacaaaagtcaaagtcccctcatgacacatcctcagatactgccagctacacaggatattttgaaggcactatctaaacacccatctgtaggggacaataagccagtggagctccagcccgagaggtcctctgaagagaggccctttgagaaaatcagtgaccagtcagagagtagtgaccttgatgatgtcagtacaccaagtggcagtgacctggaaacaacctcgggctctgatctggaaagtgacattgaaagtgataaagagaaatttaaagaaaatggtaaaatgttcaaagacaaagtaagccctcttcagaatctggcttcaataaataataagaaagaatacagcaatcattccattttctcaccatctttagaggagcagactgcggtgtcaggagctgtgaatgattctataaaggctattgcttctattgctgaaaaatactttggttcaacaggactggtggggctgcaagacaaaaaagttggagctttaccttacccttccatgtttcccctcccattttttccagcattctctcaatcaatgtacccatttcctgatagagacttgagatcgttacctttgaaaatggaaccccaatcaccaggtgaagtaaagaaactgcagaagggcagctctgagtccccctttgatctcaccactaagcgaaaggatgagaagcccttgactccagtcccctccaagcctccagtgacacctgccacaagccaagaccagcccctggatctaagtatgggcagtaggagtagagccagtgggacaaagctgactgagcctcgaaaaaaccacgtgtttgggggaaaaaaaggaagcaacgtcgaatcaagacctgcttcagatggttccttgcagcatgcaagacccactcctttctttatggaccctatttacagagtagagaaaagaaaactaactgacccacttgaagctttaaaagagaaatacttgaggccttctccaggattcttgtttcacccacaaatgtcagctattgaaaacatggcagaaaagctagagagcttcagtgccctgaaacctgaggccagtgagctcttacagtcagtgccctctatgttcaacttcagggcgcctcccaatgccctgccagagaaccttctgcggaagggaaaggagcgctatacctgcagatactgtggcaagatttttccaaggtctgcaaacctaacacggcacttgagaacccacacaggagagcagccttacagatgcaaatactgtgacagatcatttagcatatcttctaacttgcaaaggcatgttcgcaacatccacaataaagagaagccatttaagtgtcacttatgtgataggtgttttggtcaacaaaccaatttagacagacacctaaagaaacatgagaatgggaacatgtccggtacagcaacatcgtcgcctcattctgaactggaaagtacaggtgcgattctggatgacaaagaagatgcttacttcacagaaattcgaaatttcattgggaacagcaaccatggcagccaatctcccaggaatgtggaggagagaatgaatggcagtcattttaaagatgaaaaggctttggtgaccagtcaaaattcagacttgctggatgatgaagaagttgaagatgaggtgttgttagatgaggaggatgaagacaatgatattactggaaaaacaggaaaggaaccagtgacaagtaatttacatgaaggaaaccctgaggatgactatgaagaaaccagtgccctggagatgagttgcaagacatccccagtgaggtataaagaggaagaatataaaagtggactttctgctctagatcatataaggcacttcacagatagcctcaaaatgaggaaaatggaagataatcaatattctgaagctgagctgtcttcttttagtacttcccatgtgccagaggaacttaagcagccgttacacagaaagtccaaatcgcaggtacagattttcccatagtacagcatcatggttacattatgcatgaaacgtacatttcctttgattaccaaaaagcaaatattctatctttgaaatattttagaatccaaatggggtcagatgcctttctaaaaatgttcatatctttactgtatttatgaccaaatccaaaatagttaagcaagaaagcaattaatttagctgcattctgtatagaaattttatgacaagccccatcctacacttatctttccttgactttgcaattctcttacttttgtacagttagttcatcatgtttgtttacaaatatttatgtattacctcagagtcattttccgtgtctatacttttgtcaatgtaattatattttaagatttttctgaaaagtgaattctattttttgtccccttctatgtctagtaaattgttaggtgtagttaattagcaagtcatctcatgttgtaatttaatagtaaaatgaggatcagaaaggaagtgagttgccaaaggtctacaccaacttactggcagatttggaaataaaacctgtcaatttaaattcaacaaatgaatgagtgaatgaatggtactcaaatttattaggctctacaacattgtatcagcactatggtaactaaaaataaatctatttaagggtccataaatagcaattaaaagagcctcagtgtttttgttacaaaataaaggaagtcggtacttttttgtttgacatccacactcaaccggattgttcattcaggtcaattaaaaataaagaaacttcctattaccaannna

SEQ ID NO: 298592 - DNA, 2125 bp, Homo sapiens
  misc_feature (994)..(994): n is a, c, g, or t
tccttttgctgttggttttttgaaagggcctttctctaaagtctacctaaacggtttttttttaagctatctttggaggtttgacagcttttaaaaacacaggagtgtgttatatgaaatgactgaagatgtgtcgttactttattttattcgagatttccgacacgattaagacatttgggagacaaatgcagttctgctagcaaatcaaaagtgaataattcacccagggggcaaacgtttctggagaaagctaagcttttgtcttggggcaagaatattgagaggaagaatgttaatatgatggtgaaatctttgaataatcgtataacagattagtaaaaagacattctttggaaatgaacctttttaaaaattaattttgctgttgacagtggcaatgctaataatgttaacacggaataaaattacacctacaatttttatgtgcagtgtatgtaatacttaactccctgcccctgtgaaagggtatgcttgaaagctagggggatggatgcttcttgactttgaaattaacaagttttccacgtctctctgcaaatatgaaatggaattagtattgcatttcactggctttattctatgtcctttattaaatatttctttggtgtgtcaggagaactgccttttcttttttcttttttttcttttttttcttttttttgccagtcaaggaaacaaacaacaaaagatcagccagaaaccaaacagactgaacaaaccaacaaaacccagcaacaaactccaacctttttactatttaaaaatgtgcattgctattatttatgtaccttctcaacatctgggatggggggaaatctcaagttgccatttgagttactcagcactgagagttgaagaaacatcttaaagtttgtaattttattgataacaaatttttagaatttgtcctcttaatagaaaggatgtttaagtgtacacttctgtcgttgttagtgtgaagaggcatccntgaaaaagaagagtttgatttctgtgtgtgtgtgtgtgtgtgtgtgtgtgtgtgtgtgtttaataatatccctatcttatgttcgatttttcttttttaaattttgggacgacttattgcccttcaatttcctcatggccaaaggtttattcatagggcttcttgactaaagcccttggagcactgggtttttcttgaagtatatgatcttagacgaattttacaatgtgaagttctgcatagatgccagtcaaccagatgttggaagctggctcaagtacattagattcgctggctgttatgatcagcacaaccttgttgcatgccagataaatgatcagatattctatagagtagttgcagacattgcgccgggagaggagcttctgctgttcatgaagagcgaagactatccccatgaaactatggcgccggatatccacgaagaacggcaatatcgctgcgaagactgtgaccagctctttgaatctaaggctgaactagcagatcaccaaaagtttccatgcagtactcctcactcagcattttcaatggttgaagaggactttcagcaaaaactcgaaagcgagaatgatctccaagagatacacacgatccaggagtgtaaggaatgtgaccaagtttttcctgatttgcaaagcctggagaaacacatgctgtcacatactgaagagagggaatacaagtgtgatcagtgtcccaaggcatttaactggaagtccaatttaattcgccaccagatgtcacatgacagtggaaagcactatgaatgtgaaaactgtgccaaggttttcacggaccctagcaaccttcagcggcacattcgctctcagcatgtcggtgcccgggcccatgcatgcccggagtgtggcaaaacgtttgccacttcgtcgggcctcaaacaacacaagcacatccacagcagtgtgaagccctttatctgtaagttttcaacactccagccctccttcccacatctgtctcttccccaaaaggcactgtgaccaggagagtggctgcacatggcctttagagggtcaccgtgttagctatttatggtccaatccagtagggctatttatgattacaagtaaatcttttataatcaga

SEQ ID NO: 298593 - DNA, 3638 bp, Homo sapiens
  misc_feature (2687)..(2688): n is a, c, g, or t
  misc_feature (2772)..(2772): n is a, c, g, or t
  misc_feature (2849)..(2850): n is a, c, g, or t
tttccaggcactctcattcatagagccagcgggcgcgggcgggacgggcgccccgcggccggacccagccagggcaccacgctgcccggccctgcgccgccaggcacttctttccggggctcctagggacgccagaaggaagtcaacctctgctgcttctccttggcctgcgttggaccttcctttttttgttgtttttttttgtttttcccctttcttccttttgaattaactggcttcttggctggatgttttcaacttctttcctggctgcgaactttttccccaattgttttccttttacaacagggggagaaagtgctctgtggtccgaggcgagccgtgaagttgcgtgtgcgtggcagtgtgcgtggcaggatgtgcgtgcgtgtgtaacccgagccgcccgatctgtttcgatctgcgccgcggagccctccctcaaggcccgctccacctgcttggcggttacgcggcgctcgtgggtgttcgtgccttcggagcagctaaccggcgggtgctgggcgacggtggaggagtatcgttctcgctgcttgcccgagtcagggctgagtcaccccagctgatgtagacagtggctgccttccgaagagtgcgtgtttgcatgtgtgtgactctgcggctgctcaactcccaacaaaccagaggaccagccacaaacttaaccaacatccccaaacccgagttcacagatgtgggagagctgtagaaccctgagtgtcatcgactgggccttcttatgattgttgttttaagattagctgaagatctctgaaacgctgaattttctgcactgagcgtttgacagaattcattgagagaacagagaacatgacaagtacttctagctcagcactgctccaactactgaagctgattttcaaggctacttaaaaaaatctgcagcgtacattaatggatttctgttgtgtttaaattctccacagattgtattgtaaatattttatgaagtagagcatatgtatatatttatatatacgtgcacatacattagtagcactacctttggaagtctcagctcttgcttttcgggactgaagccagttttgcatgataaaagtggccttgttacgggagataattgtgttctgttgggactttagacaaaactcacctgcaaaaaactgacaggcattaactactggaacttccaaataatgtgtttgctgatcgttttactcttcgcataaatattttaggaagtgtatgagaattttgccttcaggaacttttctaacagccaaagacagaacttaacctctgcaagcaagattcgtggaagatagtctccactttttaatgcactaagcaatcggttgctaggagcccatcctgggtcagaggccgatccgcagaaccagaacgttttcccctcctggactgttagtaacttagtctccctcctcccctaaccacccccgcccccccccaccccccgcagtaataaaggcccctgaacgtgtatgttggtctcccgggagctgcttgctgaagatccgcgcccctgtcgccgtctggtaggagctgtttgcagggtcctaactcaatcggcttgttgtgatgcgtatccccgtagatgccagcacgagccgccgcttcacgccgccttccaccgcgctgagcccaggcaagatgagcgaggcgttgccgctgggcgccccggacgccggcgctgccctggccggcaagctgaggagcggcgaccgcagcatggtggaggtgctggccgaccacccgggcgagctggtgcgcaccgacagccccaacttcctctgctccgtgctgcctacgcactggcgctgcaacaagaccctgcccatcgctttcaaggtggtggccctaggggatgttccagatggcactctggtcactgtgatggctggcaatgatgaaaactactcggctgagctgagaaatgctaccgcagccatgaagaaccaggttgcaagatttaatgacctcaggtttgtcggtcgaagtggaagagggaaaagcttcactctgaccatcactgtcttcacaaacccaccgcaagtcgccacctaccacagagccatcaaaatcacagtggatgggccccgagaacctcgaaataatgagtgtgtatatggcaactaccctgaaatacctttggaagaaatgccagatgcagatggagtagccagcactccctccctcaatattcaagagccatgctctcctgccacatccagtgaagcattcactccaaaggagggttctccttacaaagcccccatctacatccctgatgatatccccattcctgctgagtttgaacttcgagagtcaaatatgcctggggcaggactaggaatatggaccaaaaggaagatcgaagtaggtgaaaagtttgggccttatgtgggagagcagaggtcaaacctgaaagaccccagttatggatgggaggtaagaatgtattttgagttaacacatttatatattgcagctgtgtaaagaagagattgtttaagcatccacaaaataagcaaattatatttgttacaatatgttttcaacaggtttttaagaataaacttcctttacaatctcacttcttaatacaaacaatgtattgattaaaggtatagcgtgataggagggaacccaacctaatatatggnnaaagaattgtactgatttgaaaaaatactaaaggaagaagatatgattttatagttaacgtttggaaacattggctatgaccangtgtagcatgtggcattagcaaacaagcataatcatatgacatgtttattgcattttatcttttttggggtgggganntggaggattggaggaaaacatttgttttctctattttgtgactatgagttaatttggttttattttcattttgtgctatgtttttctaatatattttgcctctcttttgataaccctgctttaattatacatgcttccagaatgtcagcactgtactcatcactgaattaggttatggttctttatattcaaatgatttaatgagtaatttgtgcatcaaaacagacgcacaaaatggttgtgaaaattagtcactcgtttcagtcatatttttcataaaatccatttggcaacatctaagaattagaagttatagtctgattaaagaatctaaattaaatttatttcaataaagacaggtaactatgttattcttctgagtgtaagttttatacagattcagtagatatatatatactttccatttatttctgtaacttgaaaacttttgtgcttgaatcattacatcataatttctggaaaatcttgtttctatctgaaaaacttgtagacagtttctgcaggggtaagatattttttagagatgtgattgacctttggtttcatagcatttcagtagacagaaatcagataaactggatttatttcggtatgtttccttaatatttatgatcattaatagaatatctggttagcttttaaatagaaatgaatattcagtgccttcaggacttaatttcaactttttgtcctcttgctttatatgtatcctcttgtgaaatctgttcaaaatgccataataaaagcaattcttgttcaaattctga

SEQ ID NO: 298594 - DNA, 363 bp, Homo sapiens
tttgggggaaaaaaaggaagcaacgtcgaatcaagacctgcttcagatggttccttgcagcatgcaagacccactcctttctttatggaccctatttacaggtaagcgtgtatggaagatgacgaaatatgagcagatgtatgaaaggcggtatttccactgtaaagtgatggctttttaacacatcatttttactattattataaaacagagtgaagttgtttgatctagtgaactcattttttattctgaaagttggatcattctgtttgaacttatttttggatgtttctgaagttgggggtttggaataggcctacagaatttttttcccttgacaataaatttatttttaaacacttt

SEQ ID NO: 298595 - DNA, 4925 bp, Homo sapiens
gaaacttccttattattgtgacgccgaaaacggagaaaccccgggtccggcgagaggggctgtgacagtcggagtcccaagctgcggttcggctgctgccgagaactgcaaggtgtggaatatttctggcttctagtccaatgccaagtgtgtgacctgtggctacatgattccctgaaagataagaacaatgttatgttggggatattggtctctgggccaacctggtatcagcaccaacctgcagggaattgtggctgagccccaggtgtgtgggttcatatctgacagaagtgtcaaggaagtggcctgtgggggaaaccactctgtgttcctgctggaagatggggaagtttacacatgtggtttgaacaccaaggggcaactgggccatgagagggaaggaaacaagccagaacaaattggagctctggcagatcagcatatcattcatgtggcatgtggcgagtcccacagtctggccctcagtgaccgaggccagctgttttcttggggtgcagggagtgatggtcagctaggactcatgactactgaggattctgtggcagtgcccaggttaatacaaaagctgaaccagcaaacaatattacaagtttcctgtggcaactggcattgcttggctcttgcggctgatggccagttcttcacctggggaaagaacagccatgggcagcttggcttagggaaggagttcccctcccaagccagcccacagagggtgaggtccctggaggggatcccactggctcaggtggctgccggaggggctcacagctttgccctgtctctctcaggagctgtttttggctgggggatgaataatgccgggcagctagggctcagtgatgaaaaagatcgagaatctccatgccatgtaaaactcttacgcacgcaaaaagttgtctatattagttgtggagaagaacacacagcagttctcacaaagagtggaggtgtgtttacctttggcgctggttcctgtgggcaacttggacacgactccatgaatgatgaggttaaccctagaagagttctagagctgatgggtagtgaagtaactcaaattgcttgtggcagacaacataccctagccttcgtgccttcttctggactcatctatgcatttggttgtggagcaagaggtcaattaggaactgggcacacttgtaatgttaagtgcccatctcctgtcaagggttactgggctgcccacagtggccagctttcagcccgagctgatcgctttaaatatcatatcgttaagcagatcttctctggaggagaccagacttttgtactttgctccaaatacgagaattattctcctgctgttgacttcaggactatgaaccaagcacattataccagtttaataaatgatgaaaccatagcagtttggagacaaaaactctcagaacacaacaatgcaaatacaatcaatggtgttgttcagatattatcttctgcagcctgttggaatggaagttttcttgaaaaaaaaattgatgaacattttaaaacgagtcccaaaatccctgggattgacctgaactcaactagggtgttatttgagaagttaatgaactctcagcactccatgattctagaacagattttgaacagttttgaaagttgtctgattccccagttgtcaagctcaccaccagatgttgaagccatgagaatctatttaatactacctgagtttcccctactccaggattccaagtattatataacattgactattcccttggctatggccattcttcggctggatacaaaccccagcaaagtactagataactggtggtctcaggtatgcccgaaatatttcatgaagctggtaaacctctataaaggtgcagtcctttatctactgaggggaagaaagacattcttaattcccgtactgtttaacaattatatcacagcagctctcaaactcttggagaagttatataaggtaaatcttaaagtgaagcatgtggaatatgatacattttacattcctgagatttccaatctcgtggacattcaggaagactacctcatgtggttcttgcatcaagcagggatgaaggctagaccatcaataatacaggatactgtaacactttgttcctaccctttcatctttgatgcccaagccaagaccaaaatgttacagacagatgctgaactacagatgcaggtggcagtcaatggagccaacctgcagaatgtcttcatgcttctcaccctggagcctctgctggccagaagccccttcctggtccttcacgttcgcaggaacaaccttgttggagatgccctaagagagctgagcattcattctgatattgatttgaaaaagcctctcaaagtaatctttgatggtgaagaagcagtggatgccggtggtgttacaaaggaattttttcttttgctgttaaaagaacttttgaatcccatctatggaatgtttacctactatcaagattcaaatctcttgtggttttcagacacgtgttttgtagagcacaactggtttcacttgattggtataacctgtggactagctatctacaactccactgtggtcgatctccacttcccattggctctctacaagaagttactcaatgtaaagcctggcttggaagacttaaaggagttgtcacccactgaaggaaggagtctccaagagcttttagattaccccggggaggatgtggaggagactttctgcctcaacttcacgatctgccgagaaagctatggagtgattgaacagaagaagctgatacctgggggagataatgtaactgtgtgcaaggataacaggcaggaatttgtggatgcttatgtgaattatgtcttccaaatctcagttcatgaatggtacacagccttctctagtggcttcctaaaggtgtgtggtggcaaagtacttgagctcttccagccttcagaactgagggctatgatggtggggaacagcaactacaactgggaagaactggaagagactgccatctacaagggagattactcggccacacatcccactgtaaaactattttgggaaacatttcatgagtttccattggaaaagaagaagaagtttctcttgttcctgacaggcagcgatcggattcccatctacggcatggccagtctgcagattgtcatccagtccacagccagcggggaggagtacttgccggtggcccacacttgctacaaccttcttgacctccccaagtacagcagcaaagagattctgagtgcccggctgacccaggcccttgacaactatgaagggtttagtttggcctgaggcttctcagcttgtccagtatttcccttcgttcctcagtgtccacattgaggcctatacagaaaatcatggggagtgatttctatttttttattgtctaagtgggttgggacttttaaatactgagcctggttgatgtgtttctgggattgtatagcagtaaacaacctttttgaaaaattagaggttggggatggggtgaaaaattggcccttgtatgggaggtgtttttgtttttgttttaaaccaaactacccagtattccttgcacttgtgaatgtgttgcactctgctggatgaaatggcagtggatttttaaactttaatttcccaaatgtctctctcagccctgatgttttctcacagtgcttccttgtccttctcttaacttctcattcctctataagaatgatttagactgacctgtccttttttatctgcgcatgcgagaacatcaccttcctctgtacacttggaaatgcctctggcttgttgcagccctcctttaacccaaaggaggaaaggactgcttcagaaactcccaattccaaaaagctgagtctgggtccattattttggcagaactcctaagaatttatgggagcctatataaacatatcttgcttttaaaaagttcttgagggaatagcaactttcccatggctgtgcctatttcctagaccttttaaaagatgtgcagagcagcttagcattcgttgcagctgagcctaattttttcttgctcatccttgtccctttgacaataaggttaattgatagacccaccacctcttgcactctcgcttttggagcaagttgcattaactattttgagtctctatattgtccaagaaaagtagaaataataaatttactttccctttttctatcaccttatgtcctctaccattttctccttcctcccttcccttattttctccttttcgtaccctgtgtcctccctgattttcctttcgtttcttctttattttatcccattctctgttacttgactcagtgctcccttcctctcctctccttctagtggatgcatgcagcctttttttcaatttttatttaaattgcaaaatttttactcagattttttttcctcttccctaattgctaagatttaaggacgttctttattatgaaactttatcacattcgaaatgtttgtttacagtgggattttaggggggattgtgtttaaatcaaatatatgtattttaaaaataatgacatgctcaaccttcctcatcatggagtaagaaaattctacatgattaaagaatccatgtaagtctaattttaaattcctagtaactagagaaaagacttatttatataaaatgaagtatttatgaactgtgataaagcatcaaatcttgatgaaggattgtagatttttgctttttctttttgtttttaaaacttattccaattgctaaattggtagtttttcagtctttataaatacaggattaaaaatatatatacagttatatgaaatgtttattttctatgtgtgtgcatatagttcaatattatgcaataaatttggtgttttaacttaaaacta

SEQ ID NO: 298596 - DNA, 707 bp, Homo sapiens
  misc_feature (37)..(37): n is a, c, g, or t
  misc_feature (49)..(49): n is a, c, g, or t
  misc_feature (76)..(76): n is a, c, g, or t
  misc_feature (90)..(90): n is a, c, g, or t
ccttatggccacccccccaccttagacggtctttcantgaaaccacccncactccctaaacttcaacaggctccgnccccccccaaatcnacgtccaacccccaacccccccagagtagaattcactcaggggcaaggagcagatggcattaaggaagaatgaagtttttgaaggttgggatggacgaaaaggtgtttctcatggagagggatgctttagcaaaggctcaaacattggggcatatttaggcaagagccaagaacagtttgaagggaacatcagaggaaataggcaaataatagtaaataatggtaagtaagacttgggagaaagaaggtagatttggggctgaggaactagcctaacactggaactttagtagtagccaagtaggatttgtttcaatgttcagaacttgagggtgataagacctgagccgggtcttaagaaggaaaatgtggatggtctaaatctggaggtattgaggtgggaaggactgaagcagaaagacaggagctgagacagcagtgacagtggcagcagcagaactagagaagagtatctgaggagaggtagggggagtgagtggaggtggtaggagcctgcagggagaaggaggcactaaaggtggatcagagactggttcatttagtgattggtgattgttaggccatttaagcacaccaaaagtttgtgagacacagca

SEQ ID NO: 298597 - DNA, 289 bp, Homo sapiens
gaaacttccttattattgtgacgccgaaaacggagaaaccccgggtccggcgagaggggctgtgacagtcggagtcccaagctgcggttcggctgctgccgagaactgcaaggtgtggaatatttctggcttctagtccaatgccaagtgtgtgacctgtgagttaattctgcattttagttttggccctacatttatttaaagcctgaatttggggagtatctgcaaagcactgaaggttttggacattgtcttttcctgctgttgaaagagaccctcttcatatata

SEQ ID NO: 298598 - DNA, 4887 bp, Homo sapiens
gaaacttccttattattgtgacgccgaaaacggagaaaccccgggtccggcgagaggggctgtgacagtcggagtcccaagctgcggttcggctgctgccgagaactgcaaggtgtggaatatttctggcttctagtccaatgccaagtgtgtgacctgtggctacatgattccctgaaagataagaacaatgttatgttggggatattggtctctgggccaacctggtatcagcaccaacctgcagggaattgtggctgagccccaggtgtgtgggttcatatctgacagaagtgtcaaggaagtggcctgtgggggaaaccactctgtgttcctgctggaagatggggaagtttacacatgtggtttgaacaccaaggggcaactgggccatgagagggaaggaaacaagccagaacaaattggagctctggcagatcagcatatcattcatgtggcatgtggcgagtcccacagtctggccctcagtgaccgaggccagctgttttcttggggtgcagggagtgatggtcagctaggactcatgactactgaggattctgtggcagtgcccaggttaatacaaaagctgaaccagcaaacaatattacaagtttcctgtggcaactggcattgcttggctcttgcggctgatggccagttcttcacctggggaaagaacagccatgggcagcttggcttagggaaggagttcccctcccaagccagcccacagagggtgaggtccctggaggggatcccactggctcaggtggctgccggaggggctcacagctttgccctgtctctctcaggagctgtttttggctgggggatgaataatgccgggcagctagggctcagtgatgaaaaagatcgagaatctccatgccatgtaaaactcttacgcacgcaaaaagttgtctatattagttgtggagaagaacacacagcagttctcacaaagagtggaggtgtgtttacctttggcgctggttcctgtgggcaacttggacacgactccatgaatgatgaggttaaccctagaagagttctagagctgatgggtagtgaagtaactcaaattgcttgtggcagacaacataccctagccttcgtgccttcttctggactcatctatgcatttggttgtggagcaagaggtcaattaggaactgggcacacttgtaatgttaagtgcccatctcctgtcaagggttactgggctgcccacagtggccagctttcagcccgagctgatcgctttaaatatcatatcgttaagcagatcttctctggaggagaccagacttttgtactttgctccaaatacgagaattattctcctgctgttgacttcaggactatgaaccaagcacattataccagtttaataaatgatgaaaccatagcagtttggagacaaaaactctcagaacacaacaatgcaaatacaatcaatggtgttgttcagatattatcttctgcagcctgttggaatggaagttttcttgaaaaaaaaattgatgaacattttaaaacgagtcccaaaatccctgggattgacctgaactcaactagggtgttatttgagaagttaatgaactctcagcactccatgattctagaacagattttgaacagttttgaaagttgtctgattccccagttgtcaagctcaccaccagatgttgaagccatgagaatctatttaatactacctgagtttcccctactccaggattccaagtattatataacattgactattcccttggctatggccattcttcggctggatacaaaccccagcaaagtactagataactggtggtctcaggtatgcccgaaatatttcatgaagctggtaaacctctataaaggtgcagtcctttatctactgaggggaagaaagacattcttaattcccgtactgtttaacaattatatcacagcagctctcaaactcttggagaagttatataaggtaaatcttaaagtgaagcatgtggaatatgatacattttacattcctgagatttccaatctcgtggacattcaggaagactacctcatgtggttcttgcatcaagcagggatgaaggctagaccatcaataatacaggatactgtaacactttgttcctaccctttcatctttgatgcccaagccaagagtggcagtcaatggagccaacctgcagaatgtcttcatgcttctcaccctggagcctctgctggccagaagccccttcctggtccttcacgttcgcaggaacaaccttgttggagatgccctaagagagctgagcattcattctgatattgatttgaaaaagcctctcaaagtaatctttgatggtgaagaagcagtggatgccggtggtgttacaaaggaattttttcttttgctgttaaaagaacttttgaatcccatctatggaatgtttacctactatcaagattcaaatctcttgtggttttcagacacgtgttttgtagagcacaactggtttcacttgattggtataacctgtggactagctatctacaactccactgtggtcgatctccacttcccattggctctctacaagaagttactcaatgtaaagcctggcttggaagacttaaaggagttgtcacccactgaaggaaggagtctccaagagcttttagattaccccggggaggatgtggaggagactttctgcctcaacttcacgatctgccgagaaagctatggagtgattgaacagaagaagctgatacctgggggagataatgtaactgtgtgcaaggataacaggcaggaatttgtggatgcttatgtgaattatgtcttccaaatctcagttcatgaatggtacacagccttctctagtggcttcctaaaggtgtgtggtggcaaagtacttgagctcttccagccttcagaactgagggctatgatggtggggaacagcaactacaactgggaagaactggaagagactgccatctacaagggagattactcggccacacatcccactgtaaaactattttgggaaacatttcatgagtttccattggaaaagaagaagaagtttctcttgttcctgacaggcagcgatcggattcccatctacggcatggccagtctgcagattgtcatccagtccacagccagcggggaggagtacttgccggtggcccacacttgctacaaccttcttgacctccccaagtacagcagcaaagagattctgagtgcccggctgacccaggcccttgacaactatgaagggtttagtttggcctgaggcttctcagcttgtccagtatttcccttcgttcctcagtgtccacattgaggcctatacagaaaatcatggggagtgatttctatttttttattgtctaagtgggttgggacttttaaatactgagcctggttgatgtgtttctgggattgtatagcagtaaacaacctttttgaaaaattagaggttggggatggggtgaaaaattggcccttgtatgggaggtgtttttgtttttgttttaaaccaaactacccagtattccttgcacttgtgaatgtgttgcactctgctggatgaaatggcagtggatttttaaactttaatttcccaaatgtctctctcagccctgatgttttctcacagtgcttccttgtccttctcttaacttctcattcctctataagaatgatttagactgacctgtccttttttatctgcgcatgcgagaacatcaccttcctctgtacacttggaaatgcctctggcttgttgcagccctcctttaacccaaaggaggaaaggactgcttcagaaactcccaattccaaaaagctgagtctgggtccattattttggcagaactcctaagaatttatgggagcctatataaacatatcttgcttttaaaaagttcttgagggaatagcaactttcccatggctgtgcctatttcctagaccttttaaaagatgtgcagagcagcttagcattcgttgcagctgagcctaattttttcttgctcatccttgtccctttgacaataaggttaattgatagacccaccacctcttgcactctcgcttttggagcaagttgcattaactattttgagtctctatattgtccaagaaaagtagaaataataaatttactttccctttttctatcaccttatgtcctctaccattttctccttcctcccttcccttattttctccttttcgtaccctgtgtcctccctgattttcctttcgtttcttctttattttatcccattctctgttacttgactcagtgctcccttcctctcctctccttctagtggatgcatgcagcctttttttcaatttttatttaaattgcaaaatttttactcagattttttttcctcttccctaattgctaagatttaaggacgttctttattatgaaactttatcacattcgaaatgtttgtttacagtgggattttaggggggattgtgtttaaatcaaatatatgtattttaaaaataatgacatgctcaaccttcctcatcatggagtaagaaaattctacatgattaaagaatccatgtaagtctaattttaaattcctagtaactagagaaaagacttatttatataaaatgaagtatttatgaactgtgataaagcatcaaatcttgatgaaggattgtagatttttgctttttctttttgtttttaaaacttattccaattgctaaattggtagtttttcagtctttataaatacaggattaaaaatatatatacagttatatgaaatgtttattttctatgtgtgtgcatatagttcaatattatgcaataaatttggtgttttaacttaaaacta

SEQ ID NO: 298599 - DNA, 4313 bp, Homo sapiens
tcccttcgattactcaccagacacgagagaagggagagaggcgtaactgcaaccctctcttaattttccaccgctacagatggccagttcttcacctggggaaagaacagccatgggcagcttggcttagggaaggagttcccctcccaagccagcccacagagggtgaggtccctggaggggatcccactggctcaggtggctgccggaggggctcacagctttgccctgtctctctcaggagctgtttttggctgggggatgaataatgccgggcagctagggctcagtgatgaaaaagatcgagaatctccatgccatgtaaaactcttacgcacgcaaaaagttgtctatattagttgtggagaagaacacacagcagttctcacaaagagtggaggtgtgtttacctttggcgctggttcctgtgggcaacttggacacgactccatgaatgatgaggttaaccctagaagagttctagagctgatgggtagtgaagtaactcaaattgcttgtggcagacaacataccctagccttcgtgccttcttctggactcatctatgcatttggttgtggagcaagaggtcaattaggaactgggcacacttgtaatgttaagtgcccatctcctgtcaagggttactgggctgcccacagtggccagctttcagcccgagctgatcgctttaaatatcatatcgttaagcagatcttctctggaggagaccagacttttgtactttgctccaaatacgagaattattctcctgctgttgacttcaggactatgaaccaagcacattataccagtttaataaatgatgaaaccatagcagtttggagacaaaaactctcagaacacaacaatgcaaatacaatcaatggtgttgttcagatattatcttctgcagcctgttggaatggaagttttcttgaaaaaaaaattgatgaacattttaaaacgagtcccaaaatccctgggattgacctgaactcaactagggtgttatttgagaagttaatgaactctcagcactccatgattctagaacagattttgaacagttttgaaagttgtctgattccccagttgtcaagctcaccaccagatgttgaagccatgagaatctatttaatactacctgagtttcccctactccaggattccaagtattatataacattgactattcccttggctatggccattcttcggctggatacaaaccccagcaaagtactagataactggtggtctcaggtatgcccgaaatatttcatgaagctggtaaacctctataaaggtgcagtcctttatctactgaggggaagaaagacattcttaattcccgtactgtttaacaattatatcacagcagctctcaaactcttggagaagttatataaggtaaatcttaaagtgaagcatgtggaatatgatacattttacattcctgagatttccaatctcgtggacattcaggaagactacctcatgtggttcttgcatcaagcagggatgaaggctagaccatcaataatacaggatactgtaacactttgttcctaccctttcatctttgatgcccaagccaagagtggcagtcaatggagccaacctgcagaatgtcttcatgcttctcaccctggagcctctgctggccagaagccccttcctggtccttcacgttcgcaggaacaaccttgttggagatgccctaagagagctgagcattcattctgatattgatttgaaaaagcctctcaaagtaatctttgatggtgaagaagcagtggatgccggtggtgttacaaaggaattttttcttttgctgttaaaagaacttttgaatcccatctatggaatgtttacctactatcaagattcaaatctcttgtggttttcagacacgtgttttgtagagcacaactggtttcacttgattggtataacctgtggactagctatctacaactccactgtggtcgatctccacttcccattggctctctacaagaagttactcaatgtaaagcctggcttggaagacttaaaggagttgtcacccactgaaggaaggagtctccaagagcttttagattaccccggggaggatgtggaggagactttctgcctcaacttcacgatctgccgagaaagctatggagtgattgaacagaagaagctgatacctgggggagataatgtaactgtgtgcaaggataacaggcaggaatttgtggatgcttatgtgaattatgtcttccaaatctcagttcatgaatggtacacagccttctctagtggcttcctaaaggtgtgtggtggcaaagtacttgagctcttccagccttcagaactgagggctatgatggtggggaacagcaactacaactgggaagaactggaagagactgccatctacaagggagattactcggccacacatcccactgtaaaactattttgggaaacatttcatgagtttccattggaaaagaagaagaagtttctcttgttcctgacaggcagcgatcggattcccatctacggcatggccagtctgcagattgtcatccagtccacagccagcggggaggagtacttgccggtggcccacacttgctacaaccttcttgacctccccaagtacagcagcaaagagattctgagtgcccggctgacccaggcccttgacaactatgaagggtttagtttggcctgaggcttctcagcttgtccagtatttcccttcgttcctcagtgtccacattgaggcctatacagaaaatcatggggagtgatttctatttttttattgtctaagtgggttgggacttttaaatactgagcctggttgatgtgtttctgggattgtatagcagtaaacaacctttttgaaaaattagaggttggggatggggtgaaaaattggcccttgtatgggaggtgtttttgtttttgttttaaaccaaactacccagtattccttgcacttgtgaatgtgttgcactctgctggatgaaatggcagtggatttttaaactttaatttcccaaatgtctctctcagccctgatgttttctcacagtgcttccttgtccttctcttaacttctcattcctctataagaatgatttagactgacctgtccttttttatctgcgcatgcgagaacatcaccttcctctgtacacttggaaatgcctctggcttgttgcagccctcctttaacccaaaggaggaaaggactgcttcagaaactcccaattccaaaaagctgagtctgggtccattattttggcagaactcctaagaatttatgggagcctatataaacatatcttgcttttaaaaagttcttgagggaatagcaactttcccatggctgtgcctatttcctagaccttttaaaagatgtgcagagcagcttagcattcgttgcagctgagcctaattttttcttgctcatccttgtccctttgacaataaggttaattgatagacccaccacctcttgcactctcgcttttggagcaagttgcattaactattttgagtctctatattgtccaagaaaagtagaaataataaatttactttccctttttctatcaccttatgtcctctaccattttctccttcctcccttcccttattttctccttttcgtaccctgtgtcctccctgattttcctttcgtttcttctttattttatcccattctctgttacttgactcagtgctcccttcctctcctctccttctagtggatgcatgcagcctttttttcaatttttatttaaattgcaaaatttttactcagattttttttcctcttccctaattgctaagatttaaggacgttctttattatgaaactttatcacattcgaaatgtttgtttacagtgggattttaggggggattgtgtttaaatcaaatatatgtattttaaaaataatgacatgctcaaccttcctcatcatggagtaagaaaattctacatgattaaagaatccatgtaagtctaattttaaattcctagtaactagagaaaagacttatttatataaaatgaagtatttatgaactgtgataaagcatcaaatcttgatgaaggattgtagatttttgctttttctttttgtttttaaaacttattccaattgctaaattggtagtttttcagtctttataaatacaggattaaaaatatatatacagttatatgaaatgtttattttctatgtgtgtgcatatagttcaatattatgcaataaatttggtgttttaacttaaaacta

SEQ ID NO: 298600 - DNA, 4826 bp, Homo sapiens
gaaacttccttattattgtgacgccgaaaacggagaaaccccgggtccggcgagaggggctgtgacagtcggagtcccaagctgcggttcggctgctgccgagaactgcaaggtgtggaatatttctggcttctagtccaatgccaagtgtgtgacctgtggctacatgattccctgaaagataagaacaatgttatgttggggatattggtctctgggccaacctggtatcagcaccaacctgcagggaattgtggctgagccccaggtgtgtgggttcatatctgacagaagtgtcaaggaagtggcctgtgggggaaaccactctgtgttcctgctggaagatggggaagtttacacatgtggtttgaacaccaaggggcaactgggccatgagagggaaggaaacaagccagaacaaattggagctctggcagatcagcatatcattcatgtggcatgtggcgagtcccacagtctggccctcagtgaccgaggccagctgttttcttggggtgcagggagtgatggtcagctaggactcatgactactgaggattctgtggcagtgcccaggttaatacaaaagctgaaccagcaaacaatattacaagtttcctgtggcaactggcattgcttggctcttgcggctgatggccagttcttcacctggggaaagaacagccatgggcagcttggcttagggaaggagttcccctcccaagccagcccacagagggtgaggtccctggaggggatcccactggctcaggtggctgccggaggggctcacagctttgccctgtctctctcaggagctgtttttggctgggggatgaataatgccgggcagctagggctcagtgatgaaaaagatcgagaatctccatgccatgtaaaactcttacgcacgcaaaaagttgtctatattagttgtggagaagaacacacagcagttctcacaaagagtggaggtgtgtttacctttggcgctggttcctgtgggcaacttggacacgactccatgaatgatgaggttaaccctagaagagttctagagctgatgggtagtgaagtaactcaaattgcttgtggcagacaacataccctagccttcgtgccttcttctggactcatctatgcatttggttgtggagcaagaggtcaattaggaactgggcacacttgtaatgttaagtgcccatctcctgtcaagggttactgggctgcccacagtggccagctttcagcccgagctgatcgctttaaatatcatatcgttaagcagatcttctctggaggagaccagacttttgtactttgctccaaatacgagaattattctcctgctgttgacttcaggactatgaaccaagcacattataccagtttaataaatgatgaaaccatagcagtttggagacaaaaactctcagaacacaacaatgcaaatacaatcaatggtgttgttcagatattatcttctgcagcctgttggaatggaagttttcttgaaaaaaaaattgatgaacattttaaaacgagtcccaaaatccctgggattgacctgaactcaactagggtgttatttgagaagttaatgaactctcagcactccatgattctagaacagattttgaacagttttgaaagttgtctgattccccagttgtcaagctcaccaccagatgttgaagccatgagaatctatttaatactacctgagtttcccctactccaggattccaagtattatataacattgactattcccttggctatggccattcttcggctggatacaaaccccagcaaagtactagataactggtggtctcaggtatgcccgaaatatttcatgaagctggtaaacctctataaaggtgcagtcctttatctactgaggggaagaaagacattcttaattcccgtactgtttaacaattatatcacagcagctctcaaactcttggagaagttatataaggtaaatcttaaagtgaagcatgtggaatatgatacattttacattcctgagatttccaatctcgtggacattcaggaagactacctcatgtggttcttgcatcaagcagggatgaaggctagaccatcaataatacaggatactgtaacactttgttcctaccctttcatctttgatgcccaagccaagagtggcagtcaatggagccaacctgcagaatgtcttcatgcttctcaccctggagcctctgctggccagaagccccttcctggtccttcacgttcgcaggaacaaccttgttggagatgccctaagagagctgagcattcattctgatattgatttgaaaaagcctctcaaagtaatctttgatggtgaagaagcagtggatgccggtggtgttacaaaggaattttttcttttgctgttaaaagaacttttgaatcccatctatggaatgtttacctactatcaagattcaaatctcttgtggttttcagacacgtgttttgtagagcacaactggtttcacttgattggtataacctgtggactagctatctacaactccactgtggtcgatctccacttcccattggctctctacaagaagttactcaatgtaaagcctggcttggaagacttaaaggagttgtcacccactgaaggaaggagtctccaagagcttttagattaccccggggaggatgtggaggagactttctgcctcaacttcacgatctgccgagaaagctatggagtgattgaacagaagaagctgatacctgggggagataatgtaactgtgtgcaaggataacaggcaggaatttgtggatgcttatgtgaattatgtcttccaaatctcagttcatgaatggtacacagccttctctagtggcttcctaaaggtgtgtggtggcaaagtacttgagctcttccagccttcagaactgagggctatgatggtggggaacagcaactacaactgggaagaactggaagagactgccatctacaagggagattactcggccacacatcccactgtaaaactattttgggaaacatttcatgagtttccattggaaaagaagaagaagtttctcttgttcctgacaggcagcgatcggattcccatctacggcatggccagtctgcagattgtcatccagtccacagccagcggggaggagtacttgccggtggcccacacttgctacaaccttcttgacctccccaagtacagcagcaaagagattctgagtgcccggctgacccaggcccttgacaactatgaagggtttagtttggcctgaggcttctcagcttgtccagtatttcccttcgttcctcagtgtccacattgaggcctatacagaaaatcatggggagtgatttctatttttttattgtctaagtgggttgggacttttaaatactgagcctggttgatgtgtttctgggattgtatagcagtaaacaacctttttgaaaaattagaggttggggatggggtgaaaaattggcccttgtatgggaggtgtttttgtttttgttttaaaccaaactacccagtattccttgcacttgtgaatgtgttgcactctgctggatgaaatggcagtggatttttaaactttaatttcccaaatgtctctctcagccctgatgttttctcacagtgcttccttgtccttctcttaacttctcattcctctataagaatgatttagactgacctgtccttttttatctgcgcatgcgagaacatcaccttcctctgtacacttggaaatgcctctggcttgttgcagccctcctttaacccaaaggaggaaaggactgcttcagaaactcccaattccaaaaagctgagtctgggtccattattttggcagaactcctaagaatttatgggagcctatataaacatatcttgcttttaaaaagttcttgagggaatagcaactttcccatggctgtgcctatttcctagaccttttaaaagatgtgcagagcagcttagcattcgttgcagctgagcctaattttttcttgctcatccttgtccctttgacaataaggttaattgatagacccaccacctcttgcactctcgcttttggagcaagttgcattaactattttgagtctctatattgtccaagatccttcctcccttcccttattttctccttttcgtaccctgtgtcctccctgattttcctttcgtttcttctttattttatcccattctctgttacttgactcagtgctcccttcctctcctctccttctagtggatgcatgcagcctttttttcaatttttatttaaattgcaaaatttttactcagattttttttcctcttccctaattgctaagatttaaggacgttctttattatgaaactttatcacattcgaaatgtttgtttacagtgggattttaggggggattgtgtttaaatcaaatatatgtattttaaaaataatgacatgctcaaccttcctcatcatggagtaagaaaattctacatgattaaagaatccatgtaagtctaattttaaattcctagtaactagagaaaagacttatttatataaaatgaagtatttatgaactgtgataaagcatcaaatcttgatgaaggattgtagatttttgctttttctttttgtttttaaaacttattccaattgctaaattggtagtttttcagtctttataaatacaggattaaaaatatatatacagttatatgaaatgtttattttctatgtgtgtgcatatagttcaatattatgcaataaatttggtgttttaacttaaaacta

SEQ ID NO: 298601 - DNA, 3581 bp, Homo sapiens
ttctttttactgttacatttaattctccagaattattctcctgctgttgacttcaggactatgaaccaagcacattataccagtttaataaatgatgaaaccatagcagtttggagacaaaaactctcagaacacaacaatgcaaatacaatcaatggtgttgttcagatattatcttctgcagcctgttggaatggaagttttcttgaaaaaaaaattgatgaacattttaaaacgagtcccaaaatccctgggattgacctgaactcaactagggtgttatttgagaagttaatgaactctcagcactccatgattctagaacagattttgaacagttttgaaagttgtctgattccccagttgtcaagctcaccaccagatgttgaagccatgagaatctatttaatactacctgagtttcccctactccaggattccaagtattatataacattgactattcccttggctatggccattcttcggctggatacaaaccccagcaaagtactagataactggtggtctcaggtatgcccgaaatatttcatgaagctggtaaacctctataaaggtgcagtcctttatctactgaggggaagaaagacattcttaattcccgtactgtttaacaattatatcacagcagctctcaaactcttggagaagttatataaggtaaatcttaaagtgaagcatgtggaatatgatacattttacattcctgagatttccaatctcgtggacattcaggaagactacctcatgtggttcttgcatcaagcagggatgaaggctagaccatcaataatacaggatactgtaacactttgttcctaccctttcatctttgatgcccaagccaagagtggcagtcaatggagccaacctgcagaatgtcttcatgcttctcaccctggagcctctgctggccagaagccccttcctggtccttcacgttcgcaggaacaaccttgttggagatgccctaagagagctgagcattcattctgatattgatttgaaaaagcctctcaaagtaatctttgatggtgaagaagcagtggatgccggtggtgttacaaaggaattttttcttttgctgttaaaagaacttttgaatcccatctatggaatgtttacctactatcaagattcaaatctcttgtggttttcagacacgtgttttgtagagcacaactggtttcacttgattggtataacctgtggactagctatctacaactccactgtggtcgatctccacttcccattggctctctacaagaagttactcaatgtaaagcctggcttggaagacttaaaggagttgtcacccactgaaggaaggagtctccaagagcttttagattaccccggggaggatgtggaggagactttctgcctcaacttcacgatctgccgagaaagctatggagtgattgaacagaagaagctgatacctgggggagataatgtaactgtgtgcaaggataacaggcaggaatttgtggatgcttatgtgaattatgtcttccaaatctcagttcatgaatggtacacagccttctctagtggcttcctaaaggtgtgtggtggcaaagtacttgagctcttccagccttcagaactgagggctatgatggtggggaacagcaactacaactgggaagaactggaagagactgccatctacaagggagattactcggccacacatcccactgtaaaactattttgggaaacatttcatgagtttccattggaaaagaagaagaagtttctcttgttcctgacaggcagcgatcggattcccatctacggcatggccagtctgcagattgtcatccagtccacagccagcggggaggagtacttgccggtggcccacacttgctacaaccttcttgacctccccaagtacagcagcaaagagattctgagtgcccggctgacccaggcccttgacaactatgaagggtttagtttggcctgaggcttctcagcttgtccagtatttcccttcgttcctcagtgtccacattgaggcctatacagaaaatcatggggagtgatttctatttttttattgtctaagtgggttgggacttttaaatactgagcctggttgatgtgtttctgggattgtatagcagtaaacaacctttttgaaaaattagaggttggggatggggtgaaaaattggcccttgtatgggaggtgtttttgtttttgttttaaaccaaactacccagtattccttgcacttgtgaatgtgttgcactctgctggatgaaatggcagtggatttttaaactttaatttcccaaatgtctctctcagccctgatgttttctcacagtgcttccttgtccttctcttaacttctcattcctctataagaatgatttagactgacctgtccttttttatctgcgcatgcgagaacatcaccttcctctgtacacttggaaatgcctctggcttgttgcagccctcctttaacccaaaggaggaaaggactgcttcagaaactcccaattccaaaaagctgagtctgggtccattattttggcagaactcctaagaatttatgggagcctatataaacatatcttgcttttaaaaagttcttgagggaatagcaactttcccatggctgtgcctatttcctagaccttttaaaagatgtgcagagcagcttagcattcgttgcagctgagcctaattttttcttgctcatccttgtccctttgacaataaggttaattgatagacccaccacctcttgcactctcgcttttggagcaagttgcattaactattttgagtctctatattgtccaagaaaagtagaaataataaatttactttccctttttctatcaccttatgtcctctaccattttctccttcctcccttcccttattttctccttttcgtaccctgtgtcctccctgattttcctttcgtttcttctttattttatcccattctctgttacttgactcagtgctcccttcctctcctctccttctagtggatgcatgcagcctttttttcaatttttatttaaattgcaaaatttttactcagattttttttcctcttccctaattgctaagatttaaggacgttctttattatgaaactttatcacattcgaaatgtttgtttacagtgggattttaggggggattgtgtttaaatcaaatatatgtattttaaaaataatgacatgctcaaccttcctcatcatggagtaagaaaattctacatgattaaagaatccatgtaagtctaattttaaattcctagtaactagagaaaagacttatttatataaaatgaagtatttatgaactgtgataaagcatcaaatcttgatgaaggattgtagatttttgctttttctttttgtttttaaaacttattccaattgctaaattggtagtttttcagtctttataaatacaggattaaaaatatatatacagttatatgaaatgtttattttctatgtgtgtgcatatagttcaatattatgcaataaatttggtgttttaacttaaaacta

SEQ ID NO: 298602 - DNA, 5353 bp, Homo sapiens
  misc_feature (5170)..(5170): n is a, c, g, or t
gaaacttccttattattgtgacgccgaaaacggagaaaccccgggtccggcgagaggggctgtgacagtcggagtcccaagctgcggttcggctgctgccgagaactgcaaggtgtggaatatttctggcttctagtccaatgccaagtgtgtgacctgtggctacatgattccctgaaagataagaacaatgttatgttggggatattggtctctgggccaacctggtatcagcaccaacctgcagggaattgtggctgagccccaggtgtgtgggttcatatctgacagaagtgtcaaggaagtggcctgtgggggaaaccactctgtgttcctgctggaagatggggaagtttacacatgtggtttgaacaccaaggggcaactgggccatgagagggaaggaaacaagccagaacaaattggagctctggcagatcagcatatcattcatgtggcatgtggcgagtcccacagtctggccctcagtgaccgaggccagctgttttcttggggtgcagggagtgatggtcagctaggactcatgactactgaggattctgtggcagtgcccaggttaatacaaaagctgaaccagcaaacaatattacaagtttcctgtggcaactggcattgcttggctcttgcggctgatggccagttcttcacctggggaaagaacagccatgggcagcttggcttagggaaggagttcccctcccaagccagcccacagagggtgaggtccctggaggggatcccactggctcaggtggctgccggaggggctcacagctttgccctgtctctctcaggagctgtttttggctgggggatgaataatgccgggcagctagggctcagtgatgaaaaagatcgagaatctccatgccatgtaaaactcttacgcacgcaaaaagttgtctatattagttgtggagaagaacacacagcagttctcacaaagagtggaggtgtgtttacctttggcgctggttcctgtgggcaacttggacacgactccatgaatgatgaggttaaccctagaagagttctagagctgatgggtagtgaagtaactcaaattgcttgtggcagacaacataccctagccttcgtgccttcttctggactcatctatgcatttggttgtggagcaagaggtcaattaggaactgggcacacttgtaatgttaagtgcccatctcctgtcaagggttactgggctgcccacagtggccagctttcagcccgagctgatcgctttaaatatcatatcgttaagcagatcttctctggaggagaccagacttttgtactttgctccaaatacgagaattattctcctgctgttgacttcaggactatgaaccaagcacattataccagtttaataaatgatgaaaccatagcagtttggagacaaaaactctcagaacacaacaatgcaaatacaatcaatggtgttgttcagatattatcttctgcagcctgttggaatggaagttttcttgaaaaaaaaattgatgaacattttaaaacgagtcccaaaatccctgggattgacctgaactcaactagggtgttatttgagaagttaatgaactctcagcactccatgattctagaacagattttgaacagttttgaaagttgtctgattccccagttgtcaagctcaccaccagatgttgaagccatgagaatctatttaatactacctgagtttcccctactccaggattccaagtattatataacattgactattcccttggctatggccattcttcggctggatacaaaccccagcaaagtactagataactggtggtctcaggtatgcccgaaatatttcatgaagctggtaaacctctataaaggtgcagtcctttatctactgaggggaagaaagacattcttaattcccgtactgtttaacaattatatcacagcagctctcaaactcttggagaagttatataaggtaaatcttaaagtgaagcatgtggaatatgatacattttacattcctgagatttccaatctcgtggacattcaggaagactacctcatgtggttcttgcatcaagcagggatgaaggctagaccatcaataatacaggatactgtaacactttgttcctaccctttcatctttgatgcccaagccaagagtggcagtcaatggagccaacctgcagaatgtcttcatgcttctcaccctggagcctctgctggccagaagccccttcctggtccttcacgttcgcaggaacaaccttgttggagatgccctaagagagctgagcattcattctgatattgatttgaaaaagcctctcaaagtaatctttgatggtgaagaagcagtggatgccggtggtgttacaaaggaattttttcttttgctgttaaaagaacttttgaatcccatctatggaatgtttacctactatcaagattcaaatctcttgtggttttcagacacgtgttttgtagagcacaactggtttcacttgattggtataacctgtggactagctatctacaactccactgtggtcgatctccacttcccattggctctctacaagaagttactcaatgtaaagcctggcttggaagacttaaaggagttgtcacccactgaaggaaggagtctccaagagcttttagattaccccggggaggatgtggaggagactttctgcctcaacttcacgatctgccgagaaagctatggagtgattgaacagaagaagctgatacctgggggagataatgtaactgtgtgcaaggataacaggcaggaatttgtggatgcttatgtgaattatgtcttccaaatctcagttcatgaatggtacacagccttctctagtggcttcctaaaggtgtgtggtggcaaagtacttgagctcttccagccttcagaactgagggctatgatggtggggaacagcaactacaactgggaagaactggaagagactgccatctacaagggagattactcggccacacatcccactgtaaaactattttgggaaacatttcatgagtttccattggaaaagaagaagaagtttctcttgttcctgacaggcagcgatcggattcccatctacggcatggccagtctgcagattgtcatccagtccacagccagcggggaggagtacttgccggtggcccacacttgctacaaccttcttgacctccccaagtacagcagcaaagagattctgagtgcccggctgacccaggcccttgacaactatgaagggtttagtttggcctgaggcttctcagcttgtccagtatttcccttcgttcctcagtgtccacattgaggcctatacagaaaatcatggggagtgatttctatttttttattgtctaagtgggttgggacttttaaatactgagcctggttgatgtgtttctgggattgtatagcagtaaacaacctttttgaaaaattagaggttggggatggggtgaaaaattggcccttgtatgggaggtgtttttgtttttgttttaaaccaaactacccagtattccttgcacttgtgaatgtgttgcactctgctggatgaaatggcagtggatttttaaactttaatttcccaaatgtctctctcagccctgatgttttctcacagtgcttccttgtccttctcttaacttctcattcctctataagaatgatttagactgacctgtccttttttatctgcgcatgcgagaacatcaccttcctctgtacacttggaaatgcctctggcttgttgcagccctcctttaacccaaaggaggaaaggactgcttcagaaactcccaattccaaaaagctgagtctgggtccattattttggcagaactcctaagaatttatgggagcctatataaacatatcttgcttttaaaaagttcttgagggaatagcaactttcccatggctgtgcctatttcctagaccttttaaaagatgtgcagagcagcttagcattcgttgcagctgagcctaattttttcttgctcatccttgtccctttgacaataaggttaattgatagacccaccacctcttgcactctcgcttttggagcaagttgcattaactattttgagtctctatattgtccaagaaaagtagaaataataaatttactttccctttttctatcaccttatgtcctctaccattttctccttcctcccttcccttattttctccttttcgtaccctgtgtcctccctgattttcctttcgtttcttctttattttatcccattctctgttacttgactcagtgctcccttcctctcctctccttctagtggatgcatgcagcctttttttcaatttttatttaaattgcaaaatttttactcagattttttttcctcttccctaattgctaagatttaaggacgttctttattatgaaactttatcacattcgaaatgtttgtttacagtgggattttaggggggattgtgtttaaatcaaatatatgtattttaaaaataatgacatgctcaaccttcctcatcatggagtaagaaaattctacatgattaaagaatccatgtaagtctaattttaaattcctagtaactagagaaaagacttatttatataaaatgaagtatttatgaactgtgataaagcatcaaatcttgatgaaggattgtagatttttgctttttctttttgtttttaaaacttattccaattgctaaattggtagtttttcagtctttataaatacaggattaaaaatatatatacagttatatgaaatgtttattttctatgtgtgtgcatatagttcaatattatgcaataaatttggtgttttaacttaaaactaaaaaaaaaaaaaaaaaaaaaaaaaaaaaaaaaaaaaaaaaaaaaaaaaaaaaaaaaaaaaaaaaaaaaaaaaaaaaaaaaaaaaaaaaaaaaaaaaaataaaaaaaaaaaaaataaactaaaaaactaaaaataaaataaattaaataacaaatatatacaaaaaaaaaaattttccccctctttctccaacactattttttccctcacacattttaatttactcccctactactcctttatattctcataatccccaaatcttttattctttaatcatttcnccctcttttctcatataattcctcctctttaaacatctttttctctacccaatattacatcctttctctactaacacaaccctcttttactaacttactcaaatacatctaatctctctcataacatctctcattctcctttatacttctctctctattctcctctcatcatcttcttcttct

SEQ ID NO: 298603 - DNA, 4013 bp, Homo sapiens
gaaacttccttattattgtgacgccgaaaacggagaaaccccgggtccggcgagaggggctgtgacagtcggagtcccaagctgcggttcggctgctgccgagaactgcaaggtgtggaatatttctggcttctagtccaatgccaagtgtgtgacctgtggctacatgattccctgaaagataagaacaatgttatgttggggatattggtctctgggccaacctggtatcagcaccaacctgcagggaattgtggctgagccccaggtgtgtgggttcatatctgacagaagtgtcaaggaagtggcctgtgggggaaaccactctgtgttcctgctggaagatggggaagtttacacatgtggtttgaacaccaaggggcaactgggccatgagagggaaggaaacaagccagaacaaattggagctctggcagatcagcatatcattcatgtggcatgtggcgagtcccacagtctggccctcagtgaccgaggccagctgttttcttggggtgcagggagtgatggtcagctaggactcatgactactgaggattctgtggcagtgcccaggttaatacaaaagctgaaccagcaaacaatattacaagtttcctgtggcaactggcattgcttggctcttgcggctgatggccagttcttcacctggggaaagaacagccatgggcagcttggcttagggaaggagttcccctcccaagccagcccacagagggtgaggtccctggaggggatcccactggctcaggtggctgccggaggggctcacagctttgccctgtctctctcaggagctgtttttggctgggggatgaataatgccgggcagctagggctcagtgatgaaaaagatcgagaatctccatgccatgtaaaactcttacgcacgcaaaaagttgtctatattagttgtggagaagaacacacagcagttctcacaaagagtggaggtgtgtttacctttggcgctggttcctgtgggcaacttggacacgactccatgaatgatgaggttaaccctagaagagttctagagctgatgggtagtgaagtaactcaaattgcttgtggcagacaacataccctagccttcgtgccttcttctggactcatctatgcatttggttgtggagcaagaggtcaattaggaactgggcacacttgtaatgttaagtgcccatctcctgtcaagggttactgggctgcccacagtggccagctttcagcccgagctgatcgctttaaatatcatatcgttaagcagatcttctctggaggagaccagacttttgtactttgctccaaatacgagaattattctcctgctgttgacttcaggactatgaaccaagcacattataccagtttaataaatgatgaaaccatagcagtttggagacaaaaactctcagaacacaacaatgcaaatacaatcaatggtgttgttcagatattatcttctgcagcctgttggaatggaagttttcttgaaaaaaaaattgatgaacattttaaaacgagtcccaaaatccctgggattgacctgaactcaactagggtgttatttgagaagttaatgaactctcagcactccatgattctagaacagattttgaacagttttgaaagttgtctgattccccagttgtcaagctcaccaccagatgttgaagccatgagaatctatttaatactacctgagtttcccctactccaggattccaagtattatataacattgactattcccttggctatggccattcttcggctggatacaaaccccagcaaagtactagataactggtggtctcaggtatgcccgaaatatttcatgaagctggtaaacctctataaaggtgcagtcctttatctactgaggggaagaaagacattcttaattcccgtactgtttaacaattatatcacagcagctctcaaactcttggagaagttatataaggtaaatcttaaagtgaagcatgtggaatatgatacattttacattcctgagatttccaatctcgtggacattcaggaagactacctcatgtggttcttgcatcaagcagggatgaaggctagaccatcaataatacaggatactgtaacactttgttcctaccctttcatctttgatgcccaagccaagagtggcagtcaatggagccaacctgcagaatgtcttcatgcttctcaccctggagcctctgctggccagaagccccttcctggtccttcacgttcgcaggaacaaccttgttggagatgccctaagagagctgagcattcattctgatattgatttgaaaaagcctctcaaagtaatctttgatggtgaagaagcagtggatgccggtggtgttacaaaggaattttttcttttgctgttaaaagaacttttgaatcccatctatggaatgtttacctactatcaagattcaaatctcttgtggttttcagacacgtgttttgtagagcacaactggtttcacttgattggtataacctgtggactagctatctacaactccactgtggtcgatctccacttcccattggctctctacaagaagttactcaatgtaaagcctggcttggaagacttaaaggagttgtcacccactgaaggaaggagtctccaagagcttttagattaccccggggaggatgtggaggagactttctgcctcaacttcacgatctgccgagaaagctatggagtgattgaacagaagaagctgatacctgggggagataatgtaactgtgtgcaaggataacaggcaggaatttgtggatgcttatgtgaattatgtcttccaaatctcagttcatgaatggtacacagccttctctagtggcttcctaaaggtgtgtggtggcaaagtacttgagctcttccagccttcagaactgagggctatgatggtggggaacagcaactacaactgggaagaactggaagagactgccatctacaagggagattactcggccacacatcccactgtaaaactattttgggaaacatttcatgagtttccattggaaaagaagaagaagtttctcttgttcctgacaggcagcgatcggattcccatctacggcatggccagtctgcagattgtcatccagtccacagccagcggggaggagtacttgccggtggcccacacttgctacaaccttcttgacctccccaagtacagcagcaaagagattctgagtgcccggctgacccaggcccttgacaactatgaagggtttagtttggcctgaggcttctcagcttgtccagtatttcccttcgttcctcagtgtccacattgaggcctatacagaaaatcatggggagtgatttctatttttttattgtctaagtgggttgggacttttaaatactgagcctggttgatgtgtttctgggattgtatagcagtaaacaacctttttgaaaaattagaggttggggatggggtgaaaaattggcccttgtatgggaggtgtttttgtttttgttttaaaccaaactacccagtattccttgcacttgtgaatgtgttgcactctgctggatgaaatggcagtggatttttaaactttaatttcccaaatgtctctctcagccctgatgttttctcacagtgcttccttgtccttctcttaacttctcattcctctataagaatgatttagactgacctgtccttttttatctgcgcatgcgagaacatcaccttcctctgtacacttggaaatgcctctggcttgttgcagccctcctttaacccaaaggaggaaaggactgcttcagaaactcccaattccaaaaagctgagtctgggtccattattttggcagaactcctaagaatttatgggagcctatataaacatatcttgcttttaaaaagttcttgagggaatagcaactttcccatggctgtgcctatttcctagaccttttgctcatccttgtccctttgac

SEQ ID NO: 298604 - DNA, 3327 bp, Homo sapiens
gaaacttccttattattgtgacgccgaaaacggagaaaccccgggtccggcgagaggggctgtgacagtcggagtcccaagctgcggttcggctgctgccgagaactgcaaggtgtggaatatttctggcttctagtccaatgccaagtgtgtgacctgtggctacatgattccctgaaagataagaacaatgttatgttggggatattggtctctgggccaacctggtatcagcaccaacctgcagggaattgtggctgagccccaggtgtgtgggttcatatctgacagaagtgtcaaggaagtggcctgtgggggaaaccactctgtgttcctgctggaagatggggaagtttacacatgtggtttgaacaccaaggggcaactgggccatgagagggaaggaaacaagccagaacaaattggagctctggcagatcagcatatcattcatgtggcatgtggcgagtcccacagtctggccctcagtgaccgaggccagctgttttcttggggtgcagggagtgatggtcagctaggactcatgactactgaggattctgtggcagtgcccaggttaatacaaaagctgaaccagcaaacaatattacaagtttcctgtggcaactggcattgcttggctcttgcggctgatggccagttcttcacctggggaaagaacagccatgggcagcttggcttagggaaggagttcccctcccaagccagcccacagagggtgaggtccctggaggggatcccactggctcaggtggctgccggaggggctcacagctttgccctgtctctctcaggagctgtttttggctgggggatgaataatgccgggcagctagggctcagtgatgaaaaagatcgagaatctccatgccatgtaaaactcttacgcacgcaaaaagttgtctatattagttgtggagaagaacacacagcagttctcacaaagagtggaggtgtgtttacctttggcgctggttcctgtgggcaacttggacacgactccatgaatgatgaggttaaccctagaagagttctagagctgatgggtagtgaagtaactcaaattgcttgtggcagacaacataccctagccttcgtgccttcttctggactcatctatgcatttggttgtggagcaagaggtcaattaggaactgggcacacttgtaatgttaagtgcccatctcctgtcaagggttactgggctgcccacagtggccagctttcagcccgagctgatcgctttaaatatcatatcgttaagcagatcttctctggaggagaccagacttttgtactttgctccaaatacgagaattattctcctgctgttgacttcaggactatgaaccaagcacattataccagtttaataaatgatgaaaccatagcagtttggagacaaaaactctcagaacacaacaatgcaaatacaatcaatggtgttgttcagatattatcttctgcagcctgttggaatggaagttttcttgaaaaaaaaattgatgaacattttaaaacgagtcccaaaatccctgggattgacctgaactcaactagggtgttatttgagaagttaatgaactctcagcactccatgattctagaacagattttgaacagttttgaaagttgtctgattccccagttgtcaagctcaccaccagatgttgaagccatgagaatctatttaatactacctgagtttcccctactccaggattccaagtattatataacattgactattcccttggctatggccattcttcggctggatacaaaccccagcaaagtactagataactggtggtctcaggtatgcccgaaatatttcatgaagctggtaaacctctataaaggtgcagtcctttatctactgaggggaagaaagacattcttaattcccgtactgtttaacaattatatcacagcagctctcaaactcttggagaagttatataaggtaaatcttaaagtgaagcatgtggaatatgatacattttacattcctgagatttccaatctcgtggacattcaggaagactacctcatgtggttcttgcatcaagcagggatgaaggctagaccatcaataatacaggatactgtaacactttgttcctaccctttcatctttgatgcccaagccaagagtggcagtcaatggagccaacctgcagaatgtcttcatgcttctcaccctggagcctctgctggccagaagccccttcctggtccttcacgttcgcaggaacaaccttgttggagatgccctaagagagctgagcattcattctgatattgatttgaaaaagcctctcaaagtaatctttgatggtgaagaagcagtggatgccggtggtgttacaaaggaattttttcttttgctgttaaaagaacttttgaatcccatctatggaatgtttacctactatcaagattcaaatctcttgtggttttcagacacgtgttttgtagagcacaactggtttcacttgattggtataacctgtggactagctatctacaactccactgtggtcgatctccacttcccattggctctctacaagaagttactcaatgtaaagcctggcttggaagacttaaaggagttgtcacccactgaaggaagtccttcctcccttcccttattttctccttttcgtaccctgtgtcctccctgattttcctttcgtttcttctttattttatcccattctctgttacttgactcagtgctcccttcctctcctctccttctagtggatgcatgcagcctttttttcaatttttatttaaattgcaaaatttttactcagattttttttcctcttccctaattgctaagatttaaggacgttctttattatgaaactttatcacattcgaaatgtttgtttacagtgggattttaggggggattgtgtttaaatcaaatatatgtattttaaaaataatgacatgctcaaccttcctcatcatggagtaagaaaattctacatgattaaagaatccatgtaagtctaattttaaattcctagtaactagagaaaagacttatttatataaaatgaagtatttatgaactgtgataaagcatcaaatcttgatgaaggattgtagatttttgctttttctttttgtttttaaaacttattccaattgctaaattggtagtttttcagtctttataaatacaggattaaaaatatatatacagttatatgaaatgtttattttctatgtgtgtgcatatagttcaatattatgcaataaatttggtgttttaacttaaaacta

SEQ ID NO: 298605 - DNA, 747 bp, Homo sapiens
ccaatcaacatccaaccccaatcaacatccacctttttaatctggcaaaacaatacattttacttgctttaccaatttatccttcctcccttcccttattttctccttttcgtaccctgtgtcctccctgattttcctttcgtttcttctttattttatcccattctctgttacttgactcagtgctcccttcctctcctctccttctagtggatgcatgcagcctttttttcaatttttatttaaattgcaaaatttttactcagattttttttcctcttccctaattgctaagatttaaggacgttctttattatgaaactttatcacattcgaaatgtttgtttacagtgggattttaggggggattgtgtttaaatcaaatatatgtattttaaaaataatgacatgctcaaccttcctcatcatggagtaagaaaattctacatgattaaagaatccatgtaagtctaattttaaattcctagtaactagagaaaagacttatttatataaaatgaagtatttatgaactgtgataaagcatcaaatcttgatgaaggattgtagatttttgctttttctttttgtttttaaaacttattccaattgctaaattggtagtttttcagtctttataaatacaggattaaaaatatatatacagttatatgaaatgtttattttctatgtgtgtgcatatagttcaatattatgcaataaatttggtgttttaacttaaaacta

SEQ ID NO: 298606 - DNA, 1909 bp, Homo sapiens
gaaacttccttattattgtgacgccgaaaacggagaaaccccgggtccggcgagaggggctgtgacagtcggagtcccaagctgcggttcggctgctgccgagaactgcaaggtgtggaatatttctggcttctagtccaatgccaagtgtgtgacctgtggctacatgattccctgaaagataagaacaatgttatgttggggatattggtctctgggccaacctggtatcagcaccaacctgcagggaattgtggctgagccccaggtgtgtgggttcatatctgacagaagtgtcaaggaagtggcctgtgggggaaaccactctgtgttcctgctggaagatggggaagtttacacatgtggtttgaacaccaaggggcaactgggccatgagagggaaggaaacaagccagaacaaattggagctctggcagatcagcatatcattcatgtggcatgtggcgagtcccacagtctggccctcagtgaccgaggccagctgttttcttggggtgcagggagtgatggtcagctaggactcatgactactgaggattctgtggcagtgcccaggttaatacaaaagctgaaccagcaaacaatattacaagtttcctgtggcaactggcattgcttggctcttgcggctgatggccagttcttcacctggggaaagaacagccatgggcagcttggcttagggaaggagttcccctcccaagccagcccacagagggtgaggtccctggaggggatcccactggctcaggtggctgccggaggggctcacagctttgccctgtctctctcaggagctgtttttggctgggggatgaataatgccgggcagctagggctcagtgatgaaaaagatcgagaatctccatgccatgtaaaactcttacgcacgcaaaaagttgtctatattagttgtggagaagaacacacagcagttctcacaaagagtggaggtgtgtttacctttggcgctggttcctgtgggcaacttggacacgactccatgaatgatgaggttaaccctagaagagttctagagctgatgggtagtgaagtaactcaaattgcttgtggcagacaacataccctagccttcgtgccttcttctggactcatctatgcatttggttgtggagcaagaggtcaattaggaactgggcacacttgtaatgttaagtgcccatctcctgtcaagggttactgggctgcccacagtggccagctttcagcccgagctgatcgctttaaatatcatatcgttaagcagatcttctctggaggagaccagacttttgtactttgctccaaatacgagaattattctcctgctgttgacttcaggactatgaaccaagcacattataccagtttaataaatgatgaaaccatagcagtttggagacaaaaactctcagaacacaacaatgcaaatacaatcaagtatgtggctgcttgtcttcatttttttttccacaaagtatgttacaactttttagcttagtgtgattttccgtacttgcatattgatactgtgaatgtaaatggggttttacattatagggaatcgtgggttatttttggttactatttcagggttgatctccttagccccaaatagcataatggatggatccccaattctcacacacagtatatgcctcaacctgccttgtttattgtatgatcttaaaaatcctgactgatgaaggcctgagttggtgattctgctaagagagcttagcgttatggttaactcccatgggttttagtgtatgcatgttccaaaacatcccaaatctgagacagctgttatcttacctaatcttaataatttctagcattttcctattcataatgattgagatggtaattcagagtcatgtagaaa

SEQ ID NO: 298607 - DNA, 395 bp, Homo sapiens
gtaagactcagcttacctctctgttatatcacttgggagttttggttttggcagtctgatagcatgaagtatctctgttcctttgctcttgggtgggtttggtgttggggggcaactggcaaatgaccctaataactagattatttttgtgtgtggagcttgtatcattttatggtaataccagttatcctgttatttcagatggccagttcttcacctggggaaagaacagccatgggcagcttggcttagggaaggagttcccctcccaagccagcccacagagggtgaggtccctggaggggatcccactggctcaggtggctgccggaggggctcacagctttgccctgtctctctcaggagctgtttttggctgggggatgaataatgcc

SEQ ID NO: 298608 - DNA, 661 bp, Homo sapiens
gccacttttccttttctgtcattctatgattaggagtctccaagagcttttagattaccccggggaggatgtggaggagactttctgcctcaacttcacggtaagaatttccacagtttacttaggattgtggctgtctctcttaccatctttagagtgatatttaacattagttcttcttcaaatcatagaaaaaagtcagagacttctttgaatcaaattattttagtcatagtgtcttgagtgttataggggttcagtgggcgtgttgaataaatgaatgaatgattaatctgttatttattgcatttattggcaactccatgtcctaaaacaaaagatgttttttaacctgctaatgttttctgactcaagttctgattattctcccactaattttctgtaatagtcatgaaactacatttgttcctaaagcctctctcagtcatttgagttctagaaagatgaatggttaacaaaattgaaatatttcttttttccaccttaaatatagatctgccgagaaagctatggagtgattgaacagaagaagctgatacctgggggagataatgtaactgtgtgcaaggataacaggttagtcctgaccttggactgttgcagatactgctacttcatatttctgcagttttacatttaa

SEQ ID NO: 298609 - DNA, 510 bp, Homo sapiens
gagtaagaaaattctacatgattaaagaatccatgtaagtctaattttaaattcctagtaactagagaaaagacttatttatataaaatgaagtatttatgaactgtgataaagcatcaaatcttgatgaaggattgtagatttttgctttttctttttgtttttaaaacttattccaattgctaaattggtagtttttcagtctttataaatacaggattaaaaatatatatacagttatatgaaatgtttattttctatgtgtgtgcatatagttcaatattatgcaataaatttggtgttttaacttaaaactatttcttattgtacttgcagaatggatagcttgcttttagtagaagcattaggtcgtatactcagataatctaatagaaggtcagatttgattcctgcataagaaagtagagccaagtgctgcagaaatggagaagaaagcaggggcaaggagcagatggcattaaggaagaatgaagtttttgaaggttggga

SEQ ID NO: 298610 - DNA, 1287 bp, Homo sapiens
  misc_feature (822)..(822): n is a, c, g, or t
cagagggcgggaggaagcgggaggaactccgtcgtcctccgcgcgcgcctgcccgcggctggggaaccaagggcctggaggggaaacagctccctgctgcgttgttttgggctccgtgagccgaaagggggaggggagacgaaggagaagcaaacactgcgcagcgggaccgtgcgcggcctccgctcctgcgtgcgtgcgctcgctcgcgcgggctcagtgctggcgcgtgaggcggaggcgggcggcggcggcggcgcctgcgcggtcggactcggtcgacggttcgcaggggaggaggcggcgggaggcggaggaggcggcggcggcgatggaggtgaagcggctgaaagtgaccgagctgcggtcggagctgcagcggcggggcctggactcgcgcggcctcaaggtggatctggcgcagcggctgcaggaggcgctggacgccgagatgctcgaggacgaggccggcggcggcggggccgggcccggcggggcctgcaaggcggagcctcggcctgtggccgcgtcgggcggcggcccgggcggggacgaggaggaggacgaagaggaggaggaggaggacgaggaggcgctgcttgaggacgaggacgaggagccaccccctgctcaagccttgggtcaggccgcgcagccgccgccggagcccccggaggcggcagccatggaggccgcggccgagccagatgcttccgagaagccggcggaggccacggccgggtcaggcggggtaaatggtggcgaagagcagggcctcggcaagagggaggaagacgaacccgaggagcggagcggagcggngacgagacgccgggatccgaggtgccgggtgacaaggccgccgaggaacagggagatgaccaggatagtgaaaagtcaaaaccttcgtctccctctcttttacccagagacagcacatacgtgtgcacacgcatgcacacacacattcagtattttaaaagaatgttttcttggtgccattttcattttattttattttttaattcttggagggggaaataagggaataaggccaaggaagatgtatagctttagctttagcctggcaacctggagaatccacataccttgtgtattgaaccccaggaaaaggaagaggtcgaaccaaccctgcggaaggagcatggtttcaggagtttattttaagactgctgggaaggaaacaggccccattttgtatatagttgcaacttaaactttttggcttgcaaaatatttttgtaataaagatttctgggtaataat

SEQ ID NO: 298611 - DNA, 288 bp, Homo sapiens
gggtacaggcgcgaggaacagggagatgaccaggatagtgaaaagtcaaaaccagcaggctcagatggtgagcggcggggggtaaagagacagcgggatgagaaggatgaacatggccgagcttactatgaattccgagaggaggcttaccacagccgctcaaagtctccactgcctcctgaagaagaggcaaaagatgaggaggaggatcaaactcttgtgaacctggacacgtgaccgacctggattcgcgaccgacctggattcgcgaccgacctggattcgcga

SEQ ID NO: 298612 - DNA, 3610 bp, Homo sapiens
  misc_feature (33)..(33): n is a, c, g, or t
tacactaaaggcgaggccggctagcggagcggngacgagacgccgggatccgaggtgccgggtgacaaggccgccgaggaacagggagatgaccaggatagtgaaaagtcaaaaccagcaggctcagatggtgagcggcggggggtaaagagacagcgggatgagaaggatgaacatggccgagcttactatgaattccgagaggaggcttaccacagccgctcaaagtctccactgcctcctgaagaagaggcaaaagatgaggaggaggatcaaactcttgtgaacctggacacgtatacctcggatctgcattttcaagtgagcaaagaccgctatggagggcagccacttttctcagagaagttccccaccctttggtctggggcaaggagtacttacggagtgacaaagggaaaagtctgctttgaggcaaaggtaacccagaatctcccaatgaaagaaggctgcacagaggtctctctccttcgagttgggtggtctgttgatttttcccgtccacagcttggtgaagatgaattctcttacggtttcgatggacgaggactcaaggcagaaaatggacaatttgaggaatttggccagacttttggggagaatgatgttattggctgctttgctaattttgagactgaagaagtagaactttccttctccaagaatggagaagacctaggtgtggcattctggatcagcaaggattccctggcagaccgggcccttctaccccatgtcctctgcaaaaattgtgttgtagaattaaacttcggtcagaaggaggagcccttcttcccaccaccagaagagtttgtgttcattcatgctgtgcctgttgaggagcgtgtacgcactgcagtccctcccaagaccatagaggaatgtgaggtgattctgatggtgggactacccggatctggaaagacccagtgggcactgaaatatgcaaaagaaaaccctgagaaaagatacaatgtcctgggagctgagactgtgctcaatcaaatgaggatgaagggtctcgaggagccagagatggaccccaaaagccgagaccttttagttcagcaagcctcccagtgccttagtaagctggtccagattgcttcccggacaaagaggaactttattcttgatcagtgtaatgtgtacaattctggccaacggcggaagctattgctgttcaagaccttctctcggaaagtggtggtggttgtccctaatgaggaagattggaagaagaggctggagttgaggaaggaagtagagggagatgatgtgcctgaatctataatgctggagatgaaagccaacttctctttgcctgaaaaatgcgactatatggatgaggtgacatatggggagctggagaaggaggaagctcagcccattgtcactaagtacaaggaggaggcaaggaagcttctgcccccctccgagaagcggacaaatcgccgaaacaaccgaaacaagcgtaaccggcagaaccgaagccggggccaaggctatgtgggcgggcagcgccgaggctacgacaaccgggcctacgggcagcagtactgggggcagcctggaaacagagggggttaccgtaatttctatgatcgatacaggggagactatgatcgattttacgggcgagattatgagtacaacagatacagagactattacagacaatacaatcgggattggcagagttactactaccaccacccccaggacagagaccgatactacaggaattactacgggtaccaagggtatcggtgaagcccctgccatggtcacctgtcagccatgaagctgaatctctgggggtgccaggcacccccgcaaaacacaaccaaggaaaacaggggctgtcggggtggggctgagctgccggggaggggtggtggggggggagggtgctcaagcaggggtgggggaggggggaggtggaaacaaacaacaaaactgtacattttttttaaagtttgttgaaaagaatattgtcttattctataaaacatttcaaacctagttagagatttgtaatcaaaaaacatttgcgcagaaagcagcacttagggctgcctgttctataccctacagtcagacaggaaaagaactgaaaatggcacccttctgacattctgaggcagctggactggcagccaagtaaaggagagtgatgaggtggtgtggggagggtggggaggcagcgcgagggtgctctccacagcaggtaggagcaggcaggagtggggacagagggagagcttgtgactgggacagtgaaaataaacgattggctcttatcaatcacttgcaccaactaaccgtttgtattttctttaccgacctttcccttttgggatatgtggtctggtgggctgggaggcttacagtgtcccaactctccattttcctgtgcctttgtgctgtttggctgaggcatggagactgccagtgggtggttctattttacaggattcccaggccaagaaagcctggggactgtccttgatggcagagcagaatagcctgccccttctatagacccattgattaattcctgtaaaatcttggggagaatgggattgcagccctcagcctaaagattgtgatttgccagtctctagtctctgtcttccaaggttgagagaggtgggaggtctctgaaatcatccctgttagagtgtctgtcctcttacagtgcgagagaaggaacgtttctcagggtttcagctcacacgaaaacacagcaggattcttttcactgcagcgggatatgtatataggtgaatcctgtggtgtgggctcacaggcccaggtgctgagaatagcaactagcaactattttctacagtgtggagggctcgtgccctgctggtttttttgatacacaggtagagaatgaatagaagaggggagggtggtgggggggggtgggaggcagctcagtggggctgctgaaccttgggaagagtgtgagtgtgaacgtgtgtaaatgtgcgtgtgaaagggagcaccccttcccgacttctagaaacaaaattccttttggggcgctttccctgtgtgtccccagagaggcctctagccaggagccttcagttgggatagtttcatttgtgactttaccaataccctcccagttcttgatagacagctgtaggttgctgggttcaagaatatgggtgggatatggaatgctctttcaatgtctagcttcagttttcattcatcctcctgctcagcactgtcagccaagagcttactcagcagacaccacatactgcagcagttcctagtgagaaaatctgtgccactagaaaatgcttcacttccatttcctcacctgggcagttctctgtttaaaattgtgggctgatttggtcttcctctcctcctcccactgttactgccctgcagcccttgttcaggtgtacaggacccttattctggcctctagtgtccttgtctgtcatgacacacccttccgcccaaatacctctgaccccaaggctggaatggggctggtaggagataagtttgcttactcatagtcatgtcctttctcttggcacctgcttccctgcggtgt

SEQ ID NO: 298613 - DNA, 4399 bp, Homo sapiens
  misc_feature (822)..(822): n is a, c, g, or t
cagagggcgggaggaagcgggaggaactccgtcgtcctccgcgcgcgcctgcccgcggctggggaaccaagggcctggaggggaaacagctccctgctgcgttgttttgggctccgtgagccgaaagggggaggggagacgaaggagaagcaaacactgcgcagcgggaccgtgcgcggcctccgctcctgcgtgcgtgcgctcgctcgcgcgggctcagtgctggcgcgtgaggcggaggcgggcggcggcggcggcgcctgcgcggtcggactcggtcgacggttcgcaggggaggaggcggcgggaggcggaggaggcggcggcggcgatggaggtgaagcggctgaaagtgaccgagctgcggtcggagctgcagcggcggggcctggactcgcgcggcctcaaggtggatctggcgcagcggctgcaggaggcgctggacgccgagatgctcgaggacgaggccggcggcggcggggccgggcccggcggggcctgcaaggcggagcctcggcctgtggccgcgtcgggcggcggcccgggcggggacgaggaggaggacgaagaggaggaggaggaggacgaggaggcgctgcttgaggacgaggacgaggagccaccccctgctcaagccttgggtcaggccgcgcagccgccgccggagcccccggaggcggcagccatggaggccgcggccgagccagatgcttccgagaagccggcggaggccacggccgggtcaggcggggtaaatggtggcgaagagcagggcctcggcaagagggaggaagacgaacccgaggagcggagcggagcggngacgagacgccgggatccgaggtgccgggtgacaaggccgccgaggaacagggagatgaccaggatagtgaaaagtcaaaaccagcaggctcagatggtgagcggcggggggtaaagagacagcgggatgagaaggatgaacatggccgagcttactatgaattccgagaggaggcttaccacagccgctcaaagtctccactgcctcctgaagaagaggcaaaagatgaggaggaggatcaaactcttgtgaacctggacacgtatacctcggatctgcattttcaagtgagcaaagaccgctatggagggcagccacttttctcagagaagttccccaccctttggtctggggcaaggagtacttacggagtgacaaagggaaaagtctgctttgaggcaaaggtaacccagaatctcccaatgaaagaaggctgcacagaggtctctctccttcgagttgggtggtctgttgatttttcccgtccacagcttggtgaagatgaattctcttacggtttcgatggacgaggactcaaggcagaaaatggacaatttgaggaatttggccagacttttggggagaatgatgttattggctgctttgctaattttgagactgaagaagtagaactttccttctccaagaatggagaagacctaggtgtggcattctggatcagcaaggattccctggcagaccgggcccttctaccccatgtcctctgcaaaaattgtgttgtagaattaaacttcggtcagaaggaggagcccttcttcccaccaccagaagagtttgtgttcattcatgctgtgcctgttgaggagcgtgtacgcactgcagtccctcccaagaccatagaggaatgtgaggtgattctgatggtgggactacccggatctggaaagacccagtgggcactgaaatatgcaaaagaaaaccctgagaaaagatacaatgtcctgggagctgagactgtgctcaatcaaatgaggatgaagggtctcgaggagccagagatggaccccaaaagccgagaccttttagttcagcaagcctcccagtgccttagtaagctggtccagattgcttcccggacaaagaggaactttattcttgatcagtgtaatgtgtacaattctggccaacggcggaagctattgctgttcaagaccttctctcggaaagtggtggtggttgtccctaatgaggaagattggaagaagaggctggagttgaggaaggaagtagagggagatgatgtgcctgaatctataatgctggagatgaaagccaacttctctttgcctgaaaaatgcgactatatggatgaggtgacatatggggagctggagaaggaggaagctcagcccattgtcactaagtacaaggaggaggcaaggaagcttctgcccccctccgagaagcggacaaatcgccgaaacaaccgaaacaagcgtaaccggcagaaccgaagccggggccaaggctatgtgggcgggcagcgccgaggctacgacaaccgggcctacgggcagcagtactgggggcagcctggaaacagagggggttaccgtaatttctatgatcgatacaggggagactatgatcgattttacgggcgagattatgagtacaacagatacagagactattacagacaatacaatcgggattggcagagttactactaccaccacccccaggacagagaccgatactacaggaattactacgggtaccaagggtatcggtgaagcccctgccatggtcacctgtcagccatgaagctgaatctctgggggtgccaggcacccccgcaaaacacaaccaaggaaaacaggggctgtcggggtggggctgagctgccggggaggggtggtggggggggagggtgctcaagcaggggtgggggaggggggaggtggaaacaaacaacaaaactgtacattttttttaaagtttgttgaaaagaatattgtcttattctataaaacatttcaaacctagttagagatttgtaatcaaaaaacatttgcgcagaaagcagcacttagggctgcctgttctataccctacagtcagacaggaaaagaactgaaaatggcacccttctgacattctgaggcagctggactggcagccaagtaaaggagagtgatgaggtggtgtggggagggtggggaggcagcgcgagggtgctctccacagcaggtaggagcaggcaggagtggggacagagggagagcttgtgactgggacagtgaaaataaacgattggctcttatcaatcacttgcaccaactaaccgtttgtattttctttaccgacctttcccttttgggatatgtggtctggtgggctgggaggcttacagtgtcccaactctccattttcctgtgcctttgtgctgtttggctgaggcatggagactgccagtgggtggttctattttacaggattcccaggccaagaaagcctggggactgtccttgatggcagagcagaatagcctgccccttctatagacccattgattaattcctgtaaaatcttggggagaatgggattgcagccctcagcctaaagattgtgatttgccagtctctagtctctgtcttccaaggttgagagaggtgggaggtctctgaaatcatccctgttagagtgtctgtcctcttacagtgcgagagaaggaacgtttctcagggtttcagctcacacgaaaacacagcaggattcttttcactgcagcgggatatgtatataggtgaatcctgtggtgtgggctcacaggcccaggtgctgagaatagcaactagcaactattttctacagtgtggagggctcgtgccctgctggtttttttgatacacaggtagagaatgaatagaagaggggagggtggtgggggggggtgggaggcagctcagtggggctgctgaaccttgggaagagtgtgagtgtgaacgtgtgtaaatgtgcgtgtgaaagggagcaccccttcccgacttctagaaacaaaattccttttggggcgctttccctgtgtgtccccagagaggcctctagccaggagccttcagttgggatagtttcatttgtgactttaccaataccctcccagttcttgatagacagctgtaggttgctgggttcaagaatatgggtgggatatggaatgctctttcaatgtctagcttcagttttcattcatcctcctgctcagcactgtcagccaagagcttactcagcagacaccacatactgcagcagttcctagtgagaaaatctgtgccactagaaaatgcttcacttccatttcctcacctgggcagttctctgtttaaaattgtgggctgatttggtcttcctctcctcctcccactgttactgccctgcagcccttgttcaggtgtacaggacccttattctggcctctagtgtccttgtctgtcatgacacacccttccgcccaaatacctctgaccccaaggctggaatggggctggtaggagataagtttgcttactcatagtcatgtcctttctcttggcacctgcttccctgcggtgt

SEQ ID NO: 298614 - DNA, 2803 bp, Homo sapiens
  misc_feature (33)..(33): n is a, c, g, or t
  misc_feature (2372)..(2372): n is a, c, g, or t
  misc_feature (2375)..(2375): n is a, c, g, or t
tacactaaaggcgaggccggctagcggagcggngacgagacgccgggatccgaggtgccgggtgacaaggccgccgaggaacagggagatgaccaggatagtgaaaagtcaaaaccagcaggctcagatggtgagcggcggggggtaaagagacagcgggatgagaaggatgaacatggccgagcttactatgaattccgagaggaggcttaccacagccgctcaaagtctccactgcctcctgaagaagaggcaaaagatgaggaggaggatcaaactcttgtgaacctggacacgtatacctcggatctgcattttcaagtgagcaaagaccgctatggagggcagccacttttctcagagaagttccccaccctttggtctggggcaaggagtacttacggagtgacaaagggaaaagtctgctttgaggcaaaggtaacccagaatctcccaatgaaagaaggctgcacagaggtctctctccttcgagttgggtggtctgttgatttttcccgtccacagcttggtgaagatgaattctcttacggtttcgatggacgaggactcaaggcagaaaatggacaatttgaggaatttggccagacttttggggagaatgatgttattggctgctttgctaattttgagactgaagaagtagaactttccttctccaagaatggagaagacctaggtgtggcattctggatcagcaaggattccctggcagaccgggcccttctaccccatgtcctctgcaaaaattgtgttgtagaattaaacttcggtcagaaggaggagcccttcttcccaccaccagaagagtttgtgttcattcatgctgtgcctgttgaggagcgtgtacgcactgcagtccctcccaagaccatagaggaatgtgaggtgattctgatggtgggactacccggatctggaaagacccagtgggcactgaaatatgcaaaagaaaaccctgagaaaagatacaatgtcctgggagctgagactgtgctcaatcaaatgaggatgaagggtctcgaggagccagagatggaccccaaaagccgagaccttttagttcagcaagcctcccagtgccttagtaagctggtccagattgcttcccggacaaagaggaactttattcttgatcagtgtaatgtgtacaattctggccaacggcggaagctattgctgttcaagaccttctctcggaaagtggtggtggttgtccctaatgaggaagattggaagaagaggctggagttgaggaaggaagtagagggagatgatgtgcctgaatctataatgctggagatgaaagccaacttctctttgcctgaaaaatgcgactatatggatgaggtgacatatggggagctggagaaggaggaagctcagcccattgtcactaagtacaaggaggaggcaaggaagcttctgcccccctccgagaagcggacaaatcgccgaaacaaccgaaacaagcgtaaccggcagaaccgaagccggggccaaggctatgtgggcgggcagcgccgaggctacgacaaccgggcctacgggcagcagtactgggggcagcctggaaacagagggggttaccgtaatttctatgatcgatacaggggagactatgatcgattttacgggcgagattatgagtacaacagatacagagactattacagacaatacaatcgggattggcagagttactactaccaccacccccaggacagagaccgatactacaggaattactacgggtaccaagggtatcggtgaagcccctgccatggtcacctgtcagccatgaagctgaatctctgggggtgccaggcacccccgcaaaacacaaccaaggaaaacaggggctgtcggggtggggctgagctgccggggaggggtggtggggggggagggtgctcaagcaggggtgggggaggggggaggtggaaacaaacaacaaaactgtacattttttttaaagtttgttgaaaagaatattgtcttattctataaaacatttcaaacctagttagagatttgtaatcaaaaaacatttgcgcagaaagcagcacttagggctgcctgttctataccctacagtcagacaggaaaagaactgaaaatggcacccttctgacattctgaggcagctggactggcagccaagtaaaggagagtgatgaggtggtgtggggagggtggggaggcagcgcgagggtgctctccacagcaggtaggagcaggcaggagtggggacagagggagagcttgtgactgggacagtgaaaataaacgattggctcttatcaatcacttgcaccaactaaaaaaaaaaaagaaaaaaaaaaaaaaaaaanaanaaaagaaaaaaaaaaaaagaaaaacaaaaaaaaagaaagaaagaaaaagaaaagaaaagaagagaaaagaaaaaaagaaaaaagaagaaaaaaaacaaaaacagagagaaacaacaagaaaaggggggggcggcgacactagactacagcacgacgggaaggacacacaaacagaacacgaagcaacaggaagatcaaggcgaaagaaggccacacacaaaacaggcggcgtagacaacaaacagcgaccgacagcgcagcacgcaaaaaagaagaaaaacaagagaaggggcggagagaaaagagaaaagaagcgaaggaagaaggaagagaaaagaaacacatcaggcggggagggcaaagaagagaagaggaacgaacacagcggcaaaggaaaaccgcgagagagaacaaaaaaaaaagaggag

SEQ ID NO: 298615 - DNA, 3793 bp, Homo sapiens
cggagagagatgttatgtcggcacccgctctccctgatagatgcggagagcatccagaaacttccagaccagccctctcaccacacccagaagaggcctttcccatctggagagaagcttccagaccagcccttcacacaccacagccaggaggggcctttcccacctggagagaaacttccagaccggcccctcataccacagccaagaggggcctttctcacctggagagaaacttccagaccatcccctctcaccacagccaggagaggcctttcccaccggaagaagaaaatgatccggatcattttcttcttccggcggggggtaaagagacagcgggatgagaaggatgaacatggccgagcttactatgaattccgagaggaggcttaccacagccgctcaaagtctccactgcctcctgaagaagaggcaaaagatgaggaggaggatcaaactcttgtgaacctggacacgtatacctcggatctgcattttcaagtgagcaaagaccgctatggagggcagccacttttctcagagaagttccccaccctttggtctggggcaaggagtacttacggagtgacaaagggaaaagtctgctttgaggcaaaggtaacccagaatctcccaatgaaagaaggctgcacagaggtctctctccttcgagttgggtggtctgttgatttttcccgtccacagcttggtgaagatgaattctcttacggtttcgatggacgaggactcaaggcagaaaatggacaatttgaggaatttggccagacttttggggagaatgatgttattggctgctttgctaattttgagactgaagaagtagaactttccttctccaagaatggagaagacctaggtgtggcattctggatcagcaaggattccctggcagaccgggcccttctaccccatgtcctctgcaaaaattgtgttgtagaattaaacttcggtcagaaggaggagcccttcttcccaccaccagaagagtttgtgttcattcatgctgtgcctgttgaggagcgtgtacgcactgcagtccctcccaagaccatagaggaatgtgaggtgattctgatggtgggactacccggatctggaaagacccagtgggcactgaaatatgcaaaagaaaaccctgagaaaagatacaatgtcctgggagctgagactgtgctcaatcaaatgaggatgaagggtctcgaggagccagagatggaccccaaaagccgagaccttttagttcagcaagcctcccagtgccttagtaagctggtccagattgcttcccggacaaagaggaactttattcttgatcagtgtaatgtgtacaattctggccaacggcggaagctattgctgttcaagaccttctctcggaaagtggtggtggttgtccctaatgaggaagattggaagaagaggctggagttgaggaaggaagtagagggagatgatgtgcctgaatctataatgctggagatgaaagccaacttctctttgcctgaaaaatgcgactatatggatgaggtgacatatggggagctggagaaggaggaagctcagcccattgtcactaagtacaaggaggaggcaaggaagcttctgcccccctccgagaagcggacaaatcgccgaaacaaccgaaacaagcgtaaccggcagaaccgaagccggggccaaggctatgtgggcgggcagcgccgaggctacgacaaccgggcctacgggcagcagtactgggggcagcctggaaacagagggggttaccgtaatttctatgatcgatacaggggagactatgatcgattttacgggcgagattatgagtacaacagatacagagactattacagacaatacaatcgggattggcagagttactactaccaccacccccaggacagagaccgatactacaggaattactacgggtaccaagggtatcggtgaagcccctgccatggtcacctgtcagccatgaagctgaatctctgggggtgccaggcacccccgcaaaacacaaccaaggaaaacaggggctgtcggggtggggctgagctgccggggaggggtggtggggggggagggtgctcaagcaggggtgggggaggggggaggtggaaacaaacaacaaaactgtacattttttttaaagtttgttgaaaagaatattgtcttattctataaaacatttcaaacctagttagagatttgtaatcaaaaaacatttgcgcagaaagcagcacttagggctgcctgttctataccctacagtcagacaggaaaagaactgaaaatggcacccttctgacattctgaggcagctggactggcagccaagtaaaggagagtgatgaggtggtgtggggagggtggggaggcagcgcgagggtgctctccacagcaggtaggagcaggcaggagtggggacagagggagagcttgtgactgggacagtgaaaataaacgattggctcttatcaatcacttgcaccaactaaccgtttgtattttctttaccgacctttcccttttgggatatgtggtctggtgggctgggaggcttacagtgtcccaactctccattttcctgtgcctttgtgctgtttggctgaggcatggagactgccagtgggtggttctattttacaggattcccaggccaagaaagcctggggactgtccttgatggcagagcagaatagcctgccccttctatagacccattgattaattcctgtaaaatcttggggagaatgggattgcagccctcagcctaaagattgtgatttgccagtctctagtctctgtcttccaaggttgagagaggtgggaggtctctgaaatcatccctgttagagtgtctgtcctcttacagtgcgagagaaggaacgtttctcagggtttcagctcacacgaaaacacagcaggattcttttcactgcagcgggatatgtatataggtgaatcctgtggtgtgggctcacaggcccaggtgctgagaatagcaactagcaactattttctacagtgtggagggctcgtgccctgctggtttttttgatacacaggtagagaatgaatagaagaggggagggtggtgggggggggtgggaggcagctcagtggggctgctgaaccttgggaagagtgtgagtgtgaacgtgtgtaaatgtgcgtgtgaaagggagcaccccttcccgacttctagaaacaaaattccttttggggcgctttccctgtgtgtccccagagaggcctctagccaggagccttcagttgggatagtttcatttgtgactttaccaataccctcccagttcttgatagacagctgtaggttgctgggttcaagaatatgggtgggatatggaatgctctttcaatgtctagcttcagttttcattcatcctcctgctcagcactgtcagccaagagcttactcagcagacaccacatactgcagcagttcctagtgagaaaatctgtgccactagaaaatgcttcacttccatttcctcacctgggcagttctctgtttaaaattgtgggctgatttggtcttcctctcctcctcccactgttactgccctgcagcccttgttcaggtgtacaggacccttattctggcctctagtgtccttgtctgtcatgacacacccttccgcccaaatacctctgaccccaaggctggaatggggctggtaggagataagtttgcttactcatagtcatgtcctttctcttggcacctgcttccctgcggtgt

SEQ ID NO: 298616 - DNA, 3797 bp, Homo sapiens
  misc_feature (33)..(33): n is a, c, g, or t
tacactaaaggcgaggccggctagcggagcggngacgagacgccgggatccgaggtgccgggtgacaaggccgccgaggaacagggagatgaccaggatagtgaaaagtcaaaaccagcaggctcagatggtgagcggcggggggtaaagagacagcgggatgagaaggatgaacatggccgagcttactatgaattccgagaggaggcttaccacagccgctcaaagtctccactgcctcctgaagaagaggcaaaagatgaggaggaggatcaaactcttgtgaacctggacacgtgtatgtataaggcagacagactgtggtttttaactaatctcctaaaagtgattttggagattaaaacttcatagcctataaattctatgagactttgtatccactacaacaactggtatacttatgctctgttggcggcttacaagtattggacattggagtaaactgattgcttctttctttacagatacctcggatctgcattttcaagtgagcaaagaccgctatggagggcagccacttttctcagagaagttccccaccctttggtctggggcaaggagtacttacggagtgacaaagggaaaagtctgctttgaggcaaaggtaacccagaatctcccaatgaaagaaggctgcacagaggtctctctccttcgagttgggtggtctgttgatttttcccgtccacagcttggtgaagatgaattctcttacggtttcgatggacgaggactcaaggcagaaaatggacaatttgaggaatttggccagacttttggggagaatgatgttattggctgctttgctaattttgagactgaagaagtagaactttccttctccaagaatggagaagacctaggtgtggcattctggatcagcaaggattccctggcagaccgggcccttctaccccatgtcctctgcaaaaattgtgttgtagaattaaacttcggtcagaaggaggagcccttcttcccaccaccagaagagtttgtgttcattcatgctgtgcctgttgaggagcgtgtacgcactgcagtccctcccaagaccatagaggaatgtgaggtgattctgatggtgggactacccggatctggaaagacccagtgggcactgaaatatgcaaaagaaaaccctgagaaaagatacaatgtcctgggagctgagactgtgctcaatcaaatgaggatgaagggtctcgaggagccagagatggaccccaaaagccgagaccttttagttcagcaagcctcccagtgccttagtaagctggtccagattgcttcccggacaaagaggaactttattcttgatcagtgtaatgtgtacaattctggccaacggcggaagctattgctgttcaagaccttctctcggaaagtggtggtggttgtccctaatgaggaagattggaagaagaggctggagttgaggaaggaagtagagggagatgatgtgcctgaatctataatgctggagatgaaagccaacttctctttgcctgaaaaatgcgactatatggatgaggtgacatatggggagctggagaaggaggaagctcagcccattgtcactaagtacaaggaggaggcaaggaagcttctgcccccctccgagaagcggacaaatcgccgaaacaaccgaaacaagcgtaaccggcagaaccgaagccggggccaaggctatgtgggcgggcagcgccgaggctacgacaaccgggcctacgggcagcagtactgggggcagcctggaaacagagggggttaccgtaatttctatgatcgatacaggggagactatgatcgattttacgggcgagattatgagtacaacagatacagagactattacagacaatacaatcgggattggcagagttactactaccaccacccccaggacagagaccgatactacaggaattactacgggtaccaagggtatcggtgaagcccctgccatggtcacctgtcagccatgaagctgaatctctgggggtgccaggcacccccgcaaaacacaaccaaggaaaacaggggctgtcggggtggggctgagctgccggggaggggtggtggggggggagggtgctcaagcaggggtgggggaggggggaggtggaaacaaacaacaaaactgtacattttttttaaagtttgttgaaaagaatattgtcttattctataaaacatttcaaacctagttagagatttgtaatcaaaaaacatttgcgcagaaagcagcacttagggctgcctgttctataccctacagtcagacaggaaaagaactgaaaatggcacccttctgacattctgaggcagctggactggcagccaagtaaaggagagtgatgaggtggtgtggggagggtggggaggcagcgcgagggtgctctccacagcaggtaggagcaggcaggagtggggacagagggagagcttgtgactgggacagtgaaaataaacgattggctcttatcaatcacttgcaccaactaaccgtttgtattttctttaccgacctttcccttttgggatatgtggtctggtgggctgggaggcttacagtgtcccaactctccattttcctgtgcctttgtgctgtttggctgaggcatggagactgccagtgggtggttctattttacaggattcccaggccaagaaagcctggggactgtccttgatggcagagcagaatagcctgccccttctatagacccattgattaattcctgtaaaatcttggggagaatgggattgcagccctcagcctaaagattgtgatttgccagtctctagtctctgtcttccaaggttgagagaggtgggaggtctctgaaatcatccctgttagagtgtctgtcctcttacagtgcgagagaaggaacgtttctcagggtttcagctcacacgaaaacacagcaggattcttttcactgcagcgggatatgtatataggtgaatcctgtggtgtgggctcacaggcccaggtgctgagaatagcaactagcaactattttctacagtgtggagggctcgtgccctgctggtttttttgatacacaggtagagaatgaatagaagaggggagggtggtgggggggggtgggaggcagctcagtggggctgctgaaccttgggaagagtgtgagtgtgaacgtgtgtaaatgtgcgtgtgaaagggagcaccccttcccgacttctagaaacaaaattccttttggggcgctttccctgtgtgtccccagagaggcctctagccaggagccttcagttgggatagtttcatttgtgactttaccaataccctcccagttcttgatagacagctgtaggttgctgggttcaagaatatgggtgggatatggaatgctctttcaatgtctagcttcagttttcattcatcctcctgctcagcactgtcagccaagagcttactcagcagacaccacatactgcagcagttcctagtgagaaaatctgtgccactagaaaatgcttcacttccatttcctcacctgggcagttctctgtttaaaattgtgggctgatttggtcttcctctcctcctcccactgttactgccctgcagcccttgttcaggtgtacaggacccttattctggcctctagtgtccttgtctgtcatgacacacccttccgcccaaatacctctgaccccaaggctggaatggggctggtaggagataagtttgcttactcatagtcatgtcctttctcttggcacctgcttccctgcggtgt

SEQ ID NO: 298617 - DNA, 2559 bp, Homo sapiens
ggctagccagaggtaggacatgtggctgcaggcaatcaaaacaacaggtttactgctgttggtgctgctgcaaagttgctataaggatagggagagagaggcggaagtgtaatgtgtacaattctggccaacggcggaagctattgctgttcaagaccttctctcggaaagtggtggtggttgtccctaatgaggaagattggaagaagaggctggagttgaggaaggaagtagagggagatgatgtgcctgaatctataatgctggagatgaaagccaacttctctttgcctgaaaaatgcgactatatggatgaggtgacatatggggagctggagaaggaggaagctcagcccattgtcactaagtacaaggaggaggcaaggaagcttctgcccccctccgagaagcggacaaatcgccgaaacaaccgaaacaagcgtaaccggcagaaccgaagccggggccaaggctatgtgggcgggcagcgccgaggctacgacaaccgggcctacgggcagcagtactgggggcagcctggaaacagagggggttaccgtaatttctatgatcgatacaggggagactatgatcgattttacgggcgagattatgagtacaacagatacagagactattacagacaatacaatcgggattggcagagttactactaccaccacccccaggacagagaccgatactacaggaattactacgggtaccaagggtatcggtgaagcccctgccatggtcacctgtcagccatgaagctgaatctctgggggtgccaggcacccccgcaaaacacaaccaaggaaaacaggggctgtcggggtggggctgagctgccggggaggggtggtggggggggagggtgctcaagcaggggtgggggaggggggaggtggaaacaaacaacaaaactgtacattttttttaaagtttgttgaaaagaatattgtcttattctataaaacatttcaaacctagttagagatttgtaatcaaaaaacatttgcgcagaaagcagcacttagggctgcctgttctataccctacagtcagacaggaaaagaactgaaaatggcacccttctgacattctgaggcagctggactggcagccaagtaaaggagagtgatgaggtggtgtggggagggtggggaggcagcgcgagggtgctctccacagcaggtaggagcaggcaggagtggggacagagggagagcttgtgactgggacagtgaaaataaacgattggctcttatcaatcacttgcaccaactaaccgtttgtattttctttaccgacctttcccttttgggatatgtggtctggtgggctgggaggcttacagtgtcccaactctccattttcctgtgcctttgtgctgtttggctgaggcatggagactgccagtgggtggttctattttacaggattcccaggccaagaaagcctggggactgtccttgatggcagagcagaatagcctgccccttctatagacccattgattaattcctgtaaaatcttggggagaatgggattgcagccctcagcctaaagattgtgatttgccagtctctagtctctgtcttccaaggttgagagaggtgggaggtctctgaaatcatccctgttagagtgtctgtcctcttacagtgcgagagaaggaacgtttctcagggtttcagctcacacgaaaacacagcaggattcttttcactgcagcgggatatgtatataggtgaatcctgtggtgtgggctcacaggcccaggtgctgagaatagcaactagcaactattttctacagtgtggagggctcgtgccctgctggtttttttgatacacaggtagagaatgaatagaagaggggagggtggtgggggggggtgggaggcagctcagtggggctgctgaaccttgggaagagtgtgagtgtgaacgtgtgtaaatgtgcgtgtgaaagggagcaccccttcccgacttctagaaacaaaattccttttggggcgctttccctgtgtgtccccagagaggcctctagccaggagccttcagttgggatagtttcatttgtgactttaccaataccctcccagttcttgatagacagctgtaggttgctgggttcaagaatatgggtgggatatggaatgctctttcaatgtctagcttcagttttcattcatcctcctgctcagcactgtcagccaagagcttactcagcagacaccacatactgcagcagttcctagtgagaaaatctgtgccactagaaaatgcttcacttccatttcctcacctgggcagttctctgtttaaaattgtgggctgatttggtcttcctctcctcctcccactgttactgccctgcagcccttgttcaggtgtacaggacccttattctggcctctagtgtccttgtctgtcatgacacacccttccgcccaaatacctctgaccccaaggctggaatggggctggtaggagataagtttgcttactcatagtcatgtcctttctcttggcacctgcttccctgcggtgt

SEQ ID NO: 298618 - DNA, 2148 bp, Homo sapiens
  misc_feature (5)..(6): n is a, c, g, or t
  misc_feature (53)..(54): n is a, c, g, or t
gctcnntcctctctgctcagagcattcgcgctctcacagaagccccaatcacnncaggcattcgtgtgggcgggcagcgccgaggctacgacaaccgggcctacgggcagcagtactgggggcagcctggaaacagagggggttaccgtaatttctatgatcgatacaggggagactatgatcgattttacgggcgagattatgagtacaacagatacagagactattacagacaatacaatcgggattggcagagttactactaccaccacccccaggacagagaccgatactacaggaattactacgggtaccaagggtatcggtgaagcccctgccatggtcacctgtcagccatgaagctgaatctctgggggtgccaggcacccccgcaaaacacaaccaaggaaaacaggggctgtcggggtggggctgagctgccggggaggggtggtggggggggagggtgctcaagcaggggtgggggaggggggaggtggaaacaaacaacaaaactgtacattttttttaaagtttgttgaaaagaatattgtcttattctataaaacatttcaaacctagttagagatttgtaatcaaaaaacatttgcgcagaaagcagcacttagggctgcctgttctataccctacagtcagacaggaaaagaactgaaaatggcacccttctgacattctgaggcagctggactggcagccaagtaaaggagagtgatgaggtggtgtggggagggtggggaggcagcgcgagggtgctctccacagcaggtaggagcaggcaggagtggggacagagggagagcttgtgactgggacagtgaaaataaacgattggctcttatcaatcacttgcaccaactaaccgtttgtattttctttaccgacctttcccttttgggatatgtggtctggtgggctgggaggcttacagtgtcccaactctccattttcctgtgcctttgtgctgtttggctgaggcatggagactgccagtgggtggttctattttacaggattcccaggccaagaaagcctggggactgtccttgatggcagagcagaatagcctgccccttctatagacccattgattaattcctgtaaaatcttggggagaatgggattgcagccctcagcctaaagattgtgatttgccagtctctagtctctgtcttccaaggttgagagaggtgggaggtctctgaaatcatccctgttagagtgtctgtcctcttacagtgcgagagaaggaacgtttctcagggtttcagctcacacgaaaacacagcaggattcttttcactgcagcgggatatgtatataggtgaatcctgtggtgtgggctcacaggcccaggtgctgagaatagcaactagcaactattttctacagtgtggagggctcgtgccctgctggtttttttgatacacaggtagagaatgaatagaagaggggagggtggtgggggggggtgggaggcagctcagtggggctgctgaaccttgggaagagtgtgagtgtgaacgtgtgtaaatgtgcgtgtgaaagggagcaccccttcccgacttctagaaacaaaattccttttggggcgctttccctgtgtgtccccagagaggcctctagccaggagccttcagttgggatagtttcatttgtgactttaccaataccctcccagttcttgatagacagctgtaggttgctgggttcaagaatatgggtgggatatggaatgctctttcaatgtctagcttcagttttcattcatcctcctgctcagcactgtcagccaagagcttactcagcagacaccacatactgcagcagttcctagtgagaaaatctgtgccactagaaaatgcttcacttccatttcctcacctgggcagttctctgtttaaaattgtgggctgatttggtcttcctctcctcctcccactgttactgccctgcagcccttgttcaggtgtacaggacccttattctggcctctagtgtccttgtctgtcatgacacacccttccgcccaaatacctctgaccccaaggctggaatggggctggtaggagataagtttgcttactcatagtcatgtcctttctcttggcacctgcttccctgcggtgt

SEQ ID NO: 298619 - DNA, 2348 bp, Homo sapiens
  misc_feature (822)..(822): n is a, c, g, or t
cagagggcgggaggaagcgggaggaactccgtcgtcctccgcgcgcgcctgcccgcggctggggaaccaagggcctggaggggaaacagctccctgctgcgttgttttgggctccgtgagccgaaagggggaggggagacgaaggagaagcaaacactgcgcagcgggaccgtgcgcggcctccgctcctgcgtgcgtgcgctcgctcgcgcgggctcagtgctggcgcgtgaggcggaggcgggcggcggcggcggcgcctgcgcggtcggactcggtcgacggttcgcaggggaggaggcggcgggaggcggaggaggcggcggcggcgatggaggtgaagcggctgaaagtgaccgagctgcggtcggagctgcagcggcggggcctggactcgcgcggcctcaaggtggatctggcgcagcggctgcaggaggcgctggacgccgagatgctcgaggacgaggccggcggcggcggggccgggcccggcggggcctgcaaggcggagcctcggcctgtggccgcgtcgggcggcggcccgggcggggacgaggaggaggacgaagaggaggaggaggaggacgaggaggcgctgcttgaggacgaggacgaggagccaccccctgctcaagccttgggtcaggccgcgcagccgccgccggagcccccggaggcggcagccatggaggccgcggccgagccagatgcttccgagaagccggcggaggccacggccgggtcaggcggggtaaatggtggcgaagagcagggcctcggcaagagggaggaagacgaacccgaggagcggagcggagcggngacgagacgccgggatccgaggtgccgggtgacaaggccgccgaggaacagggagatgaccaggatagtgaaaagtcaaaaccagcaggctcagatggtgagcggcggggggtaaagagacagcgggatgagaaggatgaacatggccgagcttactatgaattccgagagcaggcaggagtggggacagagggagagcttgtgactgggacagtgaaaataaacgattggctcttatcaatcacttgcaccaactaaccgtttgtattttctttaccgacctttcccttttgggatatgtggtctggtgggctgggaggcttacagtgtcccaactctccattttcctgtgcctttgtgctgtttggctgaggcatggagactgccagtgggtggttctattttacaggattcccaggccaagaaagcctggggactgtccttgatggcagagcagaatagcctgccccttctatagacccattgattaattcctgtaaaatcttggggagaatgggattgcagccctcagcctaaagattgtgatttgccagtctctagtctctgtcttccaaggttgagagaggtgggaggtctctgaaatcatccctgttagagtgtctgtcctcttacagtgcgagagaaggaacgtttctcagggtttcagctcacacgaaaacacagcaggattcttttcactgcagcgggatatgtatataggtgaatcctgtggtgtgggctcacaggcccaggtgctgagaatagcaactagcaactattttctacagtgtggagggctcgtgccctgctggtttttttgatacacaggtagagaatgaatagaagaggggagggtggtgggggggggtgggaggcagctcagtggggctgctgaaccttgggaagagtgtgagtgtgaacgtgtgtaaatgtgcgtgtgaaagggagcaccccttcccgacttctagaaacaaaattccttttggggcgctttccctgtgtgtccccagagaggcctctagccaggagccttcagttgggatagtttcatttgtgactttaccaataccctcccagttcttgatagacagctgtaggttgctgggttcaagaatatgggtgggatatggaatgctctttcaatgtctagcttcagttttcattcatcctcctgctcagcactgtcagccaagagcttactcagcagacaccacatactgcagcagttcctagtgagaaaatctgtgccactagaaaatgcttcacttccatttcctcacctgggcagttctctgtttaaaattgtgggctgatttggtcttcctctcctcctcccactgttactgccctgcagcccttgttcaggtgtacaggacccttattctggcctctagtgtccttgtctgtcatgacacacccttccgcccaaatacctctgaccccaaggctggaatggggctggtaggagataagtttgcttactcatagtcatgtcctttctcttggcacctgcttccctgcggtgt

SEQ ID NO: 298620 - DNA, 333 bp, Homo sapiens
  misc_feature (33)..(33): n is a, c, g, or t
tacactaaaggcgaggccggctagcggagcggngacgagacgccgggatccgaggtgccgggtgacaaggccgccgaggaacagggagatgaccaggatagtgaaaagtcaaaaccagcaggctcagatggtgagcggcggggggtaaagagacagcgggatgagaaggatgaacatggccgagcttactatgaattccgagaggaggcttaccacagccgctcaaagtctccactgcctcctgaagaagaggcaaaagatgaggaggaggatcaaactcttgtgaacctggacacgtatacccgactcgcctttacgggatcctctagatca

SEQ ID NO: 298621 - DNA, 239 bp, Homo sapiens
caagtattggacattggagtaaactgattgcttctttctttacagatacctcggatctgcattttcaagtgagcaaagaccgctatggagggcagccacttttctcagagaagttccccaccctttggtctggggcaaggagtacttacggagtgacaaagggaaaagtctgctttgaggcaaaggtagctcattaagaccattcattcattcattcatttattactggatgcttacgg

SEQ ID NO: 298622 - DNA, 426 bp, Homo sapiens
ttattatagatcacttaagaacttgtaaatctacatagccctttgcctgggtctgttacaatttagggaaaacttagagtagaaaaagttaatgtcattatttagatgcgagtgggtataaacgtagcacatttttgtgcagtaatagatgaggcatagaaagtcatatgcttcttgtagagttttcataatgagttcttacccatctatgcacttttcaggcccacaagcttctctcttactcttatagccaacttctctttgcctgaaaaatgcgactatatggatgaggtgacatatggggagctggagaaggaggaagctcagcccattgtcactaagtacaaggaggaggcaaggaagcttctgcccccctccgagaagcggacaaatcgccgaaacaaccgaaacaagcgtaaccggcag

SEQ ID NO: 298623 - DNA, 4559 bp, Homo sapiens
tccttgggctctgttggcggcggcgctagcttcggagtctcccgcgcgcacctcagccgcctcctagcggcgcggcgctcgctcctacgcctaaaatgaccaatgtgtgatttcagtggaataaatggcgtccaaagtcacagatgctatagtctggtatcaaaagaagattggagcatatgatcaacaaatatgggaaaaatctgttgaacagagagaaatcaaggggctaaggaataaaccaaagaaaacagcacatgtgaaaccagacctcatagatgttgatcttgtaagagggtctgcatttgcaaaggcaaagcctgaaagtccttggacttctctgaccagaaagggaattgttcgagttgtatttttcccctttttcttccggtggtggttacaagtaacatcaaaggtcatctttttctggcttcttgtcctttatcttcttcaagttgctgcaatagtattattctgctccacttctagcccacacagcatacctctgacagaggtgattgggccgatatggctgatgctgctcctgggaactgtgcattgccagattgtttccacaagaacacccaaacctcctctaagtacagggggtaaaagaagaaggaaattaagaaaagcagcccatttggaagtacatagggaaggagatggttctagtaccacagataacacacaagagggagcagttcagaaccacggtacaagcacctctcacagcgttggcactgtcttcagagatctctggcatgctgctttctttttatcaggatcaaagaaagcaaagaattcaattgataaatcaactgaaactgacaatggctatgtatcccttgatgggaagaagactgttaaaagcggtgaagatggaatacaaaaccatgaacctcagtgtgaaactattcgaccagaagagacagcctggaacacaggaacactgaggaatggtcctagcaaagatacccaaaggacaataacaaatgtctctgatgaagtctccagtgaggaaggtcctgaaacaggatactcattacgtcgtcatgtggacaggacttctgaaggtgttcttcggaatagaaagtcacaccattataagaaacattaccctaatgaggacgcccctaaatcgggtactagttgcagctctcgctgttcaagttccagacaggattctgagagtgcaaggccagaatctgaaacagaagatgtgttatgggaagacttgttacattgtgcagaatgccattcatcttgtaccagtgagacagatgtggaaaatcatcagattaatccatgtgtgaaaaaagaatatagagatgacccttttcatcagagtcatttgccctggctccatagttcccacccaggattagaaaaaataagtgctatagtatgggaaggtaatgattgtaagaaagcagacatgtctgtacttgaaatcagtggaatgataatgaacagagtgaacagccatataccaggaataggataccagatttttggaaatgcagtctctctcatactgggtttaactccatttgttttccgactttctcaagctacagacttggaacaactcacagcacattctgcttcagaactttatgtgattgcatttggttctaatgaagatgtcatagttctttctatggttataataagttttgtggttcgcgtgtctcttgtgtggattttcttttttttgctctgtgtagcagaaagaacttataaacagcgattactttttgcaaaactctttggacatttaacatctgcaaggagggctcgaaaatctgaggttcctcatttccggttgaagaaagtacagaatataaaaatgtggctatctctccgttcctatcttaagcgtcgaggtcctcagcgatcagttgatgtaatagtttcatctgctttcttattgactatctcagttgtatttatctgttgtgcccagataaacctctacttgaaaatggagaaaaaacctaacaaaaaggaggaactgacactagtgaataatgttttaaaactggctactaaactgctaaaggagttggacagtccttttagattatatgggcttacaatgaatccgctgctttataacatcacccaggttgttatcctgtcagctgtttctggtgttatcagtgacttgcttggatttaatttaaagctatggaagattaagtcatgacaattcaaagaaaagaagatgtagcctcttttccagaataagagtactgactaagctgcctgaaagcttgtcactgattctttgcttcaggagtctcagctagggagttgaagtgtttacatcagactgtcttgtgcaattcttatatttattttactggttcacttttttttacatttattttagtctttatatttttatttttaagcattgatgtacttagttgttgaaagggtgatgaaactgatatccagatacttgagatcctggtaattggtcataaataattggcaaaataacaaattgtgaaaatagaagccattgctcagcaccgtttctccatcaatgccgtgaacttgccttacttgaggaaaaattctttaactttggaatattgcattgaactcagctatacacataaaacattttctttggtaaatcaagatccagtcagggtttctcttgaattattttggaacaatgccaggatccaaactgattaagttacagtttaagcacccttcagtattaatatatacggtattatataacaggtcaacaagtgctctttgatgataaaacttgtaatagagcaataattgtaaatggttaccatactgtaagatattttgataaaaattaactagtaatacttgtatttatttgaaacactgggctgtttgcacagctccaactgtgcatgctcaaaatgtgcactttttaaaattgttacttttaatgcgtatctttatatgggatctgttatagtatactagggcatgatatcgtatccttttgagtgaggtatatactcatctcacaagtgaagtgcctactgatattactaaagtacattatgtttactcaagtaaataattttctccccatggtacactctagtgtaggctattcataccacactgaaatgaacaactgaagaataaggctaagaaccaataaaatatttctctaattgctagttgtaaaactgtatccaaattttcagaaaagacagcttcagcttgcaaattctatcctctaaacttatctggtgcattctccccaccccacccccattatataagggctattttagatgcttttaacctccccaacaaataatttgccaagtgtccaatgagaacttatcatgttggtgtgttaggtaaatcgggcaaatatgatagtgtcttacattgggccttgattttaagttgttatatttgtacaatcgagtattttagaaattacatgaaacatgaaacagtttttgcaattttttttaaactgggcatctggtttctaaaaatttatttgaaacaatctagaattttcttggtgcaaagtgtatcatgtggaatatcctcatatttttaccatattttaagaactttaagacgattaattgtaaataatttatttgattggtgcagttctaatccctaaatcataatcttaaaatcaggaatgtgtggagaacagagccatgtcatatcactttgctcttaccattccttttgatcagcctcaattcagcctcattgtgtagtatgttttttctttctatgaaaaacaacagaaagcatttcattttatttgcctatgttcaaatatgtttaataatgaccaaagtgcattctgagttttttcaaggaatgtaatactggagctttaagaacatacttagtttctcatgtgaaaacttaggctttgtctgatgtttttccttcctctattgtctaatgttgaggttgtttttaggaattatgttttataaactttttcaatataaggtacatgcctatacagaacttaacattttgcacagaatatatcaaatatattttgagaaaaaaagtacggcatgagttctgttaggaataaaagatgaaactattgtatctcacaaaaaatcttatttcagaatggaaatatttttgagaaaagtagctgagtatactggtttaagaaaatgcttgttttagattgaggttaacttagagttgggagttgatttattaagtacagtatacctctcaacagtttataaataatatgttgaattatgtcagtgtgggcagcagtagaatactaaaaggaaaatgtcatgttaagcaatttcagaacattaactgaactattttcaaagcagaaaaattgacattgctgcctttaagaataccatgaatgtaagaaattgaaagaaattgtaaaatatcacataatatagaaatggcagttcaaagagaattgtggcagatgttgtgtgtgaactgttgtttctttgccacatgtgttgtatttgaaagttttacagtaagtttaaaataaaacattctgtgactga

SEQ ID NO: 298624 - DNA, 4713 bp, Homo sapiens
tccttgggctctgttggcggcggcgctagcttcggagtctcccgcgcgcacctcagccgcctcctagcggcgcggcgctcgctcctacgcctaaaatgaccaatgtgtgatttcagtggaataaatggcgtccaaagtcacagatgctatagtctggtatcaaaagaagattggagcatatgatcaacaaatatgggaaaaatctgttgaacagagagaaatcaaggggctaaggaataaaccaaagaaaacagcacatgtgaaaccagacctcatagatgttgatcttgtaagagggtctgcatttgcaaaggcaaagcctgaaagtccttggacttctctgaccagaaagggaattgttcgagttgtatttttcccctttttcttccggtggtggttacaagtaacatcaaaggtcatctttttctggcttcttgtcctttatcttcttcaagttgctgcaatagtattattctgctccacttctagcccacacagcatacctctgacagaggtgattgggccgatatggctgatgctgctcctgggaactgtgcattgccagattgtttccacaagaacacccaaacctcctctaagtacagggggtaaaagaagaaggaaattaagaaaagcagcccatttggaagtacatagggaaggagatggttctagtaccacagataacacacaagagggagcagttcagaaccacggtacaagcacctctcacagcgttggcactgtcttcagagatctctggcatgctgctttctttttatcaggatcaaagaaagcaaagaattcaattgataaatcaactgaaactgacaatggctatgtatcccttgatgggaagaagactgttaaaagcggtgaagatggaatacaaaaccatgaacctcagtgtgaaactattcgaccagaagagacagcctggaacacaggaacactgaggaatggtcctagcaaagatacccaaaggacaataacaaatgtctctgatgaagtctccagtgaggaaggtcctgaaacaggatactcattacgtcgtcatgtggacaggacttctgaaggtgttcttcggaatagaaagtcacaccattataagaaacattaccctaatgaggacgcccctaaatcgggtactagttgcagctctcgctgttcaagttccagacaggattctgagagtgcaaggccagaatctgaaacagaagatgtgttatgggaagacttgttacattgtgcagaatgccattcatcttgtaccagtgagacagatgtggaaaatcatcagattaatccatgtgtgaaaaaagaatatagagatgacccttttcatcagagtcatttgccctggctccatagttcccacccaggattagaaaaaataagtgctatagtatgggaaggtaatgattgtaagaaagcagacatgtctgtacttgaaatcagtggaatgataatgaacagagtgaacagccatataccaggaataggataccagatttttggaaatgcagtctctctcatactgggtttaactccatttgttttccgactttctcaagctacagacttggaacaactcacagcacattctgcttcagaactttatgtgattgcatttggttctaatgaagatgtcatagttctttctatggttataataagttttgtggttcgcgtgtctcttgtgtggattttcttttttttgctctgtgtagcagaaagaacttataaacagcgattactttttgcaaaactctttggacatttaacatctgcaaggagggctcgaaaatctgaggttcctcatttccggttgaagaaagtacagaatataaaaatgtggctatctctccgttcctatcttaagcgtcgaggtcctcagcgatcagttgatgtaatagtttcatctgctttcttattgactatctcagttgtatttatctgttgtgcccagctacttcatgtacacgagatcttccttgattgtcactacaattgggaattggtaatctggtgcatctcgttaacactttttctcctaagatttgttacccttggatcagaaacaagtaaaaaatatagtaatacctcaatattacttactgaacataaacctctacttgaaaatggagaaaaaacctaacaaaaaggaggaactgacactagtgaataatgttttaaaactggctactaaactgctaaaggagttggacagtccttttagattatatgggcttacaatgaatccgctgctttataacatcacccaggttgttatcctgtcagctgtttctggtgttatcagtgacttgcttggatttaatttaaagctatggaagattaagtcatgacaattcaaagaaaagaagatgtagcctcttttccagaataagagtactgactaagctgcctgaaagcttgtcactgattctttgcttcaggagtctcagctagggagttgaagtgtttacatcagactgtcttgtgcaattcttatatttattttactggttcacttttttttacatttattttagtctttatatttttatttttaagcattgatgtacttagttgttgaaagggtgatgaaactgatatccagatacttgagatcctggtaattggtcataaataattggcaaaataacaaattgtgaaaatagaagccattgctcagcaccgtttctccatcaatgccgtgaacttgccttacttgaggaaaaattctttaactttggaatattgcattgaactcagctatacacataaaacattttctttggtaaatcaagatccagtcagggtttctcttgaattattttggaacaatgccaggatccaaactgattaagttacagtttaagcacccttcagtattaatatatacggtattatataacaggtcaacaagtgctctttgatgataaaacttgtaatagagcaataattgtaaatggttaccatactgtaagatattttgataaaaattaactagtaatacttgtatttatttgaaacactgggctgtttgcacagctccaactgtgcatgctcaaaatgtgcactttttaaaattgttacttttaatgcgtatctttatatgggatctgttatagtatactagggcatgatatcgtatccttttgagtgaggtatatactcatctcacaagtgaagtgcctactgatattactaaagtacattatgtttactcaagtaaataattttctccccatggtacactctagtgtaggctattcataccacactgaaatgaacaactgaagaataaggctaagaaccaataaaatatttctctaattgctagttgtaaaactgtatccaaattttcagaaaagacagcttcagcttgcaaattctatcctctaaacttatctggtgcattctccccaccccacccccattatataagggctattttagatgcttttaacctccccaacaaataatttgccaagtgtccaatgagaacttatcatgttggtgtgttaggtaaatcgggcaaatatgatagtgtcttacattgggccttgattttaagttgttatatttgtacaatcgagtattttagaaattacatgaaacatgaaacagtttttgcaattttttttaaactgggcatctggtttctaaaaatttatttgaaacaatctagaattttcttggtgcaaagtgtatcatgtggaatatcctcatatttttaccatattttaagaactttaagacgattaattgtaaataatttatttgattggtgcagttctaatccctaaatcataatcttaaaatcaggaatgtgtggagaacagagccatgtcatatcactttgctcttaccattccttttgatcagcctcaattcagcctcattgtgtagtatgttttttctttctatgaaaaacaacagaaagcatttcattttatttgcctatgttcaaatatgtttaataatgaccaaagtgcattctgagttttttcaaggaatgtaatactggagctttaagaacatacttagtttctcatgtgaaaacttaggctttgtctgatgtttttccttcctctattgtctaatgttgaggttgtttttaggaattatgttttataaactttttcaatataaggtacatgcctatacagaacttaacattttgcacagaatatatcaaatatattttgagaaaaaaagtacggcatgagttctgttaggaataaaagatgaaactattgtatctcacaaaaaatcttatttcagaatggaaatatttttgagaaaagtagctgagtatactggtttaagaaaatgcttgttttagattgaggttaacttagagttgggagttgatttattaagtacagtatacctctcaacagtttataaataatatgttgaattatgtcagtgtgggcagcagtagaatactaaaaggaaaatgtcatgttaagcaatttcagaacattaactgaactattttcaaagcagaaaaattgacattgctgcctttaagaataccatgaatgtaagaaattgaaagaaattgtaaaatatcacataatatagaaatggcagttcaaagagaattgtggcagatgttgtgtgtgaactgttgtttctttgccacatgtgttgtatttgaaagttttacagtaagtttaaaataaaacattctgtgactga

SEQ ID NO: 298625 - DNA, 4581 bp, Homo sapiens
tccttgggctctgttggcggcggcgctagcttcggagtctcccgcgcgcacctcagccgcctcctagcggcgcggcgctcgctcctacgcctaaaatgaccaatgtgtgatttcagtggaataaatggcgtccaaagtcacagatgctatagtctggtatcaaaagaagattggagcatatgatcaacaaatatgggaaaaatctgttgaacagagagaaatcaaggggctaaggaataaaccaaagaaaacagcacatgtgaaaccagacctcatagatgttgatcttgtaagagggtctgcatttgcaaaggcaaagcctgaaagtccttggacttctctgaccagaaagggaattgttcgagttgtatttttcccctttttcttccggtggtggttacaagtaacatcaaaggtcatctttttctggcttcttgtcctttatcttcttcaagttgctgcaatagtattattctgctccacttctagcccacacagcatacctctgacagaggtgattgggccgatatggctgatgctgctcctgggaactgtgcattgccagattgtttccacaagaacacccaaacctcctctaagtacagggggtaaaagaagaaggaaattaagaaaagcagcccatttggaagtacatagggaaggagatggttctagtaccacagataacacacaagagggagcagttcagaaccacggtacaagcacctctcacagcgttggcactgtcttcagagatctctggcatgctgctttctttttatcaggatcaaagaaagcaaagaattcaattgataaatcaactgaaactgacaatggctatgtatcccttgatgggaagaagactgttaaaagcggtgaagatggaatacaaaaccatgaacctcagtgtgaaactattcgaccagaagagacagcctggaacacaggaacactgaggaatggtcctagcaaagatacccaaaggacaataacaaatgtctctgatgaagtctccagtgaggaaggtcctgaaacaggatactcattacgtcgtcatgtggacaggacttctgaaggtgttcttcggaatagaaagtcacaccattataagaaacattaccctaatgaggacgcccctaaatcgggtactagttgcagctctcgctgttcaagttccagacaggattctgagagtgcaaggccagaatctgaaacagaagatgtgttatgggaagacttgttacattgtgcagaatgccattcatcttgtaccagtgagacagatgtggaaaatcatcagattaatccatgtgtgaaaaaagaatatagagatgacccttttcatcagagtcatttgccctggctccatagttcccacccaggattagaaaaaataagtgctatagtatgggaaggtaatgattgtaagaaagcagacatgtctgtacttgaaatcagtggaatgataatgaacagagtgaacagccatataccaggaataggataccagatttttggaaatgcagtctctctcatactgggtttaactccatttgttttccgactttctcaagctacagacttggaacaactcacagcacattctgcttcagaactttatgtgattgcatttggttctaatgaagatgtcatagttctttctatggttataataagttttgtggttcgcgtgtctcttgtgtggattttcttttttttgctctgtgtagcagaaagaacttataaacagcgtcgaggtcctcagcgatcagttgatgtaatagtttcatctgctttcttattgactatctcagttgtatttatctgttgtgcccagctacttcatgtacacgagatcttccttgattgtcactacaattgggaattggtaatctggtgcatctcgttaacactttttctcctaagatttgttacccttggatcagaaacaagtaaaaaatatagtaatacctcaatattacttactgaacataaacctctacttgaaaatggagaaaaaacctaacaaaaaggaggaactgacactagtgaataatgttttaaaactggctactaaactgctaaaggagttggacagtccttttagattatatgggcttacaatgaatccgctgctttataacatcacccaggttgttatcctgtcagctgtttctggtgttatcagtgacttgcttggatttaatttaaagctatggaagattaagtcatgacaattcaaagaaaagaagatgtagcctcttttccagaataagagtactgactaagctgcctgaaagcttgtcactgattctttgcttcaggagtctcagctagggagttgaagtgtttacatcagactgtcttgtgcaattcttatatttattttactggttcacttttttttacatttattttagtctttatatttttatttttaagcattgatgtacttagttgttgaaagggtgatgaaactgatatccagatacttgagatcctggtaattggtcataaataattggcaaaataacaaattgtgaaaatagaagccattgctcagcaccgtttctccatcaatgccgtgaacttgccttacttgaggaaaaattctttaactttggaatattgcattgaactcagctatacacataaaacattttctttggtaaatcaagatccagtcagggtttctcttgaattattttggaacaatgccaggatccaaactgattaagttacagtttaagcacccttcagtattaatatatacggtattatataacaggtcaacaagtgctctttgatgataaaacttgtaatagagcaataattgtaaatggttaccatactgtaagatattttgataaaaattaactagtaatacttgtatttatttgaaacactgggctgtttgcacagctccaactgtgcatgctcaaaatgtgcactttttaaaattgttacttttaatgcgtatctttatatgggatctgttatagtatactagggcatgatatcgtatccttttgagtgaggtatatactcatctcacaagtgaagtgcctactgatattactaaagtacattatgtttactcaagtaaataattttctccccatggtacactctagtgtaggctattcataccacactgaaatgaacaactgaagaataaggctaagaaccaataaaatatttctctaattgctagttgtaaaactgtatccaaattttcagaaaagacagcttcagcttgcaaattctatcctctaaacttatctggtgcattctccccaccccacccccattatataagggctattttagatgcttttaacctccccaacaaataatttgccaagtgtccaatgagaacttatcatgttggtgtgttaggtaaatcgggcaaatatgatagtgtcttacattgggccttgattttaagttgttatatttgtacaatcgagtattttagaaattacatgaaacatgaaacagtttttgcaattttttttaaactgggcatctggtttctaaaaatttatttgaaacaatctagaattttcttggtgcaaagtgtatcatgtggaatatcctcatatttttaccatattttaagaactttaagacgattaattgtaaataatttatttgattggtgcagttctaatccctaaatcataatcttaaaatcaggaatgtgtggagaacagagccatgtcatatcactttgctcttaccattccttttgatcagcctcaattcagcctcattgtgtagtatgttttttctttctatgaaaaacaacagaaagcatttcattttatttgcctatgttcaaatatgtttaataatgaccaaagtgcattctgagttttttcaaggaatgtaatactggagctttaagaacatacttagtttctcatgtgaaaacttaggctttgtctgatgtttttccttcctctattgtctaatgttgaggttgtttttaggaattatgttttataaactttttcaatataaggtacatgcctatacagaacttaacattttgcacagaatatatcaaatatattttgagaaaaaaagtacggcatgagttctgttaggaataaaagatgaaactattgtatctcacaaaaaatcttatttcagaatggaaatatttttgagaaaagtagctgagtatactggtttaagaaaatgcttgttttagattgaggttaacttagagttgggagttgatttattaagtacagtatacctctcaacagtttataaataatatgttgaattatgtcagtgtgggcagcagtagaatactaaaaggaaaatgtcatgttaagcaatttcagaacattaactgaactattttcaaagcagaaaaattgacattgctgcctttaagaataccatgaatgtaagaaattgaaagaaattgtaaaatatcacataatatagaaatggcagttcaaagagaattgtggcagatgttgtgtgtgaactgttgtttctttgccacatgtgttgtatttgaaagttttacagtaagtttaaaataaaacattctgtgactga

SEQ ID NO: 298626 - DNA, 4708 bp, Homo sapiens
cagagtgctatgtctgcatgctgttcagtctccttttggaaggtgggaaataaagtcatttgtatgtttttctctcttgcacagcctaaaatgaccaatgtgtgatttcagtggaataaatggcgtccaaagtcacagatgctatagtctggtatcaaaagaagattggagcatatgatcaacaaatatgggaaaaatctgttgaacagagagaaatcaaggggctaaggaataaaccaaagaaaacagcacatgtgaaaccagacctcatagatgttgatcttgtaagagggtctgcatttgcaaaggcaaagcctgaaagtccttggacttctctgaccagaaagggaattgttcgagttgtatttttcccctttttcttccggtggtggttacaagtaacatcaaaggtcatctttttctggcttcttgtcctttatcttcttcaagttgctgcaatagtattattctgctccacttctagcccacacagcatacctctgacagaggtgattgggccgatatggctgatgctgctcctgggaactgtgcattgccagattgtttccacaagaacacccaaacctcctctaagtacagggggtaaaagaagaaggaaattaagaaaagcagcccatttggaagtacatagggaaggagatggttctagtaccacagataacacacaagagggagcagttcagaaccacggtacaagcacctctcacagcgttggcactgtcttcagagatctctggcatgctgctttctttttatcaggatcaaagaaagcaaagaattcaattgataaatcaactgaaactgacaatggctatgtatcccttgatgggaagaagactgttaaaagcggtgaagatggaatacaaaaccatgaacctcagtgtgaaactattcgaccagaagagacagcctggaacacaggaacactgaggaatggtcctagcaaagatacccaaaggacaataacaaatgtctctgatgaagtctccagtgaggaaggtcctgaaacaggatactcattacgtcgtcatgtggacaggacttctgaaggtgttcttcggaatagaaagtcacaccattataagaaacattaccctaatgaggacgcccctaaatcgggtactagttgcagctctcgctgttcaagttccagacaggattctgagagtgcaaggccagaatctgaaacagaagatgtgttatgggaagacttgttacattgtgcagaatgccattcatcttgtaccagtgagacagatgtggaaaatcatcagattaatccatgtgtgaaaaaagaatatagagatgacccttttcatcagagtcatttgccctggctccatagttcccacccaggattagaaaaaataagtgctatagtatgggaaggtaatgattgtaagaaagcagacatgtctgtacttgaaatcagtggaatgataatgaacagagtgaacagccatataccaggaataggataccagatttttggaaatgcagtctctctcatactgggtttaactccatttgttttccgactttctcaagctacagacttggaacaactcacagcacattctgcttcagaactttatgtgattgcatttggttctaatgaagatgtcatagttctttctatggttataataagttttgtggttcgcgtgtctcttgtgtggattttcttttttttgctctgtgtagcagaaagaacttataaacagcgattactttttgcaaaactctttggacatttaacatctgcaaggagggctcgaaaatctgaggttcctcatttccggttgaagaaagtacagaatataaaaatgtggctatctctccgttcctatcttaagcgtcgaggtcctcagcgatcagttgatgtaatagtttcatctgctttcttattgactatctcagttgtatttatctgttgtgcccagctacttcatgtacacgagatcttccttgattgtcactacaattgggaattggtaatctggtgcatctcgttaacactttttctcctaagatttgttacccttggatcagaaacaagtaaaaaatatagtaatacctcaatattacttactgaacataaacctctacttgaaaatggagaaaaaacctaacaaaaaggaggaactgacactagtgaataatgttttaaaactggctactaaactgctaaaggagttggacagtccttttagattatatgggcttacaatgaatccgctgctttataacatcacccaggttgttatcctgtcagctgtttctggtgttatcagtgacttgcttggatttaatttaaagctatggaagattaagtcatgacaattcaaagaaaagaagatgtagcctcttttccagaataagagtactgactaagctgcctgaaagcttgtcactgattctttgcttcaggagtctcagctagggagttgaagtgtttacatcagactgtcttgtgcaattcttatatttattttactggttcacttttttttacatttattttagtctttatatttttatttttaagcattgatgtacttagttgttgaaagggtgatgaaactgatatccagatacttgagatcctggtaattggtcataaataattggcaaaataacaaattgtgaaaatagaagccattgctcagcaccgtttctccatcaatgccgtgaacttgccttacttgaggaaaaattctttaactttggaatattgcattgaactcagctatacacataaaacattttctttggtaaatcaagatccagtcagggtttctcttgaattattttggaacaatgccaggatccaaactgattaagttacagtttaagcacccttcagtattaatatatacggtattatataacaggtcaacaagtgctctttgatgataaaacttgtaatagagcaataattgtaaatggttaccatactgtaagatattttgataaaaattaactagtaatacttgtatttatttgaaacactgggctgtttgcacagctccaactgtgcatgctcaaaatgtgcactttttaaaattgttacttttaatgcgtatctttatatgggatctgttatagtatactagggcatgatatcgtatccttttgagtgaggtatatactcatctcacaagtgaagtgcctactgatattactaaagtacattatgtttactcaagtaaataattttctccccatggtacactctagtgtaggctattcataccacactgaaatgaacaactgaagaataaggctaagaaccaataaaatatttctctaattgctagttgtaaaactgtatccaaattttcagaaaagacagcttcagcttgcaaattctatcctctaaacttatctggtgcattctccccaccccacccccattatataagggctattttagatgcttttaacctccccaacaaataatttgccaagtgtccaatgagaacttatcatgttggtgtgttaggtaaatcgggcaaatatgatagtgtcttacattgggccttgattttaagttgttatatttgtacaatcgagtattttagaaattacatgaaacatgaaacagtttttgcaattttttttaaactgggcatctggtttctaaaaatttatttgaaacaatctagaattttcttggtgcaaagtgtatcatgtggaatatcctcatatttttaccatattttaagaactttaagacgattaattgtaaataatttatttgattggtgcagttctaatccctaaatcataatcttaaaatcaggaatgtgtggagaacagagccatgtcatatcactttgctcttaccattccttttgatcagcctcaattcagcctcattgtgtagtatgttttttctttctatgaaaaacaacagaaagcatttcattttatttgcctatgttcaaatatgtttaataatgaccaaagtgcattctgagttttttcaaggaatgtaatactggagctttaagaacatacttagtttctcatgtgaaaacttaggctttgtctgatgtttttccttcctctattgtctaatgttgaggttgtttttaggaattatgttttataaactttttcaatataaggtacatgcctatacagaacttaacattttgcacagaatatatcaaatatattttgagaaaaaaagtacggcatgagttctgttaggaataaaagatgaaactattgtatctcacaaaaaatcttatttcagaatggaaatatttttgagaaaagtagctgagtatactggtttaagaaaatgcttgttttagattgaggttaacttagagttgggagttgatttattaagtacagtatacctctcaacagtttataaataatatgttgaattatgtcagtgtgggcagcagtagaatactaaaaggaaaatgtcatgttaagcaatttcagaacattaactgaactattttcaaagcagaaaaattgacattgctgcctttaagaataccatgaatgtaagaaattgaaagaaattgtaaaatatcacataatatagaaatggcagttcaaagagaattgtggcagatgttgtgtgtgaactgttgtttctttgccacatgtgttgtatttgaaagttttacagtaagtttaaaataaaacattctgtgactga

SEQ ID NO: 298627 - DNA, 4624 bp, Homo sapiens
caggcaggagctaccacgcccggctctccatatatcttctaaaccttaacttgagaggaaaacaaaaaggggaagtgataccagagttacggaggaaaagctactgtctcaggaactgagaccatgggagggacatgatcacttttagaaagatacagtcagaagaaagaaggaaaaagagaggaagaaagtggctcctcctcctttttctaatgccttgtcgtcagaatttcacagtactccttggccctggattcaggcatggctggattgagaggctcggataatatcttcacttctttttgctgtagactttggtcttgctggtcacattcttaggttggctctttctaggtggtggctaagttgctgcaatagtattattctgctccacttctagcccacacagcatacctctgacagaggtgattgggccgatatggctgatgctgctcctgggaactgtgcattgccagattgtttccacaagaacacccaaacctcctctaagtacagggggtaaaagaagaaggaaattaagaaaagcagcccatttggaagtacatagggaaggagatggttctagtaccacagataacacacaagagggagcagttcagaaccacggtacaagcacctctcacagcgttggcactgtcttcagagatctctggcatgctgctttctttttatcaggatcaaagaaagcaaagaattcaattgataaatcaactgaaactgacaatggctatgtatcccttgatgggaagaagactgttaaaagcggtgaagatggaatacaaaaccatgaacctcagtgtgaaactattcgaccagaagagacagcctggaacacaggaacactgaggaatggtcctagcaaagatacccaaaggacaataacaaatgtctctgatgaagtctccagtgaggaaggtcctgaaacaggatactcattacgtcgtcatgtggacaggacttctgaaggtgttcttcggaatagaaagtcacaccattataagaaacattaccctaatgaggacgcccctaaatcgggtactagttgcagctctcgctgttcaagttccagacaggattctgagagtgcaaggccagaatctgaaacagaagatgtgttatgggaagacttgttacattgtgcagaatgccattcatcttgtaccagtgagacagatgtggaaaatcatcagattaatccatgtgtgaaaaaagaatatagagatgacccttttcatcagagtcatttgccctggctccatagttcccacccaggattagaaaaaataagtgctatagtatgggaaggtaatgattgtaagaaagcagacatgtctgtacttgaaatcagtggaatgataatgaacagagtgaacagccatataccaggaataggataccagatttttggaaatgcagtctctctcatactgggtttaactccatttgttttccgactttctcaagctacagacttggaacaactcacagcacattctgcttcagaactttatgtgattgcatttggttctaatgaagatgtcatagttctttctatggttataataagttttgtggttcgcgtgtctcttgtgtggattttcttttttttgctctgtgtagcagaaagaacttataaacagcgattactttttgcaaaactctttggacatttaacatctgcaaggagggctcgaaaatctgaggttcctcatttccggttgaagaaagtacagaatataaaaatgtggctatctctccgttcctatcttaagcgtcgaggtcctcagcgatcagttgatgtaatagtttcatctgctttcttattgactatctcagttgtatttatctgttgtgcccagctacttcatgtacacgagatcttccttgattgtcactacaattgggaattggtaatctggtgcatctcgttaacactttttctcctaagatttgttacccttggatcagaaacaagtaaaaaatatagtaatacctcaatattacttactgaacataaacctctacttgaaaatggagaaaaaacctaacaaaaaggaggaactgacactagtgaataatgttttaaaactggctactaaactgctaaaggagttggacagtccttttagattatatgggcttacaatgaatccgctgctttataacatcacccaggttgttatcctgtcagctgtttctggtgttatcagtgacttgcttggatttaatttaaagctatggaagattaagtcatgacaattcaaagaaaagaagatgtagcctcttttccagaataagagtactgactaagctgcctgaaagcttgtcactgattctttgcttcaggagtctcagctagggagttgaagtgtttacatcagactgtcttgtgcaattcttatatttattttactggttcacttttttttacatttattttagtctttatatttttatttttaagcattgatgtacttagttgttgaaagggtgatgaaactgatatccagatacttgagatcctggtaattggtcataaataattggcaaaataacaaattgtgaaaatagaagccattgctcagcaccgtttctccatcaatgccgtgaacttgccttacttgaggaaaaattctttaactttggaatattgcattgaactcagctatacacataaaacattttctttggtaaatcaagatccagtcagggtttctcttgaattattttggaacaatgccaggatccaaactgattaagttacagtttaagcacccttcagtattaatatatacggtattatataacaggtcaacaagtgctctttgatgataaaacttgtaatagagcaataattgtaaatggttaccatactgtaagatattttgataaaaattaactagtaatacttgtatttatttgaaacactgggctgtttgcacagctccaactgtgcatgctcaaaatgtgcactttttaaaattgttacttttaatgcgtatctttatatgggatctgttatagtatactagggcatgatatcgtatccttttgagtgaggtatatactcatctcacaagtgaagtgcctactgatattactaaagtacattatgtttactcaagtaaataattttctccccatggtacactctagtgtaggctattcataccacactgaaatgaacaactgaagaataaggctaagaaccaataaaatatttctctaattgctagttgtaaaactgtatccaaattttcagaaaagacagcttcagcttgcaaattctatcctctaaacttatctggtgcattctccccaccccacccccattatataagggctattttagatgcttttaacctccccaacaaataatttgccaagtgtccaatgagaacttatcatgttggtgtgttaggtaaatcgggcaaatatgatagtgtcttacattgggccttgattttaagttgttatatttgtacaatcgagtattttagaaattacatgaaacatgaaacagtttttgcaattttttttaaactgggcatctggtttctaaaaatttatttgaaacaatctagaattttcttggtgcaaagtgtatcatgtggaatatcctcatatttttaccatattttaagaactttaagacgattaattgtaaataatttatttgattggtgcagttctaatccctaaatcataatcttaaaatcaggaatgtgtggagaacagagccatgtcatatcactttgctcttaccattccttttgatcagcctcaattcagcctcattgtgtagtatgttttttctttctatgaaaaacaacagaaagcatttcattttatttgcctatgttcaaatatgtttaataatgaccaaagtgcattctgagttttttcaaggaatgtaatactggagctttaagaacatacttagtttctcatgtgaaaacttaggctttgtctgatgtttttccttcctctattgtctaatgttgaggttgtttttaggaattatgttttataaactttttcaatataaggtacatgcctatacagaacttaacattttgcacagaatatatcaaatatattttgagaaaaaaagtacggcatgagttctgttaggaataaaagatgaaactattgtatctcacaaaaaatcttatttcagaatggaaatatttttgagaaaagtagctgagtatactggtttaagaaaatgcttgttttagattgaggttaacttagagttgggagttgatttattaagtacagtatacctctcaacagtttataaataatatgttgaattatgtcagtgtgggcagcagtagaatactaaaaggaaaatgtcatgttaagcaatttcagaacattaactgaactattttcaaagcagaaaaattgacattgctgcctttaagaataccatgaatgtaagaaattgaaagaaattgtaaaatatcacataatatagaaatggcagttcaaagagaattgtggcagatgttgtgtgtgaactgttgtttctttgccacatgtgttgtatttgaaagttttacagtaagtttaaaataaaacattctgtgactga

SEQ ID NO: 298628 - DNA, 4307 bp, Homo sapiens
tgcaacttaacctgacaattagatcatttcttaaataaaacttcaaaatatatttttaaccataataaaatgggcaaaattttgtttctagattttgttcaaagaccagatgatttactaagaattttttgataagttagggcatgtctcctagaattgttatctgtaagacctcaaaacctttaagctgaaataggacattaatttacatgtttattttagctgttagatatatttctaaattattatacaaatagggtggtcattaaaatttagagaaatagctatctgatgtaattattaacagattataatttctatcagtaacctatccaaaataagctaagtccaaacattcttctgcatattttaatttttagatcaaagaaagcaaagaattcaattgataaatcaactgaaactgacaatggctatgtatcccttgatgggaagaagactgttaaaagcggtgaagatggaatacaaaaccatgaacctcagtgtgaaactattcgaccagaagagacagcctggaacacaggaacactgaggaatggtcctagcaaagatacccaaaggacaataacaaatgtctctgatgaagtctccagtgaggaaggtcctgaaacaggatactcattacgtcgtcatgtggacaggacttctgaaggtgttcttcggaatagaaagtcacaccattataagaaacattaccctaatgaggacgcccctaaatcgggtactagttgcagctctcgctgttcaagttccagacaggattctgagagtgcaaggccagaatctgaaacagaagatgtgttatgggaagacttgttacattgtgcagaatgccattcatcttgtaccagtgagacagatgtggaaaatcatcagattaatccatgtgtgaaaaaagaatatagagatgacccttttcatcagagtcatttgccctggctccatagttcccacccaggattagaaaaaataagtgctatagtatgggaaggtaatgattgtaagaaagcagacatgtctgtacttgaaatcagtggaatgataatgaacagagtgaacagccatataccaggaataggataccagatttttggaaatgcagtctctctcatactgggtttaactccatttgttttccgactttctcaagctacagacttggaacaactcacagcacattctgcttcagaactttatgtgattgcatttggttctaatgaagatgtcatagttctttctatggttataataagttttgtggttcgcgtgtctcttgtgtggattttcttttttttgctctgtgtagcagaaagaacttataaacagcgattactttttgcaaaactctttggacatttaacatctgcaaggagggctcgaaaatctgaggttcctcatttccggttgaagaaagtacagaatataaaaatgtggctatctctccgttcctatcttaagcgtcgaggtcctcagcgatcagttgatgtaatagtttcatctgctttcttattgactatctcagttgtatttatctgttgtgcccagctacttcatgtacacgagatcttccttgattgtcactacaattgggaattggtaatctggtgcatctcgttaacactttttctcctaagatttgttacccttggatcagaaacaagtaaaaaatatagtaatacctcaatattacttactgaacataaacctctacttgaaaatggagaaaaaacctaacaaaaaggaggaactgacactagtgaataatgttttaaaactggctactaaactgctaaaggagttggacagtccttttagattatatgggcttacaatgaatccgctgctttataacatcacccaggttgttatcctgtcagctgtttctggtgttatcagtgacttgcttggatttaatttaaagctatggaagattaagtcatgacaattcaaagaaaagaagatgtagcctcttttccagaataagagtactgactaagctgcctgaaagcttgtcactgattctttgcttcaggagtctcagctagggagttgaagtgtttacatcagactgtcttgtgcaattcttatatttattttactggttcacttttttttacatttattttagtctttatatttttatttttaagcattgatgtacttagttgttgaaagggtgatgaaactgatatccagatacttgagatcctggtaattggtcataaataattggcaaaataacaaattgtgaaaatagaagccattgctcagcaccgtttctccatcaatgccgtgaacttgccttacttgaggaaaaattctttaactttggaatattgcattgaactcagctatacacataaaacattttctttggtaaatcaagatccagtcagggtttctcttgaattattttggaacaatgccaggatccaaactgattaagttacagtttaagcacccttcagtattaatatatacggtattatataacaggtcaacaagtgctctttgatgataaaacttgtaatagagcaataattgtaaatggttaccatactgtaagatattttgataaaaattaactagtaatacttgtatttatttgaaacactgggctgtttgcacagctccaactgtgcatgctcaaaatgtgcactttttaaaattgttacttttaatgcgtatctttatatgggatctgttatagtatactagggcatgatatcgtatccttttgagtgaggtatatactcatctcacaagtgaagtgcctactgatattactaaagtacattatgtttactcaagtaaataattttctccccatggtacactctagtgtaggctattcataccacactgaaatgaacaactgaagaataaggctaagaaccaataaaatatttctctaattgctagttgtaaaactgtatccaaattttcagaaaagacagcttcagcttgcaaattctatcctctaaacttatctggtgcattctccccaccccacccccattatataagggctattttagatgcttttaacctccccaacaaataatttgccaagtgtccaatgagaacttatcatgttggtgtgttaggtaaatcgggcaaatatgatagtgtcttacattgggccttgattttaagttgttatatttgtacaatcgagtattttagaaattacatgaaacatgaaacagtttttgcaattttttttaaactgggcatctggtttctaaaaatttatttgaaacaatctagaattttcttggtgcaaagtgtatcatgtggaatatcctcatatttttaccatattttaagaactttaagacgattaattgtaaataatttatttgattggtgcagttctaatccctaaatcataatcttaaaatcaggaatgtgtggagaacagagccatgtcatatcactttgctcttaccattccttttgatcagcctcaattcagcctcattgtgtagtatgttttttctttctatgaaaaacaacagaaagcatttcattttatttgcctatgttcaaatatgtttaataatgaccaaagtgcattctgagttttttcaaggaatgtaatactggagctttaagaacatacttagtttctcatgtgaaaacttaggctttgtctgatgtttttccttcctctattgtctaatgttgaggttgtttttaggaattatgttttataaactttttcaatataaggtacatgcctatacagaacttaacattttgcacagaatatatcaaatatattttgagaaaaaaagtacggcatgagttctgttaggaataaaagatgaaactattgtatctcacaaaaaatcttatttcagaatggaaatatttttgagaaaagtagctgagtatactggtttaagaaaatgcttgttttagattgaggttaacttagagttgggagttgatttattaagtacagtatacctctcaacagtttataaataatatgttgaattatgtcagtgtgggcagcagtagaatactaaaaggaaaatgtcatgttaagcaatttcagaacattaactgaactattttcaaagcagaaaaattgacattgctgcctttaagaataccatgaatgtaagaaattgaaagaaattgtaaaatatcacataatatagaaatggcagttcaaagagaattgtggcagatgttgtgtgtgaactgttgtttctttgccacatgtgttgtatttgaaagttttacagtaagtttaaaataaaacattctgtgactga

SEQ ID NO: 298629 - DNA, 5000 bp, Homo sapiens
tccttgggctctgttggcggcggcgctagcttcggagtctcccgcgcgcacctcagccgcctcctagcggcgcggcgctcgctcctacgcctaaaatgaccaatgtgtgatttcagtggaataaatggcgtccaaagtcacagatgctatagtctggtatcaaaagaagattggagcatatgatcaacaaatatgggaaaaatctgttgaacagagagaaatcaaggggctaaggaataaaccaaagaaaacagcacatgtgaaaccagacctcatagatgttgatcttgtaagagggtctgcatttgcaaaggcaaagcctgaaagtccttggacttctctgaccagaaagggaattgttcgagttgtatttttcccctttttcttccggtggtggttacaagtaacatcaaaggtcatctttttctggcttcttgtcctttatcttcttcaagttgctgcaatagtattattctgctccacttctagcccacacagcatacctctgacagaggtgattgggccgatatggctgatgctgctcctgggaactgtgcattgccagattgtttccacaagaacacccaaacctcctctaagtacagggggtaaaagaagaaggaaattaagaaaagcagcccatttggaagtacatagggaaggagatggttctagtaccacagataacacacaagagggagcagttcagaaccacggtacaagcacctctcacagcgttggcactgtcttcagagatctctggcatgctgctttctttttatcaggatcaaagaaagcaaagaattcaattgataaatcaactgaaactgacaatggctatgtatcccttgatgggaagaagactgttaaaagcggtgaagatggaatacaaaaccatgaacctcagtgtgaaactattcgaccagaagagacagcctggaacacaggaacactgaggaatggtcctagcaaagatacccaaaggacaataacaaatgtctctgatgaagtctccagtgaggaaggtcctgaaacaggatactcattacgtcgtcatgtggacaggacttctgaaggtgttcttcggaatagaaagtcacaccattataagaaacattaccctaatgaggacgcccctaaatcgggtactagttgcagctctcgctgttcaagttccagacaggattctgagagtgcaaggccagaatctgaaacagaagatgtgttatgggaagacttgttacattgtgcagaatgccattcatcttgtaccagtgagacagatgtggaaaatcatcagattaatccatgtgtgaaaaaagaatatagagatgacccttttcatcagagtcatttgccctggctccatagttcccacccaggattagaaaaaataagtgctatagtatgggaaggtaatgattgtaagaaagcagacatgtctgtacttgaaatcagtggaatgataatgaacagagtgaacagccatataccaggaataggataccagatttttggaaatgcagtctctctcatactgggtttaactccatttgttttccgactttctcaagctacagacttggaacaactcacagcacattctgcttcagaactttatgtgattgcatttggttctaatgaagatgtcatagttctttctatggttataataagttttgtggttcgcgtgtctcttgtgtggattttcttttttttgctctgtgtagcagaaagaacttataaacagcgattactttttgcaaaactctttggacatttaacatctgcaaggagggctcgaaaatctgaggttcctcatttccggttgaagaaagtacagaatataaaaatgtggctatctctccgttcctatcttaagcgtcgaggtcctcagcgatcagttgatgtaatagtttcatctgctttcttattgactatctcagttgtatttatctgttgtgcccagctacttcatgtacacgagatcttccttgattgtcactacaattgggaattggtaatctggtgcatctcgttaacactttttctcctaagatttgttacccttggatcagaaacaagtaaaaaatatagtaatacctcaatattacttactgaacataaacctctacttgaaaatggagaaaaaacctaacaaaaaggaggaactgacactagtgaataatgttttaaaactggctactaaactgctaaaggagttggacagtccttttagattatatgggcttacaatgaatccgctgctttataacatcacccaggttgttatcctgtcagctgtttctggtgttatcagtgacttgcttggatttaatttaaagctatggaagattaagtcatgacaattcaaagaaaagaagatgtagcctcttttccagaataagagtactgactaagctgcctgaaagcttgtcactgattctttgcttcaggagtctcagctagggagttgaagtgtttacatcagactgtcttgtgcaattcttatatttattttactggttcacttttttttacatttattttagtctttatatttttatttttaagcattgatgtacttagttgttgaaagggtgatgaaactgatatccagatacttgagatcctggtaattggtcataaataattggcaaaataacaaattgtgaaaatagaagccattgctcagcaccgtttctccatcaatgccgtgaacttgccttacttgaggaaaaattctttaactttggaatattgcattgaactcagctatacacataaaacattttctttggtaaatcaagatccagtcagggtttctcttgaattattttggaacaatgccaggatccaaactgattaagttacagtttaagcacccttcagtattaatatatacggtattatataacaggtcaacaagtgctctttgatgataaaacttgtaatagagcaataattgtaaatggttaccatactgtaagatattttgataaaaattaactagtaatacttgtatttatttgaaacactgggctgtttgcacagctccaactgtgcatgctcaaaatgtgcactttttaaaattgttacttttaatgcgtatctttatatgggatctgttatagtatactagggcatgatatcgtatccttttgagtgaggtatatactcatctcacaagtgaagtgcctactgatattactaaagtacattatgtttactcaagtaaataattttctccccatggtacactctagtgtaggctattcataccacactgaaatgaacaactgaagaataaggctaagaaccaataaaatatttctctaattgctagttgtaaaactgtatccaaattttcagaaaagacagcttcagcttgcaaattctatcctctaaacttatctggtgcattctccccaccccacccccattatataagggctattttagatgcttttaacctccccaacaaataatttgccaagtgtccaatgagaacttatcatgttggtgtgttaggtaaatcgggcaaatatgatagtgtcttacattgggccttgattttaagttgttatatttgtacaatcgagtattttagaaattacatgaaacatgaaacagtttttgcaattttttttaaactgggcatctggtttctaaaaatttatttgaaacaatctagaattttcttggtgcaaagtgtatcatgtggaatatcctcatatttttaccatattttaagaactttaagacgattaattgtaaataatttatttgattggtgcagttctaatccctaaatcataatcttaaaatcaggaatgtgtggagaacagagccatgtcatatcactttgctcttaccattccttttgatcagcctcaattcagcctcattgtgtagtatgttttttctttctatgaaaaacaacagaaagcatttcattttatttgcctatgttcaaatatgtttaataatgaccaaagtgcattctgagttttttcaaggaatgtaatactggagctttaagaacatacttagtttctcatgtgaaaacttaggctttgtctgatgtttttccttcctctattgtctaatgttgaggttgtttttaggaattatgttttataaactttttcaatataaggtacatgcctatacagaacttaacattttgcacagaatatatcaaatatattttgagaaaaaaagtacggcatgagttctgttaggaataaaagatgaaactattgtatctcacaaaaaatcttatttcagaatggaaatatttttgagaaaagtagctgagtatactggtttaagaaaatgcttgttttagattgaggttaacttagagttgggagttgatttattaagtacagtatacctctcaacagtttataaataatatgttgaattatgtcagtgtgggcagcagtagaatactaaaaggaaaatgtcatgttaagcaatttcagaacattaactgaactattttcaaagcagaaaaattgacattgctgcctttaagaataccatgaatgtaagaaattgaaagaaattgtaaaatatcacataatatagaaatggcagttcaaagagaattgtggcagatgttgtgtgtgaactgttgtttctttgccacatgtgttgtatttgaaagttttacagtaagtttaaaataaaacattctgtgactgacggtgttttttttttttaattttcaggtcatatacatttctatggtaattttgtgtttacttaacataaaatttagttagatttggggggagtgaaaataaattttttataactttccaacattttagattttgttatgattcttagaacatgaaagaataatacacaggtttttcatcaccaaaatgatattatatcattaatgtttgtttgcttctttgtttttgaatacagcaaactggctgtggcctgaaatattaaagctcattgtgaaaagaaaaaaaaaa

SEQ ID NO: 298630 - DNA, 1910 bp, Homo sapiens
tccttgggctctgttggcggcggcgctagcttcggagtctcccgcgcgcacctcagccgcctcctagcggcgcggcgctcgctcctacgcctaaaatgaccaatgtgtgatttcagtggaataaatggcgtccaaagtcacagatgctatagtctggtatcaaaagaagattggagcatatgatcaacaaatatgggaaaaatctgttgaacagagagaaatcaaggggctaaggaataaaccaaagaaaacagcacatgtgaaaccagacctcatagatgttgatcttgtaagagggtctgcatttgcaaaggcaaagcctgaaagtccttggacttctctgaccagaaagggaattgttcgagttgtatttttcccctttttcttccggtggtggttacaagtaacatcaaaggtcatctttttctggcttcttgtcctttatcttcttcaagttgctgcaatagtattattctgctccacttctagcccacacagcatacctctgacagaggtgattgggccgatatggctgatgctgctcctgggaactgtgcattgccagattgtttccacaagaacacccaaacctcctctaagtacagggggtaaaagaagaaggaaattaagaaaagcagcccatttggaagtacatagggaaggagatggttctagtaccacagataacacacaagagggagcagttcagaaccacggtacaagcacctctcacagcgttggcactgtcttcagagatctctggcatgctgctttctttttatcaggatcaaagaaagcaaagaattcaattgataaatcaactgaaactgacaatggctatgtatcccttgatgggaagaagactgttaaaagcggtgaagatggaatacaaaaccatgaacctcagtgtgaaactattcgaccagaagagacagcctggaacacaggaacactgaggaatggtcctagcaaagatacccaaaggacaataacaaatgtctctgatgaagtctccagtgaggaaggtcctgaaacaggatactcattacgtcgtcatgtggacaggacttctgaaggtgttcttcggaatagaaagtcacaccattataagaaacattaccctaatgaggacgcccctaaatcgggtactagttgcagctctcgctgttcaagttccagacaggattctgagagtgcaaggccagaatctgaaacagaagatgtgttatgggaagacttgttacattgtgcagaatgccattcatcttgtaccagtgagacagatgtggaaaatcatcagattaatccatgtgtgaaaaaagaatatagagatgacccttttcatcagagtcatttgccctggctccatagttcccacccaggattagaaaaaataagtgctatagtatgggaaggtaatgattgtaagaaagcagacatgtctgtacttgaaatcagtggaatgataatgaacagagtgaacagccatataccaggaataggataccagatttttggaaatgcagtctctctcatactgggtttaactccatttgttttccgactttctcaagctacagacttggaacaactcacagcacattctgcttcagaactttatgtgattgcatttggttctaatgaagatgtcatagttctttctatggttataataagttttgtggttcgcgtgtctcttgtgtggattttcttttttttgctctgtgtagcagaaagaacttataaacaggtgggtataatgtagacttccgaataagaatattttatcgttttcataatattaaaagtattcctgaagtactttattatttcattatatcatttttacctaattattttttattttgcttttatagtacctaaccaaataaaatcttaacaattcatat

SEQ ID NO: 298631 - DNA, 1843 bp, Homo sapiens
tccttgggctctgttggcggcggcgctagcttcggagtctcccgcgcgcacctcagccgcctcctagcggcgcggcgctcgctcctacgcctaaaatgaccaatgtgtgatttcagtggaataaatggcgtccaaagtcacagatgctatagtctggtatcaaaagaagattggagcatatgatcaacaaatatgggaaaaatctgttgaacagagagaaatcaaggggctaaggaataaaccaaagaaaacagcacatgtgaaaccagacctcatagatgttgatcttgtaagagggtctgcatttgcaaaggcaaagcctgaaagtccttggacttctctgaccagaaagggaattgttcgagttgtatttttcccctttttcttccggtggtggttacaagtaacatcaaaggtcatctttttctggcttcttgtcctttatcttcttcaagttgctgcaatagtattattctgctccacttctagcccacacagcatacctctgacagaggtgattgggccgatatggctgatgctgctcctgggaactgtgcattgccagattgtttccacaagaacacccaaacctcctctaagtacagggggtaaaagaagaaggaaattaagaaaagcagcccatttggaagtacatagggaaggagatggttctagtaccacagataacacacaagagggagcagttcagaaccacggtacaagcacctctcacagcgttggcactgtcttcagagatctctggcatgctgctttctttttatcaggatcaaagaaagcaaagaattcaattgataaatcaactgaaactgacaatggctatgtatcccttgatgggaagaagactgttaaaagcggtgaagatggaatacaaaaccatgaacctcagtgtgaaactattcgaccagaagagacagcctggaacacaggaacactgaggaatggtcctagcaaagatacccaaaggacaataacaaatgtctctgatgaagtctccagtgaggaaggtcctgaaacaggatactcattacgtcgtcatgtggacaggacttctgaaggtgttcttcggaatagaaagtcacaccattataagaaacattaccctaatgaggacgcccctaaatcgggtactagttgcagctctcgctgttcaagttccagacaggattctgagagtgcaaggccagaatctgaaacagaagatgtgttatgggaagacttgttacattgtgcagaatgccattcatcttgtaccagtgagacagatgtggaaaatcatcagattaatccatgtgtgaaaaaagaatatagagatgacccttttcatcagagtcatttgccctggctccatagttcccacccaggattagaaaaaataagtgctatagtatgggaaggtaatgattgtaagaaagcagacatgtctgtacttgaaatcagtggaatgataatgaacagagtgagtttttaaattttattcttgtagttcaagggtaagacttagtaattatatataagataattactggaatattatattagtaaccttctgacctcatttcttcaccgtgaaaaaaaagttacatgtgtgtatttgtttctgtctgtaatttaaacagtgatttgtcaccaaaccactctcatcttctagtgttttcacttatctgaccaagaatagatgatacggtctataatttttctcttttatctttttctttcttttgaaattcaggagcttgttagatatatacaggtgttaataaagacttttctttggactagagattgttgttacaagaactttaaaaataaaaaaataattaaa

SEQ ID NO: 298632 - DNA, 1238 bp, Homo sapiens
tccttgggctctgttggcggcggcgctagcttcggagtctcccgcgcgcacctcagccgcctcctagcggcgcggcgctcgctcctacgcctaaaatgaccaatgtgtgatttcagtggaataaatggcgtccaaagtcacagatgctatagtctggtatcaaaagaagattggagcatatgatcaacaaatatgggaaaaatctgttgaacagagagaaatcaaggggctaaggaataaaccaaagaaaacagcacatgtgaaaccagacctcatagatgttgatcttgtaagagggtctgcatttgcaaaggcaaagcctgaaagtccttggacttctctgaccagaaagggaattgttcgagttgtatttttcccctttttcttccggtggtggttacaagtaacatcaaaggtcatctttttctggcttcttgtcctttatcttcttcaagttgctgcaatagtattattctgctccacttctagcccacacagcatacctctgacagaggtgattgggccgatatggctgatgctgctcctgggaactgtgcattgccagattgtttccacaagaacacccaaacctcctctaagtacagggggtaaaagaagaaggaaattaagaaaagcagcccatttggaagtacatagggaaggagatggttctagtaccacagataacacacaagagggagcagttcagaaccacggtacaagcacctctcacagcgttggcactgtcttcagagatctctggcatgctgctttctttttatcaggatcaaagaaagcaaagaattcaattgataaatcaactgaaactgacaatggctatgtatcccttgatgggaagaagactgttaaaagcggtgaagatggaatacaaaaccatgaacctcagtgtgaaactattcgaccagaagagacagcctggaacacaggaacactgaggaatggtcctagcaaagatacccaaaggacaataacaaatgtctctgatgaagtctccagtgaggaaggtcctgaaacaggatactcattacgtcgtcatgtggacaggacttctgaaggtgttcttcggaatagaaagtcacaccattataagaaacattaccctaatgaggtatatactttgtccttaagtgtatacatacgtatctattttatatgttactaatttataacttctttcaacaattaaaaattgttgaaataaatatttcacattatta

SEQ ID NO: 298633 - DNA, 613 bp, Homo sapiens
gtaaatatccatccaatgcaatcctttcaatcttctgtccactgacctgccactataagcaaggaccaataccttaacatttctagaaattggtcttgaatatgcatcatgatatttggattaaattttatctagtaaatctaaattttattatgtgttaagtaaagttcctgtgtttatgttttccaaaattttgattgtactactgagaaagtggttattaaaatattaaagctgccttccattcttaatctcttctgatgaaggaaattaagaaaagcagcccatttggaagtacatagggaaggagatggttctagtaccacagataacacacaagagggagcagttcagaaccacggtacaagcacctctcacagcgttggcactgtcttcagagatctctggcatgctgctttctttttatcagggtttgtatttatttaaggttttatatggcatagagatggcactatcctttttctggcacttcagtctcaggtaatgaatattaattactttaaatgtgacagcctcattatggattttgttttgataaattataatagtatagataatggaaaaatagacactgtaaactttatttggctca

SEQ ID NO: 298634 - DNA, 625 bp, Homo sapiens
ctatgtctttcccttttagcactcatcacaatttatcacatatatctgtgattattaacttgatgtctcactcccctcctagttcctgtgaaggtagagggaccatgtgttgttctctgttgtatttgtagcacccagcacagtatctagtgctaagcaggtgcttaagaaatatttgtcgaataaatgacttgtgtttgacaaaatgaagtatttgaaagttataccaataattttatgctatataaatatagatacccttttaactctgttgcaattcctcaggaaatcataacactatcattaaaatttgcctaacaaattaggtatattcaacattgtgggctgtgatcaactgatggtgatgagtcaacacctttattgaaaccatggaaattatctgctgattagtaaatatattttaaaatgtttccttttctcccttccacccacaccctgcagcgtcgaggtcctcagcgatcagttgatgtaatagtttcatctgctttcttattgactatctcagttgtatttatctgttgtgcccaggtgagttaactcgctccatgtagaaattaaccagatatataaatattaactttcagattaataaataatcaaataa

SEQ ID NO: 298635 - DNA, 791 bp, Homo sapiens
agagtccgcctatcagccaatgaagagacagcagtgagagcggttgcgcagtgaaggctagacccggtttactggaattgctctggcgatcgaggggtcctagtacaccgcaatcatgtctattatgtcctataacggaggggccgtcatggccatgaaggggaagaactgtgtggccatcgctgcagacaggcgcttcgggatccaggcccagatggtgaccacggacttccagaagatctttcccatgggtgaccggctgtacatcggtctggccgggctcgccactgacgtccagacagttgcccagcgcctcaagttccggctgaacctgtatgagttgaaggaaggtcggcagatcaaaccttataccctcatgagcatggtggccaacctcttgtatgagaaacggtttggcccttactacactgagccagtcattgccgggttggacccgaagacctttaagcccttcatttgctctctagacctcatcggctgccccatggtgactgatgactttgtggtcagtggcacctgcgccgaacaaatgtacggaatgtgtgagtccctctgggagcccaacatggatccggatcacctgtttgaaaccatctcccaagccatgctgaatgctgtggaccgggatgcagtgtcaggcatgggagtcattgtccacatcatcgagaaggacaaaatcaccaccaggacactgaaggcccgaatggactaaccctgttcccagagcccacttttttttctttttttgaaataaaatagcctgtctttca

SEQ ID NO: 298636 - DNA, 260 bp, Homo sapiens
tatttacctctccttaatactcattagagactattattttcttcgcaaacggctacacgatccggatcacctgtttgaaaccatctcccaagccatgctgaatgctgtggaccgggatgcagtgtcaggcatgggagtcattgtccacatcatcgagaaggacaaaatcaccaccaggacactgaaggcccgaatggactaaccctgttcccagagcccacttttttttctttttttgaaataaaatagcctgtctttca

SEQ ID NO: 298637 - DNA, 261 bp, Homo sapiens
gggtaggaggcgaagtgtgctaatatgcgagcagcaaaaaaacctttaggaccactacagatccggatcacctgtttgaaaccatctcccaagccatgctgaatgctgtggaccgggatgcagtgtcaggcatgggagtcattgtccacatcatcgagaaggacaaaatcaccaccaggacactgaaggcccgaatggactaaccctgttcccagagcccacttttttttctttttttgaaataaaatagcctgtctttca

SEQ ID NO: 298638 - DNA, 258 bp, Homo sapiens
gcgttgaaattgcatcatcctcattcccaacccaacgccacgttatggacactacagatccggatcacctgtttgaaaccatctcccaagccatgctgaatgctgtggaccgggatgcagtgtcaggcatgggagtcattgtccacatcatcgagaaggacaaaatcaccaccaggacactgaaggcccgaatggactaaccctgttcccagagcccacttttttttctttttttgaaataaaatagcctgtctttca

SEQ ID NO: 298639 - DNA, 791 bp, Homo sapiens
  misc_feature (255)..(255): n is a, c, g, or t
atcccaacgcgctgtcgtcctgagcgacctgcacgcgcacaagcttcgggtggacccggtcaacttcaatgctccgtaagccactgcctgactggtgaccctggcctgcccacctcccacggctgagttcacccctttgcggtgacactgctctccctgtgacatagttccgtgtgctttcatgtgagctaccgtgcgtgacgctcacaagatagccgttaagcgtggagcctcggtggccatgcttcttgcccnctgtggtgcatctccgcacacgggaaccgttcgcgtcagcactcttacatcggtaatcagctcatcactggatcggtggtggcactacctctttgtatgagaaacggtttggcccttactacactgagccagtcattgccgggttggacccgaagacctttaagcccttcatttgctctctagacctcatcggctgccccatggtgactgatgactttgtggtcagtggcacctgcgccgaacaaatgtacggaatgtgtgagtccctctgggagcccaacatggatccggatcacctgtttgaaaccatctcccaagccatgctgaatgctgtggaccgggatgcagtgtcaggcatgggagtcattgtccacatcatcgagaaggacaaaatcaccaccaggacactgaaggcccgaatggactaaccctgttcccagagcccaccacgttttatagaaaccttattttttgaacagtaacattaggccctgttcttttcaaaacacacaaaaaggcaaaaaacgaaaacaggg

SEQ ID NO: 298640 - DNA, 297 bp, Homo sapiens
  misc_feature (22)..(22): n is a, c, g, or t
agtgctacctccacaaacagantgctacctccacagacaggcgcttcgggatccaggcccagatggtgaccacggacttccagaagatctttcccatgggtgaccggctgtacatcggtctggccgggctcgccactgacgtccagacagttgcccagcgcctcaagttccggctgaacctgtatgagttgaaggaaggtcggcagatcaaaccttataccctcatgagcatggtggccaacctcttgtatgagaaacgatccgatcacctgtttgtggagtacaataagcccgtaa

SEQ ID NO: 298641 - DNA, 745 bp, Homo sapiens
tttatttttcagtgtttttcatataaactgcctccaatcttttctctaaaggagtagaggtataaacatacacatagaggactgagtgatggtaggaccttgggtgaggagagggaggattagaagaaaacaattctgaaagaaagaaggagcacaagagggtcagaggtgagaaggatagaaaggtaagtgttgaagaaaagaaagtggaaaagtcttagaatatttctagctggcaggagaagggagagggagctggcctcagggaaaggtgatcttcctaaacaggtcctccatttccctttgggtctgggtctaggccggggccttgtctgaataggcttaaacatgaaagcgagccacaaaaacaagtgagaagagatgagatagtgcttgacggcgagggtcggctgtcgttattaagtgccagctcttccggccactggggaaagcaggtacagtctgctttcaagggcccactgcagtccagtgaagcaagacacatccaaatacctgttgaactgcagtttgttgggaagaggaggaaagaaagggtctgggggcaaaggtacaggaaggggcaggtatgctcagtgactggagagctgagcctggctggagtgtgggttaaacatggggagaaatgatgctggagactgagatgagacctcaaagggccttgaatgccatgccaaggagtttgaactctgtcctctgccataggaacctagggaatcaggtgcct

SEQ ID NO: 298642 - DNA, 1706 bp, Homo sapiens
agagtccgcctatcagccaatgaagagacagcagtgagagcggttgcgcagtgaaggctagacccggtttactggaattgctctggcgatcgaggggtcctagtacaccgcaatcatgtctattatgtcctataacggaggggccgtcatggccatgaaggggaagaactgtgtggccatcgctgcagacaggcgcttcgggatccaggcccagatggtgaccacggacttccagaagatctttcccatgggtgaccggctgtacatcggtctggccgggctcgccactgacgtccagacagttgcccagcgcctcaagttccggctgaacctgtatgagttgaaggaaggtcggcagatcaaaccttataccctcatgagcatggtggccaacctcttgtatgagaaacggtttggcccttactacactgagccagtcattgccgggttggacccgaagacctttaagcccttcatttgctctctagacctcatcggctgccccatggtgactgatgactttgtggtcagtggcacctgcgccgaacaaatgtacggaatgtgtgagtccctctgggagcccaacatggatccggatcacctgtttgaaaccatctcccaagccatgctgaatgctgtggaccgggatgcagtgtcaggcatgggagtcattgtccacatcatcgagaaggacaaaatcaccaccaggacactgaaggcccgaatggactaaccctgttcccagagcccacttttttttctttttttgaaataaaatagcctgtctttcaaaaaaaaaacaaaaaacaaaaaaaaaaaaaaaaaaaaaaaaaaaaaaaaaaaaaaaaaaaaaaaaaaaataacataaaaaacaaccaaaaagaacacaccaacactacataacaccaccacacaaaacaaccatacatccataaactaacaatacatatcatagtacacaccaaggacacaaataaaccctacttcaacacatcacacagacatacagcactccactctaacgaacactatactttctccttcctccctattcgtacatccacatgccacctcattatctatctcacacctcctacctactcatatcactacgcatactcaaacatagtcactacctatctactagcttcatcactcgctcgaggaggcaatcacgcccgatgtcgtctttctttcattcggatcagtagttagctgtgagtatcattatcgtgggtgattgattgtcgttggtcttgtctgtatcatgtttcggtgtggtcgagcaggtgacggtggctggtcagtggcgttcttgtcctcgccagtggatgggtgtggcgtgatggtacactcattattgttttgcctgtgtgttctctatcccaacacctcttctcacatcatactctaaaactcaatccgcttccactcaccctctcgatacaacttcacactcatctaactctcacactcaccctcccactatactttaaccacctacaattactcatagcacatttttccatctacaaccacaccatataatactacttatgtcagtaattaaagacaataagtagcagtcagctccaccacctgcgatgcactctcttcactataatcaaatctccaccaacacacaacctaaccttaaacaaaacctaaacgaactaataacaacacacaaacacccactcacactt

SEQ ID NO: 298643 - DNA, 1153 bp, Homo sapiens
agagtccgcctatcagccaatgaagagacagcagtgagagcggttgcgcagtgaaggctagacccggtttactggaattgctctggcgatcgaggggtcctagtacaccgcaatcatgtctattatgtcctataacggaggggccgtcatggccatgaaggggaagaactgtgtggccatcgctgcagacaggcgcttcgggatccaggcccagatggtgaccacggacttccagaagatctttcccatgggtgaccggctgtacatcggtctggccgggctcgccactgacgtccagacagttgcccagcgcctcaagttccggctgaacctgtatgagttgaaggaaggtcggcagatcaaaccttataccctcatgagcatggtggccaacctcttgtatgagaaacggtttggcccttactacactgagccagtcattgccgggttggacccgaagacctttaagcccttcatttgctctctagacctcatcggctgccccatggtgactgatgactttgtggtcagtggcacctgcgccgaacaaatgtacggaatgtgtgagtccctctgggagcccaacatggatccggatcacctgtttgaaaccatctcccaagccatgctgaatgctgtggaccgggatgcagtgtcaggcatgggagtcattgtccacatcatcgagaaggacaaaatcaccaccaggacactgaaggcccgaatggactaaccctgttcccagagcccacttttttttctttttttgaaataaaatagcctgtctttcaaaaaaaaaacaaaaaacaaaaaaaaaaaaaaaaaaaaaaaaaaaaaaaaaaaaaaaaaaaaaaagggggggggggggggggcccccaaaaaaacgctttaaaaaaacacgagggggggcgagcgggggcccaaaagagagaaaagagaaaaagggggcaaaagaggggcccacaaagaaaacaggggcacaaaaacaggggggggaacctccacaaacaaaaaaaaacaccgggggggacaacaggagaggtttgagaaaaaccacaagagagggaggacaggggggaaaaagggggggaaaaacagagggagacaaaagaggcagcagcaacacaataaacccgacgcgggggggatgcga

SEQ ID NO: 298644 - DNA, 837 bp, Homo sapiens
agagtccgcctatcagccaatgaagagacagcagtgagagcggttgcgcagtgaaggctagacccggtttactggaattgctctggcgatcgaggggtcctagtacaccgcaatcatgtctattatgtcctataacggaggggccgtcatggccatgaaggggaagaactgtgtggccatcgctgcagacaggcgcttcgggatccaggcccagatggtgaccacggacttccagaagatctttcccatgggtgaccggctgtacatcggtctggccgggctcgccactgacgtccagacagttgcccagcgcctcaagttccggctgaacctgtatgagttgaaggaaggtcggcagatcaaaccttataccctcatgagcatggtggccaacctcttgtatgagaaacggtttggcccttactacactgagccagtcattgccgggttggacccgaagacctttaagcccttcatttgctctctagacctcatcggctgccccatggtgactgatgactttgtggtcagtggcacctgcgccgaacaaatgtacggaatgtgtgagtccctctgggagcccaacatggatccggatcacctgtttgaaaccatctcccaagccatgctgaatgctgtggaccgggatgcagtgtcaggcatgggagtcattgtccacatcatcgagaaggacaaaatcaccaccaggacactgaaggcccgaatggactaaccctgttcccagagcccacttttttttctttttttgaaataaaatagcctgtctttcagacagccatttaggttacagccatttatggtaacagccatttatac

SEQ ID NO: 298645 - DNA, 915 bp, Homo sapiens
agagtccgcctatcagccaatgaagagacagcagtgagagcggttgcgcagtgaaggctagacccggtttactggaattgctctggcgatcgaggggtcctagtacaccgcaatcatgtctattatgtcctataacggaggggccgtcatggccatgaaggggaagaactgtgtggccatcgctgcagacaggcgcttcgggatccaggcccagatggtgaccacggacttccagaagatctttcccatgggtgaccggctgtacatcggtctggccgggctcgccactgacgtccagacagttgcccagcgcctcaagttccggctgaacctgtatgagttgaaggaaggtcggcagatcaaaccttataccctcatgagcatggtggccaacctcttgtatgagaaacggtttggcccttactacactgagccagtcattgccgggttggacccgaagacctttaagcccttcatttgctctctagacctcatcggctgccccatggtgactgatgactttgtggtcagtggcacctgcgccgaacaaatgtacggaatgtgtgagtccctctgggagcccaacatggatccggatcacctgtttgaaaccatctcccaagccatgctgaatgctgtggaccgggatgcagtgtcaggcatgggagtcattgtccacatcatcgagaaggacaaaatcaccaccaggacactgaaggcccgaatggactaaccctgttcccagagcccacttttttttctttttttgaaataaaatagcctgtctttcatcaaaaaaaaaaatcatcccttaaaaacaaaacccgggggctttttcgggggggggagacaaaggtttttagtggcctggggatgtttttcgcccccttttttgcaaagggggaattgcggccc

SEQ ID NO: 298646 - DNA, 613 bp, Homo sapiens
agagtccgcctatcagccaatgaagagacagcagtgagagcggttgcgcagtgaaggctagacccggtttactggaattgctctggcgatcgaggggtcctagtacaccgcaatcatgtctattatgtcctataacggaggggccgtcatggccatgaaggggaagaactgtgtggccatcgctgcagacaggcgcttcgggatccaggcccagatggtgaccacggacttccagaagatctttcccatgggtgaccggctgtacatcggtctggccgggctcgccactgacgtccagacagttgcccagcgcctcaagttccggctgaacctgtatgagttgaaggaaggtcggcagatcaaaccttataccctcatgagcatggtggccaacctcttgtatgagaaacggatccggatcacctgtttgaaaccatctcccaagccatgctgaatgctgtggaccgggatgcagtgtcaggcatgggagtcattgtccacatcatcgagaaggacaaaatcaccaccaggacactgaaggcccgaatggactaaccctgttcccagagcccacttttttttctttttttgaaataaaatagcctgtctttca

SEQ ID NO: 298647 - DNA, 432 bp, Homo sapiens
ggagtcgtgaatggctcagtgtagtaagggccaacctcttgtatgagaaacggtttggcccttactacactgagccagtcattgccgggttggacccgaagacctttaagcccttcatttgctctctagacctcatcggctgccccatggtgactgatgactttgtggtcagtggcacctgcgccgaacaaatgtacggaatgtgtgagtccctctgggagcccaacatggatccggatcacctgtttgaaaccatctcccaagccatgctgaatgctgtggaccgggatgcagtgtcaggcatgggagtcattgtccacatcatcgagaaggacaaaatcaccaccaggacactgaaggcccgaatggactaaccctgttcccagagcccacttttttttctttttttgaaataaaatagcctgtctttca

SEQ ID NO: 298648 - DNA, 472 bp, Homo sapiens
agagtccgcctatcagccaatgaagagacagcagtgagagcggttgcgcagtgaaggctagacccggtttactggaattgctctggcgatcgaggggtcctagtacaccgcaatcatgtctattatgtcctataacggaggggccgtcatggccatgaaggggaagaactgtgtggccatcgctgcagacaggcgcttcgggatccaggcccagatggtgaccacggacttccagaagatctttcccatgggtgaccggctgtacatcggtctggccgggctcgccactgacgtccagacagttgcccagcgcctcaagttccggctgaacctgtatgagttgaaggaaggtcggcagatcaaaccttataccctcatgagcatggtggccaacctcttgtatgagaaacgtaaccctgttcccagagcccacttttttttctttttttgaaataaaatagcctgtctttca

SEQ ID NO: 298649 - DNA, 142 bp, Homo sapiens
ctcagggaaaggtgatcttcctaaacaggtcctccatttccctttgggtctgggtctaggccggggccttgtctgaataggcttaaacatgaaagcgagcgttcttgagttctggtttctctctctgatgctggcccccaca

SEQ ID NO: 298650 - DNA, 371 bp, Homo sapiens
gctctaggaatatctctgaatctagaagtgttgcaatccaaaattttccaaatgtaacaaaagttttttaaaaaattaatctttctctgtaaaatctgatgacccattgaaaataataatactaaaactttggatcgggaagaaatataaacagcctgttcaataatttcaaaattctctccatttgtatttaataatatcttcctttgggattccaaaagaatatactttatatctttgcttggaaaaggttgggaaatgttccaatcccttgaaaatttgctgaggaacatttgccacatcacgcttatatatgccagtttaagttacgacatattttgtaaactgcagttttaaagaaagaacagcac

SEQ ID NO: 298651 - DNA, 2817 bp, Homo sapiens
ctgcccggggaaagtccgggcagagcccgagcagcggccagggtaacgctgtcttgtggacccgcacttcccacccgagacctctcactgagcccgagccgcgcgcgacatgagccacgggaagggaaccgacatgctcccggagatcgccgccgccgtgggcttcctctccagcctcctgaggacccggggctgcgtgagcgagcagaggcttaaggtcttcagcggggcgctccaggaggcactcacagagcactacaaacaccactggtttcccgaaaagccgtccaagggctccggctaccgctgcattcgcatcaaccacaagatggaccccatcatcagcagggtggccagccagatcggactcagccagccccagctgcaccagctgctgcccagcgagctgaccctgtgggtggacccctatgaggtgtcctaccgcattggggaggacggctccatctgcgtcttgtacgaggaggccccactggccgcctcctgtgggctcctcacctgcaagaaccaagtgctgctgggccggagcagcccctccaagaactacgtgatggcagtctccagctaggcccttccgcccccgccctgggcgccgccgtgctcatgctgccgtgacaacaggccaccacatacctcaacctggggaactgtatttttaaatgaagagctatttatatatattatttttttttaagaaaggaggaaaagaaaccaaaagttttttttaagaaaaaaaatccttcaagggagctgcttggaagtggcctccccaggtgcctttggagagaactgttgcgtgcttgagtctgtgagccagtgtctgcctataggagggggagctgttagggggtagacctagccaaggagaagtgggagacgtttggctagcaccccaggaagatgtgagagggagcaagcaaggttagcaactgtgaacagagaggtcgggatttgccctgggggaggaagagaggccaagttcagagctctctgtctcccccagccagacacctgcatccctggctcctctattactcaggggcattcatgcctggacttaaacaatactatgttatcttttcttttatttttctaatgaggtcctgggcagagagtgaaaaggcctctcctgattcctactgtcctaagctgcttttcttgaaatcatgacttgtttctaattctaccctcaggggcctgtagatgttgctttccagccaggaatctaaagctttgggttttctgagggggggaggagggaactggaggttattggggttaggatggaagggaactctgcacaaaacctttgctttgctagtgctgctttgtgtgtatgtgtggcaaataatttgggggtgatttgcaatgaaattttgggacccaaagagtatccactggggatgttttttggccaaaactcttccttttggaaccacatgaaagtcttgatgctgctgccatgatccctttgagaggtggctcaaaagctacagggaactccaggtcctttattactgccttcttttcaaaagcacaactctcctctaaccctcccctcccccttcccttctggtcgggtcatagagctaccgtattttctaggacaagagttctcagtcactgtgcaatatgccccctgggtcccaggagggtctggaggaaaactggctatcagaacctcctgatgccctggtgggcttagggaaccatctctcctgctctccttgggatgatggctggctagtcagccttgcatgtattccttggctgaatgggagagtgccccatgttctgcaagactacttggtattcttgtagggccgacactaaataaaagccaaaccttgggcactgttttttctccctggtgctcagagcacctgtgggaaaggttgctgtctgtctcagtacaatccaaatttgtcgtagacttgtgcaatatatactgttgtgggttggagaaaagtggaaagctacactgggaagaaactcccttccttcaatttctcagtgacattgatgaggggtcctcaaaagacctcgagtttcccaaaccgaatcaccttaagaaggacagggctagggcatttggccaggatggccaccctcctgctgttgccccttagtgaggaatcttcaccccacttcctctacccccaggttctcctccccacagccagtcccctttcctggatttctaaactgctcaattttgactcaaaggtgctatttaccaaacactctccctacccattcctgccagctctgcctccttttcaactctccacattttgtattgccttcccagacctgcttccagtctttattgctttaaagttcactttgggcccacagacccaagagctaattttctggtttgtgggttgaaacaaagctgtgaatcactgcaggctgtgttcttgcatcttgtctgcaaacaggtccctgcctttttagaagcagcctcatggtctcatgcttaatcttgtctctcttctcttctttatgatgttcactttaaaaacaacaaaacccctgagctggactgttgagcaggcctgtctctcctattaagtaaaaataaatagtagtagtatgtttgtaagctattctgacagaaaagacaaaggttactaattgtatgatagtgtttttatatggaagaatgtacagcttatggacaaatgtacacctttttgttactttaataaaaatgtagtaggataaaaaaatagggaggcggattacaattcactgcccgccgtttaccgtcgtgactgggcccctgcggtccct

SEQ ID NO: 298652 - DNA, 2749 bp, Homo sapiens
ctgcccggggaaagtccgggcagagcccgagcagcggccagggtaacgctgtcttgtggacccgcacttcccacccgagacctctcactgagcccgagccgcgcgcgacatgagccacgggaagggaaccgacatgctcccggagatcgccgccgccgtgggcttcctctccagcctcctgaggacccggggctgcgtgagcgagcagaggcttaaggtcttcagcggggcgctccaggaggcactcacagagcactacaaacaccactggtttcccgaaaagccgtccaagggctccggctaccgctgcattcgcatcaaccacaagatggaccccatcatcagcagggtggccagccagatcggactcagccagccccagctgcaccagctgctgcccagcgagctgaccctgtgggtggacccctatgaggtgtcctaccgcattggggaggacggctccatctgcgtcttgtacgaggaggccccactggccgcctcctgtgggctcctcacctgcaagaaccaagtgctgctgggccggagcagcccctccaagaactacgtgatggcagtctccagctaggcccttccgcccccgccctgggcgccgccgtgctcatgctgccgtgacaacaggccaccacatacctcaacctggggaactgtatttttaaatgaagagctatttatatatattatttttttttaagaaaggaggaaaagaaaccaaaagttttttttaagaaaaaaaatccttcaagggagctgcttggaagtggcctccccaggtgcctttggagagaactgttgcgtgcttgagtctgtgagccagtgtctgcctataggagggggagctgttagggggtagacctagccaaggagaagtgggagacgtttggctagcaccccaggaagatgtgagagggagcaagcaaggttagcaactgtgaacagagaggtcgggatttgccctgggggaggaagagaggccaagttcagagctctctgtctcccccagccagacacctgcatccctggctcctctattactcaggggcattcatgcctggacttaaacaatactatgttatcttttcttttatttttctaatgaggtcctgggcagagagtgaaaaggcctctcctgattcctactgtcctaagctgcttttcttgaaatcatgacttgtttctaattctaccctcaggggcctgtagatgttgctttccagccaggaatctaaagctttgggttttctgagggggggaggagggaactggaggttattggggttaggatggaagggaactctgcacaaaacctttgctttgctagtgctgctttgtgtgtatgtgtggcaaataatttgggggtgatttgcaatgaaattttgggacccaaagagtatccactggggatgttttttggccaaaactcttccttttggaaccacatgaaagtcttgatgctgctgccatgatccctttgagaggtggctcaaaagctacagggaactccaggtcctttattactgccttcttttcaaaagcacaactctcctctaaccctcccctcccccttcccttctggtcgggtcatagagctaccgtattttctaggacaagagttctcagtcactgtgcaatatgccccctgggtcccaggagggtctggaggaaaactggctatcagaacctcctgatgccctggtgggcttagggaaccatctctcctgctctccttgggatgatggctggctagtcagccttgcatgtattccttggctgaatgggagagtgccccatgttctgcaagactacttggtattcttgtagggccgacactaaataaaagccaaaccttgggcactgttttttctccctggtgctcagagcacctgtgggaaaggttgctgtctgtctcagtacaatccaaatttgtcgtagacttgtgcaatatatactgttgtgggttggagaaaagtggaaagctacactgggaagaaactcccttccttcaatttctcagtgacattgatgaggggtcctcaaaagacctcgagtttcccaaaccgaatcaccttaagaaggacagggctagggcatttggccaggatggccaccctcctgctgttgccccttagtgaggaatcttcaccccacttcctctacccccaggttctcctccccacagccagtcccctttcctggatttctaaactgctcaattttgactcaaaggtgctatttaccaaacactctccctacccattcctgccagctctgcctccttttcaactctccacattttgtattgccttcccagacctgcttccagtctttattgctttaaagttcactttgggcccacagacccaagagctaattttctggtttgtgggttgaaacaaagctgtgaatcactgcaggctgtgttcttgcatcttgtctgcaaacaggtccctgcctttttagaagcagcctcatggtctcatgcttaatcttgtctctcttctcttctttatgatgttcactttaaaaacaacaaaacccctgagctggactgttgagcaggcctgtctctcctattaagtaaaaataaatagtagtagtatgtttgtaagctattctgacagaaaagacaaaggttactaattgtatgatagtgtttttatatggaagaatgtacagcttatggacaaatgtacacctttttgttactttaataaaaatgtagtaggataaa

SEQ ID NO: 298653 - DNA, 2787 bp, Homo sapiens
ctgcccggggaaagtccgggcagagcccgagcagcggccagggtaacgctgtcttgtggacccgcacttcccacccgagacctctcactgagcccgagccgcgcgcgacatgagccacgggaagggaaccgacatgctcccggagatcgccgccgccgtgggcttcctctccagcctcctgaggacccggggctgcgtgagcgagcagaggcttaaggtcttcagcggggcgctccaggaggcactcacagagcactacaaacaccactggtttcccgaaaagccgtccaagggctccggctaccgctgcattcgcatcaaccacaagatggaccccatcatcagcagggtggccagccagatcggactcagccagccccagctgcaccagctgctgcccagcgagctgaccctgtgggtggacccctatgaggtgtcctaccgcattggggaggacggctccatctgcgtcttgtacgaggaggccccactggccgcctcctgtgggctcctcacctgcaagaaccaagtgctgctgggccggagcagcccctccaagaactacgtgatggcagtctccagctaggcccttccgcccccgccctgggcgccgccgtgctcatgctgccgtgacaacaggccaccacatacctcaacctggggaactgtatttttaaatgaagagctatttatatatattatttttttttaagaaaggaggaaaagaaaccaaaagttttttttaagaaaaaaaatccttcaagggagctgcttggaagtggcctccccaggtgcctttggagagaactgttgcgtgcttgagtctgtgagccagtgtctgcctataggagggggagctgttagggggtagacctagccaaggagaagtgggagacgtttggctagcaccccaggaagatgtgagagggagcaagcaaggttagcaactgtgaacagagaggtcgggatttgccctgggggaggaagagaggccaagttcagagctctctgtctcccccagccagacacctgcatccctggctcctctattactcaggggcattcatgcctggacttaaacaatactatgttatcttttcttttatttttctaatgaggtcctgggcagagagtgaaaaggcctctcctgattcctactgtcctaagctgcttttcttgaaatcatgacttgtttctaattctaccctcaggggcctgtagatgttgctttccagccaggaatctaaagctttgggttttctgagggggggaggagggaactggaggttattggggttaggatggaagggaactctgcacaaaacctttgctttgctagtgctgctttgtgtgtatgtgtggcaaataatttgggggtgatttgcaatgaaattttgggacccaaagagtatccactggggatgttttttggccaaaactcttccttttggaaccacatgaaagtcttgatgctgctgccatgatccctttgagaggtggctcaaaagctacagggaactccaggtcctttattactgccttcttttcaaaagcacaactctcctctaaccctcccctcccccttcccttctggtcgggtcatagagctaccgtattttctaggacaagagttctcagtcactgtgcaatatgccccctgggtcccaggagggtctggaggaaaactggctatcagaacctcctgatgccctggtgggcttagggaaccatctctcctgctctccttgggatgatggctggctagtcagccttgcatgtattccttggctgaatgggagagtgccccatgttctgcaagactacttggtattcttgtagggccgacactaaataaaagccaaaccttgggcactgttttttctccctggtgctcagagcacctgtgggaaaggttgctgtctgtctcagtacaatccaaatttgtcgtagacttgtgcaatatatactgttgtgggttggagaaaagtggaaagctacactgggaagaaactcccttccttcaatttctcagtgacattgatgaggggtcctcaaaagacctcgagtttcccaaaccgaatcaccttaagaaggacagggctagggcatttggccaggatggccaccctcctgctgttgccccttagtgaggaatcttcaccccacttcctctacccccaggttctcctccccacagccagtcccctttcctggatttctaaactgctcaattttgactcaaaggtgctatttaccaaacactctccctacccattcctgccagctctgcctccttttcaactctccacattttgtattgccttcccagacctgcttccagtctttattgctttaaagttcactttgggcccacagacccaagagctaattttctggtttgtgggttgaaacaaagctgtgaatcactgcaggctgtgttcttgcatcttgtctgcaaacaggtccctgcctttttagaagcagcctcatggtctcatgcttaatcttgtctctcttctcttctttatgatgttcactttaaaaacaacaaaacccctgagctggactgttgagcaggcctgtctctcctattaagtaaaaataaatagtagtagtatgtttgtaagctattctgacagaaaagacaaaggttactaattgtatgatagtgtttttatatggaagaatgtacagcttatggacaaatgtacacctttttgttactttaataaaaatgtagtaggataaaaatccatgaaaggggactggctgtggagagttgtcgac

SEQ ID NO: 298654 - DNA, 1517 bp, Homo sapiens
ccccgatcagtatatattgcacaagtctacgacaaatttggattgtactgagacagacagcaacctttcccacaggtgctcagagcacctgtgggaaagtttgctagtgctgctttgtgtgtatgtgtggcaaataatttgggggtgatttgcaatgaaattttgggacccaaagagtatccactggggatgttttttggccaaaactcttccttttggaaccacatgaaagtcttgatgctgctgccatgatccctttgagaggtggctcaaaagctacagggaactccaggtcctttattactgccttcttttcaaaagcacaactctcctctaaccctcccctcccccttcccttctggtcgggtcatagagctaccgtattttctaggacaagagttctcagtcactgtgcaatatgccccctgggtcccaggagggtctggaggaaaactggctatcagaacctcctgatgccctggtgggcttagggaaccatctctcctgctctccttgggatgatggctggctagtcagccttgcatgtattccttggctgaatgggagagtgccccatgttctgcaagactacttggtattcttgtagggccgacactaaataaaagccaaaccttgggcactgttttttctccctggtgctcagagcacctgtgggaaaggttgctgtctgtctcagtacaatccaaatttgtcgtagacttgtgcaatatatactgttgtgggttggagaaaagtggaaagctacactgggaagaaactcccttccttcaatttctcagtgacattgatgaggggtcctcaaaagacctcgagtttcccaaaccgaatcaccttaagaaggacagggctagggcatttggccaggatggccaccctcctgctgttgccccttagtgaggaatcttcaccccacttcctctacccccaggttctcctccccacagccagtcccctttcctggatttctaaactgctcaattttgactcaaaggtgctatttaccaaacactctccctacccattcctgccagctctgcctccttttcaactctccacattttgtattgccttcccagacctgcttccagtctttattgctttaaagttcactttgggcccacagacccaagagctaattttctggtttgtgggttgaaacaaagctgtgaatcactgcaggctgtgttcttgcatcttgtctgcaaacaggtccctgcctttttagaagcagcctcatggtctcatgcttaatcttgtctctcttctcttctttatgatgttcactttaaaaacaacaaaacccctgagctggactgttgagcaggcctgtctctcctattaagtaaaaataaatagtagtagtatgtttgtaagctattctgacagaaaagacaaaggttactaattgtatgatagtgtttttatatggaagaatgtacagcttatggacaaatgtacacctttttgttactttaataaaaatgtagtaggataaa

SEQ ID NO: 298655 - DNA, 1996 bp, Homo sapiens
ctgcccggggaaagtccgggcagagcccgagcagcggccagggtaacgctgtcttgtggacccgcacttcccacccgagacctctcactgagcccgagccgcgcgcgacatgagccacgggaagggaaccgacatgctcccggagatcgccgccgccgtgggcttcctctccagcctcctgaggacccggggctgcgtgagcgagcagaggcttaaggtcttcagcggggcgctccaggaggcactcacagagcactacaaacaccactggtttcccgaaaagccgtccaagggctccggctaccgctgcattcgcatcaaccacaagatggaccccatcatcagcagggtggccagccagatcggactcagccagccccagctgcaccagctgctgcccagcgagctgaccctgtgggtggacccctatgaggtgtcctaccgcattggggaggacggctccatctgcgtcttgtacgaggaggccccactggccgcctcctgtgggctcctcacctgcaagaaccaagtgctgctgggccggagcagcccctccaagaactacgtgatggcagtctccagctaggcccttccgcccccgccctgggcgccgccgtgctcatgctgccgtgacaacaggccaccacatacctcaacctggggaactgtatttttaaatgaagagctatttatatatattatttttttttaagaaaggaggaaaagaaaccaaaagttttttttaagaaaaaaaatccttcaagggagctgcttggaagtggcctccccaggtgcctttggagagaactgttgcgtgcttgagtctgtgagccagtgtctgcctataggagggggagctgttagggggtagacctagccaaggagaagtgggagacgtttggctagcaccccaggaagatgtgagagggagcaagcaaggttagcaactgtgaacagagaggtcgggatttgccctgggggaggaagagaggccaagttcagagctctctgtctcccccagccagacacctgcatccctggctcctctattactcaggggcattcatgcctggacttaaacaatactatgttatcttttcttttatttttctaatgaggtcctgggcagagagtgaaaaggcctctcctgattcctactgtcctaagctgcttttcttgaaatcatgacttgtttctaattctaccctcaggggcctgtagatgttgctttccagccaggaatctaaagctttgggttttctgagggggggaggagggaactggaggttattggggttaggatggaagggaactctgcacaaaacctttgctttgctagtgctgctttgtgtgtatgtgtggcaaataatttgggggtgatttgcaatgaaattttgggacccaaagagtatccactggggatgttttttggccaaaactcttccttttggaaccacatgaaagtcttgatgctgctgccatgatccctttgagaggtggctcaaaagctacagggaactccaggtcctttattactgccttcttttcaaaagcacaactctcctctaaccctcccctcccccttcccttctggtcgggtcatagagctaccgtattttctaggacaagagttctcagtcactgtgcaatatgccccctgggtcccaggagggtctggaggaaaactggctatcagaacctcctgatgccctggtgggcttagggaaccatctctcctgctctccttgggatgatggctggctagtcagccttgcatgtattccttggctgaatgggagagtgccccatgttctgcaagactacttggtattcttgtagggccgacactaaataaaagccaaaccttgggcactgttttttctccctggtgctcagagcacctgtgggaaaggttgctgtctgtctcagtacaatccaaatttgtcgtagacttgtgcaatatataccttcggcatagggatcctctagatcaccc

SEQ ID NO: 298656 - DNA, 1962 bp, Homo sapiens
  misc_feature (1960)..(1960): n is a, c, g, or t
ctgcccggggaaagtccgggcagagcccgagcagcggccagggtaacgctgtcttgtggacccgcacttcccacccgagacctctcactgagcccgagccgcgcgcgacatgagccacgggaagggaaccgacatgctcccggagatcgccgccgccgtgggcttcctctccagcctcctgaggacccggggctgcgtgagcgagcagaggcttaaggtcttcagcggggcgctccaggaggcactcacagagcactacaaacaccactggtttcccgaaaagccgtccaagggctccggctaccgctgcattcgcatcaaccacaagatggaccccatcatcagcagggtggccagccagatcggactcagccagccccagctgcaccagctgctgcccagcgagctgaccctgtgggtggacccctatgaggtgtcctaccgcattggggaggacggctccatctgcgtcttgtacgaggaggccccactggccgcctcctgtgggctcctcacctgcaagaaccaagtgctgctgggccggagcagcccctccaagaactacgtgatggcagtctccagctaggcccttccgcccccgccctgggcgccgccgtgctcatgctgccgtgacaacaggccaccacatacctcaacctggggaactgtatttttaaatgaagagctatttatatatattatttttttttaagaaaggaggaaaagaaaccaaaagttttttttaagaaaaaaaatccttcaagggagctgcttggaagtggcctccccaggtgcctttggagagaactgttgcgtgcttgagtctgtgagccagtgtctgcctataggagggggagctgttagggggtagacctagccaaggagaagtgggagacgtttggctagcaccccaggaagatgtgagagggagcaagcaaggttagcaactgtgaacagagaggtcgggatttgccctgggggaggaagagaggccaagttcagagctctctgtctcccccagccagacacctgcatccctggctcctctattactcaggggcattcatgcctggacttaaacaatactatgttatcttttcttttatttttctaatgaggtcctgggcagagagtgaaaaggcctctcctgattcctactgtcctaagctgcttttcttgaaatcatgacttgtttctaattctaccctcaggggcctgtagatgttgctttccagccaggaatctaaagctttgggttttctgagggggggaggagggaactggaggttattggggttaggatggaagggaactctgcacaaaacctttgctttgctagtgctgctttgtgtgtatgtgtggcaaataatttgggggtgatttgcaatgaaattttgggacccaaagagtatccactggggatgttttttggccaaaactcttccttttggaaccacatgaaagtcttgatgctgctgccatgatccctttgagaggtggctcaaaagctacagggaactccaggtcctttattactgccttcttttcaaaagcacaactctcctctaaccctcccctcccccttcccttctggtcgggtcatagagctaccgtattttctaggacaagagttctcagtcactgtgcaatatgccccctgggtcccaggagggtctggaggaaaactggctatcagaacctcctgatgccctggtgggcttagggaaccatctctcctgctctccttgggatgatggctggctagtcagccttgcatgtattccttggctgaatgggagagtgccccatgttctgcaagactacttggtattcttgtagggccgacactaaataaaagccaaaccttgggcactgttttttctccctggtgctcagagcacctgtgggaaaggttgctgtctgtctcagtacacccgccgtcggggactcctctagaacngc

SEQ ID NO: 298657 - DNA, 1301 bp, Homo sapiens
ctgcccggggaaagtccgggcagagcccgagcagcggccagggtaacgctgtcttgtggacccgcacttcccacccgagacctctcactgagcccgagccgcgcgcgacatgagccacgggaagggaaccgacatgctcccggagatcgccgccgccgtgggcttcctctccagcctcctgaggacccggggctgcgtgagcgagcagaggcttaaggtcttcagcggggcgctccaggaggcactcacagagcactacaaacaccactggtttcccgaaaagccgtccaagggctccggctaccgctgcattcgcatcaaccacaagatggaccccatcatcagcagggtggccagccagatcggactcagccagccccagctgcaccagctgctgcccagcgagctgaccctgtgggtggacccctatgaggtgtcctaccgcattggggaggacggctccatctgcgtcttgtacgaggaggccccactggccgcctcctgtgggctcctcacctgcaagaaccaagtgctgctgggccggagcagcccctccaagaactacgtgatggcagtctccagctaggcccttccgcccccgccctgggcgccgccgtgctcatgctgccgtgacaacaggccaccacatacctcaacctggggaactgtatttttaaatgaagagctatttatatatattatttttttttaagaaaggaggaaaagaaaccaaaagttttttttaagaaaaaaaatccttcaagggagctgcttggaagtggcctccccaggtgcctttggagagaactgttgcgtgcttgagtctgtgagccagtgtctgcctccttttcaactctccacattttgtattgccttcccagacctgcttccagtctttattgctttaaagttcactttgggcccacagacccaagagctaattttctggtttgtgggttgaaacaaagctgtgaatcactgcaggctgtgttcttgcatcttgtctgcaaacaggtccctgcctttttagaagcagcctcatggtctcatgcttaatcttgtctctcttctcttctttatgatgttcactttaaaaacaacaaaacccctgagctggactgttgagcaggcctgtctctcctattaagtaaaaataaatagtagtagtatgtttgtaagctattctgacagaaaagacaaaggttactaattgtatgatagtgtttttatatggaagaatgtacagcttatggacaaatgtacacctttttgttactttaataaaaatgtagtaggataaa

SEQ ID NO: 298658 - DNA, 835 bp, Homo sapiens
ggaggagtccacagaggcaaaattgagcagtttagaaatccaggaaaggggactgttgtgggttggagaaaagtggaaagctacactgggaagaaactcccttccttcaatttctcagtgacattgatgaggggtcctcaaaagacctcgagtttcccaaaccgaatcaccttaagaaggacagggctagggcatttggccaggatggccaccctcctgctgttgccccttagtgaggaatcttcaccccacttcctctacccccaggttctcctccccacagccagtcccctttcctggatttctaaactgctcaattttgactcaaaggtgctatttaccaaacactctccctacccattcctgccagctctgcctccttttcaactctccacattttgtattgccttcccagacctgcttccagtctttattgctttaaagttcactttgggcccacagacccaagagctaattttctggtttgtgggttgaaacaaagctgtgaatcactgcaggctgtgttcttgcatcttgtctgcaaacaggtccctgcctttttagaagcagcctcatggtctcatgcttaatcttgtctctcttctcttctttatgatgttcactttaaaaacaacaaaacccctgagctggactgttgagcaggcctgtctctcctattaagtaaaaataaatagtagtagtatgtttgtaagctattctgacagaaaagacaaaggttactaattgtatgatagtgtttttatatggaagaatgtacagcttatggacaaatgtacacctttttgttactttaataaaaatgtagtaggataaa

SEQ ID NO: 298659 - DNA, 758 bp, Homo sapiens
  misc_feature (18)..(18): n is a, c, g, or t
  misc_feature (36)..(36): n is a, c, g, or t
  misc_feature (61)..(61): n is a, c, g, or t
aatcacccccaaattatntgccacacatacacacanagcagcactagcaaagcaaaggttntgtgcagagttcccttccatcctaaccccaataacctccagttccctcctcctctgggtggccaggatggccaccctcctgctgttgccccttagtgaggaatcttcaccccacttcctctacccccaggttctcctccccacagccagtcccctttcctggatttctaaactgctcaattttgactcaaaggtgctatttaccaaacactctccctacccattcctgccagctctgcctccttttcaactctccacattttgtattgccttcccagacctgcttccagtctttattgctttaaagttcactttgggcccacagacccaagagctaattttctggtttgtgggttgaaacaaagctgtgaatcactgcaggctgtgttcttgcatcttgtctgcaaacaggtccctgcctttttagaagcagcctcatggtctcatgcttaatcttgtctctcttctcttctttatgatgttcactttaaaaacaacaaaacccctgagctggactgttgagcaggcctgtctctcctattaagtaaaaataaatagtagtagtatgtttgtaagctattctgacagaaaagacaaaggttactaattgtatgatagtgtttttatatggaagaatgtacagcttatggacaaatgtacacctttttgttactttaataaaaatgtagtaggataaa

SEQ ID NO: 298660 - DNA, 616 bp, Homo sapiens
gatagccgaagtcccgacgtagcccgacagtcccgactagcccgacagtcgactagcccgacagccagtcccctttcctggatttctaaactgctcaattttgactcaaaggtgctatttaccaaacactctccctacccattcctgccagctctgcctccttttcaactctccacattttgtattgccttcccagacctgcttccagtctttattgctttaaagttcactttgggcccacagacccaagagctaattttctggtttgtgggttgaaacaaagctgtgaatcactgcaggctgtgttcttgcatcttgtctgcaaacaggtccctgcctttttagaagcagcctcatggtctcatgcttaatcttgtctctcttctcttctttatgatgttcactttaaaaacaacaaaacccctgagctggactgttgagcaggcctgtctctcctattaagtaaaaataaatagtagtagtatgtttgtaagctattctgacagaaaagacaaaggttactaattgtatgatagtgtttttatatggaagaatgtacagcttatggacaaatgtacacctttttgttactttaataaaaatgtagtaggataaa

SEQ ID NO: 298661 - DNA, 1121 bp, Homo sapiens
ctgcccggggaaagtccgggcagagcccgagcagcggccagggtaacgctgtcttgtggacccgcacttcccacccgagacctctcactgagcccgagccgcgcgcgacatgagccacgggaagggaaccgacatgctcccggagatcgccgccgccgtgggcttcctctccagcctcctgaggacccggggctgcgtgagcgagcagaggcttaaggtcttcagcggggcgctccaggaggcactcacagagcactacaaacaccactggtttcccgaaaagccgtccaagggctccggctaccgctgcattcgcatcaaccacaagatggaccccatcatcagcagggtggccagccagatcggactcagccagccccagctgcaccagctgctgcccagcgagctgaccctgtgggtggacccctatgaggtgtcctaccgcattggggaggacggctccatctgcgtcttgtacgaggaggccccactggccgcctcctgtgggctcctcacctgcaagaaccaagtgctgctgggccggagcagcccctccaagaactacgtgatggcagtctccagctaggcccttccgcccccgccctgggcgccgccgtgctcatgctgccgtgacaacaggccaccacatacctcaacctggggaactgtatttttaaatgaagagctatttatatatattatttttttttaagaaaggaggaaaagaaaccaaaagttttttttaagaaaaaaaatccttcaagggagctgcttggaagtggcctccccaggtgcctttggagagaactgttgcgtgcttgagtctgtgagccagtgtctgcctttttagaagcagcctcatggtctcatgcttaatcttgtctctcttctcttctttatgatgttcactttaaaaacaacaaaacccctgagctggactgttgagcaggcctgtctctcctattaagtaaaaataaatagtagtagtatgtttgtaagctattctgacagaaaagacaaaggttactaattgtatgatagtgtttttatatggaagaatgtacagcttatggacaaatgtacacctttttgttactttaataaaaatgtagtaggataaa

SEQ ID NO: 298662 - DNA, 712 bp, Homo sapiens
ctgcccggggaaagtccgggcagagcccgagcagcggccagggtaacgctgtcttgtggacccgcacttcccacccgagacctctcactgagcccgagccgcgcgcgacatgagccacgggaagggaaccgacatgctcccggagatcgccgccgccgtgggcttcctctccagcctcctgaggacccggggctgcgtgagcgagcagaggcttaaggtcttcagcggggcgctccaggaggcactcacagagcactacaaacaccactggtttcccgaaaagccgtccaagggctccggctaccgctgcattcgcatcaaccacaagatggaccccatcatcagcagggtggccagccagatcggactcagccagccccagctgcaccagctgctgcccagcgagctgaccctgtgggtggacccctatgaggtgtcctaccgcattggggaggacggctccatctgcgtcttgtacgaggaggccccactggccgcctcctgtgggctcctcacctgcaagaaccaagtgctgctgggccggagcagcccctccaagaactacgtgatggcagtctccagctaggcccttccgcccccgccctgggcgccgccgtgctcatgctgccgtgacaacaggccaccacatacctcaacctggggaactgtatttttaaatgaagttcagcaacaagactcgggatcctcagaa

SEQ ID NO: 298663 - DNA, 1788 bp, Homo sapiens
agcggagtgtttacttccgcttgacctggcccggacgccagaaaatgttccacgtgggataccctgcgtggggttcactgtagtagctgcactaggtgattcttggagcgggcctgagagacaaggacatgtggatcccagtggtcgggcttcctcggcggctgaggctctccgccttggcgggcgctggtcgcttttgcattttagggtctgaagcggcgacgcgaaagcatttgccggcgaggaaccactgtgggctctctgactcctctccgcagctgtggcccgaaccggatttcaggaatccgccaaggaaggcgtctaaggccagcttagactttaagcgttacgtaaccgatcggagattggctgagaccctggcgcaaatctatttgggaaaaccaagtagacctccacacctactgctggagtgcaatccaggtcctggaatcctgactcaggcattacttgaagctggtgccaaagtggttgcgctcgaaagtgacaaaacttttattccacatttggagtccttaggaaaaaatctggatggaaaactacgagtgattcactgtgacttctttaaactagatcctagaagtggtggagtaataaaaccacctgctatgtcttctcgagggctctttaagaatttgggaatagaagcagttccttggacagcagacatccctttaaaagtagttggaatgttcccaagtagaggtgagaaaagggcactttggaaactcgcatatgacttgtattcctgtacttctatatataaatttggacgaatagaagtaaatatgtttattggtgaaaaagaattccagaaactaatggcagatcccggaaatccagacttgtatcatgtattaagtgttatctggcaattagcttgtgagattaaggttctgcacatggagccttggtcatcatttgatatatacacccggaaagggccgctggaaaacccaaagcgtagggaattattagaccaattacaacaaaagctgtatcttattcaaatgattcctcgtcaaaatttatttaccaagaacttaacacctatgaactataatatattttttcacttgttaaagcactgttttgggaggcgcagcgccactgtaatagaccacttacgttcattgactccacttgatgcgagagatatattgatgcaaataggaaaacaggaggatgagaaagtagttaacatgcaccctcaagacttcaaaacactttttgaaactatagagcgttccaaagattgtgcttataaatggctgtatgatgaaaccctggaagataggtagcaactagactgtcgtttttggtggagcggttcatttatttggaaactatgacatgaaaaccaaatttgaaaactcacatcctttcagcagaaggtaactgttcttgtcttgcacaagccaggcagatcatttctcctaagctgatatcattggcttattggatgaaacagtgtctgctattttattcacaattgaataaaatgaaaacttcaattaattgtggatttgatcagattgaattcgttttgtttcagattcctatttaaatatttcacttgtactgttgctgatttttgcatcttcttgaagagcaagagtctgtacattattaagcttagaaagtaagcaaaactgatttactggtttgcctttcagtttgttgaaatgtattgtcaagtactgtacaatgaaattgtttaaattttaatatgatttaagctttttagaaattaaaatattttaaataaga

SEQ ID NO: 298664 - DNA, 2584 bp, Homo sapiens
agcggagtgtttacttccgcttgacctggcccggacgccagaaaatgttccacgtgggataccctgcgtggggttcactgtagtagctgcactaggtgattcttggagcgggcctgagagacaaggacatgtggatcccagtggtcgggcttcctcggcggctgaggctctccgccttggcgggcgctggtcgcttttgcattttagggtctgaagcggcgacgcgaaagcatttgccggcgaggaaccactgtgggctctctgactcctctccgcagctgtggcccgaaccggatttcaggaatccgccaaggaaggcgtctaaggccagcttagactttaagcgttacgtaaccgatcggagattggctgagaccctggcgcaaatctatttgggaaaaccaagtagacctccacacctactgctggagtgcaatccaggtcctggaatcctgactcaggcattacttgaagctggtgccaaagtggttgcgctcgaaagtgacaaaacttttattccacatttggagtccttaggaaaaaatctggatggaaaactacgagtgattcactgtgacttctttaaactagatcctagaagtggtggagtaataaaaccacctgctatgtcttctcgagggctctttaagaatttgggaatagaagcagttccttggacagcagacatccctttaaaagtagttggaatgttcccaagtagaggtgagaaaagggcactttggaaactcgcatatgacttgtattcctgtacttctatatataaatttggacgaatagaagtaaatatgtttattggtgaaaaagaattccagaaactaatggcagatcccggaaatccagacttgtatcatgtattaagtgttatctggcaattagcttgtgagattaaggttctgcacatggagccttggtcatcatttgatatatacacccggaaagggccgctggaaaacccaaagcgtagggaattattagaccaattacaacaaaagctgtatcttattcaaatgattcctcgtcaaaatttatttaccaagaacttaacacctatgaactataatatattttttcacttgttaaagcactgttttgggaggcgcagcgccactgtaatagaccacttacgttcattgactccacttgatgcgagagatatattgatgcaaataggaaaacaggaggatgagaaagtagttaacatgcaccctcaagacttcaaaacactttttgaaactatagagcgttccaaagattgtgcttataaatggctgtatgatgaaaccctggaagataggtagcaactagactgtcgtttttggtggagcggttcatttatttggaaactatgacatgaaaaccaaatttgaaaactcacatcctttcagcagaaggtaactgttcttgtcttgcacaagccaggcagatcatttctcctaagctgatatcattggcttattggatgaaacagtgtctgctattttattcacaattgaataaaatgaaaacttcaattaattgtggatttgatcagattgaattcgttttgtttcagattcctatttaaatatttcacttgtactgttgctgatttttgcatcttcttgaagagcaagagtctgtacattattaagcttagaaagtaagcaaaactgatttactggtttgcctttcagtttgttgaaatgtattgtcaagtactgtacaatgaaattgtttaaattttaatatgatttaagctttttagaaattaaaatattttaaataagaagattttgtggtttcttttggtctctaaatacctaatgaaacattaaactgaccctaatttactcctttttagttctgtcatgtagcgtcaatatagttttggtgaataattcagtctgtattactgaaaagtctgcacatttgttctatcaagaaaattcatctgaagttggatatgaacctaaatggaatttatgtgaacctaaatggaattaagaatattttcttggccaggcacagcggctcacgcctgtaatcccagcactttgggaggccaaggcgggcggatcacgaagtcaggagttcgagaccagcctggccaacacggtgaaaccccatctctactaaaagtacaaaaattagcctggtgtggtggtgggcacctgtaatcccagttactctggaggctgaggcaggagaatcgcttggacctgggaggcagaggttgcagtgagccgagatcataccactgcactccagcctgggtgacagagcaagactcagtctcggaaaaaaaaaaaaaaaaaaaagaatgttttcttgccaggaatggtggtgtgcacctgtagtcccagctactcaggaggtggaggagggaggacaactgagcccatgggtctagcctgggggcaacatggtgaaacccccatttctaaaaatattttataaaacagctgggcatggtggcaggttcctgtagtcccagcaacttcggaggctgaggtgagaggatcacttcagcccaagagttcgaggctgcagggagctattatttattgtacctgtgaagaacccc

SEQ ID NO: 298665 - DNA, 1865 bp, Homo sapiens
agcggagtgtttacttccgcttgacctggcccggacgccagaaaatgttccacgtgggataccctgcgtggggttcactgtagtagctgcactaggtgattcttggagcgggcctgagagacaaggacatgtggatcccagtggtcgggcttcctcggcggctgaggctctccgccttggcgggcgctggtcgcttttgcattttagggtctgaagcggcgacgcgaaagcatttgccggcgaggaaccactgtgggctctctgactcctctccgcagctgtggcccgaaccggatttcaggaatccgccaaggaaggcgtctaaggccagcttagactttaagcgttacgtaaccgatcggagattggctgagaccctggcgcaaatctatttgggaaaaccaagtagacctccacacctactgctggagtgcaatccaggtcctggaatcctgactcaggcattacttgaagctggtgccaaagtggttgcgctcgaaagtgacaaaacttttattccacatttggagggtctcactcccattgcccaggctggagtgcagtgctgcagtcacagctcactacagtctcaacttcccaggctcagtccttaggaaaaaatctggatggaaaactacgagtgattcactgtgacttctttaaactagatcctagaagtggtggagtaataaaaccacctgctatgtcttctcgagggctctttaagaatttgggaatagaagcagttccttggacagcagacatccctttaaaagtagttggaatgttcccaagtagaggtgagaaaagggcactttggaaactcgcatatgacttgtattcctgtacttctatatataaatttggacgaatagaagtaaatatgtttattggtgaaaaagaattccagaaactaatggcagatcccggaaatccagacttgtatcatgtattaagtgttatctggcaattagcttgtgagattaaggttctgcacatggagccttggtcatcatttgatatatacacccggaaagggccgctggaaaacccaaagcgtagggaattattagaccaattacaacaaaagctgtatcttattcaaatgattcctcgtcaaaatttatttaccaagaacttaacacctatgaactataatatattttttcacttgttaaagcactgttttgggaggcgcagcgccactgtaatagaccacttacgttcattgactccacttgatgcgagagatatattgatgcaaataggaaaacaggaggatgagaaagtagttaacatgcaccctcaagacttcaaaacactttttgaaactatagagcgttccaaagattgtgcttataaatggctgtatgatgaaaccctggaagataggtagcaactagactgtcgtttttggtggagcggttcatttatttggaaactatgacatgaaaaccaaatttgaaaactcacatcctttcagcagaaggtaactgttcttgtcttgcacaagccaggcagatcatttctcctaagctgatatcattggcttattggatgaaacagtgtctgctattttattcacaattgaataaaatgaaaacttcaattaattgtggatttgatcagattgaattcgttttgtttcagattcctatttaaatatttcacttgtactgttgctgatttttgcatcttcttgaagagcaagagtctgtacattattaagcttagaaagtaagcaaaactgatttactggtttgcctttcagtttgttgaaatgtattgtcaagtactgtacaatgaaattgtttaaattttaatatgatttaagctttttagaaattaaaatattttaaataaga

SEQ ID NO: 298666 - DNA, 1634 bp, Homo sapiens
agcggagtgtttacttccgcttgacctggcccggacgccagaaaatgttccacgtgggataccctgcgtggggttcactgtagtagctgcactaggtgattcttggagcgggcctgagagacaaggacatgtggatcccagtggtcgggcttcctcggcggctgaggctctccgccttggcgggcgctggtcgcttttgcattttagggtctgaagcggcgacgcgaaagcatttgccggcgaggaaccactgtgggctctctgactcctctccgcagctgtggcccgaaccggatttcaggaatccgccaaggaaggcgtctaaggccagcttagactttaagcgttacgtaaccgatcggagattggctgagaccctggcgcaaatctatttgggaaaaccaagtagacctccacacctactgctggagtgcaatccaggtcctggaatcctgactcaggcattacttgaagctggtgccaaagtggttgcgctcgaaagtgacaaaacttttattccacatttggagacatccctttaaaagtagttggaatgttcccaagtagaggtgagaaaagggcactttggaaactcgcatatgacttgtattcctgtacttctatatataaatttggacgaatagaagtaaatatgtttattggtgaaaaagaattccagaaactaatggcagatcccggaaatccagacttgtatcatgtattaagtgttatctggcaattagcttgtgagattaaggttctgcacatggagccttggtcatcatttgatatatacacccggaaagggccgctggaaaacccaaagcgtagggaattattagaccaattacaacaaaagctgtatcttattcaaatgattcctcgtcaaaatttatttaccaagaacttaacacctatgaactataatatattttttcacttgttaaagcactgttttgggaggcgcagcgccactgtaatagaccacttacgttcattgactccacttgatgcgagagatatattgatgcaaataggaaaacaggaggatgagaaagtagttaacatgcaccctcaagacttcaaaacactttttgaaactatagagcgttccaaagattgtgcttataaatggctgtatgatgaaaccctggaagataggtagcaactagactgtcgtttttggtggagcggttcatttatttggaaactatgacatgaaaaccaaatttgaaaactcacatcctttcagcagaaggtaactgttcttgtcttgcacaagccaggcagatcatttctcctaagctgatatcattggcttattggatgaaacagtgtctgctattttattcacaattgaataaaatgaaaacttcaattaattgtggatttgatcagattgaattcgttttgtttcagattcctatttaaatatttcacttgtactgttgctgatttttgcatcttcttgaagagcaagagtctgtacattattaagcttagaaagtaagcaaaactgatttactggtttgcctttcagtttgttgaaatgtattgtcaagtactgtacaatgaaattgtttaaattttaatatgatttaagctttttagaaattaaaatattttaaataaga

SEQ ID NO: 298667 - DNA, 1485 bp, Homo sapiens
agcggagtgtttacttccgcttgacctggcccggacgccagaaaatgttccacgtgggataccctgcgtggggttcactgtagtagctgcactaggtgattcttggagcgggcctgagagacaaggacatgtggatcccagtggtcgggcttcctcggcggctgaggctctccgccttggcgggcgctggtcgcttttgcattttagggtctgaagcggcgacgcgaaagcatttgccggcgaggaaccactgtgggctctctgactcctctccgcagctgtggcccgaaccggatttcaggaatccgccaaggaaggcgtctaaggccagcttagactttaagcgttacgtaaccgatcggagattggctgagaccctggcgcaaatctatttgggaaaaccaagtagacctccacacctactgctggagtgcaatccaggtcctggaatcctgactcaggcattacttgaagctggtgccaaagtggttgcgctcgaaagtgacaaaacttttattccacatttggagaaactaatggcagatcccggaaatccagacttgtatcatgtattaagtgttatctggcaattagcttgtgagattaaggttctgcacatggagccttggtcatcatttgatatatacacccggaaagggccgctggaaaacccaaagcgtagggaattattagaccaattacaacaaaagctgtatcttattcaaatgattcctcgtcaaaatttatttaccaagaacttaacacctatgaactataatatattttttcacttgttaaagcactgttttgggaggcgcagcgccactgtaatagaccacttacgttcattgactccacttgatgcgagagatatattgatgcaaataggaaaacaggaggatgagaaagtagttaacatgcaccctcaagacttcaaaacactttttgaaactatagagcgttccaaagattgtgcttataaatggctgtatgatgaaaccctggaagataggtagcaactagactgtcgtttttggtggagcggttcatttatttggaaactatgacatgaaaaccaaatttgaaaactcacatcctttcagcagaaggtaactgttcttgtcttgcacaagccaggcagatcatttctcctaagctgatatcattggcttattggatgaaacagtgtctgctattttattcacaattgaataaaatgaaaacttcaattaattgtggatttgatcagattgaattcgttttgtttcagattcctatttaaatatttcacttgtactgttgctgatttttgcatcttcttgaagagcaagagtctgtacattattaagcttagaaagtaagcaaaactgatttactggtttgcctttcagtttgttgaaatgtattgtcaagtactgtacaatgaaattgtttaaattttaatatgatttaagctttttagaaattaaaatattttaaataaga

SEQ ID NO: 298668 - DNA, 1906 bp, Homo sapiens
agcggagtgtttacttccgcttgacctggcccggacgccagaaaatgttccacgtgggataccctgcgtggggttcactgtagtagctgcactaggtgattcttggagcgggcctgagagacaaggacatgtggatcccagtggtcgggcttcctcggcggctgaggctctccgccttggcgggcgctggtcgcttttgcattttagggtctgaagcggcgacgcgaaagcatttgccggcgaggaaccactgtgggctctctgactcctctccgcagctgtggcccgaaccggatttcaggaatccgccaaggaaggcgtctaaggccagcttagactttaagcgttacgtaaccgatcggagattggctgagaccctggcgcaaatctatttgggaaaaccaagtagacctccacacctactgctggagtgcaatccaggtcctggaatcctgactcaggcattacttgaagctggtgccaaagtggttgcgctcgaaagtgacaaaacttttattccacatttggagtccttaggaaaaaatctggatggaaaactacgagtgattcactgtgacttctttaaactagatcctagaagtggtggagtaataaaaccacctgctatgtcttctcgagggctctttaagaatttgggaatagaagcagttccttggacagcagacatccctttaaaagtagttggaatgttcccaagtagaggtgagaaaagggcactttggaaactcgcatatgacttgtattcctgtacttctatatataaatttggacgaatagaagtaaatatgtttattggtgaaaaagaattccagaaactaatggcagatcccggaaatccagacttgtatcatgtattaagtgttatctggcaattagcttgtgagattaaggttctgcacatggagccttggtcatcatttgatatatacacccggaaagggccgctggaaaacccaaagcgtagggaattattagaccaattacaacaaaagctgtatcttattcaaatgattcctcgtcaaaatttatttaccaagaacttaacacctatgaactataatatattttttcacttgttaaagcactgttttgggaggcgcagcgccactgtaatagaccacttacgttcattgactccacttgatgcgagagatatattgatgcaaataggaaaacaggaggatgagaaagtagttaacatgcaccctcaagacttcaaaacactttttgaaactatagagcgttccaaagattgtgcttataaatggctgtatgatgaaaccctggaagataggtagcaactagactgtcgtttttggtggagcggttcatttatttggaaactatgacatgaaaaccaaatttgaaaactcacatcctttcagcagaaggtaactgttcttgtcttgcacaagccaggcagatcatttctcctaagctgatatcattggcttattggatgaaacagtgtctgctattttattcacaattgaataaaatgaaaacttcaattaattgtggatttgatcagattgaattcgttttgtttcagattcctatttaaatatttcacttgtactgttgctgatttttgcatcttcttgaagagcaagagtctgtacattattaagcttagaaagtaagcaaaactgatttactggttgcttcaagtgtgaatgttgtcagtactgtacatgaatgttaattatatgattagtttgaataatttatagacaaaaaaaaaagaaggaaaatgaaaaaaaaaagggggcggggaaaataataggggacgaaaagtgtaaaaacggaggggtacaaaagggagagtaaggagtgatggagaaacgggaaaaacaaagaagggaagttgcgttctctgttgttt

SEQ ID NO: 298669 - DNA, 1083 bp, Homo sapiens
agcggagtgtttacttccgcttgacctggcccggacgccagaaaatgttccacgtgggataccctgcgtggggttcactgtagtagctgcactaggtgattcttggagcgggcctgagagacaaggacatgtggatcccagtggtcgggcttcctcggcggctgaggctctccgccttggcgggcgctggtcgcttttgcattttagggtctgaagcggcgacgcgaaagcatttgccggcgaggaaccactgtgggctctctgactcctctccgcagctgtggcccgaaccggatttcaggaatccgccaaggaaggcgtctaaggccagcttagactttaagcgttacgtaaccgatcggagattggctgagaccctggcgcaaatctatttgggaaaaccaagtagacctccacacctactgctggagtgcaatccaggtcctggaatcctgactcaggcattacttgaagctggtgccaaagtggttgcgctcgaaagtgacaaaacttttattccacatttggagtccttaggaaaaaatctggatggaaaactacgagtgattcactgtgacttctttaaactagatcctagaagtggtggagtaataaaaccacctgctatgtcttctcgagggctctttaagaatttgggaatagaagcagttccttggacagcagacatccctttaaaagtagttggaatgttcccaagtagaggtgagaaaagggcactttggaaactcgcatatgacttgtattcctgtacttctatatataaatttggacgaatagaagtaaatatgtttattggtgaaaaagaattccaggtatgttattaacaaatacctattttttgttctgagtctgtaatttttctctgagtactcttaatctgtgcgattttaatttagggctcgtgacatttgagggtctaagattgtttttaaattctgcagagcagtcttatgctcaggttgctttttcagtgtacagttgagtggttttaactgcattcccattgtacagccattaccatcatctgtctccaaaacttttcatcatcccataccaaaactc

SEQ ID NO: 298670 - DNA, 1170 bp, Homo sapiens
ggccggcccactgggttgtgctttctgccgtacgtcccttcccatgaggatgagatgacccatctgttgcatcccggctgctgataaaacaagaccctcggagccaagaaacaacactgagttccagatttcggaaggttcacgagtgttgccgacacgccctcccaactgcagacatcctccctggaggacctgctgtgctcacatgcccccctgtccagcgaggacgacacctccccgggctgtgcagccccctcccaggcacccttcaaggccttcctcagtcccccagagccacatagccaccgaggcaccgacaggaagctgtccccgctcctgagccccttgcaagactcactggtggacaagaccctgctggagcccagggagatggtccggcctaagaaggtgtgtttctcggagagcagcctgcccaccggggacaggaccaggaggagctactacctcaatgagatccagagcttcgcgggcgccgagaaggacgcgcgcgtggtgggcgagatcgccttccagctggaccgccgcatcctggcctacgtgttcccgggcgtgacgcggctctacggcttcacggtggccaacatccccgagaagatcgagcagacctccaccaagtctctggacggctccgtggacgagaggaagctgcgcgagctgacgcagcgctacctggccctgagcgcgcgcctggagaagctgggctacagccgcgacgtgcacccggcgttcagcgagttcctcatcaacacctacggaatcctgaagcagcggcccgacctgcgcgccaaccccctgcacagcagcccggccgcgctgcgcaagctggtcatcgacgtggtgccccccaagttcctgggcgactcgctgctgctgctcaactgcctgtgcgagctctccaaggaggacggcaagcccctcttcgcctggtgagccgccccgcgcccgccgccttgcctgcagtaaacgcgtttgttccaacccggggccgcggtgcctcctgcgcgtccccccggaggggaaagggccgcgtcccccgcgcgcgaggccagagaaggccccgctcccaccggtgctgggccccgaccgcagcccgccgctgcccgcacctgcggagtgcttctcacccctcattaaaatcatccgtttgca

SEQ ID NO: 298671 - DNA, 2861 bp, Homo sapiens
ggccggcccactgggttgtgctttctgccgtacgtcccttcccatgaggatgagatgacccatctgttgcatcccggctgctgataaaacaagaccctcggagccaagaaacaacactgagttccagatttcggaaggttcacgagtgttgccgacacgccctcccaactgcagacatcctccctggaggacctgctgtgctcacatgcccccctgtccagcgaggacgacacctccccgggctgtgcagccccctcccaggcacccttcaaggccttcctcagtcccccagagccacatagccaccgaggcaccgacaggaagctgtccccgctcctgagccccttgcaagactcactggtggacaagaccctgctggagcccagggagatggtccggcctaagaaggtgtgtttctcggagagcagcctgcccaccggggacaggaccaggaggagctactacctcaatgagatccagagcttcgcgggcgccgagaaggacgcgcgcgtggtgggcgagatcgccttccagctggaccgccgcatcctggcctacgtgttcccgggcgtgacgcggctctacggcttcacggtggccaacatccccgagaagatcgagcagacctccaccaagtctctggacggctccgtggacgagaggaagctgcgcgagctgacgcagcgctacctggccctgagcgcgcgcctggagaagctgggctacagccgcgacgtgcacccggcgttcagcgagttcctcatcaacacctacggaatcctgaagcagcggcccgacctgcgcgccaaccccctgcacagcagcccggccgcgctgcgcaagctggtcatcgacgtggtgccccccaagttcctgggcgactcgctgctgctgctcaactgcctgtgcgagctctccaaggaggacggcaagcccctcttcgcctggtgagccgccccgcgcccgccgccttgcctgcagtaaacgcgtttgttccaacccggggccgcggtgcctcctgcgcgtccccccggaggggaaagggccgcgtcccccgcgcgcgaggccagagaaggccccgctcccaccggtgctgggccccgaccgcagcccgccgctgcccgcacctgcggagtgcttctcacccctcattaaaatcatccgtttgcaaaaaaaaaaaaaaaaaactcgagactagttctctccctgccgtcgcgtttgcacctcgctgctccagcctctggggcgcattccaaccttccagcctgcgacctgcggagaaaaaaaattacttattttcttgccccatacataccttgaggcgagcaaaaaaattaaattttaaccatgagggaaatcgtgcacatccaggctggtcagtgtggcaaccagatcggtgccaagttctgggaggtgatcagtgatgaacatggcatcgaccccaccggcacctaccacggggacagcgacctgcagctggaccgcatctctgtgtactacaatgaagccacaggtggcaaatatgttcctcgtgccatcctggtggatctagaacctgggaccatggactctgttcgctcaggtccttttggccagatctttagaccagacaactttgtatttggtcagtctggggcaggtaacaactgggccaaaggccactacacagagggcgccgagctggttgattctgtcctggatgtggtacggaaggaggcagagagctgtgactgcctgcagggcttccagctgacccactcactgggcgggggcacaggctctggaatgggcactctccttatcagcaagatccgagaagaataccctgatcgcatcatgaataccttcagtgtggtgccttcacccaaagtgtctgacaccgtggtcgagccctacaatgccaccctctccgtccatcagttggtagagaatactgatgagacctattgcattgacaacgaggccctctatgatatctgcttccgcactctgaagctgaccacaccaacctacggggatctgaaccaccttgtctcagccaccatgagtggtgtcaccacctgcctccgtttccctggccagctcaatgctgacctccgcaagttggcagtcaacatggtccccttcccacgtctccatttctttatgcctggctttgcccctctcaccagccgtggaagccagcagtatcgagctctcacagtgccggaactcacccagcaggtcttcgatgccaagaacatgatggctgcctgtgacccccgccacggccgatacctcaccgtggctgctgtcttccgtggtcggatgtccatgaaggaggtcgatgagcagatgcttaacgtgcagaacaagaacagcagctactttgtggaatggatccccaacaatgtcaagacagccgtctgtgacatcccacctcgtggcctcaagatggcagtcaccttcattggcaatagcacagccatccaggagctcttcaagcgcatctcggagcagttcactgccatgttccgccggaaggccttcctccactggtacacaggcgagggcatggacgagatggagttcaccgaggctgagagcaacatgaacgacctcgtctctgagtatcagcagtaccaggatgccaccgcagaagaggaggaggatttcggtgaggaggccgaagaggaggcctaaggcagagcccccatcacctcaggcttctcagttcccttagccgtcttactcaactgcccctttcctctccctcagaatttgtgtttgctgcctctatcttgttttttgttttttcttctgggggggggtctagaacagtgcctggcacatagtaggcgctcaataaatacttgtttgtt

SEQ ID NO: 298672 - DNA, 1316 bp, Homo sapiens
ggccggcccactgggttgtgctttctgccgtacgtcccttcccatgaggatgagatgacccatctgttgcatcccggctgctgataaaacaagaccctcggagccaagaaacaacactgagttccagatttcggaaggttcacgagtgttgccgacacgccctcccaactgcagacatcctccctggaggacctgctgtgctcacatgcccccctgtccagcgaggacgacacctccccgggctgtgcagccccctcccaggcacccttcaaggccttcctcagtcccccagagccacatagccaccgaggcaccgacaggaagctgtccccgctcctgagccccttgcaagactcactggtggacaagaccctgctggagcccagggagatggtccggcctaagaagagatccagagcttcgcgggcgccgagaaggacgcgcgcgtggtgggcgagatcgccttccagctggaccgccgcatcctggcctacgtgttcccgggcgtgacgcggctctacggcttcacggtggccaacatccccgagaagatcgagcaggtgcgccccgtggggagggcgcggccaggagggtgcggggcgctcggtccgtccctgtgcggcccccagatcttggctcctggccgggcactgtccgcaggaggggaccccggggacccaggcgggcggggcagggatcggccctgggcctggaagtccccgtccgagggccccgagccccccacccccatccatgcgctgcgcccgcagacctccaccaagtctctggacggctccgtggacgagaggaagctgcgcgagctgacgcagcgctacctggccctgagcgcgcgcctggagaagctgggctacagccgcgacgtgcacccggcgttcagcgagttcctcatcaacacctacggaatcctgaagcagcggcccgacctgcgcgccaaccccctgcacagcagcccggccgcgctgcgcaagctggtcatcgacgtggtgccccccaagttcctgggcgactcgctgctgctgctcaactgcctgtgcgagctctccaaggaggacggcaagcccctcttcgcctggtgagccgccccgcgcccgccgccttgcctgcagtaaacgcgtttgttccaacccggggccgcggtgcctcctgcgcgtccccccggaggggaaagggccgcgtcccccgcgcgcgaggccagagaaggccccgctcccaccggtgctgggccccgaccgcagcccgccgctgcccgcacctgcggagtgcttctcacccctcattaaaatcatccgtttgca

SEQ ID NO: 298673 - DNA, 570 bp, Homo sapiens
ttctgccgtacgtcccttcccatgaggatgagatgacccatctgttgcatcccggctgctgataaaacaagaccctcggagccaagaaacaacactgaggtgatttactttcccaagtaattgaagcagggagtcagggtgggtttcaagtcggtcgcactgactgaggacagacgcctgctctagcagggccccatgagccgcagccctgtgtgacggcccgaggggccgtggccatgggttgggggcgtcctcagttacgtgcaggcaggagcagtgcagtcaggaacaattggtgtcttagacacgggcgctcgtggtctgaggggtggacatgcactgctggacccttctcatcagggagtgaggtcagtaggtggcctccagcccagccctcagggccacccagtgctccaaagcatgtgggggccatcgtggggctgcctcaggctggtctccccaccctaggctggtctcccccgcaagactggtctcctcccccaggctggtctcccccacaaggctggtctcctcccccaggctggtctcctcaccaggctggtctcctcc

SEQ ID NO: 298674 - DNA, 2969 bp, Homo sapiens
tccttctgaaggacctcatccttcctcacagggggatgaccaagaaatcattttgtggctggttctggccacgccctttggactgtgctgttccgccatatttcaatgccaaatgaaccacattgacatgacctggaccatagggcttcctatcctgggctcagctgcccctgtctgaagggtcttggcttgattgcagaaggacaacctccgcacccacctaaagacatgtatatgtcttgggatcccagagattgggtccttgggcctggcttcttaagagttttgatgatgctgggaaaagtgactgcgattctgaagaaccgctgccttgcaaggtcaaggacattcagtggttgctggggtccgcagactactgccacccactcaccatcaactctgttagcccaattgccctgctgaacaactgcctgaatacaggctttaggttcccctggactccagccaaggctgttcaggtgggaccatggtgctctttaagcgtgatcggagggaagacacacagcagggccaccattccatgaatgggaggtgtacagatcactttctctttgtgctcagttctcttctgtctccagcagctatattggtaagactagtacctgccagggagaggtgcccccaagtgaaggggtacagtggcacctgggaaaaggcacctggaaggtttccatgtggcccagcccagcatggaagcagggtgggaactctgctgtgtcgccagcgctcactctactcgagtggctttttgagagccctgccatgtctgtgtcaggcctgtgctgcttcacatcctacagctgcctgggaaaggccggccacgctccctgtccacacactccctgtccacacactccctgtccacaactgcagccgggccctctgcctatgggcacccaatccaagcagctgctccacctttgtttggcatggtgatttgtgttttttctcttggtgcttatgtgtgtgggcttgggacgagtgctggtatgcacttaggaccttcttgatagctccctgcactttggaacacggagcagatgagagagggtcaggggcttgccctccaccttggacttggaagaagcccacattggagaggtgaggaccccatggtggctctagtggaagatacgttagtctccagctaaggaggatgaggcgcagccccagagggagacctcagtgataggggatcaggctacgaaagtgggggaagggagatgctttgtacatattttggggttataatttctctaaattttaggagaacgggtattgattgataaaagggacaggcagtagtgttcaacagtgcatgtgaaggaaagttctgttttccatggttttgacattctttggactgtattgtgactgctgtctggtccacatggtacccctttggtaagtaggcttcagtgcataccagggtatcactggagatgggagttagtgaaggggtgactccctggcctagtatagtgtgaccctgggacaacttaatgtcctaaagcattttggtgacttctagggaatagcaaagacctatttcattgtccccaggtaagtatgtgatgagcaatgaggaggagtggaaaacaaaacccagaaagtgcggcaggaccagcctgacgcacacgctcctgttgtcatggcagacagccgccttgggtgggcaccaccctggcagttccagcctgtaggggagtgaagggacatggctgagctgggcatgtgctgaggttgacttagggaacaagccctgggattggacaaaagggcccatgctgcagccactgactgggggcagagctctgggtggaagagggaagagatcctaatggaggcgcctccatctgcaaccacagttgtaaggctcatggcacctctgcttggaaagcactggtttagggacttagagaggtaggcacaaggtgggtctcctgggtaagggaagcaagagcagactgttgggccaacaggagaagctccccagagtaggggagaaggttggggtgtagggccttccacgtggaacagacagcccctgtgtctctgtctcttggggacctgagtttgggtggggtggcagttggcacagcgcagatgcggtagagatgggaggaaacccagctcctcacttccgtgtgcctcatgcctttgcatacacaagcaccaaacctactaggtcttctcattacccatgtaaaccacatgttagataaatttttgcaagtagaggaaagaaggaaataaaacatcacattttggtgtctctcaggctttcccccccaactatggtttctttgctttttgttttaacatagttttgttgctgtcttctgtaatgatacagttttgtgcagctgttttcacttagcatatcgtgggcatctccccttatgattactaaatattttattttggagtggctgtgtactctcccattgactagatggaccattgtgccagttgccaatcactaatgctgttactaacttttcagttataaattgatgaatatctttgtgcacaggctgtttcccaatgtcaagttattagggtagactccaggaggtgggattcttcaactaaagaatatgaaaacctttgaggcttttactacatattgacaaaatggtttccggaaatatttgtatccccttacactgccaccagcaaggataaacatgtccatcttgcccgtattgggaattatcatctggctaaatatttgctaatttgataatgaaaaaatagcatcgtgtttcagttggcatttcactgacttctagcacggttgaacatctttcatgtggagcgattgtatttcctcctttgtggattgtcagtgtcctttgctctatcttctggggtcagataaatttgtatgagctcggtatatattaaagatattaacctggtgtgtgtcatatttgctacagctg

SEQ ID NO: 298675 - DNA, 2983 bp, Homo sapiens
tccttctgaaggacctcatccttcctcacagggggatgaccaagaaatcattttgtggctggttctggccacgccctttggactgtgctgttccgccatatttcaatgccaaatgaaccacattgacatgacctggaccatagggcttcctatcctgggctcagctgcccctgtctgaagggtcttggcttgattgcagaaggacaacctccgcacccacctaaagacatgtatatgtcttgggatcccagagattgggtccttgggcctggcttcttaagagttttgatgatgctgggaaaagtgactgcgattctgaagaaccgctgccttgcaaggtcaaggacattcagtggttgctggggtccgcagactactgccacccactcaccatcaactctgttagcccaattgccctgctgaacaactgcctgaatacaggctttaggttcccctggactccagccaaggctgttcaggtgggaccatggtgctctttaagcgtgatcggagggaagacacacagcagggccaccattccatgaatgggaggtgtacagatcactttctctttgtgctcagttctcttctgtctccagcagctatattggtaagactagtacctgccagggagaggtgcccccaagtgaaggggtacagtggcacctgggaaaaggcacctggaaggtttccatgtggcccagcccagcatggaagcagggtgggaactctgctgtgtcgccagcgctcactctactcgagtggctttttgagagccctgccatgtctgtgtcaggcctgtgctgcttcacatcctacagctgcctgggaaaggccggccacgctccctgtccacacctccctgtccacacactccctgtccacacactccctgtccacaactgcagccgggccctctgcctatgggcacccaatccaagcagctgctccacctttgtttggcatggtgatttgtgttttttctcttggtgcttatgtgtgtgggcttgggacgagtgctggtatgcacttaggaccttcttgatagctccctgcactttggaacacggagcagatgagagagggtcaggggcttgccctccaccttggacttggaagaagcccacattggagaggtgaggaccccatggtggctctagtggaagatacgttagtctccagctaaggaggatgaggcgcagccccagagggagacctcagtgataggggatcaggctacgaaagtgggggaagggagatgctttgtacatattttggggttataatttctctaaattttaggagaacgggtattgattgataaaagggacaggcagtagtgttcaacagtgcatgtgaaggaaagttctgttttccatggttttgacattctttggactgtattgtgactgctgtctggtccacatggtacccctttggtaagtaggcttcagtgcataccagggtatcactggagatgggagttagtgaaggggtgactccctggcctagtatagtgtgaccctgggacaacttaatgtcctaaagcattttggtgacttctagggaatagcaaagacctatttcattgtccccaggtaagtatgtgatgagcaatgaggaggagtggaaaacaaaacccagaaagtgcggcaggaccagcctgacgcacacgctcctgttgtcatggcagacagccgccttgggtgggcaccaccctggcagttccagcctgtaggggagtgaagggacatggctgagctgggcatgtgctgaggttgacttagggaacaagccctgggattggacaaaagggcccatgctgcagccactgactgggggcagagctctgggtggaagagggaagagatcctaatggaggcgcctccatctgcaaccacagttgtaaggctcatggcacctctgcttggaaagcactggtttagggacttagagaggtaggcacaaggtgggtctcctgggtaagggaagcaagagcagactgttgggccaacaggagaagctccccagagtaggggagaaggttggggtgtagggccttccacgtggaacagacagcccctgtgtctctgtctcttggggacctgagtttgggtggggtggcagttggcacagcgcagatgcggtagagatgggaggaaacccagctcctcacttccgtgtgcctcatgcctttgcatacacaagcaccaaacctactaggtcttctcattacccatgtaaaccacatgttagataaatttttgcaagtagaggaaagaaggaaataaaacatcacattttggtgtctctcaggctttcccccccaactatggtttctttgctttttgttttaacatagttttgttgctgtcttctgtaatgatacagttttgtgcagctgttttcacttagcatatcgtgggcatctccccttatgattactaaatattttattttggagtggctgtgtactctcccattgactagatggaccattgtgccagttgccaatcactaatgctgttactaacttttcagttataaattgatgaatatctttgtgcacaggctgtttcccaatgtcaagttattagggtagactccaggaggtgggattcttcaactaaagaatatgaaaacctttgaggcttttactacatattgacaaaatggtttccggaaatatttgtatccccttacactgccaccagcaaggataaacatgtccatcttgcccgtattgggaattatcatctggctaaatatttgctaatttgataatgaaaaaatagcatcgtgtttcagttggcatttcactgacttctagcacggttgaacatctttcatgtggagcgattgtatttcctcctttgtggattgtcagtgtcctttgctctatcttctggggtcagataaatttgtatgagctcggtatatattaaagatattaacctggtgtgtgtcatatttgctacagctg

SEQ ID NO: 298676 - DNA, 1358 bp, Homo sapiens
cgggctgtcatgctcgcacatgtgccattaattgacaagaatgctgctcaagttggctgatcaagagataggcagtgcaaaggaacaggatttgagacagcccaggtttcctcttcaagtaggtctaaaacatttttttttctcattgacttccttcctgttctaactgccagtactcagaagtcagagttgagagacagaggcaccccggacagagacgtgaagcactgaataaatagatcagaatgactgaaaaagccccagagccacatgtggaggaggatgacgatgatgagctggacagcaagctcaattataagcctccaccacagaagtccctgaaagagctgcaggaaatggacaaagatgatgagagtctaattaagtacaagaaaacgctgctgggagatggtcctgtggtgacagatccgaaagcccccaatgtcgttgtcacccggctcaccctggtttgtgagagtgccccgggaccaatcaccatggaccttactggagatctggaagccctcaaaaaggaaaccattgtgttaaaggaaggttctgaatatagagtcaaaattcacttcaaagtgaacagggatattgtgtcaggcctgaaatacgttcagcacacctacaggactggggtgaaagtggataaagcaacatttatggttggcagctatggacctcggcctgaggagtatgagttcctcactccagttgaggaggctcccaagggcatgctggcgcgaggcacgtaccacaacaagtccttcttcaccgacgatgacaagcaagaccacctcagctgggagtggaacctgtcgattaagaaggagtggacagaatgaatgcatccacccctttccccacccttgccacctggaagaattctctcaggcgtgttcagcaccctgtccctcctccctgtccacagctgggtccctcttcaacactgccacatttccttattgatgcatcttttcccaccctgtcactcaacgtggtccctagaacaagaggcttaaaaccgggctttcacccaacctgctccctctgatcctccatcagggccagatcttccacgtctccatctcagtacacaatcatttaatatttccctgtcttacccctattcaagcaactagaggccagaaaatgggcaaattatcactaacaggtctttgactcaggttccagtagttcattctaatgcctagattcttttgtggttgttgctggcccaatgagtccctagtcacatcccctgccagagggagttcttcttttgtgagagacactgtaaacgacacaagagaacaagaataaaacaataactgtgtgtgttctggctgaga

SEQ ID NO: 298677 - DNA, 926 bp, Homo sapiens
aattcgcggccgcgtcgactacggctgcgagaagacgcagaaggggggacagagacgtgaagcactgaataaatagatcagaatgactgaaaaagccccagagccacatgtggaggaggatgacgatgatgagctggacagcaagctcaattataagcctccaccacagaagtccctgaaagagctgcaggaaatggacaaagatgatgagagtctaattaagtacaagaaaacgctgctgggagatggtcctgtggtgacagatccgaaagcccccaatgtcgttgtcacccggctcaccctggtttgtgagagtgccccgggaccaatcaccatggaccttactggagatctggaagccctcaaaaaggaaaccattgtgttaaaggaaggttctgaatatagagtcaaaattcacttcaaagtgaacagggatattgtgtcaggcctgaaatacgttcagcacacctacaggactggggtgaaagtggataaagcaacatttatggttggcagctatggacctcggcctgaggagtatgagttcctcactccagttgaggaggctcccaagggcatgctggcgcgaggcacgtaccacaacaagtccttcttcaccgacgatgacaagcaagaccacctcagctgggagtggaacctgtcgattaagaaggagtggacagaatgaatgcatccacccctttccccacccttgccacctggaagaattctctcaggcgtgttcagcaccctgtccctcctgtcaagtggccttacagcagattcttggggtttcccccgcacaggggccaacagagggacggtaccacggcgcgtgcaaggcatggcctcagagataatcgtctgaaggagacacacagcgccgtacatgggggagcggcgaagacgtgctcacgtccaggctg

SEQ ID NO: 298678 - DNA, 642 bp, Homo sapiens
aattcgcggccgcgtcgactacggctgcgagaagacgcagaaggggggagagttgagagacagaggcaccccggacagagacgtgaagcactgaataaatagatcagaatgactgaaaaagccccagagccacatgtggaggaggatgacgatgatgagctggacagcaagctcaattataagcctccaccacagaagtccctgaaagagctgcaggaaatggacaaagatgatgagagtctaattaagtacaagaaaacgctgctgggagatggtcctgtggtgacagatccgaaagcccccaatgtcgttgtcacccggctcaccctggtttgtgagagtgccccgggaccaatcaccatggaccttactgagatctggaagccctcatcaaagggaacagggatattgcgtcagccctgaaatacgtttagcacacctacagcactgggcgtgaaagtgcataaagcaccatttatgcgttgccacctatggacccccgcactgagtgagaaagcgcttcctccattccagttgagcgagcccccctaacggtcacccctgccccgaggccccgttccattaacaagtccctcttccaccgactctgccaacgttaacctcactctttcttagcaatag

SEQ ID NO: 298679 - DNA, 1269 bp, Homo sapiens
  misc_feature (26)..(26): n is a, c, g, or t
  misc_feature (28)..(28): n is a, c, g, or t
gcaggattcggcacgagcggacaganangtgaagcactgaataaatagatcagaatgactgaaaaagccccagagccacatgtggaggaggatgacgatgatgagctggacagcaagctcaattataagcctccaccacagaagtccctgaaagagctgcaggaaatggacaaagatgatgagagtctaattaagtacaagaaaacgctgctgggagatggtcctgtggtgacagatccgaaagcccccaatgtcgttgtcacccggctcaccctggtttgtgagagtgccccgggaccaatcaccatggaccttactggagatctggaagccctcaaaaaggaaaccattgtgttaaaggaaggttctgaatatagagtcaaaattcacttcaaaaagtaagtatcctgccttgtgtgtttttgtaaagtttaaatcttttctttaatcagtgactacatttcttgcatgatcatgttgaggtactttttgtttgtttctcccctagtacccccaagctgggtctggaatgtcctcttcccagccctgagggctacctgttgagacccacgtttgcctcctgtcttttcctagccaggacttcttaaactcttcattatctcttaagccaatgggatccctctgtgaactccaaacacatcctcgaggcacacactgctttgtgttgtaccacctgtgtcatttcttcttcatagaatataagcacctcaatctagggtgaaattgtacatctctcctttccaatatttcacacaaaactttgtaaatagcatatagttcatgaatatatattgaaaagtggacaaacaagtgaatcaaccaataggaaaagaaaatgggacagggcctcagctctaattgctcaaggattatataaatccaggaagtgtgatctttgctaaagaactggaaattacaattatagttgtggaacaggtaaccaggaaagaggaaactaaataagaaataaactgacatctaatatatcccaatgagccatatatcccaatgagcagccaaaatcacaagaaaaataactttgactttgaaaacaaataagttagaaatgcagtgtttgcacttcgtggtttatgtttgctttggtggcctctcattcccacttagcctcagtctccagggcctgggctccaccaaggaagactccatctgctctctctatttgcacactgggaacttttttccccaaggtacaggatatgattcagggtttatggatgacctccctac

SEQ ID NO: 298680 - DNA, 1248 bp, Homo sapiens
tccggacggaaacggtaggcatatgggttctgatcgaaacaagaaatagacgatccacacaacaaacaccaagacagagttgagagacagaggcaccccggacagagacgtgaagcactgaataaatagatcagaatgactgaaaaagccccagagccacatgtggaggaggatgacgatgatgagctggacagcaagctcaattataagcctccaccacagaagtccctgaaagagctgcaggaaatggacaaagatgatgagagtctaattaagtacaagaaaacgctgctgggagatggtcctgtggtgacagatccgaaagcccccaatgtcgttgtcacccggctcaccctggtttgtgagagtgccccgggaccaatcaccatggaccttactggagatctggaagccctcaaaaaggaaaccattgtgttaaaggaaggttctgaatatagagtcaaaattcacttcaaagtgaacagggatattgtgtcaggcctgaaatacgttcagcacacctacaggactggggtgaaagtggataaagcaacatttatggttggcagctatggacctcggcctgaggagtatgagttcctcactccagttgaggaggctcccaagggcatgctggcgcgaggcacgtaccacaacaagtccttcttcaccgacgatgacaagcaagaccacctcagctgggagtggaacctgtcgattaagaaggagtggacagaatgaatgcatccacccctttccccacccttgccacctggaagaattctctcaggcgtgttcagcaccctgtccctcctccctgtccacagctgggtccctcttcaacactgccacatttccttattgatgcatcttttcccaccctgtcactcaacgtggtccctagaacaagaggcttaaaaccgggctttcacccaacctgctccctctgatcctccatcagggccagatcttccacgtctccatctcagtacacaatcatttaatatttccctgtcttacccctattcaagcaactagaggccagaaaatgggcaaattatcactaacaggtctttgactcaggttccagtagttcattctaatgcctagattcttttgtggttgttgctggcccaatgagtccctagtcacatcccctgccagagggagttcttcttttgtgagagacactgtaaacgacacaagagaacaagaataaaacaataactgtgtgtgttctggctgaga

SEQ ID NO: 298681 - DNA, 1816 bp, Homo sapiens
  misc_feature (1457)..(1457): n is a, c, g, or t
  misc_feature (1464)..(1464): n is a, c, g, or t
  misc_feature (1475)..(1475): n is a, c, g, or t
  misc_feature (1477)..(1477): n is a, c, g, or t
  misc_feature (1479)..(1479): n is a, c, g, or t
  misc_feature (1486)..(1486): n is a, c, g, or t
  misc_feature (1501)..(1502): n is a, c, g, or t
  misc_feature (1511)..(1511): n is a, c, g, or t
  misc_feature (1514)..(1514): n is a, c, g, or t
  misc_feature (1517)..(1517): n is a, c, g, or t
  misc_feature (1523)..(1523): n is a, c, g, or t
  misc_feature (1537)..(1537): n is a, c, g, or t
  misc_feature (1552)..(1552): n is a, c, g, or t
  misc_feature (1556)..(1556): n is a, c, g, or t
  misc_feature (1559)..(1559): n is a, c, g, or t
  misc_feature (1563)..(1563): n is a, c, g, or t
  misc_feature (1570)..(1570): n is a, c, g, or t
  misc_feature (1585)..(1585): n is a, c, g, or t
  misc_feature (1588)..(1589): n is a, c, g, or t
cgggctgtcatgctcgcacatgtgccattaattgacaagaatgctgctcaagttggctgatcaagagataggcagtgcaaaggaacaggatttgagacagcccaggtttcctcttcaagtaggtctaaaacatttttttttctcattgacttccttcctgttctaactgccagtactcagaagtcagagttgagagacagaggcaccccggacagagacgtgaagcactgaataaatagatcagaatgactgaaaaagccccagagccacatgtggaggaggatgacgatgatgagctggacagcaagctcaattataagcctccaccacagaagtccctgaaagagctgcaggaaatggacaaagatgatgagagtctaattaagtacaagaaaacgctgctgggagatggtcctgtggtgacagatccgaaagcccccaatgtcgttgtcacccggctcaccctggtttgtgagagtgccccgggaccaatcaccatggaccttactggagatctggaagccctcaaaaaggaaaccattgtgttaaaggaaggttctgaatatagagtcaaaattcacttcaaagtgaacagggatattgtgtcaggcctgaaatacgttcagcacacctacaggactggggtgaaagtggataaagcaacatttatggttggcagctatggacctcggcctgaggagtatgagttcctcactccagttgaggaggctcccaagggcatgctggcgcgaggcacgtaccacaacaagtccttcttcaccgacgatgacaagcaagaccacctcagctgggagtggaacctgtcgattaagaaggagtggacagaatgaatgcatccacccctttccccacccttgccacctggaagaattctctcaggcgtgttcagcaccctgtccctcctccctgtccacagctgggtccctcttcaacactgccacatttccttattgatgcatcttttcccaccctgtcactcaacgtggtccctagaacaagaggcttaaaaccgggctttcacccaacctgctccctctgatcctccatcagggccagatcttccacgtctccatctcagtacacaatcatttaatatttccctgtcttacccctattcaagcaactagaggccagaaaatgggcaaattatcactaacaggtctttgactcaggttccagtagttcattctaatgcctagattcttttgtggttgttgctggcccaatgagtccctagtcacatcccctgccagagggagttcttcttttgtgagagacactgtaaacgacacaagagaacaagaataaaacaataactgtgtgtgttctggctgagaaaaaaaaaaaaaaaaaaaaaaaaaaaaaaaaaaaaaaaaaaaaaaaaaaaaaaaaaaaaaaaaaaaaaaaaaaaaaaaaaaaaaaaaaaaaaaaccttnggggccncctggcccaantnanttttaanttggaaaagtttttnnttggggccnaanttngggctnatttggcaattccnccttaaggggggcgnttanaantaangggccgnggttttaaacggggngannggaaaaaccctggggttccccaacttaatggccttggaaaaaatcccctttttcccaggttggggaaaaacaaaaaagccccacccgatccgccttccacaaaattggcccccctaaatgggaaatggaaattgtaagccttaaatttttgggaaaatcccggtaaaatttgtggaaaacaccccatttttataccaaggggccgaatcgggaaaaccctctataat

SEQ ID NO: 298682 - DNA, 1437 bp, Homo sapiens
  misc_feature (1415)..(1415): n is a, c, g, or t
  misc_feature (1423)..(1423): n is a, c, g, or t
cgggctgtcatgctcgcacatgtgccattaattgacaagaatgctgctcaagttggctgatcaagagataggcagtgcaaaggaacaggatttgagacagcccaggtttcctcttcaagtaggtctaaaacatttttttttctcattgacttccttcctgttctaactgccagtactcagaagtcagagttgagagacagaggcaccccggacagagacgtgaagcactgaataaatagatcagaatgactgaaaaagccccagagccacatgtggaggaggatgacgatgatgagctggacagcaagctcaattataagcctccaccacagaagtccctgaaagagctgcaggaaatggacaaagatgatgagagtctaattaagtacaagaaaacgctgctgggagatggtcctgtggtgacagatccgaaagcccccaatgtcgttgtcacccggctcaccctggtttgtgagagtgccccgggaccaatcaccatggaccttactggagatctggaagccctcaaaaaggaaaccattgtgttaaaggaaggttctgaatatagagtcaaaattcacttcaaagtgaacagggatattgtgtcaggcctgaaatacgttcagcacacctacaggactggggtgaaagtggataaagcaacatttatggttggcagctatggacctcggcctgaggagtatgagttcctcactccagttgaggaggctcccaagggcatgctggcgcgaggcacgtaccacaacaagtccttcttcaccgacgatgacaagcaagaccacctcagctgggagtggaacctgtcgattaagaaggagtggacagaatgaatgcatccacccctttccccacccttgccacctggaagaattctctcaggcgtgttcagcaccctgtccctcctccctgtccacagctgggtccctcttcaacactgccacatttccttattgatgcatcttttcccaccctgtcactcaacgtggtccctagaacaagaggcttaaaaccgggctttcacccaacctgctccctctgatcctccatcagggccagatcttccacgtctccatctcagtacacaatcatttaatatttccctgtcttacccctattcaagcaactagaggccagaaaatgggcaaattatcactaacaggtctttgactcaggttccagtagttcattctaatgcctagattcttttgtggttgttgctggcccaatgagtccctagtcacatcccctgccagagggagttcttcttttgtgagagacactgtaaacgacacaagagaacaagaataaaacaataactgtgtgtgttctggctgagaaaaaaaaaaaaaaaaaaaaaaaaaaaaaaaaaaaaaaaaaaaacaaaaaaaaacgancaccaaanacaacaaacacaac

SEQ ID NO: 298683 - DNA, 1393 bp, Homo sapiens
  misc_feature (1371)..(1371): n is a, c, g, or t
  misc_feature (1379)..(1379): n is a, c, g, or t
cgggctgtcatgctcgcacatgtgccattaattgacaagaatgctgctcaagttggctgatcaagagataggcagtgcaaaggaacaggatttgagacagcccaggtttcctcttcaagtaggtctaaaacatttttttttctcattgacttccttcctgttctaactgccagtactcagaagtcagagttgagagacagaggcaccccggacagagacgtgaagcactgaataaatagatcagaatgactgaaaaagccccagagccacatgtggaggaggatgacgatgatgagctggacagcaagctcaattataagcctccaccacagaagtccctgaaagagctgcaggaaatggacaaagatgatgagagtctaattaagtacaagaaaacgctgctgggagatggtcctgtggtgacagatccgaaagcccccaatgtcgttgtcacccggctcaccctggtttgtgagagtgccccgggaccaatcaccatggaccttactggagatctggaagccctcaaaaaggaaaccattgtgttaaaggaaggttctgaatatagagtcaaaattcacttcaaagtgaacagggatattgtgtcaggcctgaaatacgttcagcacacctacaggactggggtgaaagtggataaagcaacatttatggttggcagctatggacctcggcctgaggagtatgagttcctcactccagttgaggaggctcccaagggcatgctggcgcgaggcacgtaccacaacaagtccttcttcaccgacgatgacaagcaagaccacctcagctgggagtggaacctgtcgattaagaaggagtggacagaatgaatgcatccacccctttccccacccttgccacctggaagaattctctcaggcgtgttcagcaccctgtccctcctccctgtccacagctgggtccctcttcaacactgccacatttccttattgatgcatcttttcccaccctgtcactcaacgtggtccctagaacaagaggcttaaaaccgggctttcacccaacctgctccctctgatcctccatcagggccagatcttccacgtctccatctcagtacacaatcatttaatatttccctgtcttacccctattcaagcaactagaggccagaaaatgggcaaattatcactaacaggtctttgactcaggttccagtagttcattctaatgcctagattcttttgtggttgttgctggcccaatgagtccctagtcacatcccctgccagagggagttcttcttttgtgagagacactgtaaacgacacaagagaacaagaataaaacaataactgtgtgtgttctggctgagaaaaaaaaaacgancaccaaanacaacaaacacaac

SEQ ID NO: 298684 - DNA, 1323 bp, Homo sapiens
cgggctgtcatgctcgcacatgtgccattaattgacaagaatgctgctcaagttggctgatcaagagataggcagtgcaaaggaacaggatttgagacagcccaggtttcctcttcaagtaggtctaaaacatttttttttctcattgacttccttcctgttctaactgccagtactcagaagtcagagttgagagacagaggcaccccggacagagacgtgaagcactgaataaatagatcagaatgactgaaaaagccccagagccacatgtggaggaggatgacgatgatgagctggacagcaagctcaattataagcctccaccacagaagtccctgaaagagctgcaggaaatggacaaagatgatgagagtctaattaagtacaagaaaacgctgctgggagatggtcctgtggtgacagatccgaaagcccccaatgtcgttgtcacccggctcaccctggtttgtgagagtgccccgggaccaatcaccatggaccttactggagatctggaagccctcaaaaaggaaaccattgtgttaaaggaaggttctgaatatagagtcaaaattcacttcaaagtgaacagggatattgtgtcaggcctgaaatacgttcagcacacctacaggactggggtgaaagtggataaagcaacatttatggttggcagctatggacctcggcctgaggagtatgagttcctcactccagttgaggaggctcccaagggcatgctggcgcgaggcacgtaccacaacaagtccttcttcaccgacgatgacaagcaagaccacctcagctgggagtggaacctgtcgattaagaaggagtggacagaatgaatgcatccacccctttccccacccttgccacctggaagaattctctcaggcgtgttcagcaccctgtccctcctccctgtccacagctgggtccctcttcaacactgccacatttccttattgatgcatcttttcccaccctgtcactcaacgtggtccctagaacaagaggcttaaaaccgggctttcacccaacctgcttctccatctcagtacacaatcatttaatatttccctgtcttacccctattcaagcaactagaggccagaaaatgggcaaattatcactaacaggtctttgactcaggttccagtagttcattctaatgcctagattcttttgtggttgttgctggcccaatgagtccctagtcacatcccctgccagagggagttcttcttttgtgagagacactgtaaacgacacaagagaacaagaataaaacaataactgtgtgtgttctggctgaga

SEQ ID NO: 298685 - DNA, 1070 bp, Homo sapiens
cgggctgtcatgctcgcacatgtgccattaattgacaagaatgctgctcaagttggctgatcaagagataggcagtgcaaaggaacaggatttgagacagcccaggtttcctcttcaagtaggtctaaaacatttttttttctcattgacttccttcctgttctaactgccagtactcagaagtcagagttgagagacagaggcaccccggacagagacgtgaagcactgaataaatagatcagaatgactgaaaaagccccagagccacatgtggaggaggatgacgatgatgagctggacagcaagctcaattataagcctccaccacagaagtccctgaaagagctgcaggaaatggacaaagatgatgagagtctaattaagtacaagaaaacgctgctgggagatggtcctgtggtgacagatccgaaagcccccaatgtcgttgtcacccggctcaccctggtttgtgagagtgccccgggaccaatcaccatggaccttactggagatctggaagccctcaaaaaggaaaccattgtgttaaaggaaggttctgaatatagagtcaaaattcacttcaaagtgaacagggatattgtgtcaggcctgaaatacgttcagcacacctacaggactggggtgaaagtggataaagcaacatttatggttggcagctatggacctcggcctgaggagtatgagttcctcactccagttgaggaggctcccaagggcatgctggcgcgaggcacgtaccacaacaagtccttcttcaccgacgatgacaagcaagaccacctcagctgggagtggaacctgtcgattaagaaggagtggacagaatgaatgcatccacccctttccccacccttgccacctggaagaattctctcaggcgtgttcagcaccctgtccctcctccctgtccacagctgggtccctcttcaacactgacaacaagtccttcttcaccgacgataacaagcaagaccacctcagctgggagtggaacctgtcgattaagaaggagtggacagaatgaatgcatccacccctttccccacc

SEQ ID NO: 298686 - DNA, 1195 bp, Homo sapiens
aattcgcggccgcgtcgactacggctgcgagaagacgcagaaggggggacagagacgtgaagcactgaataaatagatcagaatgactgaaaaagccccagagccacatgtggaggaggatgacgatgatgagctggacagcaagctcaattataagcctccaccacagaagtccctgaaagagctgcaggaaatggacaaagatgatgagagtctaattaagtacaagaaaacgctgctgggagatggtcctgtggtgacagatccgaaagcccccaatgtcgttgtcacccggctcaccctggtttgtgagagtgccccgggaccaatcaccatggaccttactggagatctggaagccctcaaaaaggaaaccattgtgttaaaggaaggttctgaatatagagtcaaaattcacttcaaagtgaacagggatattgtgtcaggcctgaaatacgttcagcacacctacaggactggggtgaaagtggataaagcaacatttatggttggcagctatggacctcggcctgaggagtatgagttcctcactccagttgaggaggctcccaagggcatgctggcgcgaggcacgtaccacaacaagtccttcttcaccgacgatgacaagcaagaccacctcagctgggagtggaacctgtcgattaagaaggagtggacagaatgaatgcatccacccctttccccacccttgccacctggaagaattctctcaggcgtgttcagcaccctgtccctcctccctgtccacagctgggtccctcttcaacactgccacatttccttattgatgcatcttttcccaccctgtcactcaacgtggtccctagaacaagaggcttaaaaccgggctttcacccaacctgctccctctgatcctccatcagggccagatcttccacgtctccatctcagtacacaatcatttaatatttccctgtcttacccctattcaagcaactagaggccagaaaatgggcaaattatcactaacaggtctttgactcaggttccagtagttcattctaatgcctagattcttttgtggttgttgctggcccaatgagtccctagtcacatcccctgccagagggagttcttcttttgtgagagacactgtaaacgacacaagagaacaagaataaaacaataactgtgtgtgttctggctgaga

SEQ ID NO: 298687 - DNA, 1406 bp, Homo sapiens
tccggacggaaacggtaggcatatgggttctgatcgaaacaagaaatagacgatccacacaacaaacaccaagacagagttgagagacagaggcaccccggacagagacgtgaagcactgaataggatgaaactggggcccagtgaggttaagcaacttgcaggaggtaacgcaggaaccgagttgcgctgaaacatcgttatctgacacttccctgctttgttaaagctgtctctgcagagcttgcaaagaagcatttacctctgcttgtgcacctccagaaatagatcagaatgactgaaaaagccccagagccacatgtggaggaggatgacgatgatgagctggacagcaagctcaattataagcctccaccacagaagtccctgaaagagctgcaggaaatggacaaagatgatgagagtctaattaagtacaagaaaacgctgctgggagatggtcctgtggtgacagatccgaaagcccccaatgtcgttgtcacccggctcaccctggtttgtgagagtgccccgggaccaatcaccatggaccttactggagatctggaagccctcaaaaaggaaaccattgtgttaaaggaaggttctgaatatagagtcaaaattcacttcaaagtgaacagggatattgtgtcaggcctgaaatacgttcagcacacctacaggactggggtgaaagtggataaagcaacatttatggttggcagctatggacctcggcctgaggagtatgagttcctcactccagttgaggaggctcccaagggcatgctggcgcgaggcacgtaccacaacaagtccttcttcaccgacgatgacaagcaagaccacctcagctgggagtggaacctgtcgattaagaaggagtggacagaatgaatgcatccacccctttccccacccttgccacctggaagaattctctcaggcgtgttcagcaccctgtccctcctccctgtccacagctgggtccctcttcaacactgccacatttccttattgatgcatcttttcccaccctgtcactcaacgtggtccctagaacaagaggcttaaaaccgggctttcacccaacctgctccctctgatcctccatcagggccagatcttccacgtctccatctcagtacacaatcatttaatatttccctgtcttacccctattcaagcaactagaggccagaaaatgggcaaattatcactaacaggtctttgactcaggttccagtagttcattctaatgcctagattcttttgtggttgttgctggcccaatgagtccctagtcacatcccctgccagagggagttcttcttttgtgagagacactgtaaacgacacaagagaacaagaataaaacaataactgtgtgtgttctggctgaga

SEQ ID NO: 298688 - DNA, 1243 bp, Homo sapiens
cgggctgtcatgctcgcacatgtgccattaattgacaagaatgctgctcaagttggctgatcaagagataggcagtgcaaaggaacaggatttgagacagcccaggtttcctcttcaaaaatagatcagaatgactgaaaaagccccagagccacatgtggaggaggatgacgatgatgagctggacagcaagctcaattataagcctccaccacagaagtccctgaaagagctgcaggaaatggacaaagatgatgagagtctaattaagtacaagaaaacgctgctgggagatggtcctgtggtgacagatccgaaagcccccaatgtcgttgtcacccggctcaccctggtttgtgagagtgccccgggaccaatcaccatggaccttactggagatctggaagccctcaaaaaggaaaccattgtgttaaaggaaggttctgaatatagagtcaaaattcacttcaaagtgaacagggatattgtgtcaggcctgaaatacgttcagcacacctacaggactggggtgaaagtggataaagcaacatttatggttggcagctatggacctcggcctgaggagtatgagttcctcactccagttgaggaggctcccaagggcatgctggcgcgaggcacgtaccacaacaagtccttcttcaccgacgatgacaagcaagaccacctcagctgggagtggaacctgtcgattaagaaggagtggacagaatgaatgcatccacccctttccccacccttgccacctggaagaattctctcaggcgtgttcagcaccctgtccctcctccctgtccacagctgggtccctcttcaacactgccacatttccttattgatgcatcttttcccaccctgtcactcaacgtggtccctagaacaagaggcttaaaaccgggctttcacccaacctgctccctctgatcctccatcagggccagatcttccacgtctccatctcagtacacaatcatttaatatttccctgtcttacccctattcaagcaactagaggccagaaaatgggcaaattatcactaacaggtctttgactcaggttccagtagttcattctaatgcctagattcttttgtggttgttgctggcccaatgagtccctagtcacatcccctgccagagggagttcttcttttgtgagagacactgtaaacgacacaagagaacaagaataaaacaataactgtgtgtgttctggctgaga

SEQ ID NO: 298689 - DNA, 1226 bp, Homo sapiens
ggctggctggatttggaggactgtgataactcctacagctttttgactgggcttttgcttcatttgttcaggagtctttgtgccatgttgcttcactcgtaaaatagatcagaatgactgaaaaagccccagagccacatgtggaggaggatgacgatgatgagctggacagcaagctcaattataagcctccaccacagaagtccctgaaagagctgcaggaaatggacaaagatgatgagagtctaattaagtacaagaaaacgctgctgggagatggtcctgtggtgacagatccgaaagcccccaatgtcgttgtcacccggctcaccctggtttgtgagagtgccccgggaccaatcaccatggaccttactggagatctggaagccctcaaaaaggaaaccattgtgttaaaggaaggttctgaatatagagtcaaaattcacttcaaagtgaacagggatattgtgtcaggcctgaaatacgttcagcacacctacaggactggggtgaaagtggataaagcaacatttatggttggcagctatggacctcggcctgaggagtatgagttcctcactccagttgaggaggctcccaagggcatgctggcgcgaggcacgtaccacaacaagtccttcttcaccgacgatgacaagcaagaccacctcagctgggagtggaacctgtcgattaagaaggagtggacagaatgaatgcatccacccctttccccacccttgccacctggaagaattctctcaggcgtgttcagcaccctgtccctcctccctgtccacagctgggtccctcttcaacactgccacatttccttattgatgcatcttttcccaccctgtcactcaacgtggtccctagaacaagaggcttaaaaccgggctttcacccaacctgctccctctgatcctccatcagggccagatcttccacgtctccatctcagtacacaatcatttaatatttccctgtcttacccctattcaagcaactagaggccagaaaatgggcaaattatcactaacaggtctttgactcaggttccagtagttcattctaatgcctagattcttttgtggttgttgctggcccaatgagtccctagtcacatcccctgccagagggagttcttcttttgtgagagacactgtaaacgacacaagagaacaagaataaaacaataactgtgtgtgttctggctgaga

SEQ ID NO: 298690 - DNA, 1147 bp, Homo sapiens
gggctgtcattctgtctcccagaaatagatcagaatgactgaaaaagccccagagccacatgtggaggaggatgacgatgatgagctggacagcaagctcaattataagcctccaccacagaagtccctgaaagagctgcaggaaatggacaaagatgatgagagtctaattaagtacaagaaaacgctgctgggagatggtcctgtggtgacagatccgaaagcccccaatgtcgttgtcacccggctcaccctggtttgtgagagtgccccgggaccaatcaccatggaccttactggagatctggaagccctcaaaaaggaaaccattgtgttaaaggaaggttctgaatatagagtcaaaattcacttcaaagtgaacagggatattgtgtcaggcctgaaatacgttcagcacacctacaggactggggtgaaagtggataaagcaacatttatggttggcagctatggacctcggcctgaggagtatgagttcctcactccagttgaggaggctcccaagggcatgctggcgcgaggcacgtaccacaacaagtccttcttcaccgacgatgacaagcaagaccacctcagctgggagtggaacctgtcgattaagaaggagtggacagaatgaatgcatccacccctttccccacccttgccacctggaagaattctctcaggcgtgttcagcaccctgtccctcctccctgtccacagctgggtccctcttcaacactgccacatttccttattgatgcatcttttcccaccctgtcactcaacgtggtccctagaacaagaggcttaaaaccgggctttcacccaacctgctccctctgatcctccatcagggccagatcttccacgtctccatctcagtacacaatcatttaatatttccctgtcttacccctattcaagcaactagaggccagaaaatgggcaaattatcactaacaggtctttgactcaggttccagtagttcattctaatgcctagattcttttgtggttgttgctggcccaatgagtccctagtcacatcccctgccagagggagttcttcttttgtgagagacactgtaaacgacacaagagaacaagaataaaacaataactgtgtgtgttctggctgaga

SEQ ID NO: 298691 - DNA, 1238 bp, Homo sapiens
tcagaagggctctgagaacacgcaccgggagtgcctggaggggtttcctgcaaagtaggagcaggcacctggccaggcttggaagaaaaagactgtagatccaaaatgatacgaaatagatcagaatgactgaaaaagccccagagccacatgtggaggaggatgacgatgatgagctggacagcaagctcaattataagcctccaccacagaagtccctgaaagagctgcaggaaatggacaaagatgatgagagtctaattaagtacaagaaaacgctgctgggagatggtcctgtggtgacagatccgaaagcccccaatgtcgttgtcacccggctcaccctggtttgtgagagtgccccgggaccaatcaccatggaccttactggagatctggaagccctcaaaaaggaaaccattgtgttaaaggaaggttctgaatatagagtcaaaattcacttcaaagtgaacagggatattgtgtcaggcctgaaatacgttcagcacacctacaggactggggtgaaagtggataaagcaacatttatggttggcagctatggacctcggcctgaggagtatgagttcctcactccagttgaggaggctcccaagggcatgctggcgcgaggcacgtaccacaacaagtccttcttcaccgacgatgacaagcaagaccacctcagctgggagtggaacctgtcgattaagaaggagtggacagaatgaatgcatccacccctttccccacccttgccacctggaagaattctctcaggcgtgttcagcaccctgtccctcctccctgtccacagctgggtccctcttcaacactgccacatttccttattgatgcatcttttcccaccctgtcactcaacgtggtccctagaacaagaggcttaaaaccgggctttcacccaacctgctccctctgatcctccatcagggccagatcttccacgtctccatctcagtacacaatcatttaatatttccctgtcttacccctattcaagcaactagaggccagaaaatgggcaaattatcactaacaggtctttgactcaggttccagtagttcattctaatgcctagattcttttgtggttgttgctggcccaatgagtccctagtcacatcccctgccagagggagttcttcttttgtgagagacactgtaaacgacacaagagaacaagaataaaacaataactgtgtgtgttctggctgaga

SEQ ID NO: 298692 - DNA, 1167 bp, Homo sapiens
  misc_feature (26)..(26): n is a, c, g, or t
  misc_feature (28)..(28): n is a, c, g, or t
gcaggattcggcacgagcggacaganangtgaagcactgaataaatagatcagaatgactgaaaaagccccagagccacatgtggaggaggatgacgatgatgagctggacagcaagctcaattataagcctccaccacagaagtccctgaaagagctgcaggaaatggacaaagatgatgagagtctaattaagtacaagaaaacgctgctgggagatggtcctgtggtgacagatccgaaagcccccaatgtcgttgtcacccggctcaccctggtttgtgagagtgccccgggaccaatcaccatggaccttactggagatctggaagccctcaaaaaggaaaccattgtgttaaaggaaggttctgaatatagagtcaaaattcacttcaaagtgaacagggatattgtgtcaggcctgaaatacgttcagcacacctacaggactggggtgaaagtggataaagcaacatttatggttggcagctatggacctcggcctgaggagtatgagttcctcactccagttgaggaggctcccaagggcatgctggcgcgaggcacgtaccacaacaagtccttcttcaccgacgatgacaagcaagaccacctcagctgggagtggaacctgtcgattaagaaggagtggacagaatgaatgcatccacccctttccccacccttgccacctggaagaattctctcaggcgtgttcagcaccctgtccctcctccctgtccacagctgggtccctcttcaacactgccacatttccttattgatgcatcttttcccaccctgtcactcaacgtggtccctagaacaagaggcttaaaaccgggctttcacccaacctgctccctctgatcctccatcagggccagatcttccacgtctccatctcagtacacaatcatttaatatttccctgtcttacccctattcaagcaactagaggccagaaaatgggcaaattatcactaacaggtctttgactcaggttccagtagttcattctaatgcctagattcttttgtggttgttgctggcccaatgagtccctagtcacatcccctgccagagggagttcttcttttgtgagagacactgtaaacgacacaagagaacaagaataaaacaataactgtgtgtgttctggctgaga

SEQ ID NO: 298693 - DNA, 1075 bp, Homo sapiens
  misc_feature (952)..(952): n is a, c, g, or t
  misc_feature (954)..(954): n is a, c, g, or t
  misc_feature (973)..(973): n is a, c, g, or t
  misc_feature (980)..(980): n is a, c, g, or t
cgggctgtcatgctcgcacatgtgccattaattgacaagaatgctgctcaagttggctgatcaagagataggcagtgcaaaggaacaggatttgagacagcccaggtttcctcttcaagtaggtctaaaacatttttttttctcattgacttccttcctgttctaactgccagtactcagaagtcagagttgagagacagaggcaccccggacagagacgtgaagcactgaataaatagatcagaatgactgaaaaagccccagagccacatgtggaggaggatgacgatgatgagctggacagcaagctcaattataagcctccaccacagaagtccctgaaagagctgcaggaaatggacaaagatgatgagagtctaattaagtacaagaaaacgctgctgggagatggtcctgtggtgacagatccgaaagcccccaatgtcgttgtcacccggctcaccctggtttgtgagagtgccccgggaccaatcaccatggaccttactggagatctggaagccctcaaaaaggaaaccattgtgttaaaggaaggttctgaatatagagtcaaaattcacttcaaagtgaacagggatattgtgtcaggcctgaaatacgttcagcacacctacaggactggggtgaaagtggataaagcaacatttatggttggcagctatggacctcggcctgaggagtatgagttcctcactccagttgaggaggctcccaagggcatgctggcgcgaggcacgtaccacaacaagtccttcttcaccgacgatgacaagcaagaccacctcagctgggagtggaacctgtcgattaagaaggagtggacagaatgaatgcatccacccctttccccacccttgccacctggaagaaaggggtcagaacactggctcctctccgccaagtgggtcctcttaacaggcacttcttttgngngtttcccccggccaggccnaaaaggnaacgggtccaccggccccggttcagggagatggccgaaaaatatgcggccacaagaagaggaacaggcggggatatatgtggccccatagtaaac

SEQ ID NO: 298694 - DNA, 1035 bp, Homo sapiens
cgggctgtcatgctcgcacatgtgccattaattgacaagaatgctgctcaagttggctgatcaagagataggcagtgcaaaggaacaggatttgagacagcccaggtttcctcttcaagtaggtctaaaacatttttttttctcattgacttccttcctgttctaactgccagtactcagaagtcagagttgagagacagaggcaccccggacagagacgtgaagcactgaataaatagatcagaatgactgaaaaagccccagagccacatgtggaggaggatgacgatgatgagctggacagcaagctcaattataagcctccaccacagaagtccctgaaagagctgcaggaaatggacaaagatgatgagagtctaattaagtacaagaaaacgctgctgggagatggtcctgtggtgacagatccgaaagcccccaatgtcgttgtcacccggctcaccctggtttgtgagagtgccccgggaccaatcaccatggaccttactggagatctggaagccctcaaaaaggaaaccattgtgttaaaggaaggttctgaatatagagtcaaaattcacttcaaagtgaacagggatattgtgtcaggcctgaaatacgttcagcacacctacaggactggggtgaaagtggataaagcaacatttatggttggcagctatggacctcggcctgaggagtatgagttcctcactccagttgaggaggctcccaagggcatgctggcgcgaggcacgtaccacaacaagtccttcttcaccgacgatgacaagcaagaccacctcagctgggagtggaacctgtcgattaagaaggagtggacagaatgaatgcatccacccctttccccacccttgccacctggaagaatctctagggggggttgaccctgccttctcctggcacgtgggactcttaaatggccattcctatggtggcttccccttgatcagggctaaaaaggtaacggttacacagtcctgatacgggaatcatcacggaaaaatacgtcaa

SEQ ID NO: 298695 - DNA, 996 bp, Homo sapiens
  misc_feature (893)..(893): n is a, c, g, or t
cgggctgtcatgctcgcacatgtgccattaattgacaagaatgctgctcaagttggctgatcaagagataggcagtgcaaaggaacaggatttgagacagcccaggtttcctcttcaagtaggtctaaaacatttttttttctcattgacttccttcctgttctaactgccagtactcagaagtcagagttgagagacagaggcaccccggacagagacgtgaagcactgaataaatagatcagaatgactgaaaaagccccagagccacatgtggaggaggatgacgatgatgagctggacagcaagctcaattataagcctccaccacagaagtccctgaaagagctgcaggaaatggacaaagatgatgagagtctaattaagtacaagaaaacgctgctgggagatggtcctgtggtgacagatccgaaagcccccaatgtcgttgtcacccggctcaccctggtttgtgagagtgccccgggaccaatcaccatggaccttactggagatctggaagccctcaaaaaggaaaccattgtgttaaaggaaggttctgaatatagagtcaaaattcacttcaaagtgaacagggatattgtgtcaggcctgaaatacgttcagcacacctacaggactggggtgaaagtggataaagcaacatttatggttggcagctatggacctcggcctgaggagtatgagttcctcactccagttgaggaggctcccaagggcatgctggcgcgaggcacgtaccacaacaagtccttcttcaccgacgatgacaagcaagaccacctcagctgggagtggaacctgtcgattaagaaggagtggacagaatgaatgcatccacccctttccccacccttgccacctggaagaatnttttagggggggggaaccccgtccttcttcttgttaaaaatgggggcttttaaaaatgcgcattttttttagggttttttcaccccgcctcgggggcttggag

SEQ ID NO: 298696 - DNA, 1321 bp, Homo sapiens
cgggctgtcatgctcgcacatgtgccattaattgacaagaatgctgctcaagttggctgatcaagagataggcagtgcaaaggaacaggatttgagacagcccaggtttcctcttcaagtaggtctaaaacatttttttttctcattgacttccttcctgttctaactgccagtactcagaagtcagagttgagagacagaggcaccccggacagagacgtgaagcactgaataaatagatcagaatgactgaaaaagccccagagccacatgtggaggaggatgacgatgatgagctggacagcaagctcaattataagcctccaccacagaagtccctgaaagagctgcaggaaatggacaaagatgatgagagtctaattaagtacaagaaaacgctgctgggagatggtcctgtggtgacagatccgaaagcccccaatgtcgttgtcacccggctcaccctggtttgtgagagtgccccgggaccaatcaccatggaccttactggagatctggaagccctcaaaaaggaaaccattgtgttaaaggaaggttctgaatatagagtcaaaattcacttcaaaagcacacctacaggactggggtgaaagtggataaagcaacatttatggttggcagctatggacctcggcctgaggagtatgagttcctcactccagttgaggaggctcccaagggcatgctggcgcgaggcacgtaccacaacaagtccttcttcaccgacgatgacaagcaagaccacctcagctgggagtggaacctgtcgattaagaaggagtggacagaatgaatgcatccacccctttccccacccttgccacctggaagaattctctcaggcgtgttcagcaccctgtccctcctccctgtccacagctgggtccctcttcaacactgccacatttccttattgatgcatcttttcccaccctgtcactcaacgtggtccctagaacaagaggcttaaaaccgggctttcacccaacctgctccctctgatcctccatcagggccagatcttccacgtctccatctcagtacacaatcatttaatatttccctgtcttacccctattcaagcaactagaggccagaaaatgggcaaattatcactaacaggtctttgactcaggttccagtagttcattctaatgcctagattcttttgtggttgttgctggcccaatgagtccctagtcacatcccctgccagagggagttcttcttttgtgagagacactgtaaacgacacaagagaacaagaataaaacaataactgtgtgtgttctggctgaga

SEQ ID NO: 298697 - DNA, 1018 bp, Homo sapiens
  misc_feature (13)..(13): n is a, c, g, or t
cggctaggtagcnaggcctgggtggtgcgatgagagtctaattaagtacaagaaaacgctgctgggagatggtcctgtggtgacagatccgaaagcccccaatgtcgttgtcacccggctcaccctggtttgtgagagtgccccgggaccaatcaccatggaccttactggagatctggaagccctcaaaaaggaaaccattgtgttaaaggaaggttctgaatatagagtcaaaattcacttcaaagtgaacagggatattgtgtcaggcctgaaatacgttcagcacacctacaggactggggtgaaagtggataaagcaacatttatggttggcagctatggacctcggcctgaggagtatgagttcctcactccagttgaggaggctcccaagggcatgctggcgcgaggcacgtaccacaacaagtccttcttcaccgacgatgacaagcaagaccacctcagctgggagtggaacctgtcgattaagaaggagtggacagaatgaatgcatccacccctttccccacccttgccacctggaagaattctctcaggcgtgttcagcaccctgtccctcctccctgtccacagctgggtccctcttcaacactgccacatttccttattgatgcatcttttcccaccctgtcactcaacgtggtccctagaacaagaggcttaaaaccgggctttcacccaacctgctccctctgatcctccatcagggccagatcttccacgtctccatctcagtacacaatcatttaatatttccctgtcttacccctattcaagcaactagaggccagaaaatgggcaaattatcactaacaggtctttgactcaggttccagtagttcattctaatgcctagattcttttgtggttgttgctggcccaatgagtccctagtcacatcccctgccagagggagttcttcttttgtgagagacactgtaaacgacacaagagaacaagaataaaacaataactgtgtgtgttctggctgaga

SEQ ID NO: 298698 - DNA, 1005 bp, Homo sapiens
  misc_feature (17)..(17): n is a, c, g, or t
  misc_feature (21)..(21): n is a, c, g, or t
gcggccgcgtcgacgtncgangcgctgacgaaaagacgacagaaggggctgggagatggtcctgtggtgacagatccgaaagcccccaatgtcgttgtcacccggctcaccctggtttgtgagagtgccccgggaccaatcaccatggaccttactggagatctggaagccctcaaaaaggaaaccattgtgttaaaggaaggttctgaatatagagtcaaaattcacttcaaagtgaacagggatattgtgtcaggcctgaaatacgttcagcacacctacaggactggggtgaaagtggataaagcaacatttatggttggcagctatggacctcggcctgaggagtatgagttcctcactccagttgaggaggctcccaagggcatgctggcgcgaggcacgtaccacaacaagtccttcttcaccgacgatgacaagcaagaccacctcagctgggagtggaacctgtcgattaagaaggagtggacagaatgaatgcatccacccctttccccacccttgccacctggaagaattctctcaggcgtgttcagcaccctgtccctcctccctgtccacagctgggtccctcttcaacactgccacatttccttattgatgcatcttttcccaccctgtcactcaacgtggtccctagaacaagaggcttaaaaccgggctttcacccaacctgctccctctgatcctccatcagggccagatcttccacgtctccatctcagtacacaatcatttaatatttccctgtcttacccctattcaagcaactagaggccagaaaatgggcaaattatcactaacaggtctttgactcaggttccagtagttcattctaatgcctagattcttttgtggttgttgctggcccaatgagtccctagtcacatcccctgccagagggagttcttcttttgtgagagacactgtaaacgacacaagagaacaagaataaaacaataactgtgtgtgttctggctgaga

SEQ ID NO: 298699 - DNA, 1275 bp, Homo sapiens
cgggctgtcatgctcgcacatgtgccattaattgacaagaatgctgctcaagttggctgatcaagagataggcagtgcaaaggaacaggatttgagacagcccaggtttcctcttcaagtaggtctaaaacatttttttttctcattgacttccttcctgttctaactgccagtactcagaagtcagagttgagagacagaggcaccccggacagagacgtgaagcactgaataaatagatcagaatgactgaaaaagccccagagccacatgtggaggaggatgacgatgatgagctggacagcaagctcaattataagcctccaccacagaagtccctgaaagagctgcaggaaatggacaaagatgatgagagtctaattaagtacaagaaaacgctgctgggagatggtcctgtggtgacagatccgaaagcccccaatgtcgttgtcacccggctcaccctggtttgtgagagtgccccgggaccaatcaccatggaccttactggagatctggaagccctcaaaaaggaaaccattgtgttaaaggaaggttctgaatatagagtcaaaattcacttcaaagtgaacagggatattgtgtcaggcctgaaatacgttcttcctcactccagttgaggaggctcccaagggcatgctggcgcgaggcacgtaccacaacaagtccttcttcaccgacgatgacaagcaagaccacctcagctgggagtggaacctgtcgattaagaaggagtggacagaatgaatgcatccacccctttccccacccttgccacctggaagaattctctcaggcgtgttcagcaccctgtccctcctccctgtccacagctgggtccctcttcaacactgccacatttccttattgatgcatcttttcccaccctgtcactcaacgtggtccctagaacaagaggcttaaaaccgggctttcacccaacctgctccctctgatcctccatcagggccagatcttccacgtctccatctcagtacacaatcatttaatatttccctgtcttacccctattcaagcaactagaggccagaaaatgggcaaattatcactaacaggtctttgactcaggttccagtagttcattctaatgcctagattcttttgtggttgttgctggcccaatgagtccctagtcacatcccctgccagagggagttcttcttttgtgagagacactgtaaacgacacaagagaacaagaataaaacaataactgtgtgtgttctggctgaga

SEQ ID NO: 298700 - DNA, 944 bp, Homo sapiens
cacacacacattcagctaccccgacatgctgacatctctccaggagagaaactcacgctctctcaccagaactcagagtcttcctaatattaccaggagatctggaagccctcaaaaaggaaaccattgtgttaaaggaaggttctgaatatagagtcaaaattcacttcaaagtgaacagggatattgtgtcaggcctgaaatacgttcagcacacctacaggactggggtgaaagtggataaagcaacatttatggttggcagctatggacctcggcctgaggagtatgagttcctcactccagttgaggaggctcccaagggcatgctggcgcgaggcacgtaccacaacaagtccttcttcaccgacgatgacaagcaagaccacctcagctgggagtggaacctgtcgattaagaaggagtggacagaatgaatgcatccacccctttccccacccttgccacctggaagaattctctcaggcgtgttcagcaccctgtccctcctccctgtccacagctgggtccctcttcaacactgccacatttccttattgatgcatcttttcccaccctgtcactcaacgtggtccctagaacaagaggcttaaaaccgggctttcacccaacctgctccctctgatcctccatcagggccagatcttccacgtctccatctcagtacacaatcatttaatatttccctgtcttacccctattcaagcaactagaggccagaaaatgggcaaattatcactaacaggtctttgactcaggttccagtagttcattctaatgcctagattcttttgtggttgttgctggcccaatgagtccctagtcacatcccctgccagagggagttcttcttttgtgagagacactgtaaacgacacaagagaacaagaataaaacaataactgtgtgtgttctggctgaga

SEQ ID NO: 298701 - DNA, 1201 bp, Homo sapiens
tcagaagggctctgagaacacgcaccgggagtgcctggaggggtttcctgcaaagtaggagcaggcacctggccaggcttggaagaaaaagactgtagatccaaaatgatacgaaatagatcagaatgactgaaaaagccccagagccacatgtggaggaggatgacgatgatgagctggacagcaagctcaattataagcctccaccacagaagtccctgaaagagctgcaggaaatggacaaagatgatgagagtctaattaagtacaagaaaacgctgctgggagatggtcctgtggtgacagatccgaaagcccccaatgtcgttgtcacccggctcaccctggtttgtgagagtgccccgggaccaatcaccatggaccttactggagatctggaagccctcaaaaaggaaaccattgtgttaaaggaaggttctgaatatagagtcaaaattcacttcaaaagcacacctacaggactggggtgaaagtggataaagcaacatttatggttggcagctatggacctcggcctgaggagtatgagttcctcactccagttgaggaggctcccaagggcatgctggcgcgaggcacgtaccacaacaagtccttcttcaccgacgatgacaagcaagaccacctcagctgggagtggaacctgtcgattaagaaggagtggacagaatgaatgcatccacccctttccccacccttgccacctggaagaattctctcaggcgtgttcagcaccctgtccctcctccctgtccacagctgggtccctcttcaacactgccacatttccttattgatgcatcttttcccaccctgtcactcaacgtggtccctagaacaagaggcttaaaaccgggctttcacccaacctgctccctctgatcctccatcagggccagatcttccacgtctccatctcagtacacaatcatttaatatttccctgtcttacccctattcaagcaactagaggccagaaaatgggcaaattatcactaacaggtctttgactcaggttccagtagttcattctaatgcctagattcttttgtggttgttgctggcccaatgagtccctagtcacatcccctgccagagggagttcttcttttgtgagagacactgtaaacgacacaagagaacaagaataaaacaataactgtgtgtgttctggctgaga

SEQ ID NO: 298702 - DNA, 1047 bp, Homo sapiens
  misc_feature (237)..(237): n is a, c, g, or t
  misc_feature (239)..(239): n is a, c, g, or t
caacaaagcctgatgacagcatatcaacattgaggcaagacccttggccagcaaaaagatgatagctcactgaaggctcaaatgttagcatttttagcaataaagtgttttttaattaatatacttttttttagacataatgctattgcatacttaatatactatagtatagtgtaaatataactttttttttttttttttccagcctggacaacaagagcaaaactccatcttaanantgactttaatcactgtaggctgtagtccagattctccagtttgcagtgtgtgtttttcctctatcaggctcttaccctaatgaactcttctttcttcttagtggataaagcaacatttatggttggcagctatggacctcggcctgaggagtatgagttcctcactccagttgaggaggctcccaagggcatgctggcgcgaggcacgtaccacaacaagtccttcttcaccgacgatgacaagcaagaccacctcagctgggagtggaacctgtcgattaagaaggagtggacagaatgaatgcatccacccctttccccacccttgccacctggaagaattctctcaggcgtgttcagcaccctgtccctcctccctgtccacagctgggtccctcttcaacactgccacatttccttattgatgcatcttttcccaccctgtcactcaacgtggtccctagaacaagaggcttaaaaccgggctttcacccaacctgctccctctgatcctccatcagggccagatcttccacgtctccatctcagtacacaatcatttaatatttccctgtcttacccctattcaagcaactagaggccagaaaatgggcaaattatcactaacaggtctttgactcaggttccagtagttcattctaatgcctagattcttttgtggttgttgctggcccaatgagtccctagtcacatcccctgccagagggagttcttcttttgtgagagacactgtaaacgacacaagagaacaagaataaaacaataactgtgtgtgttctggctgaga

SEQ ID NO: 298703 - DNA, 778 bp, Homo sapiens
tcattagggtaataacctgatagaggaaaaacacacactgcaaactggagaatctggactacagcctacagtggataaagcaacatttatggttggcagctatggacctcggcctgaggagtatgagttcctcactccagttgaggaggctcccaagggcatgctggcgcgaggcacgtaccacaacaagtccttcttcaccgacgatgacaagcaagaccacctcagctgggagtggaacctgtcgattaagaaggagtggacagaatgaatgcatccacccctttccccacccttgccacctggaagaattctctcaggcgtgttcagcaccctgtccctcctccctgtccacagctgggtccctcttcaacactgccacatttccttattgatgcatcttttcccaccctgtcactcaacgtggtccctagaacaagaggcttaaaaccgggctttcacccaacctgctccctctgatcctccatcagggccagatcttccacgtctccatctcagtacacaatcatttaatatttccctgtcttacccctattcaagcaactagaggccagaaaatgggcaaattatcactaacaggtctttgactcaggttccagtagttcattctaatgcctagattcttttgtggttgttgctggcccaatgagtccctagtcacatcccctgccagagggagttcttcttttgtgagagacactgtaaacgacacaagagaacaagaataaaacaataactgtgtgtgttctggctgaga

SEQ ID NO: 298704 - DNA, 825 bp, Homo sapiens
cgggctgtcatgctcgcacatgtgccattaattgacaagaatgctgctcaagttggctgatcaagagataggcagtgcaaaggaacaggatttgagacagcccaggtttcctcttcaagtaggtctaaaacatttttttttctcattgacttccttcctgttctaactgccagtactcagaagtcagagttgagagacagaggcaccccggacagagacgtgaagcactgaataaatagatcagaatgactgaaaaagccccagagccacatgtggaggaggatgacgatgatgagctggacagcaagctcaattataagcctccaccacagaagtccctgaaagagctgcaggaaatggacaaagatgatgagagtctaattaagtacaagaaaacgctgctgggagatggtcctgtggtgacagatccgaaagcccccaatgtcgttgtcacccggctcaccctggtttgtgagagtgccccgggaccaatcaccatggaccttactggagatctggaagccctcaaaaaggaaaccattgtgttaaaggaaggttctgaatatagagtcaaaattcacttcaaagtgaacagggatattgtgtcaggcctgaaatacgttcagcacacctacaggactggggtgaaagttaatgcaacacttatgttcgccagctatggcccttgtcctaggagtatgagttccttactccaggagaggtggcttccacggtcatgcttgtaccgcgtcctttaccccaccaagccctagctttacgcgcctacacaccgcaggatcccctcaagttgttgcgcttgccgtc

SEQ ID NO: 298705 - DNA, 1460 bp, Homo sapiens
cgggctgtcatgctcgcacatgtgccattaattgacaagaatgctgctcaagttggctgatcaagagataggcagtgcaaaggaacaggatttgagacagcccaggtttcctcttcaagtaggtctaaaacatttttttttctcattgacttccttcctgttctaactgccagtactcagaagtcagagttgagagacagaggcaccccggacagagacgtgaagcactgaataaatagatcagaatgactgaaaaagccccagagccacatgtggaggaggatgacgatgatgagctggacagcaagctcaattataagcctccaccacagaagtccctgaaagagctgcaggaaatggacaaagatgatgagagtctaattaagtacaagaaaacgctgctgggagatggtcctgtggtgacagatccgaaagcccccaatgtcgttgtcacccggctcaccctggtttgtgagagtgccccgggaccaatcaccatggaccttactggagatctggaagccctcaaaaaggaaaccattgtgttaaaggaaggttctgaatatagagtcaaaattcacttcaaaaagtaagtatcctgccttgtgtgtttttgtaaagtttaaatcttttctttaatcagtgactacatttcttgcatgatcatgttgaggtactttttgtttgtttctcccctagtacccccaagctgggtctggaatgtcctcttcccagccctgagggctacctgttgagacccacgtttgcctcctgtcttttcctagccaggacttcttaaactcttcattatctcttaagccaatgggatccctctgtgaactccaaacacatcctcgaggcacacactgctttgtgttgtaccacctgtgtcatttcttcttcatagaatataagcacctcaatctagggtgaaattgtacatctctcctttccaatatttcacacaaaactttgtaaatagcatatagttcatgaatatatattgaaaagtggacaaacaagtgaatcaaccaataggaaaagaaaatgggacagggcctcagctctaattgctcaaggattatataaatccaggaagtgtgatctttgctaaagaactggaaattacaattatagttgtggaacaggtaaccaggaaagaggaaactaaataagaaataaactgacatctaatatatcccaatgagccatatatcccaatgagcagccaaaatcacaagaaaaataactttgactttgaaaacaaataagttagaaatgcagtgtttgcacttcgtggtttatgtttgctttggtggcctctcattcccacttagcctcagtctccagggcctgggctccaccaaggaagactccatctgctctctctatttgcacactgggaacttttttccccaaggtacaggatatgattcagggtttatggatgacctccctac

SEQ ID NO: 298706 - DNA, 498 bp, Homo sapiens
agagtccaaacagtgccagagtccaaacagtgccagagtccaaacagtgccagagtccaaacagtgccagagtccaaacagtgccagagtccaaacagccacatttccttattgatgcatcttttcccaccctgtcactcaacgtggtccctagaacaagaggcttaaaaccgggctttcacccaacctgctccctctgatcctccatcagggccagatcttccacgtctccatctcagtacacaatcatttaatatttccctgtcttacccctattcaagcaactagaggccagaaaatgggcaaattatcactaacaggtctttgactcaggttccagtagttcattctaatgcctagattcttttgtggttgttgctggcccaatgagtccctagtcacatcccctgccagagggagttcttcttttgtgagagacactgtaaacgacacaagagaacaagaataaaacaataactgtgtgtgttctggctgaga

SEQ ID NO: 298707 - DNA, 664 bp, Homo sapiens
tccggacggaaacggtaggcatatgggttctgatcgaaacaagaaatagacgatccacacaacaaacaccaagacagagttgagagacagaggcaccccggacagagacgtgaagcactgaataaatagatcagaatgactgaaaaagccccagagccacatgtggaggaggatgacgatgatgagctggacagcaagctcaattataagcctccaccacagaagtccctgaaagagctgcaggaaatggacaaagatgatgagagtctaattaagtacaagaaaacgctgctgggagatggtcctgtggtgacagctagaacaagaggcttaaaaccgggctttcacccaacctgctccctctgatcctccatcagggccagatcttccacgtctccatctcagtacacaatcatttaatatttccctgtcttacccctattcaagcaactagaggccagaaaatgggcaaattatcactaacaggtctttgactcaggttccagtagttcattctaatgcctagattcttttgtggttgttgctggcccaatgagtccctagtcacatcccctgccagagggagttcttcttttgtgagagacactgtaaacgacacaagagaacaagaataaaacaataactgtgtgtgttctggctgaga

SEQ ID NO: 298708 - DNA, 581 bp, Homo sapiens
cgggctgtcatgctcgcacatgtgccattaattgacaagaatgctgctcaagttggctgatcaagagataggcagtgcaaaggaacaggatttgagacagcccaggtttcctcttcaagtaggtctaaaacatttttttttctcattgacttccttcctgttctaactgccagtactcagaagtcagagttgagagacagaggcaccccggacagagacgtgaagcactgaataaatagatcagaatgactgaaaaagccccagagccacatgtggaggaggatgacgatgatgagctggacagcaagctcaattataagcctccaccacagaagtccctgaaagagctgcaggaaatggacaaagatgatgagagtctaattaagtacaagaaaacgctgctgggagatggtcctgtggtgacagatccgaaagcccccaatgtcgttgtcacccggctcaccctggtttgtgagagtgccccgggaccaatcaccatggaccttactgagatctgggccctcaggccatggtgacccctttgtagcctttgcccttggtcaccccgatgacgtcgatct

SEQ ID NO: 298709 - DNA, 429 bp, Homo sapiens
tccggacggaaacggtaggcatatgggttctgatcgaaacaagaaatagacgatccacacaacaaacaccaagacagagttgagagacagaggcaccccggacagagacgtgaagcactgaatccctctgatcctccatcagggccagatcttccacgtctccatctcagtacacaatcatttaatatttccctgtcttacccctattcaagcaactagaggccagaaaatgggcaaattatcactaacaggtctttgactcaggttccagtagttcattctaatgcctagattcttttgtggttgttgctggcccaatgagtccctagtcacatcccctgccagagggagttcttcttttgtgagagacactgtaaacgacacaagagaacaagaataaaacaataactgtgtgtgttctggctgaga

SEQ ID NO: 298710 - DNA, 529 bp, Homo sapiens
tccggacggaaacggtaggcatatgggttctgatcgaaacaagaaatagacgatccacacaacaaacaccaagacagagttgagagacagaggcaccccggacagagacgtgaagcactgaataaatagatcagaatgactgaaaaagccccagagccacatgtggaggaggatgacgatgatgagctggacagcaagctcaattataagcctccaccacagaagtccctgaaagagctgcaggaaatggacaaagattctccatctcagtacacaatcatttaatatttccctgtcttacccctattcaagcaactagaggccagaaaatgggcaaattatcactaacaggtctttgactcaggttccagtagttcattctaatgcctagattcttttgtggttgttgctggcccaatgagtccctagtcacatcccctgccagagggagttcttcttttgtgagagacactgtaaacgacacaagagaacaagaataaaacaataactgtgtgtgttctggctgaga

SEQ ID NO: 298711 - DNA, 1020 bp, Homo sapiens
  misc_feature (661)..(661): n is a, c, g, or t
  misc_feature (668)..(668): n is a, c, g, or t
  misc_feature (679)..(679): n is a, c, g, or t
  misc_feature (681)..(681): n is a, c, g, or t
  misc_feature (683)..(683): n is a, c, g, or t
  misc_feature (690)..(690): n is a, c, g, or t
  misc_feature (705)..(706): n is a, c, g, or t
  misc_feature (715)..(715): n is a, c, g, or t
  misc_feature (718)..(718): n is a, c, g, or t
  misc_feature (721)..(721): n is a, c, g, or t
  misc_feature (727)..(727): n is a, c, g, or t
  misc_feature (741)..(741): n is a, c, g, or t
  misc_feature (756)..(756): n is a, c, g, or t
  misc_feature (760)..(760): n is a, c, g, or t
  misc_feature (763)..(763): n is a, c, g, or t
  misc_feature (767)..(767): n is a, c, g, or t
  misc_feature (774)..(774): n is a, c, g, or t
  misc_feature (789)..(789): n is a, c, g, or t
  misc_feature (792)..(793): n is a, c, g, or t
tccggacggaaacggtaggcatatgggttctgatcgaaacaagaaatagacgatccacacaacaaacaccaagacagagttgagagacagaggcaccccggacagagacgtgaagcactgaataaatagatcagaatgactgaaaaagccccagagccacatccacatttccttattgatgcatcttttcccaccctgtcactcaacgtggtccctagaacaagaggcttaaaaccgggctttcacccaacctgctccctctgatcctccatcagggccagatcttccacgtctccatctcagtacacaatcatttaatatttccctgtcttacccctattcaagcaactagaggccagaaaatgggcaaattatcactaacaggtctttgactcaggttccagtagttcattctaatgcctagattcttttgtggttgttgctggcccaatgagtccctagtcacatcccctgccagagggagttcttcttttgtgagagacactgtaaacgacacaagagaacaagaataaaacaataactgtgtgtgttctggctgagaaaaaaaaaaaaaaaaaaaaaaaaaaaaaaaaaaaaaaaaaaaaaaaaaaaaaaaaaaaaaaaaaaaaaaaaaaaaaaaaaaaaaaaaaaaaaaaccttnggggccncctggcccaantnanttttaanttggaaaagtttttnnttggggccnaanttngggctnatttggcaattccnccttaaggggggcgnttanaantaangggccgnggttttaaacggggngannggaaaaaccctggggttccccaacttaatggccttggaaaaaatcccctttttcccaggttggggaaaaacaaaaaagccccacccgatccgccttccacaaaattggcccccctaaatgggaaatggaaattgtaagccttaaatttttgggaaaatcccggtaaaatttgtggaaaacaccccatttttataccaaggggccgaatcgggaaaaccctctataat

SEQ ID NO: 298712 - DNA, 699 bp, Homo sapiens
tccggacggaaacggtaggcatatgggttctgatcgaaacaagaaatagacgatccacacaacaaacaccaagacagagttgagagacagaggcaccccggacagagacgtgaagcactgaataggatgaaactggggcccagtgaggttaagcaacttgcaggaggtaacgcaggaaccgagttgcgctgaaacatcgttatctgacacttccctgctttgttaaagctgtctctgcagagcttgcaaagaagcatttacctctgcttgtgcacctccagaaatagatcagaatgactgaaaaagccccagagccacatgtggaggaggatgacgatgatgagctggacagcaagctcaattataagcctccaccacagaagtccctgaaagagctgcaggaaatggacaaagatgatgagagtctaattaagtacaagaaaacgctgctgggagatggtcctgtggtgacagatccgaaagcccccaatgtcgttgtcacccggctcaccctggtttgtgagagtgccccgggaccaatcaccatggaccttactggagatctggaagccctcaaaaaggaaaccattgtgttaaaggaaggttctgaatatagagtcaaaattcacttcaaaagtgacaaggattattgggtaggcctggaatacgtttagtcttacaggctggggtggtggttgc

SEQ ID NO: 298713 - DNA, 610 bp, Homo sapiens
tccggacggaaacggtaggcatatgggttctgatcgaaacaagaaatagacgatccacacaacaaacaccaagacagagttgagagacagaggcaccccggacagagacgtgaagcactgaataaatagatcagaatgactgaaaaagccccagagccacatgtggaggaggatgacgatgatgagctggacagcaagctcaattataagcctccaccacagaagtccctgaaagagctgcaggaaatggacaaagatgatgagagtctaattaagtacaagaaaacgctgctgggagatggtcctgtggtgacagctagaacaagaggcttaaaaccgggctttcacccaacctgctccctctgatcctccatcagggccagatcttccacgtctccatctcagtacacaatcatttaatatttccctgtcttacccctattcaagcaactagaggccagctaatgcctagattcttttgtggttgttgctggcccaatgagtccctagtcacatcccctgccagagggagttcttcttttgtgagagacactgtaaacgacacaagagaacaagaataaaacaataactgtgtgtgttctggctgaga

SEQ ID NO: 298714 - DNA, 148 bp, Homo sapiens
gcctcaggtaaatctaatgtttatttaggcttggaaaccattgctcttgactttaatcactgtaggctgtagtccagattctccagtttgcagtgtgtgtttttcctctatcaggctcttaccctaatgaactcttctttcttcttag

SEQ ID NO: 298715 - DNA, 149 bp, Homo sapiens
tgctggcccaatgagtccctagtcacatcccctgccagagggagttcttcttttgtgagagacactgtaaacgacacaagagaacaagaataaaacaataactgtgtgtgttctggctgagattctggctgagaccttcatttccctgc

SEQ ID NO: 298716 - DNA, 4170 bp, Homo sapiens
gtgctctgtggatgtgtatagttttaaacccccactgcaagttggagcaaaaggccagttggctaaaacagctgaagaaatggaatagtgttgatgtctgtccatgggaagatggaaatcatggcagtgaattacccaacttaaccaatgctctgcctcagggtgcaaatgccaaccaagattcatcgaacaggccacatcggacagtgttcacccgagccatcgaggcatgcgatctccactggcaggatagccacttgcagcacattatcagcagtgacctatacaccaactactgttaccatgacgacactgaaaactccctcttcgactcccgcgggtggcccctctggcatgaacatgttcctacagcctgtgcaagagtggacgcattacgttctcatgggtaccccagagaagcactgagactagcaatagctattgttaatacattaagacgacagcagcagaaacagttggaaatgttccgaacccaaaaaaaagagctaccccataaaaacataacctcgataaccaatctggagggctgggttggacatcccctggaccctgtgggcactctcttcagtagccttatggaagcctgccgcattgatgatgagaacctctctgggttctcagattttacagagaatatgggacagtgcaagtctctggaataccagcatctacctgcacacaaattcttagaagaaggggaatcctatttaacgctggctgtggaagtagccctgatagggctaggacagcagcgtatcatgcctgatgggctgtacacacaagagaaagtttgccggaatgaggagcagctcatttctaagcttcaggaaattgaattggatgacacactggtgaaaatttttcgcaagcaagcagtcttcctattagaagccggaccatatagtggtttaggtgaaataatccatcgggagagcgttccaatgcacacatttgccaagtatctcttcacctctctcctacctcacgatgctgaattggcatacaaaattgcactgagagcaatgcggttactagtattggaatctactgctccatcaggagacctcacccgcccacaccacattgcatcagttgttcccaaccgctaccctcgctggttcactctaagccacattgagtcccagcagtgtgagctggcatccaccatgctaactgcagccaaaggcgatgttcggaggctggaaacagtattagaatccatccagaaaaacattcactcctcatcacacatcttcaagcttgcccaagatgcatttaaaatagcaactctcatggacagtttgccagacatcactcttttgaaagtgtctctggagctgggcctgcaggttatgcgaatgacactgtcaaccttaaattggcgacggcgggagatggtgaggtggctggtaacgtgtgctactgaagtcggggtttatgccctggacagcatcatgcagacctggtttacactctttactcccaccgaggccacaagtatagttgcaactaccgtgatgtccaacagcaccatcgtccgcctccacctggactgccaccagcaggaaaagctggccagcagcgcccggacacttgcactgcagtgtgccatgaaggatccacagaactgtgccctctctgcgctaaccctttgtgaaaaggatcacatagcttttgagacggcgtaccaaattgttctcgacgctgctacgactggcatgagctatacacagctctttacaatagcacggtacatggagcaccgcgggtaccccatgagggcctacaagctggccaccctggccatgacccatctcaacctgagctacaatcaggacacacaccctgccattaatgatgttttgtgggcctgtgcgcttagccactcccttggtaaaaatgagcttgcagctataatacctctggtggtcaagagtgtcaagtgtgcaacggtactgtcagacattttgcgcagatgcactctgaccactcctggcatggtgggacttcatgggaggaggaactctggtaagctcatgtcactggacaaagcccccttgaggcaactcttggatgccacgatcggggcctacatcaacacaacgcactcacggctcacacacatcagtcctcggcactatagtgagtttatagagttcctcagcaaagcccgagagaccttcttaatggcgcatgatggacacattcagtttacacagtttattgacaacctgaaacaaatctacaaaggcaaaaagaaactgatgatgttggttcgggagaggtttggttgatagatcttgtatgaatggggtggggggtggggatgggagggatggtttgtttttacttgagcctgcctttgtaccctttttaacttaaagaacagagccacaccggtattatatgtgtatagttatattgcgtttgcagactaaattgtcatgttgtgaaagtttgtgtgttttttattttttccctatttctttctttcctttattttattattttttttaattttttttttctggttttgtatgagagagaggttaaaaaggtttggtttacactgagtatatgttgtcaagtggcaaaagtccacatagctctcctgttttctgtatacgttcacagcctcaaaaaaaataattgaaatggctttaaaaaccaaacaaaacacctccatcctgtgataagtacctcgaatggattcagctttactcctttgtaactcatctttacattttcagcatatttaaacaaaccaacaaaatgaaatactaatagtaaaaaggctgacccatgtggctttgcagtgctgttcgtccagaagcatggcacacgatgcttgtgcatgtggaaacttagcgactgtcaacatacattctcagggatttatccaaaaaaattaaaaaaagaatgagagcatttattgtactgtatatatattatagtatatgtctgaatattgaaaatataacattaactaatttataaaaaatattctatgtaatgcaaaatacttgaagctgcagtagcttggttttaaacaaaaacaaaaaaaaaactgagagaaaacctatcagaaggactaaaagtacgccttgcttcagggttggctcaggtggtgaacttcatgctgggcatctatgcagagccaccttttggattgcatggttggactgagatctattgggagaaattatatatgtatatatatttatacaacttatgtatacatatatatatgtatacacacagacacacacacacaccaccaacaaccaccactacaccacacatgcttataacaggcactagaataaagagggacaacaaaatacacagccagagcagcaagccttagcattaagaatatacaatatgccggaattggggttcgtgcctcctagcctaggaaacttaaaagaaatatccttttgacacaaaacacaaaatgttttccaaaacaattgacataatgatacattacgcctttgcagtgagctaataataagctaacctttgtgcacaaataacattatatatattatatatctattctgcataggtattttgactttgtgcaggacagaaagttgtgtaggtatgactgttctacttttcagttttctttttttttaatatattttattttctctagaaattactcaaacaaaagcagccttctatcttgccttgtcttaatgctttaaaataaccaaactggagatctaactaccaaactgttcattatattattaaataccaactttggttacagtatagtgtctttactttagctgatggttctgtaaccttgtgctttttaaagcaatttttatgttttggtgcaaaagttgtccagtgtctcttgttcccttcactagagaacatgcttagaggtatgtttgtaggtatttttgtttagaagaactatttcatgcgctccattttatttattataataggtaaaaagaaaaaaaaaggttgtaattcatcacccatgtaaacatgctcatgaagttgaaagtaattaagatttgatacactgatatcaatttatttatgtaactaaatcactgttttataaacttgttaatgatcaacaatttttgttttgattaaaattagttttttgaaagttga

SEQ ID NO: 298717 - DNA, 4116 bp, Homo sapiens
gtgctctgtggatgtgtatagttttaaacccccactgcaagttggagcaaaaggccagttggctaaaacagctgaagaaatggaatagtgttgatgtctgtccatgggaagatggaaatcatggcagtgaattacccaacttaaccaatgctctgcctcagggtgcaaatgccaaccaagattcatcgaacaggccacatcggacagtgttcacccgagccatcgaggcatgcgatctccactggcaggatagccacttgcagcacattatcagcagtgacctatacaccaactactgttaccatgacgacactgaaaactccctcttcgactcccgcgggtggcccctctggcatgaacatgttcctacagcctgtgcaagagtggacgcattacgttctcatgggtaccccagagaagcactgagactagcaatagctattgttaatacattaagacgacagcagcagaaacagttggaaatgttccgaacccaaaaaaaagagctaccccataaaaacataacctcgataaccaatctggagggctgggttggacatcccctggaccctgtgggcactctcttcagtagccttatggaagcctgccgcattgatgatgagaacctctctgggttctcagattttacagagaatatgggacagtgcaagtctctggaataccagcatctacctgcacacaaattcttagaagaaggggaatcctatttaacgctggctgtggaagtagccctgatagggctaggacagcagcgtatcatgcctgatgggctgtacacacaagagaaagtttgccggaatgaggagcagctcatttctaagcttcaggaaattgaattggatgacacactggtgaaaatttttcgcaagcaagcagtcttcctattagaagccggaccatatagtggtttaggtgaaataatccatcgggagagcgttccaatgcacacatttgccaagtatctcttcacctctctcctacctcacgatgctgaattggcatacaaaattgcactgagagcaatgcggttactagtattggaatctactgctccatcaggagacctcacccgcccacaccacattgcatcagttgttcccaaccgctaccctcgctggttcactctaagccacattgagtcccagcagtgtgagctggcatccaccatgctaactgcagccaaaggcgatgttcggaggctggaaacagtattagaatccatccagaaaaacattcactcctcatcacacatcttcaagcttgcccaagatgcatttaaaatagcaactctcatggacagtttgccagacatcactcttttgaaagtgtctctggagctgggcctgcaggttatgcgaatgacactgtcaaccttaaattggcgacggcgggagatggtgaggtggctggtaacgtgtgctactgaagtcggggtttatgccctggacagcatcatgcagacctggtttacactctttactcccaccgaggccacaagtatagttgcaactaccgtgatgtccaacagcaccatcgtccgcctccacctggactgccaccagcaggaaaagctggccagcagcgcccggacacttgcactgcagtgtgccatgaaggatccacagaactgtgccctctctgcgctaaccctttgtgaaaaggatcacatagcttttgagacggcgtaccaaattgttctcgacgctgctacgactggcatgagctatacacagctctttacaatagcacggtacatggagcaccgcgggtaccccatgagggcctacaagctggccaccctggccatgacccatctcaacctgagctacaatcaggacacacaccctgccattaatgatgttttgtgggcctgtgcgcttagccactcccttggtaaaaatgagcttgcagctataatacctctggtggtcaagagtgtcaagtgtgcaacggtactgtcagacattttgcgcagatgcactctgaccactcctggcatggtgggacttcatgggaggaggaactctggtaagctcatgtcactggacaaagcccccttgaggcaactcttggatgccacgatcggggcctacatcaacacaacgcactcacggctcacacacatcagtcctcggcactatagtgagtttatagagttcctcagcaaagcccgagagaccttcttaatggcgcatgatggacacattcagtttacacagtttattgacaacctgaaacaaatctacaaaggcaaaaagaaactgatgatgttggttcgggagaggtttggttgatagatcttgtatgaatggggtggggggtggggatgggagggatggtttgtttttacttgagcctgcctttgtaccctttttaacttaaagaacagagccacaccggtattatatgtgtatagttatattgcgtttgcagactaaattgtcatgttgtgaaagtttgtgtgttttttattttttccctatttctttctttcctttattttattattttttttaattttttttttctggttttgtatgagagagaggttaaaaaggtttggtttacactgagtatatgttgtcaagtggcaaaagtccacatagctctcctgttttctgtatacgttcacagcctcaaaaaaaataattgaaatggctttaaaaaccaaacaaaacacctccatcctgtgataagtacctcgaatggattcagctttactcctttgtaactcatctttacattttcagcatatttaaacaaaccaacaaaatgaaatactaatagtaaaaaggctgacccatgtggctttgcagtgctgttcgtccagaagcatggcacacgatgcttgtgcatgtggaaacttagcgactgtcaacatacattctcagggatttatccaaaaaaattaaaaaaagaatgagagcatttattgtactgtatatatattatagtatatgtctgaatattgaaaatataacattaactaatttataaaaaatattctatgtaatgcaaaatacttgaagctgcagtagcttggttttaaacaaaaacaaaaaaaaaactgagagaaaacctatcagaaggaatctatgcagagccaccttttggattgcatggttggactgagatctattgggagaaattatatatgtatatatatttatacaacttatgtatacatatatatatgtatacacacagacacacacacacaccaccaacaaccaccactacaccacacatgcttataacaggcactagaataaagagggacaacaaaatacacagccagagcagcaagccttagcattaagaatatacaatatgccggaattggggttcgtgcctcctagcctaggaaacttaaaagaaatatccttttgacacaaaacacaaaatgttttccaaaacaattgacataatgatacattacgcctttgcagtgagctaataataagctaacctttgtgcacaaataacattatatatattatatatctattctgcataggtattttgactttgtgcaggacagaaagttgtgtaggtatgactgttctacttttcagttttctttttttttaatatattttattttctctagaaattactcaaacaaaagcagccttctatcttgccttgtcttaatgctttaaaataaccaaactggagatctaactaccaaactgttcattatattattaaataccaactttggttacagtatagtgtctttactttagctgatggttctgtaaccttgtgctttttaaagcaatttttatgttttggtgcaaaagttgtccagtgtctcttgttcccttcactagagaacatgcttagaggtatgtttgtaggtatttttgtttagaagaactatttcatgcgctccattttatttattataataggtaaaaagaaaaaaaaaggttgtaattcatcacccatgtaaacatgctcatgaagttgaaagtaattaagatttgatacactgatatcaatttatttatgtaactaaatcactgttttataaacttgttaatgatcaacaatttttgttttgattaaaattagttttttgaaagttga

SEQ ID NO: 298718 - DNA, 4146 bp, Homo sapiens
gtgctctgtggatgtgtatagttttaaacccccactgcaagttggagcaaaaggccagttggctaaaacagctgaagaaatggaatagtgttgatgtctgtccatgggaagatggaaatcatggcagtgaattacccaacttaaccaatgctctgcctcagggtgcaaatgccaaccaagattcatcgaacaggccacatcggacagtgttcacccgagccatcgaggcatgcgatctccactggcaggatagccacttgcagcacattatcagcagtgacctatacaccaactactgttaccatgacgacactgaaaactccctcttcgactcccgcgggtggcccctctggcatgaacatgttcctacagcctgtgcaagagtggacgcattacgttctcatgggtaccccagagaagcactgagactagcaatagctattgttaatacattaagacgacagcagcagaaacagttggaaatgttccgaacccaaaaaaaagagctaccccataaaaacataacctcgataaccaatctggagggctgggttggacatcccctggaccctgtgggcactctcttcagtagccttatggaagcctgccgcattgatgatgagaacctctctgggttctcagattttacagagaatatgggacagtgcaagtctctggaataccagcatctacctgcacacaaattcttagaagaaggggaatcctatttaacgctggctgtggaagtagccctgatagggctaggacagcagcgtatcatgcctgatgggctgtacacacaagagaaagtttgccggaatgaggagcagctcatttctaagcttcaggaaattgaattggatgacacactggtgaaaatttttcgcaagcaagcagtcttcctattagaagccggaccatatagtggtttaggtgaaataatccatcgggagagcgttccaatgcacacatttgccaagtatctcttcacctctctcctacctcacgatgctgaattggcatacaaaattgcactgagagcaatgcggttactagtattggaatctactgctccatcaggagacctcacccgcccacaccacattgcatcagttgttcccaaccgctaccctcgctggttcactctaagccacattgagtcccagcagtgtgagctggcatccaccatgctaactgcagccaaaggcgatgttcggaggctggaaacagtattagaatccatccagaaaaacattcactcctcatcacacatcttcaagcttgcccaagatgcatttaaaatagcaactctcatggacagtttgccagacatcactcttttgaaagtgtctctggagctgggcctgcaggttatgcgaatgacactgtcaaccttaaattggcgacggcgggagatggtgaggtggctggtaacgtgtgctactgaagtcggggtttatgccctggacagcatcatgcagacctggtttacactctttactcccaccgaggccacaagtatagttgcaactaccgtgatgtccaacagcaccatcgtccgcctccacctggactgccaccagcaggaaaagctggccagcagcgcccggacacttgcactgcagtgtgccatgaaggatccacagaactgtgccctctctgcgctaaccctttgtgaaaaggatcacatagcttttgagacggcgtaccaaattgttctcgacgctgctacgactggcatgagctatacacagctctttacaatagcacggtacatggagcaccgcgggtaccccatgagggcctacaagctggccaccctggccatgacccatctcaacctgagctacaatcaggacacacaccctgccattaatgatgttttgtgggcctgtgcgcttagccactcccttggtaaaaatgagcttgcagctataatacctctggtggtcaagagtgtcaagtgtgcaacggtactgtcagacattttgcgcagatgcactctgaccactcctggcatggtgggacttcatgggaggaggaactctggtaagctcatgtcactggacaaagcccccttgaggcaactcttggatgccacgatcggggcctacatcaacacaacgcactcacggctcacacacatcagtcctcggcactatagtgagtttatagagttcctcagcaaagcccgagagaccttcttaatggcgcatgatggacacattcagtttacacagtttattgacaacctgaaacaaatctacaaaggcaaaaagaaactgatgatgttggttcgggagaggtttggttgatagatcttgtatgaatggggtggggggtggggatgggagggatggtttgtttttacttgagcctgcctttgtaccctttttaacttaaagaacagagccacaccggtattatatgtgtatagttatattgcgtttgcagactaaattgtcatgttgtgaaagtttgtgtgttttttattttttccctatttctttctttcctttattttattattttttttaattttttttttctggttttgtatgagagagaggttaaaaaggtttggtttacactgagtatatgttgtcaagtggcaaaagtccacatagctctcctgttttctgtatacgttcacagcctcaaaaaaaataattgaaatggctttaaaaaccaaacaaaacacctccatcctgtgataagtacctcgaatggattcagctttactcctttgtaactcatctttacattttcagcatatttaaacaaaccaacaaaatgaaatactaatagtaaaaaggctgacccatgtggctttgcagtgctgttcgtccagaagcatggcacacgatgcttgtgcatgtggaaacttagcgactgtcaacatacattctcagggatttatccaaaaaaattaaaaaaagaatgagagcatttattgtactgtatatatattatagtatatgtctgaatattgaaaatataacattaactaatttataaaaaatattctatgtaatgcaaaatacttgaagctgcagtagcttggttttaagaaaacctatcagaaggactaaaagtacgccttgcttcagggttggctcaggtggtgaacttcatgctgggcatctatgcagagccaccttttggattgcatggttggactgagatctattgggagaaattatatatgtatatatatttatacaacttatgtatacatatatatatgtatacacacagacacacacacacaccaccaacaaccaccactacaccacacatgcttataacaggcactagaataaagagggacaacaaaatacacagccagagcagcaagccttagcattaagaatatacaatatgccggaattggggttcgtgcctcctagcctaggaaacttaaaagaaatatccttttgacacaaaacacaaaatgttttccaaaacaattgacataatgatacattacgcctttgcagtgagctaataataagctaacctttgtgcacaaataacattatatatattatatatctattctgcataggtattttgactttgtgcaggacagaaagttgtgtaggtatgactgttctacttttcagttttctttttttttaatatattttattttctctagaaattactcaaacaaaagcagccttctatcttgccttgtcttaatgctttaaaataaccaaactggagatctaactaccaaactgttcattatattattaaataccaactttggttacagtatagtgtctttactttagctgatggttctgtaaccttgtgctttttaaagcaatttttatgttttggtgcaaaagttgtccagtgtctcttgttcccttcactagagaacatgcttagaggtatgtttgtaggtatttttgtttagaagaactatttcatgcgctccattttatttattataataggtaaaaagaaaaaaaaaggttgtaattcatcacccatgtaaacatgctcatgaagttgaaagtaattaagatttgatacactgatatcaatttatttatgtaactaaatcactgttttataaacttgttaatgatcaacaatttttgttttgattaaaattagttttttgaaagttga

SEQ ID NO: 298719 - DNA, 600 bp, Homo sapiens
tcctttgagtgtatttggcatggaaactagacttgacaattctttttgcaggacgcctttaaccttagctttaatggctgcagaatgtttgtgtttgataaacaagtgagtgaatggtggctcttgggctgacctgcctcttagtacttaggatgtgagagtattcacccttcacccttctgcttagggggtgcaggacaatgtgtgtgggtgtgttcatgaacatctggccacagaatggtatgactgatttattcacatgtgaataatagctgacacggctttctgaattgtggaaaaaacagattcatcgaacaggccacatcggacagtgttcacccgagccatcgaggcatgcgatctccactggcaggatagccacttgcagcacattatcagcagtgacctatacaccaactactgttaccatgacgacactgaaaactccctcttcgactcccgcgggtggcccctctggcatggtaagtgaccaaaccggaaagacatttccatgacttacttctttgtttagtttctatagcattactggaatgggaggtggagaactgaaggattcaatgggagatggatgaatgcttg

SEQ ID NO: 298720 - DNA, 3542 bp, Homo sapiens
agagggctgcggccgcgtcgccgctgaggatgtcccgaaaggggccgcgagcggaggtgtgtgcggactgcagcgccccggaccctggctgggcatccatcagcaggggtgtgctggtgtgtgacgagtgctgcagcgtgcaccggagcctgggacgccacatctccattgtcaagcaccttcgccacagcgcctggcctcccacgctgctgcagatggtgcacacgcttgccagcaacggggccaactccatctgggagcactccctgctggaccccgcacaagtgcagagcggccggcgtaaagccaacccccaagacaaagtccaccccatcaagtcagagttcatcagggccaagtaccagatgctggcatttgtgcacaagcttccctgccgggacgatgatggagtcaccgccaaagacctcagcaagcaactacactcgagcgtgcggacaggcaacctggagacatgtctgcgcctgctctccctgggtgcccaggccaacttcttccacccagagaagggcaccacacctctgcacgtggctgccaaggcaggacagacactgcaggccgagctgcttgtagtgtatggggctgaccctggctcccctgatgttaatggccgcacacccattgactatgccaggcaggcggggcaccatgagctggcggaaaggctggttgagtgccaatatgagctcactgaccggctggccttctacctctgtggacgcaagccggatcacaagaatgggcattacatcatcccacagatggctgacagccttgacttatccgaattggccaaagctgctaagaagaagctgcaggcgctcagcaaccggctttttgaggaactcgccatggacgtgtatgacgaggtggatcgaagagaaaatgatgcagtgtggctggctacccaaaaccacagcactctggtgacagagcgcagtgccgtgcccttcctgcctgttaacccggaatactcagccacgcggaatcaggggcgacaaaagctggcccgctttaatgcccgagagtttgccaccttgatcatcgacattctcagtgaggccaagcggagacagcagggcaagagcctgagcagccccacagacaacctcgagctgtctctgcggagccagagtgacctcgacgaccaacacgactacgacagcgtggcctctgacgaggacacagaccaggagcccctgcgcagcaccggcgccactcggagcaaccgggcccggagcatggactcctcggacttgtctgacggggctgtgacgctgcaggagtacctggagctgaagaaggccctggctacatcggaggcaaaggtgcagcagctcatgaaggtcaacagtagcctgagcgacgagctccggaggctgcagcgagagatccacaagctgcaggcggagaacctgcagctccggcagcctccagggccggtgcccacacctccactccccagtgaacgggcggaacacacacccatggcgccaggcgggagcacacaccgcagggatcgccaggccttttccatgtatgaacctggctctgccctgaagccctttgggggcccccctggggacgagctcactacgcggctgcagcctttccacagcactgagctagaggacgacgccatctattcagtgcacgtccctgctggcctttaccggatccggaaaggggtgtctgcctcagctgtgcccttcactccctcctccccgctgctgtcctgctcccaggagggaagccgccacacgagcaagctttcccgccacggcagtggagccgacagtgactatgagaacacgcaaagtggggacccactgctggggctggaagggaagaggtttctagagctgggcaaagaggaagacttccacccagagctggaaagcctggatggagacctagatcctgggcttcccagcacagaggatgtcatcttgaagacagagcaggtcaccaagaacattcaggaactgttgcgggcagcccaggagttcaagcatgacagcttcgtgccctgctcagagaagatccatttggctgtgaccgagatggcctccctcttcccaaagaggccagccctggagccagtgcggagctcactgcggctgctcaacgccagcgcctaccggctgcagagtgagtgccggaagacagtgcccccagagcccggcgccccagtggacttccagctgctgactcagcaggtgatccagtgcgcctatgacatcgccaaggctgccaagcagctggtcaccatcaccacccgagagaagaagcagtgacctctctccccacaccctcacctgcaccctaggacctcactggccataggagctgggccactccagacattaatccccaccccaacagagccactggcacaagtgcccttagtgctgccacactccctggcagccaggtgccctggtgcccacccctgtcgagcccctaaggatggggaggtgggggggcaggagcttctgtcccccacattccatgcacctcccctctgtatatagcatctcccccctcctagtgagcaggggcctgcaaggcatcactcccagcccctcgccttctagggcaccctcagcaaaggggcaggtggggacactccaagtggggcagctctccgtacatgcgccccacccccatgagccagttcagccctactgggggctgagcgggggcatcccctcctttgtacatagtctccatggatgtccctgccctgtagccaccagccccttgctgctctccctttaatgccatatggcccctgcctagggcacaggccccaacctgtgtgctggggtccccagcagcaaacactggaaagtctgttttttttttttctttcttcttccccaccccttaattttaactttgtggtaactgagtgcccccgcgtgcctgcgtgttgagtgtgtgggcggcagtgccgttccggaggcctggtccatctggagttttgaggggtgaggggaccagagcagtgggaccagcatggggatcagcttcccttccccacctggagccagggactgtccgggtagccagttttggtcctgccagctgcctccctgatccctccccactctcgccccttctctatgaacttaaatcaaaaaccacttccctccatctcctcctgctcctgcgtggagggggaatgtgtgctggctagggtggaggactgagcacctgagcctggggctggctccccggggtccccgactcagctggtggctgtggagctgagtcccctccccgtaacctctgcaaggccagcacccaccatcactacctgcacctgctgtggtcccaccctctggaggcctgggaacctggctgcagcctgggaaggctggagaggcagacggtgggacccaccagctctctccccatcccgcttcttccctgggggccaggccctacctgtgtggtggtgggtgggctgtcaagacgtgtcatgtacatttgtatcaaaaataaagaagtgaccatga

SEQ ID NO: 298721 - DNA, 1811 bp, Homo sapiens
gagcggggaggagggagtgaagggcacagctgaggcagacacccctttccgctgctgtcctgctcccaggagggaagccgccacacgagcaagctttcccgccacggcagtggagccgacagtgactatgagaacacgcaaagtggggacccactgctggggctggaagggaagaggtttctagagctgggcaaagaggaagacttccacccagagctggaaagcctggatggagacctagatcctgggcttcccagcacagaggatgtcatcttgaagacagagcaggtcaccaagaacattcaggaactgttgcgggcagcccaggagttcaagcatgacagcttcgtgccctgctcagagaagatccatttggctgtgaccgagatggcctccctcttcccaaagaggccagccctggagccagtgcggagctcactgcggctgctcaacgccagcgcctaccggctgcagagtgagtgccggaagacagtgcccccagagcccggcgccccagtggacttccagctgctgactcagcaggtgatccagtgcgcctatgacatcgccaaggctgccaagcagctggtcaccatcaccacccgagagaagaagcagtgacctctctccccacaccctcacctgcaccctaggacctcactggccataggagctgggccactccagacattaatccccaccccaacagagccactggcacaagtgcccttagtgctgccacactccctggcagccaggtgccctggtgcccacccctgtcgagcccctaaggatggggaggtgggggggcaggagcttctgtcccccacattccatgcacctcccctctgtatatagcatctcccccctcctagtgagcaggggcctgcaaggcatcactcccagcccctcgccttctagggcaccctcagcaaaggggcaggtggggacactccaagtggggcagctctccgtacatgcgccccacccccatgagccagttcagccctactgggggctgagcgggggcatcccctcctttgtacatagtctccatggatgtccctgccctgtagccaccagccccttgctgctctccctttaatgccatatggcccctgcctagggcacaggccccaacctgtgtgctggggtccccaagaggcggtccccagagaagcggagggagggcacccgcagcgccgacaacactttggagaggagggagaagcacgagaagagacgagacgtctctccggagcggaggcgagagcggtcacccacccgcaggagagacggctcccccagccggcggagacggtctctggagagactcctggagcagaggaggtcccccgagcgcaggagagggggctcgcccgagcgcagggccaagtccaccgaccggaggcgcgcacgctcccccgagcgcaggagagagcggtccctggacaaaaggaacagagaggacagagccagccaccgagaaagggaagaggcgaatctgaaacaggatgccggcagaagttccagacatcccccggagcagagaaggcgaccttacaaagaatgtagcaccgacctcagtatctgagacgctgagtcacattccaacctttaccgtgtcaaaggttctaagaggaaagtcacaaacctgaaattatttagtttcttacctaatgaagcatctgacacctgatgatcctatgaataacaacaaacattttatgcatttgaaatcttataagaaaaaatatatatgaaaagtattgtgcctgatgtatcatattaaagaaagtatttttaaatgc

SEQ ID NO: 298722 - DNA, 452 bp, Homo sapiens
gtagatggtgactgacggcagcgtttattaattggcattaacccctagcgggaagcctctgtcctcccgacatagtctggtttgggcaggcctccttggagctgctaggtgtcccaggggcagccagggtgcagcttgtgggtggggaggtgcgcctcacgcacatgcgtattcactgcacactctgctcctcttagcaactacactcgagcgtgcggacaggcaacctggagacatgtctgcgcctgctctccctgggtgcccaggccaacttcttccacccagagaagggcaccacacctctgcacgtggctgccaaggcaggacagacactgcaggccgagctgcttgtagtgtatggggctgaccctggctcccctgatgttaatggccgcacacccattgactatgccaggtgagggtcggctgaagggtgcagtgtgggtgggtgg

SEQ ID NO: 298723 - DNA, 858 bp, Homo sapiens
  misc_feature (226)..(226): n is a, c, g, or t
cccacaccccacacccccaccccacaaatatgtataggtgcggaccgggatcttatgtctagcttcgtgtgacggcgtatagtgcaaaacggtgggacccaccagctctctccccatcccgcttcttccctgggggccaggccctacctgtgtggtggtgggtgggctgtcaagacgtgtcatgtacatttgtatcaaaaataaagaagtgaccatgaaaaaaaanaaaaaaaaaaaaaaaaaaaaaaaaaaaaaaaaaaaaaaaaaaaaaacaacgggcgggcagcaaattctatctaggggggggcgaaaagagagaagaaaaaaaaaagaagcacacgtcgaacacaaaagagggacgcgaagaacccacactattatataaaacaagagaacgagggacaccaactagagcgaggggcgacccacaccaaaaaagaggacgacaaactaaaaccaaatcaagaaacacccgagaggaacacacacgcgactaaacaaacaagaagacacagaagaaaaagaagacaacaacgaaaaagcaacaaaacaagaacaagaccccagcaaaccccaccacgagccgaaccacgaacaacgaccagtacgacgtatcctggccaggataacacgaaaaacaatcagacaaagaaaaaacagccaaacgctatgagcacgaagaacaccgtaaatcaggataacagatggcgtaaaaaagcacagcattgggcgcagatgaatggatatcagtagcagtaggaagcgagacaacaggcgcggcgacgcgaggaaaacggatggaggaacaattagcaaagcgactcaggtaaaggcggaacgaggacaacaacgaagata

SEQ ID NO: 298724 - DNA, 391 bp, Homo sapiens
gtagatggtgactgacggcagcgtttattaattggcattaacccctagcgggaagcctctgtcctcccgacatagtctggtttgggcagaggcatggagggtagaaatgctgcatgggaatggaggcagcccccgggctggagcacagcatgggaggcagggaaccctacaagcaagactgggatagagacgagctggagaatgagcagccccgagagcatcagcaggagcagtgaccatcccgagagcggagagttccaggcacagaagtgtgaagtcatctctgctgcttactggctgtgtgacttgcaggctgcttgacctctctgagccttggttatctctcctggaaatggagatgacagcatctatttttcagggaggagaggat

SEQ ID NO: 298725 - DNA, 3305 bp, Homo sapiens
gtagatggtgactgacggcagcgtttattaattggcattaacccctagcgggaagcctctgtcctcccgacatagtctggtttgggcaggcctccttggagctgctaggtgtcccaggggcagccagggtgcagcttgtgggtggggaggtgcgcctcacgcacatgcgtattcactgcacactctgctcctcttagcaactacactcgagcgtgcggacaggcaacctggagacatgtctgcgcctgctctccctgggtgcccaggccaacttcttccacccagagaagggcaccacacctctgcacgtggctgccaaggcaggacagacactgcaggccgagctgcttgtagtgtatggggctgaccctggctcccctgatgttaatggccgcacacccattgactatgccaggcaggcggggcaccatgagctggcggaaaggctggttgagtgccaatatgagctcactgaccggctggccttctacctctgtggacgcaagccggatcacaagaatgggcattacatcatcccacagatggctgacagccttgacttatccgaattggccaaagctgctaagaagaagctgcaggcgctcagcaaccggctttttgaggaactcgccatggacgtgtatgacgaggtggatcgaagagaaaatgatgcagtgtggctggctacccaaaaccacagcactctggtgacagagcgcagtgccgtgcccttcctgcctgttaacccggaatactcagccacgcggaatcaggggcgacaaaagctggcccgctttaatgcccgagagtttgccaccttgatcatcgacattctcagtgaggccaagcggagacagcagggcaagagcctgagcagccccacagacaacctcgagctgtctctgcggagccagagtgacctcgacgaccaacacgactacgacagcgtggcctctgacgaggacacagaccaggagcccctgcgcagcaccggcgccactcggagcaaccgggcccggagcatggactcctcggacttgtctgacggggctgtgacgctgcaggagtacctggagctgaagaaggccctggctacatcggaggcaaaggtgcagcagctcatgaaggtcaacagtagcctgagcgacgagctccggaggctgcagcgagagatccacaagctgcaggcggagaacctgcagctccggcagcctccagggccggtgcccacacctccactccccagtgaacgggcggaacacacacccatggcgccaggcgggagcacacaccgcagggatcgccaggccttttccatgtatgaacctggctctgccctgaagccctttgggggcccccctggggacgagctcactacgcggctgcagcctttccacagcactgagctagaggacgacgccatctattcagtgcacgtccctgctggcctttaccggatccggaaaggggtgtctgcctcagctgtgcccttcactccctcctccccgctgctgtcctgctcccaggagggaagccgccacacgagcaagctttcccgccacggcagtggagccgacagtgactatgagaacacgcaaagtggggacccactgctggggctggaagggaagaggtttctagagctgggcaaagaggaagacttccacccagagctggaaagcctggatggagacctagatcctgggcttcccagcacagaggatgtcatcttgaagacagagcaggtcaccaagaacattcaggaactgttgcgggcagcccaggagttcaagcatgacagcttcgtgccctgctcagagaagatccatttggctgtgaccgagatggcctccctcttcccaaagaggccagccctggagccagtgcggagctcactgcggctgctcaacgccagcgcctaccggctgcagagtgagtgccggaagacagtgcccccagagcccggcgccccagtggacttccagctgctgactcagcaggtgatccagtgcgcctatgacatcgccaaggctgccaagcagctggtcaccatcaccacccgagagaagaagcagtgacctctctccccacaccctcacctgcaccctaggacctcactggccataggagctgggccactccagacattaatccccaccccaacagagccactggcacaagtgcccttagtgctgccacactccctggcagccaggtgccctggtgcccacccctgtcgagcccctaaggatggggaggtgggggggcaggagcttctgtcccccacattccatgcacctcccctctgtatatagcatctcccccctcctagtgagcaggggcctgcaaggcatcactcccagcccctcgccttctagggcaccctcagcaaaggggcaggtggggacactccaagtggggcagctctccgtacatgcgccccacccccatgagccagttcagccctactgggggctgagcgggggcatcccctcctttgtacatagtctccatggatgtccctgccctgtagccaccagccccttgctgctctccctttaatgccatatggcccctgcctagggcacaggccccaacctgtgtgctggggtccccagcagcaaacactggaaagtctgttttttttttttctttcttcttccccaccccttaattttaactttgtggtaactgagtgcccccgcgtgcctgcgtgttgagtgtgtgggcggcagtgccgttccggaggcctggtccatctggagttttgaggggtgaggggaccagagcagtgggaccagcatggggatcagcttcccttccccacctggagccagggactgtccgggtagccagttttggtcctgccagctgcctccctgatccctccccactctcgccccttctctatgaacttaaatcaaaaaccacttccctccatctcctcctgctcctgcgtggagggggaatgtgtgctggctagggtggaggactgagcacctgagcctggggctggctccccggggtccccgactcagctggtggctgtggagctgagtcccctccccgtaacctctgcaaggccagcacccaccatcactacctgcacctgctgtggtcccaccctctggaggcctgggaacctggctgcagcctgggaaggctggagaggcagacggtgggacccaccagctctctccccatcccgcttcttccctgggggccaggccctacctgtgtggtggtgggtgggctgtcaagacgtgtcatgtacatttgtatcaaaaataaagaagtgaccatga

SEQ ID NO: 298726 - DNA, 3569 bp, Homo sapiens
agagggctgcggccgcgtcgccgctgaggatgtcccgaaaggggccgcgagcggaggtgtgtgcggactgcagcgccccggaccctggctgggcatccatcagcaggggtgtgctggtgtgtgacgagtgctgcagcgtgcaccggagcctgggacgccacatctccattgtcaagcaccttcgccacagcgcctggcctcccacgctgctgcagatggtgcacacgcttgccagcaacggggccaactccatctgggagcactccctgctggaccccgcacaagtgcagagcggccggcgtaaagccaacccccaagacaaagtccaccccatcaagtcagagttcatcagggccaagtaccagatgctggcatttgtgcacaagcttccctgccgggacgatgatggagtcaccgccaaagacctcagcaagcaactacactcgagcgtgcggacaggcaacctggagacatgtctgcgcctgctctccctgggtgcccaggccaacttcttccacccagagaagggcaccacacctctgcacgtggctgccaaggcaggacagacactgcaggccgagctgcttgtagtgtatggggctgaccctggctcccctgatgttaatggccgcacacccattgactatgccaggcaggcggggcaccatgagctggcggaaaggctggttgagtgccaatatgagctcactgaccggctggccttctacctctgtggacgcaagccggatcacaagaatgggcattacatcatcccacagatggctgacagatctcggcaaaagtgcatgtctcagagccttgacttatccgaattggccaaagctgctaagaagaagctgcaggcgctcagcaaccggctttttgaggaactcgccatggacgtgtatgacgaggtggatcgaagagaaaatgatgcagtgtggctggctacccaaaaccacagcactctggtgacagagcgcagtgccgtgcccttcctgcctgttaacccggaatactcagccacgcggaatcaggggcgacaaaagctggcccgctttaatgcccgagagtttgccaccttgatcatcgacattctcagtgaggccaagcggagacagcagggcaagagcctgagcagccccacagacaacctcgagctgtctctgcggagccagagtgacctcgacgaccaacacgactacgacagcgtggcctctgacgaggacacagaccaggagcccctgcgcagcaccggcgccactcggagcaaccgggcccggagcatggactcctcggacttgtctgacggggctgtgacgctgcaggagtacctggagctgaagaaggccctggctacatcggaggcaaaggtgcagcagctcatgaaggtcaacagtagcctgagcgacgagctccggaggctgcagcgagagatccacaagctgcaggcggagaacctgcagctccggcagcctccagggccggtgcccacacctccactccccagtgaacgggcggaacacacacccatggcgccaggcgggagcacacaccgcagggatcgccaggccttttccatgtatgaacctggctctgccctgaagccctttgggggcccccctggggacgagctcactacgcggctgcagcctttccacagcactgagctagaggacgacgccatctattcagtgcacgtccctgctggcctttaccggatccggaaaggggtgtctgcctcagctgtgcccttcactccctcctccccgctgctgtcctgctcccaggagggaagccgccacacgagcaagctttcccgccacggcagtggagccgacagtgactatgagaacacgcaaagtggggacccactgctggggctggaagggaagaggtttctagagctgggcaaagaggaagacttccacccagagctggaaagcctggatggagacctagatcctgggcttcccagcacagaggatgtcatcttgaagacagagcaggtcaccaagaacattcaggaactgttgcgggcagcccaggagttcaagcatgacagcttcgtgccctgctcagagaagatccatttggctgtgaccgagatggcctccctcttcccaaagaggccagccctggagccagtgcggagctcactgcggctgctcaacgccagcgcctaccggctgcagagtgagtgccggaagacagtgcccccagagcccggcgccccagtggacttccagctgctgactcagcaggtgatccagtgcgcctatgacatcgccaaggctgccaagcagctggtcaccatcaccacccgagagaagaagcagtgacctctctccccacaccctcacctgcaccctaggacctcactggccataggagctgggccactccagacattaatccccaccccaacagagccactggcacaagtgcccttagtgctgccacactccctggcagccaggtgccctggtgcccacccctgtcgagcccctaaggatggggaggtgggggggcaggagcttctgtcccccacattccatgcacctcccctctgtatatagcatctcccccctcctagtgagcaggggcctgcaaggcatcactcccagcccctcgccttctagggcaccctcagcaaaggggcaggtggggacactccaagtggggcagctctccgtacatgcgccccacccccatgagccagttcagccctactgggggctgagcgggggcatcccctcctttgtacatagtctccatggatgtccctgccctgtagccaccagccccttgctgctctccctttaatgccatatggcccctgcctagggcacaggccccaacctgtgtgctggggtccccagcagcaaacactggaaagtctgttttttttttttctttcttcttccccaccccttaattttaactttgtggtaactgagtgcccccgcgtgcctgcgtgttgagtgtgtgggcggcagtgccgttccggaggcctggtccatctggagttttgaggggtgaggggaccagagcagtgggaccagcatggggatcagcttcccttccccacctggagccagggactgtccgggtagccagttttggtcctgccagctgcctccctgatccctccccactctcgccccttctctatgaacttaaatcaaaaaccacttccctccatctcctcctgctcctgcgtggagggggaatgtgtgctggctagggtggaggactgagcacctgagcctggggctggctccccggggtccccgactcagctggtggctgtggagctgagtcccctccccgtaacctctgcaaggccagcacccaccatcactacctgcacctgctgtggtcccaccctctggaggcctgggaacctggctgcagcctgggaaggctggagaggcagacggtgggacccaccagctctctccccatcccgcttcttccctgggggccaggccctacctgtgtggtggtgggtgggctgtcaagacgtgtcatgtacatttgtatcaaaaataaagaagtgaccatga

SEQ ID NO: 298727 - DNA, 3494 bp, Homo sapiens
agagggctgcggccgcgtcgccgctgaggatgtcccgaaaggggccgcgagcggaggtgtgtgcggactgcagcgccccggaccctggctgggcatccatcagcaggggtgtgctggtgtgtgacgagtgctgcagcgtgcaccggagcctgggacgccacatctccattgtcaagcaccttcgccacagcgcctggcctcccacgctgctgcagatggtgcacacgcttgccagcaacggggccaactccatctgggagcactccctgctggaccccgcacaagtgcagagcggccggcgtaaagccaacccccaagacaaagtccaccccatcaagtcagagttcatcagggccaagtaccagatgctggcatttgtgcacaagcttccctgccgggacgatgatggagtcaccgccaaagacctcagcaagcaactacactcgagcgtgcggacaggcaacctggagacatgtctgcgcctgctctccctgggtgcccaggccaacttcttccacccagagaagggcaccacacctctgcacgtggctgccaaggcaggacagacactgcaggccgagctgcttgtagtgtatggggctgaccctggctcccctgatgttaatggccgcacacccattgactatgccaggcaggcggggcaccatgagctggcggaaaggctggttgagtgccaatatgagctcactgaccggctggccttctacctctgtggacgcaagccggatcacaagaatgggcattacatcatcccacagatggctgacagccttgacttatccgaattggccaaagctgctaagaagaagctgcaggcgctcagcaaccggctttttgaggaactcgccatggacgtgtatgacgaggtggatcgaagagaaaatgatgcagtgtggctggctacccaaaaccacagcactctggtgacagagcgcagtgccgtgcccttcctgcctgttaacccggaatactcagccacgcggaatcaggggcgacaaaagctggcccgctttaatgcccgagagtttgccaccttgatcatcgacattctcaacaacctcgagctgtctctgcggagccagagtgacctcgacgaccaacacgactacgacagcgtggcctctgacgaggacacagaccaggagcccctgcgcagcaccggcgccactcggagcaaccgggcccggagcatggactcctcggacttgtctgacggggctgtgacgctgcaggagtacctggagctgaagaaggccctggctacatcggaggcaaaggtgcagcagctcatgaaggtcaacagtagcctgagcgacgagctccggaggctgcagcgagagatccacaagctgcaggcggagaacctgcagctccggcagcctccagggccggtgcccacacctccactccccagtgaacgggcggaacacacacccatggcgccaggcgggagcacacaccgcagggatcgccaggccttttccatgtatgaacctggctctgccctgaagccctttgggggcccccctggggacgagctcactacgcggctgcagcctttccacagcactgagctagaggacgacgccatctattcagtgcacgtccctgctggcctttaccggatccggaaaggggtgtctgcctcagctgtgcccttcactccctcctccccgctgctgtcctgctcccaggagggaagccgccacacgagcaagctttcccgccacggcagtggagccgacagtgactatgagaacacgcaaagtggggacccactgctggggctggaagggaagaggtttctagagctgggcaaagaggaagacttccacccagagctggaaagcctggatggagacctagatcctgggcttcccagcacagaggatgtcatcttgaagacagagcaggtcaccaagaacattcaggaactgttgcgggcagcccaggagttcaagcatgacagcttcgtgccctgctcagagaagatccatttggctgtgaccgagatggcctccctcttcccaaagaggccagccctggagccagtgcggagctcactgcggctgctcaacgccagcgcctaccggctgcagagtgagtgccggaagacagtgcccccagagcccggcgccccagtggacttccagctgctgactcagcaggtgatccagtgcgcctatgacatcgccaaggctgccaagcagctggtcaccatcaccacccgagagaagaagcagtgacctctctccccacaccctcacctgcaccctaggacctcactggccataggagctgggccactccagacattaatccccaccccaacagagccactggcacaagtgcccttagtgctgccacactccctggcagccaggtgccctggtgcccacccctgtcgagcccctaaggatggggaggtgggggggcaggagcttctgtcccccacattccatgcacctcccctctgtatatagcatctcccccctcctagtgagcaggggcctgcaaggcatcactcccagcccctcgccttctagggcaccctcagcaaaggggcaggtggggacactccaagtggggcagctctccgtacatgcgccccacccccatgagccagttcagccctactgggggctgagcgggggcatcccctcctttgtacatagtctccatggatgtccctgccctgtagccaccagccccttgctgctctccctttaatgccatatggcccctgcctagggcacaggccccaacctgtgtgctggggtccccagcagcaaacactggaaagtctgttttttttttttctttcttcttccccaccccttaattttaactttgtggtaactgagtgcccccgcgtgcctgcgtgttgagtgtgtgggcggcagtgccgttccggaggcctggtccatctggagttttgaggggtgaggggaccagagcagtgggaccagcatggggatcagcttcccttccccacctggagccagggactgtccgggtagccagttttggtcctgccagctgcctccctgatccctccccactctcgccccttctctatgaacttaaatcaaaaaccacttccctccatctcctcctgctcctgcgtggagggggaatgtgtgctggctagggtggaggactgagcacctgagcctggggctggctccccggggtccccgactcagctggtggctgtggagctgagtcccctccccgtaacctctgcaaggccagcacccaccatcactacctgcacctgctgtggtcccaccctctggaggcctgggaacctggctgcagcctgggaaggctggagaggcagacggtgggacccaccagctctctccccatcccgcttcttccctgggggccaggccctacctgtgtggtggtgggtgggctgtcaagacgtgtcatgtacatttgtatcaaaaataaagaagtgaccatga

SEQ ID NO: 298728 - DNA, 3146 bp, Homo sapiens
  misc_feature (393)..(393): n is a, c, g, or t
ttgtataattgtacaacctttgaaagttacataagttgtaatgatctaatactattaatagccattcagaaaacactttccctccctcccaacatccatccagggggaaataaatgtcctgaaaagaggccagttcaacatggcctctaccctggtagaaacaaaaagtgaaaagagaagaaaacagaaatcaactaagaggtgttgccagtgtctctcaggagtggggccctggctgttgcctggggtcatgaaaggcagagcctgcagcatgcagtatggcagccgggagaccttgcagccacatcttcctcaccccggcacatccacatcccaacttaggtgtcatggaaatctttcagcagggttctcctccgctgctccgctatcctngtggcgaattcggcacgagggccaaagctgctaagaagaagctgcaggcgctcagcaaccggctttttgaggaactcgccatggacgtgtatgacgaggtggatcgaagagaaaatgatgcagtgtggctggctacccaaaaccacagcactctggtgacagagcgcagtgccgtgcccttcctgcctgttaacccggaatactcagccacgcggaatcaggggcgacaaaagctggcccgctttaatgcccgagagtttgccaccttgatcatcgacattctcagtgaggccaagcggagacagcagggcaagagcctgagcagccccacagacaacctcgagctgtctctgcggagccagagtgacctcgacgaccaacacgactacgacagcgtggcctctgacgaggacacagaccaggagcccctgcgcagcaccggcgccactcggagcaaccgggcccggagcatggactcctcggacttgtctgacggggctgtgacgctgcaggagtacctggagctgaagaaggccctggctacatcggaggcaaaggtgcagcagctcatgaaggtcaacagtagcctgagcgacgagctccggaggctgcagcgagagatccacaagctgcaggcggagaacctgcagctccggcagcctccagggccggtgcccacacctccactccccagtgaacgggcggaacacacacccatggcgccaggcgggagcacacaccgcagggatcgccaggccttttccatgtatgaacctggctctgccctgaagccctttgggggcccccctggggacgagctcactacgcggctgcagcctttccacagcactgagctagaggacgacgccatctattcagtgcacgtccctgctggcctttaccggatccggaaaggggtgtctgcctcagctgtgcccttcactccctcctccccgctgctgtcctgctcccaggagggaagccgccacacgagcaagctttcccgccacggcagtggagccgacagtgactatgagaacacgcaaagtggggacccactgctggggctggaagggaagaggtttctagagctgggcaaagaggaagacttccacccagagctggaaagcctggatggagacctagatcctgggcttcccagcacagaggatgtcatcttgaagacagagcaggtcaccaagaacattcaggaactgttgcgggcagcccaggagttcaagcatgacagcttcgtgccctgctcagagaagatccatttggctgtgaccgagatggcctccctcttcccaaagaggccagccctggagccagtgcggagctcactgcggctgctcaacgccagcgcctaccggctgcagagtgagtgccggaagacagtgcccccagagcccggcgccccagtggacttccagctgctgactcagcaggtgatccagtgcgcctatgacatcgccaaggctgccaagcagctggtcaccatcaccacccgagagaagaagcagtgacctctctccccacaccctcacctgcaccctaggacctcactggccataggagctgggccactccagacattaatccccaccccaacagagccactggcacaagtgcccttagtgctgccacactccctggcagccaggtgccctggtgcccacccctgtcgagcccctaaggatggggaggtgggggggcaggagcttctgtcccccacattccatgcacctcccctctgtatatagcatctcccccctcctagtgagcaggggcctgcaaggcatcactcccagcccctcgccttctagggcaccctcagcaaaggggcaggtggggacactccaagtggggcagctctccgtacatgcgccccacccccatgagccagttcagccctactgggggctgagcgggggcatcccctcctttgtacatagtctccatggatgtccctgccctgtagccaccagccccttgctgctctccctttaatgccatatggcccctgcctagggcacaggccccaacctgtgtgctggggtccccagcagcaaacactggaaagtctgttttttttttttctttcttcttccccaccccttaattttaactttgtggtaactgagtgcccccgcgtgcctgcgtgttgagtgtgtgggcggcagtgccgttccggaggcctggtccatctggagttttgaggggtgaggggaccagagcagtgggaccagcatggggatcagcttcccttccccacctggagccagggactgtccgggtagccagttttggtcctgccagctgcctccctgatccctccccactctcgccccttctctatgaacttaaatcaaaaaccacttccctccatctcctcctgctcctgcgtggagggggaatgtgtgctggctagggtggaggactgagcacctgagcctggggctggctccccggggtccccgactcagctggtggctgtggagctgagtcccctccccgtaacctctgcaaggccagcacccaccatcactacctgcacctgctgtggtcccaccctctggaggcctgggaacctggctgcagcctgggaaggctggagaggcagacggtgggacccaccagctctctccccatcccgcttcttccctgggggccaggccctacctgtgtggtggtgggtgggctgtcaagacgtgtcatgtacatttgtatcaaaaataaagaagtgaccatga

SEQ ID NO: 298729 - DNA, 2834 bp, Homo sapiens
  misc_feature (393)..(393): n is a, c, g, or t
ttgtataattgtacaacctttgaaagttacataagttgtaatgatctaatactattaatagccattcagaaaacactttccctccctcccaacatccatccagggggaaataaatgtcctgaaaagaggccagttcaacatggcctctaccctggtagaaacaaaaagtgaaaagagaagaaaacagaaatcaactaagaggtgttgccagtgtctctcaggagtggggccctggctgttgcctggggtcatgaaaggcagagcctgcagcatgcagtatggcagccgggagaccttgcagccacatcttcctcaccccggcacatccacatcccaacttaggtgtcatggaaatctttcagcagggttctcctccgctgctccgctatcctngtggcgaattcggcacgagggacaacctcgagctgtctctgcggagccagagtgacctcgacgaccaacacgactacgacagcgtggcctctgacgaggacacagaccaggagcccctgcgcagcaccggcgccactcggagcaaccgggcccggagcatggactcctcggacttgtctgacggggctgtgacgctgcaggagtacctggagctgaagaaggccctggctacatcggaggcaaaggtgcagcagctcatgaaggtcaacagtagcctgagcgacgagctccggaggctgcagcgagagatccacaagctgcaggcggagaacctgcagctccggcagcctccagggccggtgcccacacctccactccccagtgaacgggcggaacacacacccatggcgccaggcgggagcacacaccgcagggatcgccaggccttttccatgtatgaacctggctctgccctgaagccctttgggggcccccctggggacgagctcactacgcggctgcagcctttccacagcactgagctagaggacgacgccatctattcagtgcacgtccctgctggcctttaccggatccggaaaggggtgtctgcctcagctgtgcccttcactccctcctccccgctgctgtcctgctcccaggagggaagccgccacacgagcaagctttcccgccacggcagtggagccgacagtgactatgagaacacgcaaagtggggacccactgctggggctggaagggaagaggtttctagagctgggcaaagaggaagacttccacccagagctggaaagcctggatggagacctagatcctgggcttcccagcacagaggatgtcatcttgaagacagagcaggtcaccaagaacattcaggaactgttgcgggcagcccaggagttcaagcatgacagcttcgtgccctgctcagagaagatccatttggctgtgaccgagatggcctccctcttcccaaagaggccagccctggagccagtgcggagctcactgcggctgctcaacgccagcgcctaccggctgcagagtgagtgccggaagacagtgcccccagagcccggcgccccagtggacttccagctgctgactcagcaggtgatccagtgcgcctatgacatcgccaaggctgccaagcagctggtcaccatcaccacccgagagaagaagcagtgacctctctccccacaccctcacctgcaccctaggacctcactggccataggagctgggccactccagacattaatccccaccccaacagagccactggcacaagtgcccttagtgctgccacactccctggcagccaggtgccctggtgcccacccctgtcgagcccctaaggatggggaggtgggggggcaggagcttctgtcccccacattccatgcacctcccctctgtatatagcatctcccccctcctagtgagcaggggcctgcaaggcatcactcccagcccctcgccttctagggcaccctcagcaaaggggcaggtggggacactccaagtggggcagctctccgtacatgcgccccacccccatgagccagttcagccctactgggggctgagcgggggcatcccctcctttgtacatagtctccatggatgtccctgccctgtagccaccagccccttgctgctctccctttaatgccatatggcccctgcctagggcacaggccccaacctgtgtgctggggtccccagcagcaaacactggaaagtctgttttttttttttctttcttcttccccaccccttaattttaactttgtggtaactgagtgcccccgcgtgcctgcgtgttgagtgtgtgggcggcagtgccgttccggaggcctggtccatctggagttttgaggggtgaggggaccagagcagtgggaccagcatggggatcagcttcccttccccacctggagccagggactgtccgggtagccagttttggtcctgccagctgcctccctgatccctccccactctcgccccttctctatgaacttaaatcaaaaaccacttccctccatctcctcctgctcctgcgtggagggggaatgtgtgctggctagggtggaggactgagcacctgagcctggggctggctccccggggtccccgactcagctggtggctgtggagctgagtcccctccccgtaacctctgcaaggccagcacccaccatcactacctgcacctgctgtggtcccaccctctggaggcctgggaacctggctgcagcctgggaaggctggagaggcagacggtgggacccaccagctctctccccatcccgcttcttccctgggggccaggccctacctgtgtggtggtgggtgggctgtcaagacgtgtcatgtacatttgtatcaaaaataaagaagtgaccatga

SEQ ID NO: 298730 - DNA, 3624 bp, Homo sapiens
agagggctgcggccgcgtcgccgctgaggatgtcccgaaaggggccgcgagcggaggtgtgtgcggactgcagcgccccggaccctggctgggcatccatcagcaggggtgtgctggtgtgtgacgagtgctgcagcgtgcaccggagcctgggacgccacatctccattgtcaagcaccttcgccacagcgcctggcctcccacgctgctgcagatggtgcacacgcttgccagcaacggggccaactccatctgggagcactccctgctggaccccgcacaagtgcagagcggccggcgtaaagccaacccccaagacaaagtccaccccatcaagtcagagttcatcagggccaagtaccagatgctggcatttgtgcacaagcttccctgccgggacgatgatggagtcaccgccaaagacctcagcaagcaactacactcgagcgtgcggacaggcaacctggagacatgtctgcgcctgctctccctgggtgcccaggccaacttcttccacccagagaagggcaccacacctctgcacgtggctgccaaggcaggacagacactgcaggccgagctgcttgtagtgtatggggctgaccctggctcccctgatgttaatggccgcacacccattgactatgccaggcaggcggggcaccatgagctggcggaaaggctggttgagtgccaatatgagctcactgaccggctggccttctacctctgtggacgcaagccggatcacaagaatgggcattacatcatcccacagatggctgacagccttgacttatccgaattggccaaagctgctaagaagaagctgcaggcgctcagcaaccggctttttgaggaactcgccatggacgtgtatgacgaggtggatcgaagagaaaatgatgcagtgtggctggctacccaaaaccacagcactctggtgacagagcgcagtgccgtgcccttcctgcctgttaacccggaatactcagccacgcggaatcaggggcgacaaaagctggcccgctttaatgcccgagagtttgccaccttgatcatcgacattctcagtgaggccaagcggagacagcagggcaagagcctgagcagccccacagacaacctcgagctgtctctgcggagccagagtgacctcgacgaccaacacgactacgacagcgtggcctctgacgaggacacagaccaggagcccctgcgcagcaccggcgccactcggagcaaccgggcccggagcatggactcctcggacttgtctgacggggctgtgacgctgcaggagtacctggagctgaagaaggccctggctacatcggaggcaaaggtgcagcagctcatgaaggtcaacagtagcctgagcgacgagctccggaggctgcagcgagagatccacaagctgcaggcggagaacctgcagctccggcagcctccagggccggtgcccacacctccactccccagtgaacgggcggaacacacacccatggcgccaggcgggagcacacaccgcagggatcgccaggccttttccatgtatgaacctggctctgccctgaagccctttgggggcccccctggggacgagctcactacgcggctgcagcctttccacagcactgagctagaggacgacgccatctattcagtgcacgtccctgctggcctttaccggatccggaaaggggtgtctgcctcagctgtgcccttcactccctcctccccgctgctgtcctgctcccaggagggaagccgccacacgagcaagctttcccgccacggcagtggagccgacagtgactatgagaacacgcaaagtggggacccactgctggggctggaagggaagaggtttctagagctgggcaaagaggaagacttccacccagagctggaaagcctggatggagacctagatcctgggcttcccagcacagaggatgtcatcttgaagacagagcaggtcaccaagaacattcaggaactgttgcgggcagcccaggagttcaagcatgacagaggatgtcatcttgaagacagagcaggtcaccaagaacattcaggaactgttgcgggcagcccaggagttcaagcatgacagcttcgtgccctgctcagagaagatccatttggctgtgaccgagatggcctccctcttcccaaagaggccagccctggagccagtgcggagctcactgcggctgctcaacgccagcgcctaccggctgcagagtgagtgccggaagacagtgcccccagagcccggcgccccagtggacttccagctgctgactcagcaggtgatccagtgcgcctatgacatcgccaaggctgccaagcagctggtcaccatcaccacccgagagaagaagcagtgacctctctccccacaccctcacctgcaccctaggacctcactggccataggagctgggccactccagacattaatccccaccccaacagagccactggcacaagtgcccttagtgctgccacactccctggcagccaggtgccctggtgcccacccctgtcgagcccctaaggatggggaggtgggggggcaggagcttctgtcccccacattccatgcacctcccctctgtatatagcatctcccccctcctagtgagcaggggcctgcaaggcatcactcccagcccctcgccttctagggcaccctcagcaaaggggcaggtggggacactccaagtggggcagctctccgtacatgcgccccacccccatgagccagttcagccctactgggggctgagcgggggcatcccctcctttgtacatagtctccatggatgtccctgccctgtagccaccagccccttgctgctctccctttaatgccatatggcccctgcctagggcacaggccccaacctgtgtgctggggtccccagcagcaaacactggaaagtctgttttttttttttctttcttcttccccaccccttaattttaactttgtggtaactgagtgcccccgcgtgcctgcgtgttgagtgtgtgggcggcagtgccgttccggaggcctggtccatctggagttttgaggggtgaggggaccagagcagtgggaccagcatggggatcagcttcccttccccacctggagccagggactgtccgggtagccagttttggtcctgccagctgcctccctgatccctccccactctcgccccttctctatgaacttaaatcaaaaaccacttccctccatctcctcctgctcctgcgtggagggggaatgtgtgctggctagggtggaggactgagcacctgagcctggggctggctccccggggtccccgactcagctggtggctgtggagctgagtcccctccccgtaacctctgcaaggccagcacccaccatcactacctgcacctgctgtggtcccaccctctggaggcctgggaacctggctgcagcctgggaaggctggagaggcagacggtgggacccaccagctctctccccatcccgcttcttccctgggggccaggccctacctgtgtggtggtgggtgggctgtcaagacgtgtcatgtacatttgtatcaaaaataaagaagtgaccatga

SEQ ID NO: 298731 - DNA, 3788 bp, Homo sapiens
agagggctgcggccgcgtcgccgctgaggatgtcccgaaaggggccgcgagcggaggtgtgtgcggactgcagcgccccggaccctggctgggcatccatcagcaggggtgtgctggtgtgtgacgagtgctgcagcgtgcaccggagcctgggacgccacatctccattgtcaagcaccttcgccacagcgcctggcctcccacgctgctgcagatggtgcacacgcttgccagcaacggggccaactccatctgggagcactccctgctggaccccgcacaagtgcagagcggccggcgtaaagccaacccccaagacaaagtccaccccatcaagtcagagttcatcagggccaagtaccagatgctggcatttgtgcacaagcttccctgccgggacgatgatggagtcaccgccaaagacctcagcaagcaactacactcgagcgtgcggacaggcaacctggagacatgtctgcgcctgctctccctgggtgcccaggccaacttcttccacccagagaagggcaccacacctctgcacgtggctgccaaggcaggacagacactgcaggccgagctgcttgtagtgtatggggctgaccctggctcccctgatgttaatggccgcacacccattgactatgccaggcaggcggggcaccatgagctggcggaaaggctggttgagtgccaatatgagctcactgaccggctggccttctacctctgtggacgcaagccggatcacaagaatgggcattacatcatcccacagatggctgacagccttgacttatccgaattggccaaagctgctaagaagaagctgcaggcgctcagcaaccggctttttgaggaactcgccatggacgtgtatgacgaggtggatcgaagagaaaatgatgcagtgtggctggctacccaaaaccacagcactctggtgacagagcgcagtgccgtgcccttcctgcctgttaacccggaatactcagccacgcggaatcaggggcgacaaaagctggcccgctttaatgcccgagagtttgccaccttgatcatcgacattctcagtgaggccaagcggagacagcagggcaagagcctgagcagccccacagacaacctcgagctgtctctgcggagccagagtgacctcgacgaccaacacgactacgacagcgtggcctctgacgaggacacagaccaggagcccctgcgcagcaccggcgccactcggagcaaccgggcccggagcatggactcctcggacttgtctgacggggctgtgacgctgcaggagtacctggagctgaagaaggccctggctacatcggaggcaaaggtgcagcagctcatgaaggtcaacagtagcctgagcgacgagctccggaggctgcagcgagagatccacaagctgcaggcggagaacctgcagctccggcagcctccagggccggtgcccacacctccactccccagtgaacgggcggaacacacacccatggcgccaggcgggagcacacaccgcagggatcgccaggccttttccatgtatgaacctggctctgccctgaagccctttgggggcccccctggggacgagctcactacgcggctgcagcctttccacagcactgagctagaggacgacgccatctattcagtgcacgtccctgctggcctttaccggatccggaaaggggtgtctgcctcagctgtgcccttcactccctcctccccgctgctgtcctgctcccaggagggaagccgccacacgagcaagctttcccgccacggcagtggagccgacagtgactatgagaacacgcaaagtggggacccactgctggggctggaagggaagaggtttctagagctgggcaaagaggaagacttccacccagagctggaaagcctggatggagacctagatcctgggcttcccagcacagaggatgtcatcttgaagacagagcaggtcaccaagaacattcaggaactgttgcgggcagcccaggagttcaagcatgacagaggatgtcatcttgaagacagagcaggtcaccaagaacattcaggaactgttgcgggcagcccaggagttcaagcatgacagcttcgtgccctgctcagagaagatccatttggctgtgaccgagatggcctccctcttcccaaaggtacaggggccaaagagaggaccaggagtgggagggcctcgagctggggcaggcgtggagaatcccatctgatcgctacctgggtggagacacagacaaactgggccctgatctcagctggcggcttaaagtccaaggtccagcctcactcctgccccctccagaggccagccctggagccagtgcggagctcactgcggctgctcaacgccagcgcctaccggctgcagagtgagtgccggaagacagtgcccccagagcccggcgccccagtggacttccagctgctgactcagcaggtgatccagtgcgcctatgacatcgccaaggctgccaagcagctggtcaccatcaccacccgagagaagaagcagtgacctctctccccacaccctcacctgcaccctaggacctcactggccataggagctgggccactccagacattaatccccaccccaacagagccactggcacaagtgcccttagtgctgccacactccctggcagccaggtgccctggtgcccacccctgtcgagcccctaaggatggggaggtgggggggcaggagcttctgtcccccacattccatgcacctcccctctgtatatagcatctcccccctcctagtgagcaggggcctgcaaggcatcactcccagcccctcgccttctagggcaccctcagcaaaggggcaggtggggacactccaagtggggcagctctccgtacatgcgccccacccccatgagccagttcagccctactgggggctgagcgggggcatcccctcctttgtacatagtctccatggatgtccctgccctgtagccaccagccccttgctgctctccctttaatgccatatggcccctgcctagggcacaggccccaacctgtgtgctggggtccccagcagcaaacactggaaagtctgttttttttttttctttcttcttccccaccccttaattttaactttgtggtaactgagtgcccccgcgtgcctgcgtgttgagtgtgtgggcggcagtgccgttccggaggcctggtccatctggagttttgaggggtgaggggaccagagcagtgggaccagcatggggatcagcttcccttccccacctggagccagggactgtccgggtagccagttttggtcctgccagctgcctccctgatccctccccactctcgccccttctctatgaacttaaatcaaaaaccacttccctccatctcctcctgctcctgcgtggagggggaatgtgtgctggctagggtggaggactgagcacctgagcctggggctggctccccggggtccccgactcagctggtggctgtggagctgagtcccctccccgtaacctctgcaaggccagcacccaccatcactacctgcacctgctgtggtcccaccctctggaggcctgggaacctggctgcagcctgggaaggctggagaggcagacggtgggacccaccagctctctccccatcccgcttcttccctgggggccaggccctacctgtgtggtggtgggtgggctgtcaagacgtgtcatgtacatttgtatcaaaaataaagaagtgaccatga

SEQ ID NO: 298732 - DNA, 1848 bp, Homo sapiens
gagcggggaggagggagtgaagggcacagctgaggcagacacccctttccgctgctgtcctgctcccaggagggaagccgccacacgagcaagctttcccgccacggcagtggagccgacagtgactatgagaacacgcaaagtggggacccactgctggggctggaagggaagaggtttctagagctgggcaaagaggaagacttccacccagagctggaaagcctggatggagacctagatcctgggcttcccagcacagaggatgtcatcttgaagacagagcaggtcaccaagaacattcaggaactgttgcgggcagcccaggagttcaagcatgacagcttcgtgccctgctcagagaagatccatttggctgtgaccgagatggcctccctcttcccaaagaggccagccctggagccagtgcggagctcactgcggctgctcaacgccagcgcctaccggctgcagagtgagtgccggaagacagtgcccccagagcccggcgccccagtggacttccagctgctgactcagcaggtgatccagtgcgcctatgacatcgccaaggctgccaagcagctggtcaccatcaccacccgagagaagaagcagtgacctctctccccacaccctcacctgcaccctaggacctcactggccataggagctgggccactccagacattaatccccaccccaacagagccactggcacaagtgcccttagtgctgccacactccctggcagccaggtgccctggtgcccacccctgtcgagcccctaaggatggggaggtgggggggcaggagcttctgtcccccacattccatgcacctcccctctgtatatagcatctcccccctcctagtgagcaggggcctgcaaggcatcactcccagcccctcgccttctagggcaccctcagcaaaggggcaggtggggacactccaagtggggcagctctccgtacatgcgccccacccccatgagccagttcagccctactgggggctgagcgggggcatcccctcctttgtacatagtctccatggatgtccctgccctgtagccaccagccccttgctgctctccctttaatgccatatggcccctgcctagggcacaggccccaacctgtgtgctggggtccccagcagcaaacactggaaagtctgttttttttttttctttcttcttccccaccccttaattttaactttgtggtaactgagtgcccccgcgtgcctgcgtgttgagtgtgtgggcggcagtgccgttccggaggcctggtccatctggagttttgaggggtgaggggaccagagcagtgggaccagcatggggatcagcttcccttccccacctggagccagggactgtccgggtagccagttttggtcctgccagctgcctccctgatccctccccactctcgccccttctctatgaacttaaatcaaaaaccacttccctccatctcctcctgctcctgcgtggagggggaatgtgtgctggctagggtggaggactgagcacctgagcctggggctggctccccggggtccccgactcagctggtggctgtggagctgagtcccctccccgtaacctctgcaaggccagcacccaccatcactacctgcacctgctgtggtcccaccctctggaggcctgggaacctggctgcagcctgggaaggctggagaggcagacggtgggacccaccagctctctccccatcccgcttcttccctgggggccaggccctacctgtgtggtggtgggtgggctgtcaagacgtgtcatgtacatttgtatcaaaaataaagaagtgaccatga

SEQ ID NO: 298733 - DNA, 1646 bp, Homo sapiens
  misc_feature (18)..(19): n is a, c, g, or t
  misc_feature (28)..(28): n is a, c, g, or t
cctagatcctgggcttcnntgctctgtnttcaagatgacatcctctgtgctgggaagcccaggatgtcatcttgaagacagagcaggtcaccaagaacattcaggaactgttgcgggcagcccaggagttcaagcatgacagcttcgtgccctgctcagagaagatccatttggctgtgaccgagatggcctccctcttcccaaagaggccagccctggagccagtgcggagctcactgcggctgctcaacgccagcgcctaccggctgcagagtgagtgccggaagacagtgcccccagagcccggcgccccagtggacttccagctgctgactcagcaggtgatccagtgcgcctatgacatcgccaaggctgccaagcagctggtcaccatcaccacccgagagaagaagcagtgacctctctccccacaccctcacctgcaccctaggacctcactggccataggagctgggccactccagacattaatccccaccccaacagagccactggcacaagtgcccttagtgctgccacactccctggcagccaggtgccctggtgcccacccctgtcgagcccctaaggatggggaggtgggggggcaggagcttctgtcccccacattccatgcacctcccctctgtatatagcatctcccccctcctagtgagcaggggcctgcaaggcatcactcccagcccctcgccttctagggcaccctcagcaaaggggcaggtggggacactccaagtggggcagctctccgtacatgcgccccacccccatgagccagttcagccctactgggggctgagcgggggcatcccctcctttgtacatagtctccatggatgtccctgccctgtagccaccagccccttgctgctctccctttaatgccatatggcccctgcctagggcacaggccccaacctgtgtgctggggtccccagcagcaaacactggaaagtctgttttttttttttctttcttcttccccaccccttaattttaactttgtggtaactgagtgcccccgcgtgcctgcgtgttgagtgtgtgggcggcagtgccgttccggaggcctggtccatctggagttttgaggggtgaggggaccagagcagtgggaccagcatggggatcagcttcccttccccacctggagccagggactgtccgggtagccagttttggtcctgccagctgcctccctgatccctccccactctcgccccttctctatgaacttaaatcaaaaaccacttccctccatctcctcctgctcctgcgtggagggggaatgtgtgctggctagggtggaggactgagcacctgagcctggggctggctccccggggtccccgactcagctggtggctgtggagctgagtcccctccccgtaacctctgcaaggccagcacccaccatcactacctgcacctgctgtggtcccaccctctggaggcctgggaacctggctgcagcctgggaaggctggagaggcagacggtgggacccaccagctctctccccatcccgcttcttccctgggggccaggccctacctgtgtggtggtgggtgggctgtcaagacgtgtcatgtacatttgtatcaaaaataaagaagtgaccatga

SEQ ID NO: 298734 - DNA, 3881 bp, Homo sapiens
  misc_feature (3550)..(3550): n is a, c, g, or t
agagggctgcggccgcgtcgccgctgaggatgtcccgaaaggggccgcgagcggaggtgtgtgcggactgcagcgccccggaccctggctgggcatccatcagcaggggtgtgctggtgtgtgacgagtgctgcagcgtgcaccggagcctgggacgccacatctccattgtcaagcaccttcgccacagcgcctggcctcccacgctgctgcagatggtgcacacgcttgccagcaacggggccaactccatctgggagcactccctgctggaccccgcacaagtgcagagcggccggcgtaaagccaacccccaagacaaagtccaccccatcaagtcagagttcatcagggccaagtaccagatgctggcatttgtgcacaagcttccctgccgggacgatgatggagtcaccgccaaagacctcagcaagcaactacactcgagcgtgcggacaggcaacctggagacatgtctgcgcctgctctccctgggtgcccaggccaacttcttccacccagagaagggcaccacacctctgcacgtggctgccaaggcaggacagacactgcaggccgagctgcttgtagtgtatggggctgaccctggctcccctgatgttaatggccgcacacccattgactatgccaggcaggcggggcaccatgagctggcggaaaggctggttgagtgccaatatgagctcactgaccggctggccttctacctctgtggacgcaagccggatcacaagaatgggcattacatcatcccacagatggctgacagccttgacttatccgaattggccaaagctgctaagaagaagctgcaggcgctcagcaaccggctttttgaggaactcgccatggacgtgtatgacgaggtggatcgaagagaaaatgatgcagtgtggctggctacccaaaaccacagcactctggtgacagagcgcagtgccgtgcccttcctgcctgttaacccggaatactcagccacgcggaatcaggggcgacaaaagctggcccgctttaatgcccgagagtttgccaccttgatcatcgacattctcagtgaggccaagcggagacagcagggcaagagcctgagcagccccacagacaacctcgagctgtctctgcggagccagagtgacctcgacgaccaacacgactacgacagcgtggcctctgacgaggacacagaccaggagcccctgcgcagcaccggcgccactcggagcaaccgggcccggagcatggactcctcggacttgtctgacggggctgtgacgctgcaggagtacctggagctgaagaaggccctggctacatcggaggcaaaggtgcagcagctcatgaaggtcaacagtagcctgagcgacgagctccggaggctgcagcgagagatccacaagctgcaggcggagaacctgcagctccggcagcctccagggccggtgcccacacctccactccccagtgaacgggcggaacacacacccatggcgccaggcgggagcacacaccgcagggatcgccaggccttttccatgtatgaacctggctctgccctgaagccctttgggggcccccctggggacgagctcactacgcggctgcagcctttccacagcactgagctagaggacgacgccatctattcagtgcacgtccctgctggcctttaccggatccggaaaggggtgtctgcctcagctgtgcccttcactccctcctccccgctgctgtcctgctcccaggagggaagccgccacacgagcaagctttcccgccacggcagtggagccgacagtgactatgagaacacgcaaagtggggacccactgctggggctggaagggaagaggtttctagagctgggcaaagaggaagacttccacccagagctggaaagcctggatggagacctagatcctgggcttcccagcacagaggatgtcatcttgaagacagagcaggtcaccaagaacattcaggaactgttgcgggcagcccaggagttcaagcatgacagcttcgtgccctgctcagagaagatccatttggctgtgaccgagatggcctccctcttcccaaagaggccagccctggagccagtgcggagctcactgcggctgctcaacgccagcgcctaccggctgcagagtgagtgccggaagacagtgcccccagagcccggcgccccagtggacttccagctgctgactcagcaggtgatccagtgcgcctatgacatcgccaaggctgccaagcagctggtcaccatcaccacccgagagaagaagcagtgacctctctccccacaccctcacctgcaccctaggacctcactggccataggagctgggccactccagacattaatccccaccccaacagagccactggcacaagtgcccttagtgctgccacactccctggcagccaggtgccctggtgcccacccctgtcgagcccctaaggatggggaggtgggggggcaggagcttctgtcccccacattccatgcacctcccctctgtatatagcatctcccccctcctagtgagcaggggcctgcaaggcatcactcccagcccctcgccttctagggcaccctcagcaaaggggcaggtggggacactccaagtggggcagctctccgtacatgcgccccacccccatgagccagttcagccctactgggggctgagcgggggcatcccctcctttgtacatagtctccatggatgtccctgccctgtagccaccagccccttgctgctctccctttaatgccatatggcccctgcctagggcacaggccccaacctgtgtgctggggtccccagcagcaaacactggaaagtctgttttttttttttctttcttcttccccaccccttaattttaactttgtggtaactgagtgcccccgcgtgcctgcgtgttgagtgtgtgggcggcagtgccgttccggaggcctggtccatctggagttttgaggggtgaggggaccagagcagtgggaccagcatggggatcagcttcccttccccacctggagccagggactgtccgggtagccagttttggtcctgccagctgcctccctgatccctccccactctcgccccttctctatgaacttaaatcaaaaaccacttccctccatctcctcctgctcctgcgtggagggggaatgtgtgctggctagggtggaggactgagcacctgagcctggggctggctccccggggtccccgactcagctggtggctgtggagctgagtcccctccccgtaacctctgcaaggccagcacccaccatcactacctgcacctgctgtggtcccaccctctggaggcctgggaacctggctgcagcctgggaaggctggagaggcagacggtgggacccaccagctctctccccatcccgcttcttccctgggggccaggccctacctgtgtggtggtgggtgggctgtcaagacgtgtcatgtacatttgtatcaaaaataaagaagtgaccatgaaaaaaaanaaaaaaaaaaaaaaaaaaaaaaaaaaaaaatttgtgggcggccgggcccgaaaaatttttaaacccttcccgttgtggggccgcgcgcgcgggcccccacgttagtgttaggtgtgaacacgtgcgctccaaaacggtgtcttaccaagagaaaaccggggccaaggaacacggtgcttgtgggtttctcccacaaataaaaaaacggcccgggggggaacccgaagccgtttctggaaacacattccagagggagtccggaaggcacatacgggcgctctactacaccggaggtcccaggcgagcccaatctcatataaccgagcgggga

SEQ ID NO: 298735 - DNA, 3444 bp, Homo sapiens
  misc_feature (3392)..(3392): n is a, c, g, or t
  misc_feature (3395)..(3395): n is a, c, g, or t
  misc_feature (3402)..(3402): n is a, c, g, or t
  misc_feature (3405)..(3405): n is a, c, g, or t
  misc_feature (3411)..(3411): n is a, c, g, or t
  misc_feature (3416)..(3416): n is a, c, g, or t
  misc_feature (3425)..(3425): n is a, c, g, or t
agagggctgcggccgcgtcgccgctgaggatgtcccgaaaggggccgcgagcggaggtgtgtgcggactgcagcgccccggaccctggctgggcatccatcagcaggggtgtgctggtgtgtgacgagtgctgcagcgtgcaccggagcctgggacgccacatctccattgtcaagcaccttcgccacagcgcctggcctcccacgctgctgcagatggtgcacacgcttgccagcaacggggccaactccatctgggagcactccctgctggaccccgcacaagtgcagagcggccggcgtaaagccaacccccaagacaaagtccaccccatcaagtcagagttcatcagggccaagtaccagatgctggcatttgtgcacaagcttccctgccgggacgatgatggagtcaccgccaaagacctcagcaagcaactacactcgagcgtgcggacaggcaacctggagacatgtctgcgcctgctctccctgggtgcccaggccaacttcttccacccagagaagggcaccacacctctgcacgtggctgccaaggcaggacagacactgcaggccgagctgcttgtagtgtatggggctgaccctggctcccctgatgttaatggccgcacacccattgactatgccaggcaggcggggcaccatgagctggcggaaaggctggttgagtgccaatatgagctcactgaccggctggccttctacctctgtggacgcaagccggatcacaagaatgggcattacatcatcccacagatggctgacagccttgacttatccgaattggccaaagctgctaagaagaagctgcaggcgctcagcaaccggctttttgaggaactcgccatggacgtgtatgacgaggtggatcgaagagaaaatgatgcagtgtggctggctacccaaaaccacagcactctggtgacagagcgcagtgccgtgcccttcctgcctgttaacccggaatactcagccacgcggaatcaggggcgacaaaagctggcccgctttaatgcccgagagtttgccaccttgatcatcgacattctcagtgaggccaagcggagacagcagggcaagagcctgagcagccccacagacaacctcgagctgtctctgcggagccagagtgacctcgacgaccaacacgactacgacagcgtggcctctgacgaggacacagaccaggagcccctgcgcagcaccggcgccactcggagcaaccgggcccggagcatggactcctcggacttgtctgacggggctgtgacgctgcaggagtacctggagctgaagaaggccctggctacatcggaggcaaaggtgcagcagctcatgaaggtcaacagtagcctgagcgacgagctccggaggctgcagcgagagatccacaagctgcaggcggagaacctgcagctccggcagcctccagggccggtgcccacacctccactccccagtgaacgggcggaacacacacccatggcgccaggcgggagcacacaccgcagggatcgccaggccttttccatgtatgaacctggctctgccctgaagccctttgggggcccccctggggacgagctcactacgcggctgcagcctttccacagcactgagctagaggacgacgccatctattcagtgcacgtccctgctggcctttaccggatccggaaaggggtgtctgcctcagctgtgcccttcactccctcctccccgctgctgtcctgctcccaggagggaagccgccacacgagcaagctttcccgccacggcagtggagccgacagtgactatgagaacacgcaaagtggggacccactgctggggctggaagggaagaggtttctagagctgggcaaagaggaagacttccacccagagctggaaagcctggatggagacctagatcctgggcttcccagcacagaggatgtcatcttgaagacagagcaggtcaccaagaacattcaggaactgttgcgggcagcccaggagttcaagcatgacagcttcgtgccctgctcagagaagatccatttggctgtgaccgagatggcctccctcttcccaaagaggccagccctggagccagtgcggagctcactgcggctgctcaacgccagcgcctaccggctgcagagtgagtgccggaagacagtgcccccagagcccggcgccccagtggacttccagctgctgactcagcaggtgatccagtgcgcctatgacatcgccaaggctgccaagcagctggtcaccatcaccacccgagagaagaagcagtgacctctctccccacaccctcacctgcaccctaggacctcactggccataggagctgggccactccagacattaatccccaccccaacagagccactggcacaagtgcccttagtgctgccacactccctggcagccaggtgccctggtgcccacccctgtcgagcccctaaggatggggaggtgggggggcaggagcttctgtcccccacattccatgcacctcccctctgtatatagcatctcccccctcctagtgagcaggggcctgcaaggcatcactcccagcccctcgccttctagggcaccctcagcaaaggggcaggtggggacactccaagtggggcagctctccgtacatgcgccccacccccatgagccagttcagccctactgggggctgagcgggggcatcccctcctttgtacatagtctccatggatgtccctgccctgtagccaccagccccttgctgctctccctttaatgccatatggcccctgcctagggcacaggccccaacctgtgtgctggggtccccagcagcaaacactggaaagtctgttttttttttttctttcttcttccccaccccttaattttaactttgtggtaactgagtgcccccgcgtgcctgcgtgttgagtgtgtgggcggcagtgccgttccggaggcctggtccatctggagttttgaggggtgaggggaccagagcagtgggaccagcatggggatcagcttcccttccccacctggagccagggactgtccgggtagccagttttggtcctgccagctgcctccctgatccctccccactctcgccccttctctatgaacttaaatcaaaaaccacttccctccatctcctcctgctcctgcgtggagggggaatgtgtgctggctagggtggaggactgagcacctgagcctggggctggctccccggggtccccgactcagctggtggctgtggagctgagtcccctccccgtaacctctgcaaggccagcacccaccatcactacctgcacctgctgtggtcccaccctctggaggcctgggaacctggctggaagntgnagcacgnggncccatnttccnccgtttccngggccggcacctgtggggg

SEQ ID NO: 298736 - DNA, 3470 bp, Homo sapiens
agagggctgcggccgcgtcgccgctgaggatgtcccgaaaggggccgcgagcggaggtgtgtgcggactgcagcgccccggaccctggctgggcatccatcagcaggggtgtgctggtgtgtgacgagtgctgcagcgtgcaccggagcctgggacgccacatctccattgtcaagcaccttcgccacagcgcctggcctcccacgctgctgcagatggtgcacacgcttgccagcaacggggccaactccatctgggagcactccctgctggaccccgcacaagtgcagagcggccggcgtaaagccaacccccaagacaaagtccaccccatcaagtcagagttcatcagggccaagtaccagatgctggcatttgtgcacaagcttccctgccgggacgatgatggagtcaccgccaaagacctcagcaagcaactacactcgagcgtgcggacaggcaacctggagacatgtctgcgcctgctctccctgggtgcccaggccaacttcttccacccagagaagggcaccacacctctgcacgtggctgccaaggcaggacagacactgcaggccgagctgcttgtagtgtatggggctgaccctggctcccctgatgttaatggccgcacacccattgactatgccaggcaggcggggcaccatgagctggcggaaaggctggttgagtgccaatatgagctcactgaccggctggccttctacctctgtggacgcaagccggatcacaagaatgggcattacatcatcccacagatggctgacagccttgacttatccgaattggccaaagctgctaagaagaagctgcaggcgctcagcaaccggctttttgaggaactcgccatggacgtgtatgacgaggtggatcgaagagaaaatgatgcagtgtggctggctacccaaaaccacagcactctggtgacagagcgcagtgccgtgcccttcctgcctgttaacccggaatactcagccacgcggaatcaggggcgacaaaagctggcccgctttaatgcccgagagtttgccaccttgatcatcgacattctcagtgaggccaagcggagacagcagggcaagagcctgagcagccccacagacaacctcgagctgtctctgcggagccagagtgacctcgacgaccaacacgactacgacagcgtggcctctgacgaggacacagaccaggagcccctgcgcagcaccggcgccactcggagcaaccgggcccggagcatggactcctcggacttgtctgacggggctgtgacgctgcaggagtacctggagctgaagaaggccctggctacatcggaggcaaaggtgcagcagctcatgaaggtcaacagtagcctgagcgacgagctccggaggctgcagcgagagatccacaagctgcaggcggagaacctgcagctccggcagcctccagggccggtgcccacacctccactccccagtgaacgggcggaacacacacccatggcgccaggcgggagcacacaccgcagggatcgccaggccttttccatgtatgaacctggctctgccctgaagccctttgggggcccccctggggacgagctcactacgcggctgcagcctttccacagcactgagctagaggacgacgccatctattcagtgcacgtccctgctggcctttaccggatccggaaaggggtgtctgcctcagctgtgcccttcactccctcctccccgctgctgtcctgctcccaggagggaagccgccacacgagcaagctttcccgccacggcagtggagccgacagtgactatgagaacacgcaaagtggggacccactgctggggctggaagggaagaggtttctagagctgggcaaagaggaagacttccacccagagctggaaagcctggatggagacctagatcctgggcttcccagcacagaggatgtcatcttgaagacagagcaggtcaccaagaacattcaggaactgttgcgggcagcccaggagttcaagcatgacagcttcgtgccctgctcagagaagatccatttggctgtgaccgagatggcctccctcttcccaaagaggccagccctggagccagtgcggagctcactgcggctgctcaacgccagcgcctaccggctgcagagtgagtgccggaagacagtgcccccagagcccggcgccccagtggacttccagctgctgactcagcaggtgatccagtgcgcctatgacatcgccaaggctgccaagcagctggtcaccatcaccacccgagagaagaagcagtgacctctctccccacaccctcacctgcaccctaggacctcactggccataggagctgggccactccagacattaatccccaccccaacagagccactggcacaagtgcccttagtgctgccacactccctggcagccaggtgccctggtgcccacccctgtcgagcccctaaggatggggaggtgggggggcaggagcttctgtcccccacattccatgcacctcccctctgtatatagcatctcccccctcctagtgagcaggggcctgcaaggcatcactcccagcccctcgccttctagggcaccctcagcaaaggggcaggtggggacactccaagtggggcagctctccgtacatgcgccccacccccatgagccagttcagccctactgggggctgagcgggggcatcccctcctttgtacatagtctccatggatgtccctgccctgtagccaccagccccttgctgctctccctttaatgccatatggcccctgcctagggcacaggccccaacctgtgtgctggggtccccagcagcaaacactggaaagtctgttttttttttttctttcttcttccccaccccttaattttaactttgtggtaactgagtgcccccgcgtgcctgcgtgttgagtgtgtgggcggcagtgccgttccggaggcctggtccatctggagttttgaggggtgaggggaccagagcagtgggaccagcatggggatcagcttcccttccccacctggagccagggactgtccgggtagccagttttggtcctgccagctgcctccctgatccctccccactctcgccccttctctatgaacttaaatcaaaaaccacttccctccatctcctcctgctcctgcgtggagggggaatgtgtgctggctagggtggaggactgagcacctgagcctggggctggctccccggggtccccgactcagctggtggctgtggagctgagtcccctccccgtaacctctgcagcctgggaaggctggagaggcagacggtgggacccaccagctctctccccatcccgcttcttccctgggggccaggccctacctgtgtggtggtgggtgggctgtcaagacgtgtcatgtacatttgtatcaaaaataaagaagtgaccatga

SEQ ID NO: 298737 - DNA, 3361 bp, Homo sapiens
agagggctgcggccgcgtcgccgctgaggatgtcccgaaaggggccgcgagcggaggtgtgtgcggactgcagcgccccggaccctggctgggcatccatcagcaggggtgtgctggtgtgtgacgagtgctgcagcgtgcaccggagcctgggacgccacatctccattgtcaagcaccttcgccacagcgcctggcctcccacgctgctgcagatggtgcacacgcttgccagcaacggggccaactccatctgggagcactccctgctggaccccgcacaagtgcagagcggccggcgtaaagccaacccccaagacaaagtccaccccatcaagtcagagttcatcagggccaagtaccagatgctggcatttgtgcacaagcttccctgccgggacgatgatggagtcaccgccaaagacctcagcaagcaactacactcgagcgtgcggacaggcaacctggagacatgtctgcgcctgctctccctgggtgcccaggccaacttcttccacccagagaagggcaccacacctctgcacgtggctgccaaggcaggacagacactgcaggccgagctgcttgtagtgtatggggctgaccctggctcccctgatgttaatggccgcacacccattgactatgccaggcaggcggggcaccatgagctggcggaaaggctggttgagtgccaatatgagctcactgaccggctggccttctacctctgtggacgcaagccggatcacaagaatgggcattacatcatcccacagatggctgacagccttgacttatccgaattggccaaagctgctaagaagaagctgcaggcgctcagcaaccggctttttgaggaactcgccatggacgtgtatgacgaggtggatcgaagagaaaatgatgcagtgtggctggctacccaaaaccacagcactctggtgacagagcgcagtgccgtgcccttcctgcctgttaacccggaatactcagccacgcggaatcaggggcgacaaaagctggcccgctttaatgcccgagagtttgccaccttgatcatcgacattctcagtgaggccaagcggagacagcagggcaagagcctgagcagccccacagacaacctcgagctgtctctgcggagccagagtgacctcgacgaccaacacgactacgacagcgtggcctctgacgaggacacagaccaggagcccctgcgcagcaccggcgccactcggagcaaccgggcccggagcatggactcctcggacttgtctgacggggctgtgacgctgcaggagtacctggagctgaagaaggccctggctacatcggaggcaaaggtgcagcagctcatgaaggtcaacagtagcctgagcgacgagctccggaggctgcagcgagagatccacaagctgcaggcggagaacctgcagctccggcagcctccagggccggtgcccacacctccactccccagtgaacgggcggaacacacacccatggcgccaggcgggagcacacaccgcagggatcgccaggccttttccatgtatgaacctggctctgccctgaagccctttgggggcccccctggggacgagctcactacgcggctgcagcctttccacagcactgagctagaggacgacgccatctattcagtgcacgtccctgctggcctttaccggatccggaaaggggtgtctgcctcagctgtgcccttcactccctcctccccgctgctgtcctgctcccaggagggaagccgccacacgagcaagctttcccgccacggcagtggagccgacagtgactatgagaacacgcaaagtggggacccactgctggggctggaagggaagaggtttctagagctgggcaaagaggaagacttccacccagagctggaaagcctggatggagacctagatcctgggcttcccagcacagaggatgtcatcttgaagacagagcaggtcaccaagaacattcaggaactgttgcgggcagcccaggagttcaagcatgacagcttcgtgccctgctcagagaagatccatttggctgtgaccgagatggcctccctcttcccaaagaggccagccctggagccagtgcggagctcactgcggctgctcaacgccagcgcctaccggctgcagagtgagtgccggaagacagtgcccccagagcccggcgccccagtggacttccagctgctgactcagcaggtgatccagtgcgcctatgacatcgccaaggctgccaagcagctggtcaccatcaccacccgagagaagaagcagtgacctctctccccacaccctcacctgcaccctaggacctcactggccataggagctgggccactccagacattaatccccaccccaacagagccactggcacaagtgcccttagtgctgccacactccctggcagccaggtgccctggtgcccacccctgtcgagcccctaaggatggggaggtgggggggcaggagcttctgtcccccacattccatgcacctcccctctgtatatagcatctcccccctcctagtgagcaggggcctgcaaggcatcactcccagcccctcgccttctagggcaccctcagcaaaggggcaggtggggacactccaagtggggcagctctccgtacatgcgccccacccccatgagccagttcagccctactgggggctgagcgggggcatcccctcctttgtacatagtctccatggatgtccctgccctgtagccaccagccccttgctgctctccctttaatgccatatggcccctgcctagggcacaggccccaacctgtgtgctggggtccccagcagcaaacactggaaagtctgttttttttttttctttcttcttccccaccccttaattttaactttgtggtaactgagtgcccccgcgtgcctgcgtgttgagtgtgtgggcggcagtgccgttccggaggcctggtccatctggagttttgaggggtgaggggaccagagcagtgggaccagcatggggatcagcttcccttccccacctggagcgctccccggggtccccgactcagctggtggctgtggagctgagtcccctccccgtaacctctgcaaggccagcacccaccatcactacctgcacctgctgtggtcccaccctctggaggcctgggaacctggctgcagcctgggaaggctggagaggcagacggtgggacccaccagctctctccccatcccgcttcttccctgggggccaggccctacctgtgtggtggtgggtgggctgtcaagacgtgtcatgtacatttgtatcaaaaataaagaagtgaccatga

SEQ ID NO: 298738 - DNA, 3297 bp, Homo sapiens
agagggctgcggccgcgtcgccgctgaggatgtcccgaaaggggccgcgagcggaggtgtgtgcggactgcagcgccccggaccctggctgggcatccatcagcaggggtgtgctggtgtgtgacgagtgctgcagcgtgcaccggagcctgggacgccacatctccattgtcaagcaccttcgccacagcgcctggcctcccacgctgctgcagatggtgcacacgcttgccagcaacggggccaactccatctgggagcactccctgctggaccccgcacaagtgcagagcggccggcgtaaagccaacccccaagacaaagtccaccccatcaagtcagagttcatcagggccaagtaccagatgctggcatttgtgcacaagcttccctgccgggacgatgatggagtcaccgccaaagacctcagcaagcaactacactcgagcgtgcggacaggcaacctggagacatgtctgcgcctgctctccctgggtgcccaggccaacttcttccacccagagaagggcaccacacctctgcacgtggctgccaaggcaggacagacactgcaggccgagctgcttgtagtgtatggggctgaccctggctcccctgatgttaatggccgcacacccattgactatgccaggcaggcggggcaccatgagctggcggaaaggctggttgagtgccaatatgagctcactgaccggctggccttctacctctgtggacgcaagccggatcacaagaatgggcattacatcatcccacagatggctgacagccttgacttatccgaattggccaaagctgctaagaagaagctgcaggcgctcagcaaccggctttttgaggaactcgccatggacgtgtatgacgaggtggatcgaagagaaaatgatgcagtgtggctggctacccaaaaccacagcactctggtgacagagcgcagtgccgtgcccttcctgcctgttaacccggaatactcagccacgcggaatcaggggcgacaaaagctggcccgctttaatgcccgagagtttgccaccttgatcatcgacattctcagtgaggccaagcggagacagcagggcaagagcctgagcagccccacagacaacctcgagctgtctctgcggagccagagtgacctcgacgaccaacacgactacgacagcgtggcctctgacgaggacacagaccaggagcccctgcgcagcaccggcgccactcggagcaaccgggcccggagcatggactcctcggacttgtctgacggggctgtgacgctgcaggagtacctggagctgaagaaggccctggctacatcggaggcaaaggtgcagcagctcatgaaggtcaacagtagcctgagcgacgagctccggaggctgcagcgagagatccacaagctgcaggcggagaacctgcagctccggcagcctccagggccggtgcccacacctccactccccagtgaacgggcggaacacacacccatggcgccaggcgggagcacacaccgcagggatcgccaggccttttccatgtatgaacctggctctgccctgaagccctttgggggcccccctggggacgagctcactacgcggctgcagcctttccacagcactgagctagaggacgacgccatctattcagtgcacgtccctgctggcctttaccggatccggaaaggggtgtctgcctcagctgtgcccttcactccctcctccccgctgctgtcctgctcccaggagggaagccgccacacgagcaagctttcccgccacggcagtggagccgacagtgactatgagaacacgcaaagtggggacccactgctggggctggaagggaagaggtttctagagctgggcaaagaggaagacttccacccagagctggaaagcctggatggagacctagatcctgggcttcccagcacagaggatgtcatcttgaagacagagcaggtcaccaagaacattcaggaactgttgcgggcagcccaggagttcaagcatgacagcttcgtgccctgctcagagaagatccatttggctgtgaccgagatggcctccctcttcccaaagaggccagccctggagccagtgcggagctcactgcggctgctcaacgccagcgcctaccggctgcagagtgagtgccggaagacagtgcccccagagcccggcgccccagtggacttccagctgctgactcagcaggtgatccagtgcgcctatgacatcgccaaggctgccaagcagctggtcaccatcaccacccgagagaagaagcagtgacctctctccccacaccctcacctgcaccctaggacctcactggccataggagctgggccactccagacattaatccccaccccaacagagccactggcacaagtgcccttagtgctgccacactccctggcagccaggtgccctggtgcccacccctgtcgagcccctaaggatggggaggtgggggggcaggagcttctgtcccccacattccatgcacctcccctctgtatatagcatctcccccctcctagtgagcaggggcctgcaaggcatcactcccagcccctcgccttctagggcaccctcagcaaaggggcaggtggggacactccaagtggggcagctctccgtacatgcgccccacccccatgagccagttcagccctactgggggctgagcgggggcatcccctcctttgtacatagtctccatggatgtccctgccctgtagccaccagccccttgctgctctccctttaatgccatatggcccctgcctagggcacaggccccaacctgtgtgctggggtccccagcagcaaacactggaaagtctgttttttttttttctttcttcttccccaccccttaattttaactttgtggtaactgagtgcccccgcgtgcctgcgtgttgagtgtgtgggcggcagtgccgttccggaggcctggtccatctggagttttgaggggtgaggggaccagagcagtgggaccagcatggggatcagcttcccttccccacctggagcctggtggctgtggagctgagtcccctccccgtaacctctgcaaggccagcacccaccatcactacctgctgcagcctgggaaggctggagaggcagacggtgggacccaccagctctctccccatcccgcttcttccctgggggccaggccctacctgtgtggtggtgggtgggctgtcaagacgtgtcatgtacatttgtatcaaaaataaagaagtgaccatga

SEQ ID NO: 298739 - DNA, 3059 bp, Homo sapiens
agagggctgcggccgcgtcgccgctgaggatgtcccgaaaggggccgcgagcggaggtgtgtgcggactgcagcgccccggaccctggctgggcatccatcagcaggggtgtgctggtgtgtgacgagtgctgcagcgtgcaccggagcctgggacgccacatctccattgtcaagcaccttcgccacagcgcctggcctcccacgctgctgcagatggtgcacacgcttgccagcaacggggccaactccatctgggagcactccctgctggaccccgcacaagtgcagagcggccggcgtaaagccaacccccaagacaaagtccaccccatcaagtcagagttcatcagggccaagtaccagatgctggcatttgtgcacaagcttccctgccgggacgatgatggagtcaccgccaaagacctcagcaagcaactacactcgagcgtgcggacaggcaacctggagacatgtctgcgcctgctctccctgggtgcccaggccaacttcttccacccagagaagggcaccacacctctgcacgtggctgccaaggcaggacagacactgcaggccgagctgcttgtagtgtatggggctgaccctggctcccctgatgttaatggccgcacacccattgactatgccaggcaggcggggcaccatgagctggcggaaaggctggttgagtgccaatatgagctcactgaccggctggccttctacctctgtggacgcaagccggatcacaagaatgggcattacatcatcccacagatggctgacagccttgacttatccgaattggccaaagctgctaagaagaagctgcaggcgctcagcaaccggctttttgaggaactcgccatggacgtgtatgacgaggtggatcgaagagaaaatgatgcagtgtggctggctacccaaaaccacagcactctggtgacagagcgcagtgccgtgcccttcctgcctgttaacccggaatactcagccacgcggaatcaggggcgacaaaagctggcccgctttaatgcccgagagtttgccaccttgatcatcgacattctcagtgaggccaagcggagacagcagggcaagagcctgagcagccccacagacaacctcgagctgtctctgcggagccagagtgacctcgacgaccaacacgactacgacagcgtggcctctgacgaggacacagaccaggagcccctgcgcagcaccggcgccactcggagcaaccgggcccggagcatggactcctcggacttgtctgacggggctgtgacgctgcaggagtacctggagctgaagaaggccctggctacatcggaggcaaaggtgcagcagctcatgaaggtcaacagtagcctgagcgacgagctccggaggctgcagcgagagatccacaagctgcaggcggagaacctgcagctccggcagcctccagggccggtgcccacacctccactccccagtgaacgggcggaacacacacccatggcgccaggcgggagcacacaccgcagggatcgccaggccttttccatgtatgaacctggctctgccctgaagccctttgggggcccccctggggacgagctcactacgcggctgcagcctttccacagcactgagctagaggacgacgccatctattcagtgcacgtccctgctggcctttaccggatccggaaaggggtgtctgcctcagctgtgcccttcactccctcctccccgctgctgtcctgctcccaggagggaagccgccacacgagcaagctttcccgccacggcagtggagccgacagtgactatgagaacacgcaaagtggggacccactgctggggctggaagggaagaggtttctagagctgggcaaagaggaagacttccacccagagctggaaagcctggatggagacctagatcctgggcttcccagcacagaggatgtcatcttgaagacagagcaggtcaccaagaacattcaggaactgttgcgggcagcccaggagttcaagcatgacagcttcgtgccctgctcagagaagatccatttggctgtgaccgagatggcctccctcttcccaaagaggccagccctggagccagtgcggagctcactgcggctgctcaacgccagcgcctaccggctgcagagtgagtgccggaagacagtgcccccagagcccggcgccccagtggacttccagctgctgactcagcaggtgatccagtgcgcctatgacatcgccaaggctgccaagcagctggtcaccatcaccacccgagagaagaagcagtgacctctctccccacaccctcacctgcaccctaggacctcactggccataggagctgggccactccagacattaatccccaccccaacagagccactggcacaagtgcccttagtgctgccacactccctggcagccaggtgccctggtgcccacccctgtcgagcccctaaggatggggaggtgggggggcaggagcttctgtcccccacattccatgcacctcccctctgtatatagcatctcccccctcctagtgagcaggggcctgcaaggcatcactcccagcccctcgccttctagggcaccctcagcaaaggggcaggtggggacactccaagtggggcagctctccgtacatgcgccccacccccatgagccagttcagccctactgggggctgagcgggggcatcccctcctttgtacatagtctccatggatgtccctgccctgtagccaccagccccttgctgctctccctttaatgccatatggcccctgcctagggcacaggccccaacctgtgtgctggggtccccagcagcaaacactggaaagtctgttttttttttttctttcttctgctccccggggtccccgactcagctggtggctgtggagctgagtcccctccccgtaacctctgcaaggccagcacccaccatcactacctgctgtgtggtggtgggtgggctgtcaagacgtgtcatgtacatttgtatcaaaaataaagaagtgaccatga

SEQ ID NO: 298740 - DNA, 2375 bp, Homo sapiens
agagggctgcggccgcgtcgccgctgaggatgtcccgaaaggggccgcgagcggaggtgtgtgcggactgcagcgccccggaccctggctgggcatccatcagcaggggtgtgctggtgtgtgacgagtgctgcagcgtgcaccggagcctgggacgccacatctccattgtcaagcaccttcgccacagcgcctggcctcccacgctgctgcagatggtgcacacgcttgccagcaacggggccaactccatctgggagcactccctgctggaccccgcacaagtgcagagcggccggcgtaaagccaacccccaagacaaagtccaccccatcaagtcagagttcatcagggccaagtaccagatgctggcatttgtgcacaagcttccctgccgggacgatgatggagtcaccgccaaagacctcagcaagcaactacactcgagcgtgcggacaggcaacctggagacatgtctgcgcctgctctccctgggtgcccaggccaacttcttccacccagagaagggcaccacacctctgcacgtggctgccaaggcaggacagacactgcaggccgagctgcttgtagtgtatggggctgaccctggctcccctgatgttaatggccgcacacccattgactatgccaggcaggcggggcaccatgagctggcggaaaggctggttgagtgccaatatgagctcactgaccggctggccttctacctctgtggacgcaagccggatcacaagaatgggcattacatcatcccacagatggctgacagccttgacttatccgaattggccaaagctgctaagaagaagctgcaggcgctcagcaaccggctttttgaggaactcgccatggacgtgtatgacgaggtggatcgaagagaaaatgatgcagtgtggctggctacccaaaaccacagcactctggtgacagagcgcagtgccgtgcccttcctgcctgttaacccggaatactcagccacgcggaatcaggggcgacaaaagctggcccgctttaatgcccgagagtttgccaccttgatcatcgacattctcagtgaggccaagcggagacagcagggcaagagcctgagcagccccacagacaacctcgagctgtctctgcggagccagagtgacctcgacgaccaacacgactacgacagcgtggcctctgacgaggacacagaccaggagcccctgcgcagcaccggcgccactcggagcaaccgggcccggagcatggactcctcggacttgtctgacggggctgtgacgctgcaggagtacctggagctgaagaaggccctggctacatcggaggcaaaggtgcagcagctcatgaaggtcaacagtagcctgagcgacgagctccggaggctgcagcgagagatccacaagctgcaggcggagaacctgcagctccggcagcctccagggccggtgcccacacctccactccccagtgaacgggcggaacacacacccatggcgccaggcgggagcacacaccgcagggatcgccaggccttttccatgtatgaacctggctctgccctgaagccctttgggggcccccctggggacgagctcactacgcggctgcagcctttccacagcactgagctagaggacgacgccatctattcagtgcacgtccctgctggcctttaccggatccggaaaggggtgtctgcctcagctgtgcccttcactccctcctccccgctgctgtcctgctcccaggagggaagccgccacacgagcaagctttcccgccacggcagtggagccgacagtgactatgagaacacgcaaagtggggacccactgctggggctggaagggaagaggtttctagagctgggcaaagaggaagacttccacccagagctggaaagcctggatggagacctagatcctgggcttcccagcacagaggatgtcatcttgaagacagagcaggtcaccaagaacattcaggaactgttgcgggcagcccaggagttcaagcatgacagcttcgtgccctgctcagagaagatccatttggctgtgaccgagatggcctccctcttcccaaagaggccagccctggagccagtgcggagctcactgcggctgctcaacgccagcgcctaccggctgcagagtgagtgccggaagacagtgcccccagagcccggcgccccagtggacttccagctgctgactcagcaggtgatccagtgcgcctatgacatcgccaaggctgccaagcagctggtcaccatcaccacccgagagaagaagcagtgacctctctccccacaccctcacctgcaccctaggacctcacacaccgtcaaaaaaaaaaaa

SEQ ID NO: 298741 - DNA, 543 bp, Homo sapiens
aaaatcaccctggctgctgggtggaacaggattgtagggacaaaactagaaggagggagattaagaaacttacaaagcccaggcaacaggtgattgaggaacctggggagcttcactaggactggagggtgagggaggcttcaggtgactgccaggtggctgacactggtggtggacaaacaggtcactgagaggaagagcaagccagaggaggaggggtgggggacgcggtgagatgaattcagctttgtcccttctgggccgggtgtgcgtggagatgggtctgggcctgatgtgaaaaggcgtgtgctgccctgctcctgggtaactgccgcctctgtcctgttcttccctctgctgccttcctctggacttagatctcggcaaaagtgcatgtctcagaggtatatggtgcctgccggggcagcaggcctgaaggtggggtagggcggggaggcatttggtgtgcagcatctggggtgccatctccccgggatccctgcatgttggggaggttgctggcatgggcctggccacctctca

SEQ ID NO: 298742 - DNA, 855 bp, Homo sapiens
cggaagtgtgggcgcggctgcggtttaacccgcggtggcggcggcgacggcggccctggcagggaaggatggagacgctgaaggataagaccctgcaggagctggaggagttgcagaatgactcggaggcgattgaccagctggccctggagtcccctgaggtccaggacctacagctggaacgggagatggcactggccaccaaccggagcctggcagagcggaacttggagttccagggtcccctggagatcagccgctcaaacctctcggatagataccaggagctccggaagctcgtggagcggtgccaggagcagaaggcaaagctggagaaattttcttcagcactgcagccagggaccttgttagaccttctgcaggtggaaggcatgaagatcgaagaagagtccgaggtgagagggcgaggcgacacccctcttccctggacggggtgtcagtccctgcagcaggggcccttggaaggagaagcagatgtctgcaaagcatggaacaagggagctttcgtagatggcagaggtgaaggacatctttagtcctggggaggccttttgggtataaataacaggaacccagtcccactagctgaagcagaaacgggtgacagtggacaagggcagctcgcagccctggatggtagggcagcacagcaggaggcccccaggggctgaggccagctccctactccactctccctgcttcctgcttccctccggccacctcttcagcctctgtgggcaaactggtgctgtccactctgtgtctgggtggaagaagcttctaggccctcccagtccctgggctagtgctcatccaggtgttcagcacatatat

SEQ ID NO: 298743 - DNA, 2699 bp, Homo sapiens
cggaagtgtgggcgcggctgcggtttaacccgcggtggcggcggcgacggcggccctggcagggaaggatggagacgctgaaggataagaccctgcaggagctggaggagttgcagaatgactcggaggcgattgaccagctggccctggagtcccctgaggtccaggacctacagctggaacgggagatggcactggccaccaaccggagcctggcagagcggaacttggagttccagggtcccctggagatcagccgctcaaacctctcggatagataccaggagctccggaagctcgtggagcggtgccaggagcagaaggcaaagctggagaaattttcttcagcactgcagccagggaccttgttagaccttctgcaggtggaaggcatgaagatcgaagaagagtccgaggccatggctgagaagttcctggagggcgaggtgcccctggaaacgttcctggagaatttttcctccatgaggatgctgtcccacctgcgccgggttcgcgtggaaaagctccaggaagtggtgaggaagcccagggcttcccaggagctggccggcgatgcccctccagcccgtccaccagccccggtgcgcccagtcccccagggaacaccccctgtggttgaagagcagccgcagccaccatcagccatgcctccctaccctttgccctacagcccatcccccagcctgcctgtgggccccactgcccatggagccctgccaccggcccctttcccagtagtgtcccagccctccttctacagcgggcctctgggccccacttacccggcagcccagcttggacccaggggtgctgcgggttactcctggtccccacagaggagcatgccaccccggccgggctatcctgggaccccaatgggtgcctctgggcctgggtaccccttgcggggaggcagggcccccagtcctggttatcctcaacagtccccataccccgcaacaggaggaaaacctccctacccaatacagcctcagctccccagctttccaggccagccccagccctcagtgcccctgcagcccccttatccccccgggcccgcccctccctatgggttcccaccaccgccggggcctgcctggcctgggtattagacacactcctggccctcggcccctccctagtcccacccacgctcaacctttggcccagccatcgccgagattcgagggtcaactggaagtggcgttggtgctccctgtggacttgcgtcggcacccagaggccttggagggacaaggcactgggcggtgtgactggtcatggcacttgctggccttctggccagaggtcctcctggaagcccctcctttcagtgcctggctgcagcggtgctagccaggctggagtccagcacctctcgccggtgtctgtgtgagtgagcgcatgtgcgcatttatgagcatctacttgcggctgcactcagggccatttgaacccagtgcagagttatctctatgaggaggccccgggtctccagccccctccatctcccctggggtttggcatatttgacatggagccccatgccaagggatgcagctgttggtgtctgtccagtccattcaaggctagcctgcccatgcactgtggcaggggttggattggagggagagaacagagttgggaaaaacaacaggtttgagtcctataaagccataatttaactccagtagctgatgtcagacaagcttgtcctatgtcctatttgagtggcagcagcgccagcccagcaagaaggctgggggttgtcaaggttgtccccagaccttgcttgcagtggttggagaacccagggggctgccttgggccctctggccagagggaagcgggcagctctagccctggagattgtggtcacattggggcttgtttaggattggagggccaggtcacctccccagccaccctcccttctctcctctggggtccccactttagggcgactttgcccgaggcccacgcatccatccactcctttagtgccttgaatctcattcacaagcagccccctcccttcccctccccttctcactctgttgatgtaatcctcccacccccagtgtccatcctaagacaggcatcaaaagaggccctaactttacttcccaaatggtgctttttaaaaaacaccatcactacattaggggcaattttttcacacctccctgtcttcagaatgtaaagggtggggattatgtctctgtttaatatgcagccccctgcactgtggggtttggggcatgttcagtaataagaatgaatacaatagacaaagggggtgtgatgagtgttaacttggttgttccagaggtaaaccaggtctcagggaagagcctggagctgctattgcttaggaagttgtacgtgccttgaaatgtccactacctgaggacgcagcatctggtgggcccggggctgctggggccaaggagggaccttgaccttctggtgcctgcccctccccggcctacgtgccatccgcgtgacgctaggtcagcgctgccggttctttaccaaatgtgcttgcttctcctaagttatttataaagagaaatcactaatggactctactggtttgagtgcttctgagctggatgaccgaccgcctgtatgtttgtgtaattaattgccataataaactttgatgagtcaca

SEQ ID NO: 298744 - DNA, 3009 bp, Homo sapiens
  misc_feature (2767)..(2767): n is a, c, g, or t
cggaagtgtgggcgcggctgcggtttaacccgcggtggcggcggcgacggcggccctggcagggaaggatggagacgctgaaggataagaccctgcaggagctggaggagttgcagaatgactcggaggcgattgaccagctggccctggagtcccctgaggtccaggacctacagctggaacgggagatggcactggccaccaaccggagcctggcagagcggaacttggagttccagggtcccctggagatcagccgctcaaacctctcggatagataccaggagctccggaagctcgtggagcggtgccaggagcagaaggcaaagctggagaaattttcttcagcactgcagccagggaccttgttagaccttctgcaggtggaaggcatgaagatcgaagaagagtccgaggccatggctgagaagttcctggagggcgaggtgcccctggaaacgttcctggagaatttttcctccatgaggatgctgtcccacctgcgccgggttcgcgtggaaaagctccaggaagtggtgaggaagcccagggcttcccaggagctggccggcgatgcccctccagcccgtccaccagccccggtgcgcccagtcccccagggaacaccccctgtggttgaagagcagccgcagccaccatcagccatgcctccctaccctttgccctacagcccatcccccagcctgcctgtgggccccactgcccatggagccctgccaccggcccctttcccagtagtgtcccagccctccttctacagcgggcctctgggccccacttacccggcagcccagcttggacccaggggtgctgcgggttactcctggtccccacagaggagcatgccaccccggccgggctatcctgggaccccaatgggtgcctctgggcctgggtaccccttgcggggaggcagggcccccagtcctggttatcctcaacagtccccataccccgcaacaggaggaaaacctccctacccaatacagcctcagctccccagctttccaggccagccccagccctcagtgcccctgcagcccccttatccccccgggcccgcccctccctatgggttcccaccaccgccggggcctgcctggcctgggtattagacacactcctggccctcggcccctccctagtcccacccacgctcaacctttggcccagccatcgccgagattcgagggtcaactggaagtggcgttggtgctccctgtggacttgcgtcggcacccagaggccttggagggacaaggcactgggcggtgtgactggtcatggcacttgctggccttctggccagaggtcctcctggaagcccctcctttcagtgcctggctgcagcggtgctagccaggctggagtccagcacctctcgccggtgtctgtgtgagtgagcgcatgtgcgcatttatgagcatctacttgcggctgcactcagggccatttgaacccagtgcagagttatctctatgaggaggccccgggtctccagccccctccatctcccctggggtttggcatatttgacatggagccccatgccaagggatgcagctgttggtgtctgtccagtccattcaaggctagcctgcccatgcactgtggcaggggttggattggagggagagaacagagttgggaaaaacaacaggtttgagtcctataaagccataatttaactccagtagctgatgtcagacaagcttgtcctatgtcctatttgagtggcagcagcgccagcccagcaagaaggctgggggttgtcaaggttgtccccagaccttgcttgcagtggttggagaacccagggggctgccttgggccctctggccagagggaagcgggcagctctagccctggagattgtggtcacattggggcttgtttaggattggagggccaggtcacctccccagccaccctcccttctctcctctggggtccccactttagggcgactttgcccgaggcccacgcatccatccactcctttagtgccttgaatctcattcacaagcagccccctcccttcccctccccttctcactctgttgatgtaatcctcccacccccagtgtccatcctaagacaggcatcaaaagaggccctaactttacttcccaaatggtgctttttaaaaaacaccatcactacattaggggcaattttttcacacctccctgtcttcagaatgtaaagggtggggattatgtctctgtttaatatgcagccccctgcactgtggggtttggggcatgttcagtaataagaatgaatacaatagacaaagggggtgtgatgagtgttaacttggttgttccagaggtaaaccaggtctcagggaagagcctggagctgctattgcttaggaagttgtacgtgccttgaaatgtccactacctgaggacgcagcatctggtgggcccggggctgctggggccaaggagggaccttgaccttctggtgcctgcccctccccggcctacgtgccatccgcgtgacgctaggtcagcgctgccggttctttaccaaatgtgcttgcttctcctaagttatttataaagagaaatcactaatggactctactggtttgagtgcttctgagctggatgaccgaccgcctgtatgtttgtgtaattaattgccataataaactttgatgagtcacaaaaaaaaaaaaacaaacaaaacacaaaaaacaacaaaagaagggagagacgacaatcaaatgatgatnagattgccaatgaagagaaagaacaacgaagttagacgagcagaacacaacaactagcggtgagagacaacaagggagccccgatacagatggagcgacagcgatgacgcagaggaggatcctgagactgccggggacgagcgcggggtgcgggagcaacagggtattacagtagcgacaggtagggaatgaagagcaatgacagcgcaggggggggcagcgacgtggcagaccaacacgga

SEQ ID NO: 298745 - DNA, 287 bp, Homo sapiens
cggccgcgagcgtgtgtgtgtggcacgatgtcgtggtaactcagaggcgcgcgaggcggggcggccaacggggtcgcggggcgagcacgcgcgccactggggcgccggacgttgcaagggggtcacatccggtagggggcgggcctggcggaccccggaagtgtgggcgcggctgcggtttaacccgcggtggcggcggcgacggcggccctggcaggtgagcggagactggggagggtcccggctctgccgcaggcgggcggggcagaggacgacggtgggggcgg

SEQ ID NO: 298746 - DNA, 1934 bp, Homo sapiens
ccgggtccagcctgttgctgatgctgccgtgcggtacttgtcatggagctggcactgcggcgctctcccgtcccgcggtggttgctgctgctgccgctgctgctgggcctgaacgcaggagctgtcattgactggcccacagaggagggcaaggaagtatgggattatgtgacggtccgcaaggatgcctacatgttctggtggctctattatgccaccaactcctgcaagaacttctcagaactgcccctggtcatgtggcttcagggcggtccaggcggttctagcactggatttggaaactttgaggaaattgggccccttgacagtgatctcaaaccacggaaaaccacctggctccaggctgccagtctcctatttgtggataatcccgtgggcactgggttcagttatgtgaatggtagtggtgcctatgccaaggacctggctatggtggcttcagacatgatggttctcctgaagaccttcttcagttgccacaaagaattccagacagttccattctacattttctcagagtcctatggaggaaaaatggcagctggcattggtctagagctttataaggccattcagcgagggaccatcaagtgcaactttgcgggggttgccttgggtgattcctggatctcccctgttgattcggtgctctcctggggaccttacctgtacagcatgtctcttctcgaagacaaaggtctggcagaggtgtctaaggttgcagagcaagtactgaatgccgtaaataaggggctctacagagaggccacagagctgtgggggaaagcagaaatgatcattgaacagaacacagatggggtgaacttctataacatcttaactaaaagcactcccacgtctacaatggagtcgagtctagaattcacacagagccacctagtttgtctttgtcagcgccacgtgagacacctacaacgagatgccttaagccagctcatgaatggccccatcagaaagaagctcaaaattattcctgaggatcaatcctggggaggccaggctaccaacgtctttgtgaacatggaggaggacttcatgaagccagtcattagcattgtggacgagttgctggaggcagggatcaacgtgacggtgtataatggacagctggatctcatcgtagataccatgggtcaggaggcctgggtgcggaaactgaagtggccagaactgcctaaattcagtcagctgaagtggaaggccctgtacagtgaccctaaatctttggaaacatctgcttttgtcaagtcctacaagaaccttgctttctactggattctgaaagctggtcatatggttccttctgaccaaggggacatggctctgaagatgatgagactggtgactcagcaagaataggatggatggggctggagatgagctggtttggccttggggcacagagctgagctgaggccgctgaagctgtaggaagcgccattcttccctgtatctaactggggctgtgatcaagaaggttctgaccagcttctgcagaggataaaatcattgtctctggaggcaatttggaaattatttctgcttcttaaaaaaacctaagattttttaaaaaattgatttgttttgatcaaaataaaggatgataatagatattattttttcttatgacagaagcaaatgatgtgatttatagaaaaactgggaaatacaggtacccaaagagtaaatcaacatctgtatacccccttcccaggggtaagcactgttaccaatttagcatatgtccttgcagaatttttttttctatatatacatatatattttttaccaaaatgaatcattactctatgttgttttactatttgtttgacatatcagtatatctgaaacaccttttcatgtcaataaatgttcttctctaacatttttaa

SEQ ID NO: 298747 - DNA, 2273 bp, Homo sapiens
  misc_feature (2032)..(2032): n is a, c, g, or t
  misc_feature (2115)..(2116): n is a, c, g, or t
ccgggtccagcctgttgctgatgctgccgtgcggtacttgtcatggagctggcactgcggcgctctcccgtcccgcggtggttgctgctgctgccgctgctgctgggcctgaacgcaggagctgtcattgactggcccacagaggagggcaaggaagtatgggattatgtgacggtccgcaaggatgcctacatgttctggtggctctattatgccaccaactcctgcaagaacttctcagaactgcccctggtcatgtggcttcagggcggtccaggcggttctagcactggatttggaaactttgaggaaattgggccccttgacagtgatctcaaaccacggaaaaccacctggctccaggctgccagtctcctatttgtggataatcccgtgggcactgggttcagttatgtgaatggtagtggtgcctatgccaaggacctggctatggtggcttcagacatgatggttctcctgaagaccttcttcagttgccacaaagaattccagacagttccattctacattttctcagagtcctatggaggaaaaatggcagctggcattggtctagagctttataaggccattcagcgagggaccatcaagtgcaactttgcgggggttgccttgggtgattcctggatctcccctgttgattcggtgctctcctggggaccttacctgtacagcatgtctcttctcgaagacaaaggtctggcagaggtgtctaaggttgcagagcaagtactgaatgccgtaaataaggggctctacagagaggccacagagctgtgggggaaagcagaaatgatcattgaacagaacacagatggggtgaacttctataacatcttaactaaaagcactcccacgtctacaatggagtcgagtctagaattcacacagagccacctagtttgtctttgtcagcgccacgtgagacacctacaacgagatgccttaagccagctcatgaatggccccatcagaaagaagctcaaaattattcctgaggatcaatcctggggaggccaggctaccaacgtctttgtgaacatggaggaggacttcatgaagccagtcattagcattgtggacgagttgctggaggcagggatcaacgtgacggtgtataatggacagctggatctcatcgtagataccatgggtcaggaggcctgggtgcggaaactgaagtggccagaactgcctaaattcagtcagctgaagtggaaggccctgtacagtgaccctaaatctttggaaacatctgcttttgtcaagtcctacaagaaccttgctttctactggattctgaaagctggtcatatggttccttctgaccaaggggacatggctctgaagatgatgagactggtgactcagcaagaataggatggatggggctggagatgagctggtttggccttggggcacagagctgagctgaggccgctgaagctgtaggaagcgccattcttccctgtatctaactggggctgtgatcaagaaggttctgaccagcttctgcagaggataaaatcattgtctctggaggcaatttggaaattatttctgcttcttaaaaaaacctaagattttttaaaaaattgatttgttttgatcaaaataaaggatgataatagatattattttttcttatgacagaagcaaatgatgtgatttatagaaaaactgggaaatacaggtacccaaagagtaaatcaacatctgtatacccccttcccaggggtaagcactgttaccaatttagcatatgtccttgcagaatttttttttctatatatacatatatattttttaccaaaatgaatcattactctatgttgttttactatttgtttgacatatcagtatatctgaaacaccttttcatgtcaataaatgttcttctctaacatttttaaacaacaacaaaaaaaaaactccgggggcctctatgccggcggcgggaaaaagggcgcggaaggggccctggatcccttagctgtttccctgaacccgnttctctcgttccacaagtgtggagaaccggcgcgccccctaagggggtcgtttttaatttcgcataagccgggtcatcacaanngcgcgaacaagaaaaaacgggcaacgagcgagagcgacaaaactccaacaaagagcaaaaaacgaaaaacccacaacaacaaacacatataaaaaaaacaaacaaaaataagccatcaaagaaaacacaacaaaaaaaaagaagaatacgaacagca

SEQ ID NO: 298748 - DNA, 882 bp, Homo sapiens
cggcacgaggcccgctgggggtgaatcaaggtgacgcttttccttttccagctgaatctgaaaccctccctcttgctgtgcagcatccccagcagcttggtaaagatgtcctcatggccaggcgtggtggctcacacctgtaatcccacctcagcctcccgaagtgctgggattacagacatgagccaccaggcccagccaaagctctatttctttctgatccaagcagatatacaaaattaaacctgtccttggataagataaagagccatgtgtccttctgtttggcagctttgatgataggaaaatgaaacaaacagccaaataaacttttatatttcagaacacagatggggtgaacttctataacatcttaactaaaagcactcccacgtctacaatggagtcgagtctagaattcacacagagccacctaggtgagtgaaccttgaagttattaaagtccctgcctcagcctccatgcaaaaagaaacctgtttattaaaaaaaaaaaaaactttattaacatataatttgcataccataaaattaactcactgtaagtggttttcagtatattcccagagttgtgcagtcatcactacaatccagttatggagcatttctgtcaccccaaggagatcccacgtgtctgcttgcagacagttctcattcccactcccagccacaggcaaccactcatctgccttctgtctctctagattttccttttctgaacattttatataaatacaatcgcacaatagttagtcttttgcactggcttctgtcacatagcatgatgtttttgaagtttagaaaccagcttccatacaccaaattacaacatcagttcaagactgaatttagtcatctttcagc

SEQ ID NO: 298749 - DNA, 1880 bp, Homo sapiens
ccgggtccagcctgttgctgatgctgccgtgcggtacttgtcatggagctggcactgcggcgctctcccgtcccgcggtggttgctgctgctgccgctgctgctgggcctgaacgcaggagctgtcattgactggcccacagaggagggcaaggaagtatgggattatgtgacggtccgcaaggatgcctacatgttctggtggctctattatgccaccaactcctgcaagaacttctcagaactgcccctggtcatgtggcttcagggcggtccaggcggttctagcactggatttggaaactttgaggaaattgggccccttgacagtgatctcaaaccacggaaaaccacctggctccaggctgccagtctcctatttgtggataatcccgtgggcactgggttcagttatgtgaatggtagtggtgcctatgccaaggacctggctatggtggcttcagacatgatggttctcctgaagaccttcttcagttgccacaaagaattccagacagttccattctacattttctcagagtcctatggaggaaaaatggcagctggcattggtctagagctttataaggccattcagcgagggaccatcaagtgcaactttgcgggggttgccttgggtgattcctggatctcccctgttgattcggtgctctcctggggaccttacctgtacagcatgtctcttctcgaagacaaaggtctggcagaggtgtctaaggttgcagagcaagtactgaatgccgtaaataaggggctctacagagaggccacagagctgtgggggaaagcagaaatgatcattgaacagaacacagatggggtgaacttctataacatcttaactaaaagcactcccacgtctacaatggagtcgagtctagaattcacacagagccacctagtttgtctttgtcagcgccacgtgagacacctacaacgagatgccttaagccagctcatgaatggccccatcagaaagaagctcaaaatggaggaggacttcatgaagccagtcattagcattgtggacgagttgctggaggcagggatcaacgtgacggtgtataatggacagctggatctcatcgtagataccatgggtcaggaggcctgggtgcggaaactgaagtggccagaactgcctaaattcagtcagctgaagtggaaggccctgtacagtgaccctaaatctttggaaacatctgcttttgtcaagtcctacaagaaccttgctttctactggattctgaaagctggtcatatggttccttctgaccaaggggacatggctctgaagatgatgagactggtgactcagcaagaataggatggatggggctggagatgagctggtttggccttggggcacagagctgagctgaggccgctgaagctgtaggaagcgccattcttccctgtatctaactggggctgtgatcaagaaggttctgaccagcttctgcagaggataaaatcattgtctctggaggcaatttggaaattatttctgcttcttaaaaaaacctaagattttttaaaaaattgatttgttttgatcaaaataaaggatgataatagatattattttttcttatgacagaagcaaatgatgtgatttatagaaaaactgggaaatacaggtacccaaagagtaaatcaacatctgtatacccccttcccaggggtaagcactgttaccaatttagcatatgtccttgcagaatttttttttctatatatacatatatattttttaccaaaatgaatcattactctatgttgttttactatttgtttgacatatcagtatatctgaaacaccttttcatgtcaataaatgttcttctctaacatttttaa

SEQ ID NO: 298750 - DNA, 1820 bp, Homo sapiens
ccgggtccagcctgttgctgatgctgccgtgcggtacttgtcatggagctggcactgcggcgctctcccgtcccgcggtggttgctgctgctgccgctgctgctgggcctgaacgcaggagctgtcattgactggcccacagaggagggcaaggaagtatgggattatgtgacggtccgcaaggatgcctacatgttctggtggctctattatgccaccaactcctgcaagaacttctcagaactgcccctggtcatgtggcttcagggcggtccaggcggttctagcactggatttggaaactttgaggaaattgggccccttgacagtgatctcaaaccacggaaaaccacctggctccaggctgccagtctcctatttgtggataatcccgtgggcactgggttcagttatgtgaatggtagtggtgcctatgccaaggacctggctatggtggcttcagacatgatggttctcctgaagaccttcttcagttgccacaaagaattccagacagttccattctacattttctcagagtcctatggaggaaaaatggcagctggcattggtctagagctttataaggccattcagcgagggaccatcaagtgcaactttgcgggggttgccttgggtgattcctggatctcccctgttgattcggtgctctcctggggaccttacctgtacagcatgtctcttctcgaagacaaaggtctggcagaggtgtctaaggttgcagagcaagtactgaatgccgtaaataaggggctctacagagaggccacagagctgtgggggaaagcagaaatgatcattgaacagaacacagatggggtgaacttctataacatcttaactaaaagcactcccacgtctacaatggagtcgagtctagaattcacacagagccacctaggccaggctaccaacgtctttgtgaacatggaggaggacttcatgaagccagtcattagcattgtggacgagttgctggaggcagggatcaacgtgacggtgtataatggacagctggatctcatcgtagataccatgggtcaggaggcctgggtgcggaaactgaagtggccagaactgcctaaattcagtcagctgaagtggaaggccctgtacagtgaccctaaatctttggaaacatctgcttttgtcaagtcctacaagaaccttgctttctactggattctgaaagctggtcatatggttccttctgaccaaggggacatggctctgaagatgatgagactggtgactcagcaagaataggatggatggggctggagatgagctggtttggccttggggcacagagctgagctgaggccgctgaagctgtaggaagcgccattcttccctgtatctaactggggctgtgatcaagaaggttctgaccagcttctgcagaggataaaatcattgtctctggaggcaatttggaaattatttctgcttcttaaaaaaacctaagattttttaaaaaattgatttgttttgatcaaaataaaggatgataatagatattattttttcttatgacagaagcaaatgatgtgatttatagaaaaactgggaaatacaggtacccaaagagtaaatcaacatctgtatacccccttcccaggggtaagcactgttaccaatttagcatatgtccttgcagaatttttttttctatatatacatatatattttttaccaaaatgaatcattactctatgttgttttactatttgtttgacatatcagtatatctgaaacaccttttcatgtcaataaatgttcttctctaacatttttaa

SEQ ID NO: 298751 - DNA, 1784 bp, Homo sapiens
cgggggcggttggcctttctttgtttttgtttttttttctatgttcctgtcccttatttttaaaaatctcttttagcaacagggatatcatcaccacgctggtatcctcacatgtgtgggttttgctgagctagtagaaaatgatccaaagatgattggtgaccaaatgtctgattgcaacatttcgttttcctccgtggtacatagctccaggctgccagtctcctatttgtggataatcccgtgggcactgggttcagttatgtgaatggtagtggtgcctatgccaaggacctggctatggtggcttcagacatgatggttctcctgaagaccttcttcagttgccacaaagaattccagacagttccattctacattttctcagagtcctatggaggaaaaatggcagctggcattggtctagagctttataaggccattcagcgagggaccatcaagtgcaactttgcgggggttgccttgggtgattcctggatctcccctgttgattcggtgctctcctggggaccttacctgtacagcatgtctcttctcgaagacaaaggtctggcagaggtgtctaaggttgcagagcaagtactgaatgccgtaaataaggggctctacagagaggccacagagctgtgggggaaagcagaaatgatcattgaacagaacacagatggggtgaacttctataacatcttaactaaaagcactcccacgtctacaatggagtcgagtctagaattcacacagagccacctagtttgtctttgtcagcgccacgtgagacacctacaacgagatgccttaagccagctcatgaatggccccatcagaaagaagctcaaaattattcctgaggatcaatcctggggaggccaggctaccaacgtctttgtgaacatggaggaggacttcatgaagccagtcattagcattgtggacgagttgctggaggcagggatcaacgtgacggtgtataatggacagctggatctcatcgtagataccatgggtcaggaggcctgggtgcggaaactgaagtggccagaactgcctaaattcagtcagctgaagtggaaggccctgtacagtgaccctaaatctttggaaacatctgcttttgtcaagtcctacaagaaccttgctttctactggattctgaaagctggtcatatggttccttctgaccaaggggacatggctctgaagatgatgagactggtgactcagcaagaataggatggatggggctggagatgagctggtttggccttggggcacagagctgagctgaggccgctgaagctgtaggaagcgccattcttccctgtatctaactggggctgtgatcaagaaggttctgaccagcttctgcagaggataaaatcattgtctctggaggcaatttggaaattatttctgcttcttaaaaaaacctaagattttttaaaaaattgatttgttttgatcaaaataaaggatgataatagatattattttttcttatgacagaagcaaatgatgtgatttatagaaaaactgggaaatacaggtacccaaagagtaaatcaacatctgtatacccccttcccaggggtaagcactgttaccaatttagcatatgtccttgcagaatttttttttctatatatacatatatattttttaccaaaatgaatcattactctatgttgttttactatttgtttgacatatcagtatatctgaaacaccttttcatgtcaataaatgttcttctctaacatttttaa

SEQ ID NO: 298752 - DNA, 1259 bp, Homo sapiens
ccgggtccagcctgttgctgatgctgccgtgcggtacttgtcatggagctggcactgcggcgctctcccgtcccgcggtggttgctgctgctgccgctgctgctgggcctgaacgcaggagctgtcattgactggcccacagaggagggcaaggaagtatgggattatgtgacggtccgcaaggatgcctacatgttctggtggctctattatgccaccaactcctgcaagaacttctcagaactgcccctggtcatgtggcttcagggcggtccaggcggttctagcactggatttggaaactttgaggaaattgggccccttgacagtgatctcaaaccacggaaaaccacctggctccaggctgccagtctcctatttgtggataatcccgtgggcactgggttcagttatgtgaatggtagtggtgcctatgccaaggacctggctatggtggcttcagacatgatggttctcctgaagaccttcttcagttgccacaaagaattccagacagttccattctacattttctcagagtcctatggaggaaaaatggcagctggcattggtctagagctttataaggccattcagcgagggaccatcaagtgcaactttgcgggggttgccttgggtgattcctggatctcccctgttgattcggtgctctcctggggaccttacctgtacagcatgtctcttctcgaagacaaaggtctggcagaggtgtctaaggttgcagagcaagtactgaatgccgtaaataaggggctctacagagaggccacagagctgtgggggaaagcagaaatgatcattgaacagaacacagatggggtgaacttctataacatcttaactaaaagcactcccacgtctacaatggagtcgagtctagaattcacacagagccacctagtttgtctttgtcagcgccacgtgagacacctacaacgagatgccttaagccagctcatgaatggccccatcagaaagaagctcaaaattattcctgaggatcaatcctggggaggccaggctaccaacgtctttgtgaacatggaggaggacttcatgaagccagtcattagcattgtggacgaggctggatggggtgactgacagtccagatcattgaaacagattgggtcgtcggaaactggtccacatgaggctggatggggtgactgacagtctggatcattgaaactgattaggtcgtcaaaacgggtcaagacgagatgaggctaggctga

SEQ ID NO: 298753 - DNA, 1994 bp, Homo sapiens
ccgggtccagcctgttgctgatgctgccgtgcggtacttgtcatggagctggcactgcggcgctctcccgtcccgcggtggttgctgctgctgccgctgctgctgggcctgaacgcaggagctgtcattgactggcccacagaggagggcaaggaagtatgggattatgtgacggtccgcaaggatgcctacatgttctggtggctctattatgccaccaactcctgcaagaacttctcagaactgcccctggtcatgtggcttcagggcggtccaggcggttctagcactggatttggaaactttgaggaaattgggccccttgacagtgatctcaaaccacggaaaaccacctggctccaggctgccagtctcctatttgtggataatcccgtgggcactgggttcagttatgtgaatggtagtggtgcctatgccaaggacctggctatggtggcttcagacatgatggttctcctgaagaccttcttcagttgccacaaagaattccagacagttccattctacattttctcagagtcctatggaggaaaaatggcagctggcattggtctagagctttataaggccattcagcgagggaccatcaagtgcaactttgcgggggttgccttgggtgattcctggatctcccctgttgattcggtgctctcctggggaccttacctgtacagcatgcaataccagattgacgttcccaagtaaagtgggtctttttgctcttggtttgcattccagtctcttctcgaagacaaaggtctggcagaggtgtctaaggttgcagagcaagtactgaatgccgtaaataaggggctctacagagaggccacagagctgtgggggaaagcagaaatgatcattgaacagaacacagatggggtgaacttctataacatcttaactaaaagcactcccacgtctacaatggagtcgagtctagaattcacacagagccacctagtttgtctttgtcagcgccacgtgagacacctacaacgagatgccttaagccagctcatgaatggccccatcagaaagaagctcaaaattattcctgaggatcaatcctggggaggccaggctaccaacgtctttgtgaacatggaggaggacttcatgaagccagtcattagcattgtggacgagttgctggaggcagggatcaacgtgacggtgtataatggacagctggatctcatcgtagataccatgggtcaggaggcctgggtgcggaaactgaagtggccagaactgcctaaattcagtcagctgaagtggaaggccctgtacagtgaccctaaatctttggaaacatctgcttttgtcaagtcctacaagaaccttgctttctactggattctgaaagctggtcatatggttccttctgaccaaggggacatggctctgaagatgatgagactggtgactcagcaagaataggatggatggggctggagatgagctggtttggccttggggcacagagctgagctgaggccgctgaagctgtaggaagcgccattcttccctgtatctaactggggctgtgatcaagaaggttctgaccagcttctgcagaggataaaatcattgtctctggaggcaatttggaaattatttctgcttcttaaaaaaacctaagattttttaaaaaattgatttgttttgatcaaaataaaggatgataatagatattattttttcttatgacagaagcaaatgatgtgatttatagaaaaactgggaaatacaggtacccaaagagtaaatcaacatctgtatacccccttcccaggggtaagcactgttaccaatttagcatatgtccttgcagaatttttttttctatatatacatatatattttttaccaaaatgaatcattactctatgttgttttactatttgtttgacatatcagtatatctgaaacaccttttcatgtcaataaatgttcttctctaacatttttaa

SEQ ID NO: 298754 - DNA, 1367 bp, Homo sapiens
ccgggtccagcctgttgctgatgctgccgtgcggtacttgtcatggagctggcactgcggcgctctcccgtcccgcggtggttgctgctgctgccgctgctgctgggcctgaacgcaggagctgtcattgactggcccacagaggagggcaaggaagtatgggattatgtgacggtccgcaaggatgcctacatgttctggtggctctattatgccaccaactcctgcaagaacttctcagaactgcccctggtcatgtggcttcagggcggtccaggcggttctagcactggatttggaaactttgaggaaattgggccccttgacagtgatctcaaaccacggaaaaccacctggctccaggctgccagtctcctatttgtggataatcccgtgggcactgggttcagttatgtgaatggtagtggtgcctatgccaaggacctggctatggtggcttcagacatgatggttctcctgaagaccttcttcagttgccacaaagaattccagacagttccattctacattttctcagagtcctatggaggaaaaatggcagctggcattggtctagagctttataaggccattcagcgagggaccatcaagtgcaactttgcgggggttgccttgggtgattcctggatctcccctgttgattcggtgctctcctggggaccttacctgtacagcatgtctcttctcgaagacaaaggtctggcagaggtgtctaaggttgcagagcaagtactgaatgccgtaaataaggggctctacagagaggccacagagctgtgggggaaagcagaaatgatcattgaacagaacacagatggggtgaacttctataacatcttaactaaaagcactcccacgtctacaatggagtcgagtctagaattcacacagagccacctaggtgagtgaaccttgaagttattaaagtccctgcctcagcctccatgcaaaaagaaacctgtttattaaaaaaaaaaaaaactttattaacatataatttgcataccataaaattaactcactgtaagtggttttcagtatattcccagagttgtgcagtcatcactacaatccagttatggagcatttctgtcaccccaaggagatcccacgtgtctgcttgcagacagttctcattcccactcccagccacaggcaaccactcatctgccttctgtctctctagattttccttttctgaacattttatataaatacaatcgcacaatagttagtcttttgcactggcttctgtcacatagcatgatgtttttgaagtttagaaaccagcttccatacaccaaattacaacatcagttcaagactgaatttagtcatctttcagc

SEQ ID NO: 298755 - DNA, 1263 bp, Homo sapiens
ccgggtccagcctgttgctgatgctgccgtgcggtacttgtcatggagctggcactgcggcgctctcccgtcccgcggtggttgctgctgctgccgctgctgctgggcctgaacgcaggagctgtcattgactggcccacagaggagggcaaggaagtatgggattatgtgacggtccgcaaggatgcctacatgttctggtggctctattatgccaccaactcctgcaagaacttctcagaactgcccctggtcatgtggcttcagggcggtccaggcggttctagcactggatttggaaactttgaggaaattgggccccttgacagtgatctcaaaccacggaaaaccacctggctccaggctgccagtctcctatttgtggataatcccgtgggcactgggttcagttatgtgaatggtagtggtgcctatgccaaggacctggctatggtggcttcagacatgatggttctcctgaagaccttcttcagttgccacaaagaattccagacagttccattctacattttctcagagtcctatggaggaaaaatggcagctggcattggtctagagctttataaggccattcagcgagggaccatcaagtgcaactttgcgggggttgccttgggtgattcctggatctcccctgttgattcggtgctctcctggggaccttacctgtacagcatgtctcttctcgaagacaaaggtctggcagaggtgtctaaggttgcagagcaagtactgaatgccgtaaataaggggctctacagagaggccacagagctgtgggggaaagcagaaatgatcattgaacagaacacagatggggtgaacttctataacatcttaactaaaagcactcccacgtctacaatggagtcgagtctagaattcacacagagccacctagctgaatctgaaaccctccctcttgctgtgcagcatccccagcagcttggtaaagatgtcctcatggccaggcgtggtggctcacacctgtaatcccaccacttgggaggctgaggcgggtggatcatgaggacaagagatcgagaccatcctggccaacatggtgaaaccctgtctctactaaaaatacaaaaatgagctgggcatggtggcgggtgcctgtagttccagctactcgggaggctgaggcaggaaaatcgcttgaacccaggaggcggaggtttcagtgagccgagatcgtgccactgcactccagcctggagacagagagagattctgtct

SEQ ID NO: 298756 - DNA, 1065 bp, Homo sapiens
gtcctcttggccttacttccagccctttgactcactatctaccagtttggttttttgtctttgtcagcgccacgtgagacacctacaacgagatgccttaagccagctcatgaatggccccatcagaaagaagctcaaaattattcctgaggatcaatcctggggaggccaggctaccaacgtctttgtgaacatggaggaggacttcatgaagccagtcattagcattgtggacgagttgctggaggcagggatcaacgtgacggtgtataatggacagctggatctcatcgtagataccatgggtcaggaggcctgggtgcggaaactgaagtggccagaactgcctaaattcagtcagctgaagtggaaggccctgtacagtgaccctaaatctttggaaacatctgcttttgtcaagtcctacaagaaccttgctttctactggattctgaaagctggtcatatggttccttctgaccaaggggacatggctctgaagatgatgagactggtgactcagcaagaataggatggatggggctggagatgagctggtttggccttggggcacagagctgagctgaggccgctgaagctgtaggaagcgccattcttccctgtatctaactggggctgtgatcaagaaggttctgaccagcttctgcagaggataaaatcattgtctctggaggcaatttggaaattatttctgcttcttaaaaaaacctaagattttttaaaaaattgatttgttttgatcaaaataaaggatgataatagatattattttttcttatgacagaagcaaatgatgtgatttatagaaaaactgggaaatacaggtacccaaagagtaaatcaacatctgtatacccccttcccaggggtaagcactgttaccaatttagcatatgtccttgcagaatttttttttctatatatacatatatattttttaccaaaatgaatcattactctatgttgttttactatttgtttgacatatcagtatatctgaaacaccttttcatgtcaataaatgttcttctctaacatttttaa

SEQ ID NO: 298757 - DNA, 924 bp, Homo sapiens
aagatcaacgtgaacggggtgtatggacagctggatctcatcgtagataacatgggaggaggacttcatgaagccagtcattagcattgtggacgagttgctggaggcagggatcaacgtgacggtgtataatggacagctggatctcatcgtagataccatgggtcaggaggcctgggtgcggaaactgaagtggccagaactgcctaaattcagtcagctgaagtggaaggccctgtacagtgaccctaaatctttggaaacatctgcttttgtcaagtcctacaagaaccttgctttctactggattctgaaagctggtcatatggttccttctgaccaaggggacatggctctgaagatgatgagactggtgactcagcaagaataggatggatggggctggagatgagctggtttggccttggggcacagagctgagctgaggccgctgaagctgtaggaagcgccattcttccctgtatctaactggggctgtgatcaagaaggttctgaccagcttctgcagaggataaaatcattgtctctggaggcaatttggaaattatttctgcttcttaaaaaaacctaagattttttaaaaaattgatttgttttgatcaaaataaaggatgataatagatattattttttcttatgacagaagcaaatgatgtgatttatagaaaaactgggaaatacaggtacccaaagagtaaatcaacatctgtatacccccttcccaggggtaagcactgttaccaatttagcatatgtccttgcagaatttttttttctatatatacatatatattttttaccaaaatgaatcattactctatgttgttttactatttgtttgacatatcagtatatctgaaacaccttttcatgtcaataaatgttcttctctaacatttttaa

SEQ ID NO: 298758 - DNA, 1069 bp, Homo sapiens
ccgggtccagcctgttgctgatgctgccgtgcggtacttgtcatggagctggcactgcggcgctctcccgtcccgcggtggttgctgctgctgccgctgctgctgggcctgaacgcaggagctgtcattgactggcccacagaggagggcaaggaagtatgggattatgtgacggtccgcaaggatgcctacatgttctggtggctctattatgccaccaactcctgcaagaacttctcagaactgcccctggtcatgtggcttcagggcggtccaggcggttctagcactggatttggaaactttgaggaaattgggccccttgacagtgatctcaaaccacggaaaaccacctggctccaggctgccagtctcctatttgtggataatcccgtgggcactgggttcagttatgtgaatggtagtggtgcctatgccaaggacctggctatggtggcttcagacatgatggttctcctgaagaccttcttcagttgccacaaagaattccagacagttccattctacattttctcagagtcctatggaggaaaaatggcagctggcattggtctagagctttataaggccattcagcgagggaccatcaagtgcaactttgcgggggttgccttgggtgattcctggatctcccctgttgattcggtgctctcctggggaccttacctgtacagcatgtctcttctcgaagacaaaggtctggcagaggtgtctaaggttgcagagcaagtactgaatgccgtaaataaggggctctacagagaggccacagagctgtgggggaaagcagaaatgatcattgaacaggtaaaaaggggaaacactcagaggcgagcctgcttggctttttctggtgggtacagggcccatggttggtgttgtcaaacttggagtctacactgaggctccccacatatctgcaaatgattgcatgctggataataaatctcttgggtctaagcagtgatgtagtggctccttacagagtcagaaagccacccaggcctgcaagacttgcttgtccttcactaaatgtatggattctatt

SEQ ID NO: 298759 - DNA, 434 bp, Homo sapiens
aagctactccctctttctccttccccatgtgcaggccaggctaccaacgtctttgtgaacatggaggaggacttcatgaagccagtcattagcattgtggacgagttgctggaggcagggatcaacgtgacggtgtataatggacagctggatctcatcgtagataccatgggtaggaattgactctgagaggcacctagaggcagttttatgggttcaactggaagggaactggccttggacatgtcagtcttgcggtgggtgatgttgaaatgccaggtggaaggccatttcccattacatccgtctaccccgaccttgattattcaaagggtggggagctgcacgtggctgtgacccctcagaagcctgagcctacctgggtttgggggcccttaggtatgattaaagaaaagaacaccacctgtctctac

SEQ ID NO: 298760 - DNA, 637 bp, Homo sapiens
gttggatcttcagggactttcaggatggcccggatcagctgtagcattgtgggtgattcctttcctcagagtttcaggttttttcagttacatctagagctgaaatctggatagtacctgcaggaacaatattcctgtagccatggaagagggccaaggctcagtcactccttggatggcctcctaaatctccccgtggcaacaggtccaggagaggcccatggagcagtctcttccatggagtaagaaggaagggagcatgtacgcttggtccaagattggctagttccttgatagcatcttactctcaccttctttgtgtctgtgatgaaaggaacagtctgtgcaatgggttttacttaaacttcactgttcaacctatgagcaaatctgtatgtgtgagtataagttgagcatagcatacttccagaggtggtcttatggagatggcaagaaaggaggaaatgatttcttcagatctcaaaggagtctgaaatatcatatttctgtgtgtgtctctctcagcccctgcccaggctagagggaaacagctactgataatcgaaaactgctgtttgtggcaggaacccctggctgtgcaaataaatggggctgaggcccctgtgtgatattgaaa

SEQ ID NO: 298761 - DNA, 1642 bp, Homo sapiens
tccgacccgccccgcggcgcattgtgggatctgtcggcttgtcaggtggtggaggaaaaggcgctccgtcatggggatccagacgagccccgtcctgctggcctccctgggggtggggctggtcactctgctcggcctggctgtgggctcctacttggttcggaggtcccgccggcctcaggtcactctcctggaccccaatgaaaagtacctgctacgactgctagacaagacgactgtgagccacaacaccaagaggttccgctttgccctgcccaccgcccaccacactctggggctgcctgtgggcaaacatatctacctctccacccgaattgatggcagcctggtcatcaggccatacactcctgtcaccagtgatgaggatcaaggctatgtggatcttgtcatcaaggtctacctgaagggtgtgcaccccaaatttcctgagggagggaagatgtctcagtacctggatagcctgaaggttggggatgtggtggagtttcgggggccaagcgggttgctcacttacactggaaaagggcattttaacattcagcccaacaagaaatctccaccagaaccccgagtggcgaagaaactgggaatgattgccggcgggacaggaatcaccccaatgctacagctgatccgggccatcctgaaagtccctgaagatccaacccagtgctttctgctttttgccaaccagacagaaaaggatatcatcttgcgggaggacttagaggaactgcaggcccgctatcccaatcgctttaagctctggttcactctggatcatcccccaaaagattgggcctacagcaagggctttgtgactgccgacatgatccgggaacacctgcccgctccaggggatgatgtgctggtactgctttgtgggccacccccaatggtgcagctggcctgccatcccaacttggacaaactgggctactcacaaaagatgcgattcacctactgagcatcctccagcttccctggtgctgttcgctgcagttgttccccatcagtactcaagcactataagccttagattcctttcctcagagtttcaggttttttcagttacatctagagctgaaatctggatagtacctgcaggaacaatattcctgtagccatggaagagggccaaggctcagtcactccttggatggcctcctaaatctccccgtggcaacaggtccaggagaggcccatggagcagtctcttccatggagtaagaaggaagggagcatgtacgcttggtccaagattggctagttccttgatagcatcttactctcaccttctttgtgtctgtgatgaaaggaacagtctgtgcaatgggttttacttaaacttcactgttcaacctatgagcaaatctgtatgtgtgagtataagttgagcatagcatacttccagaggtggtcttatggagatggcaagaaaggaggaaatgatttcttcagatctcaaaggagtctgaaatatcatatttctgtgtgtgtctctctcagcccctgcccaggctagagggaaacagctactgataatcgaaaactgctgtttgtggcaggaacccctggctgtgcaaataaatggggctgaggcccctgtgtgatattgaaa

SEQ ID NO: 298762 - DNA, 1589 bp, Homo sapiens
tccgacccgccccgcggcgcattgtgggatctgtcggcttgtcaggtggtggaggaaaaggcgctccgtcatggggatccagacgagccccgtcctgctggcctccctgggggtggggctggtcactctgctcggcctggctgtgggctcctacttggttcggaggtcccgccggcctcaggtcactctcctggaccccaatgaaaagtacctgctacgactgctagacaagacgactgtgagccacaacaccaagaggttccgctttgccctgcccaccgcccaccacactctggggctgcctgtgggcaaacatatctacctctccacccgaattgatggcagcctggtcatcaggccatacactcctgtcaccagtgatgaggatcaaggctatgtggatcttgtcatcaaggtctacctgaagggtgtgcaccccaaatttcctgagggagggaagatgtctcagtacctggatagcctgaaggttggggatgtggtggagtttcgggggccaagcgggttgctcacttacactggaaaagggcattttaacattcagcccaacaagaaatctccaccagaaccccgagtggcgaagaaactgggaatgattgccggcgggacaggaatcaccccaatgctacagctgatccgggccatcctgaaagtccctgaagatccaacccagtgctttctgctttttgccaaccagacagaaaaggatatcatcttgcgggaggacttagaggaactgcaggcccgctatcccaatcgctttaagctctggttcactctggatcatcccccaaaagattgggcctacagcaagggctttgtgactgccgacatgatccgggaacacctgcccgctccaggggatgatgtgctggtactgctttgtgggccacccccaatggtgcagctggcctgccatcccaacttggacaaactgggctactcactgcagttgttccccatcagtactcaagcactataagccttagattcctttcctcagagtttcaggttttttcagttacatctagagctgaaatctggatagtacctgcaggaacaatattcctgtagccatggaagagggccaaggctcagtcactccttggatggcctcctaaatctccccgtggcaacaggtccaggagaggcccatggagcagtctcttccatggagtaagaaggaagggagcatgtacgcttggtccaagattggctagttccttgatagcatcttactctcaccttctttgtgtctgtgatgaaaggaacagtctgtgcaatgggttttacttaaacttcactgttcaacctatgagcaaatctgtatgtgtgagtataagttgagcatagcatacttccagaggtggtcttatggagatggcaagaaaggaggaaatgatttcttcagatctcaaaggagtctgaaatatcatatttctgtgtgtgtctctctcagcccctgcccaggctagagggaaacagctactgataatcgaaaactgctgtttgtggcaggaacccctggctgtgcaaataaatggggctgaggcccctgtgtgatattgaaa

SEQ ID NO: 298763 - DNA, 1683 bp, Homo sapiens
tccgacccgccccgcggcgcattgtgggatctgtcggcttgtcaggtggtggaggaaaaggcgctccgtcatggggatccagacgagccccgtcctgctggcctccctgggggtggggctggtcactctgctcggcctggctgtgggctcctacttggttcggaggtcccgccggcctcaggtcactctcctggaccccaatgaaaagtacctgctacgactgctagacaagacgactgtgagccacaacaccaagaggttccgctttgccctgcccaccgcccaccacactctggggctgcctgtgggcaaacatatctacctctccacccgaattgatggcagcctggtcatcaggccatacactcctgtcaccagtgatgaggatcaaggctatgtggatcttgtcatcaaggtctacctgaagggtgtgcaccccaaatttcctgagggagggaagatgtctcagtacctggatagcctgaaggttggggatgtggtggagtttcgggggccaagcgggttgctcacttacactggaaaagggcattttaacattcagcccaacaagaaatctccaccagaaccccgagtggcgaagaaactgggaatgattgccggcgggacaggaatcaccccaatgctacagctgatccgggccatcctgaaagtccctgaagatccaacccagtgctttctgctttttgccaaccagacagaaaaggatatcatcttgcgggaggacttagaggaactgcaggcccgctatcccaatcgctttaagctctggttcactctggatcatcccccaaaagattgggcctacagcaagggctttgtgactgccgacatgatccgggaacacctgcccgctccaggggatgatgtgctggtactgctttgtgggccacccccaatggtgcagctggcctgccatcccaacttggacaaactgggctactcacaaaagatgcgattcacctactgagcatcctccagcttccctggtgctgttcgctgcagttgttccccatcagtactcaagcactataagccttagattcctttcctcagagtttcaggttttttcagttacatctagagctgaaatctggatagtacctgcaggaacaatattcctgtagccatggaagagggccaaggctcagtcactccttggatggcctcctaaatctccccgtggcaacaggtccaggagaggcccatggagcagtctcttccatggagtaagaaggaagggagcatgtacgcttggtccaagattggctagttccttgatagcatcttactctcaccttctttgtgtctgtgatgaaaggaacagtctgtgcaatgggttttacttaaacttcactgttcaacctatgagcaaatctgtatgtgtgagtataagttgagcatagcatacttccagaggtggtcttatggagatggcaagaaaggaggaaatgatttcttcagatctcaaaggagtctgaaatatcatatttctgtgtgtgtctctctcagcccctgcccaggctagagggaaacagctactgataatcgaaaactgctgtttgtggcaggaacccctggctgtgcaaataaatggggctgaggcccctgtgtgatattgaaacttctaaaactaggggtaccggctcgattcgatctgtctgc

SEQ ID NO: 298764 - DNA, 1569 bp, Homo sapiens
tccgacccgccccgcggcgcattgtgggatctgtcggcttgtcaggtggtggaggaaaaggcgctccgtcatggggatccagacgagccccgtcctgctggcctccctgggggtggggctggtcactctgctcggcctggctgtgggctcctacttggttcggaggtcccgccggcctcaggtcactctcctggaccccaatgaaaagtacctgctacgactgctagacaagacggcaaacatatctacctctccacccgaattgatggcagcctggtcatcaggccatacactcctgtcaccagtgatgaggatcaaggctatgtggatcttgtcatcaaggtctacctgaagggtgtgcaccccaaatttcctgagggagggaagatgtctcagtacctggatagcctgaaggttggggatgtggtggagtttcgggggccaagcgggttgctcacttacactggaaaagggcattttaacattcagcccaacaagaaatctccaccagaaccccgagtggcgaagaaactgggaatgattgccggcgggacaggaatcaccccaatgctacagctgatccgggccatcctgaaagtccctgaagatccaacccagtgctttctgctttttgccaaccagacagaaaaggatatcatcttgcgggaggacttagaggaactgcaggcccgctatcccaatcgctttaagctctggttcactctggatcatcccccaaaagattgggcctacagcaagggctttgtgactgccgacatgatccgggaacacctgcccgctccaggggatgatgtgctggtactgctttgtgggccacccccaatggtgcagctggcctgccatcccaacttggacaaactgggctactcacaaaagatgcgattcacctactgagcatcctccagcttccctggtgctgttcgctgcagttgttccccatcagtactcaagcactataagccttagattcctttcctcagagtttcaggttttttcagttacatctagagctgaaatctggatagtacctgcaggaacaatattcctgtagccatggaagagggccaaggctcagtcactccttggatggcctcctaaatctccccgtggcaacaggtccaggagaggcccatggagcagtctcttccatggagtaagaaggaagggagcatgtacgcttggtccaagattggctagttccttgatagcatcttactctcaccttctttgtgtctgtgatgaaaggaacagtctgtgcaatgggttttacttaaacttcactgttcaacctatgagcaaatctgtatgtgtgagtataagttgagcatagcatacttccagaggtggtcttatggagatggcaagaaaggaggaaatgatttcttcagatctcaaaggagtctgaaatatcatatttctgtgtgtgtctctctcagcccctgcccaggctagagggaaacagctactgataatcgaaaactgctgtttgtggcaggaacccctggctgtgcaaataaatggggctgaggcccctgtgtgatattgaaa

SEQ ID NO: 298765 - DNA, 1609 bp, Homo sapiens
atcgtcgacccacgcgtccgggaaaaggcgctccgtcatggggatccagacgagccccgtcctgctggcctccctgggggtggggctggtcactctgctcggcctggctgtgggctcctacttggttcggaggtcccgccggcctcaggtcactctcctggaccccaatgaaaagtacctgctacgactgctagacaagacgactgtgagccacaacaccaagaggttccgctttgccctgcccaccgcccaccacactctggggctgcctgtgggcaaacatatctacctctccacccgaattgatggcagcctggtcatcaggccatacactcctgtcaccagtgatgaggatcaaggctatgtggatcttgtcatcaaggtctacctgaagggtgtgcaccccaaatttcctgagggagggaagatgtctcagtacctggatagcctgaaggttggggatgtggtggagtttcgggggccaagcgggttgctcacttacactggaaaagggcattttaacattcagcccaacaagaaatctccaccagaaccccgagtggcgaagaaactgggaatgattgccggcgggacaggaatcaccccaatgctacagctgatccgggccatcctgaaagtccctgaagatccaacccagtgctttctgctttttgccaaccagacagaaaaggatatcatcttgcgggaggacttagaggaactgcaggcccgctatcccaatcgctttaagctctggttcactctggatcatcccccaaaagattgggcctacagcaagggctttgtgactgccgacatgatccgggaacacctgcccgctccaggggatgatgtgctggtactgctttgtgggccacccccaatggtgcagctggcctgccatcccaacttggacaaactgggctactcacaaaagatgcgattcacctactgagcatcctccagcttccctggtgctgttcgctgcagttgttccccatcagtactcaagcactataagccttagattcctttcctcagagtttcaggttttttcagttacatctagagctgaaatctggatagtacctgcaggaacaatattcctgtagccatggaagagggccaaggctcagtcactccttggatggcctcctaaatctccccgtggcaacaggtccaggagaggcccatggagcagtctcttccatggagtaagaaggaagggagcatgtacgcttggtccaagattggctagttccttgatagcatcttactctcaccttctttgtgtctgtgatgaaaggaacagtctgtgcaatgggttttacttaaacttcactgttcaacctatgagcaaatctgtatgtgtgagtataagttgagcatagcatacttccagaggtggtcttatggagatggcaagaaaggaggaaatgatttcttcagatctcaaaggagtctgaaatatcatatttctgtgtgtgtctctctcagcccctgcccaggctagagggaaacagctactgataatcgaaaactgctgtttgtggcaggaacccctggctgtgcaaataaatggggctgaggcccctgtgtgatattgaaa

SEQ ID NO: 298766 - DNA, 2616 bp, Homo sapiens
tccgacccgccccgcggcgcattgtgggatctgtcggcttgtcaggtggtggaggaaaaggcgctccgtcatggggatccagacggtaagaccctcattcagtatcctccactgggggacccctccccatctggttctggccactcagctccggaccaggggctgtcgctgccgaccccgccccgcagggctctgggcccaccgtggatgctggggtcccgatcccgcacatccgggctcgggactccgccaggttacccctctgcccttggcatgcctccgcgctggagctcgggatcgccacccctgggacggtcaccacccaagccccgggctcttacccagcctggcggtcacgctgcctcctctacccacagagccccgtcctgctggcctccctgggggtggggctggtcactctgctcggcctggctgtgggctcctacttggttcggaggtcccgccggcctcaggtcactctcctggaccccaatgaaaagtacctgctacgactgctagacaagacggtaagttggggaagaaagggccagggtgaaggaggggaccagagtgctcctggcatggagggtacagcacccacggtggttgggatgtccaagggacgtggcagcgccaggcgcgcttggtgaaacacttgtgtcctccaccctccagactgtgagccacaacaccaagaggttccgctttgccctgcccaccgcccaccacactctggggctgcctgtgggtaaggaaagtgtggaatgggctcctttccctggtatcctcagaaggtgactcccctcctgggatctcatgaaacacgctgcttcaaccggtttgctccacacaccattccccttcccccacttggctctgcatcctccaagctgtgaggtgccactgggcccctctagagtgtggcttccatgacccccatccagctttaacactcaacagtcttgcctcttccctgcaggatttgctaattactccctctgagcaagcactactaactttttcccattgcccagacccttttggctcatctgtcaaggtcctggcagtaactggcaggaaacgctggaaataagtgtttcctcaactgggcgcttataagagatccaactgagggctcaatggggcaaatcttccctgccttgtagctccttgggaccacagcaggaagcaagacatcttgttctctcaaatctctttgagtattttgagggatgcagcacatcacagacaacccttatgtagctctctgcacggtccccaggcaaacatatctacctctccacccgaattgatggcagcctggtcatcaggccatacactcctgtcaccagtgatgaggatcaaggctatgtggatcttgtcatcaaggtctacctgaagggtgtgcaccccaaatttcctgagggagggaagatgtctcagtacctggatagcctgaaggttggggatgtggtggagtttcgggggccaagcgggttgctcacttacactggaaaagggcattttaacattcagcccaacaagaaatctccaccagaaccccgagtggcgaagaaactgggaatgattgccggcgggacaggaatcaccccaatgctacagctgatccgggccatcctgaaagtccctgaagatccaacccagtgctttctgctttttgccaaccagacagaaaaggatatcatcttgcgggaggacttagaggaactgcaggcccgctatcccaatcgctttaagctctggttcactctggatcatcccccaaaagattgggcctacagcaagggctttgtgactgccgacatgatccgggaacacctgcccgctccaggggatgatgtgctggtactgctttgtgggccacccccaatggtgcagctggcctgccatcccaacttggacaaactgggctactcacaaaagatgcgattcacctactgagcatcctccagcttccctggtgctgttcgctgcagttgttccccatcagtactcaagcactataagccttagattcctttcctcagagtttcaggttttttcagttacatctagagctgaaatctggatagtacctgcaggaacaatattcctgtagccatggaagagggccaaggctcagtcactccttggatggcctcctaaatctccccgtggcaacaggtccaggagaggcccatggagcagtctcttccatggagtaagaaggaagggagcatgtacgcttggtccaagattggctagttccttgatagcatcttactctcaccttctttgtgtctgtgatgaaaggaacagtctgtgcaatgggttttacttaaacttcactgttcaacctatgagcaaatctgtatgtgtgagtataagttgagcatagcatacttccagaggtggtcttatggagatggcaagaaaggaggaaatgatttcttcagatctcaaaggagtctgaaatatcatatttctgtgtgtgtctctctcagcccctgcccaggctagagggaaacagctactgataatcgaaaactgctgtttgtggcaggaacccctggctgtgcaaataaatggggctgaggcccctgtgtgatattgaaa

SEQ ID NO: 298767 - DNA, 1758 bp, Homo sapiens
tccgacccgccccgcggcgcattgtgggatctgtcggcttgtcaggtggtggaggaaaaggcgctccgtcatggggatccagacgagccccgtcctgctggcctccctgggggtggggctggtcactctgctcggcctggctgtgggctcctacttggttcggaggtcccgccggcctcaggtcactctcctggaccccaatgaaaagtacctgctacgactgctagacaagacgactgtgagccacaacaccaagaggttccgctttgccctgcccaccgcccaccacactctggggctgcctgtggctccttgggaccacagcaggaagcaagacatcttgttctctcaaatctctttgagtattttgagggatgcagcacatcacagacaacccttatgtagctctctgcacggtccccaggcaaacatatctacctctccacccgaattgatggcagcctggtcatcaggccatacactcctgtcaccagtgatgaggatcaaggctatgtggatcttgtcatcaaggtctacctgaagggtgtgcaccccaaatttcctgagggagggaagatgtctcagtacctggatagcctgaaggttggggatgtggtggagtttcgggggccaagcgggttgctcacttacactggaaaagggcattttaacattcagcccaacaagaaatctccaccagaaccccgagtggcgaagaaactgggaatgattgccggcgggacaggaatcaccccaatgctacagctgatccgggccatcctgaaagtccctgaagatccaacccagtgctttctgctttttgccaaccagacagaaaaggatatcatcttgcgggaggacttagaggaactgcaggcccgctatcccaatcgctttaagctctggttcactctggatcatcccccaaaagattgggcctacagcaagggctttgtgactgccgacatgatccgggaacacctgcccgctccaggggatgatgtgctggtactgctttgtgggccacccccaatggtgcagctggcctgccatcccaacttggacaaactgggctactcacaaaagatgcgattcacctactgagcatcctccagcttccctggtgctgttcgctgcagttgttccccatcagtactcaagcactataagccttagattcctttcctcagagtttcaggttttttcagttacatctagagctgaaatctggatagtacctgcaggaacaatattcctgtagccatggaagagggccaaggctcagtcactccttggatggcctcctaaatctccccgtggcaacaggtccaggagaggcccatggagcagtctcttccatggagtaagaaggaagggagcatgtacgcttggtccaagattggctagttccttgatagcatcttactctcaccttctttgtgtctgtgatgaaaggaacagtctgtgcaatgggttttacttaaacttcactgttcaacctatgagcaaatctgtatgtgtgagtataagttgagcatagcatacttccagaggtggtcttatggagatggcaagaaaggaggaaatgatttcttcagatctcaaaggagtctgaaatatcatatttctgtgtgtgtctctctcagcccctgcccaggctagagggaaacagctactgataatcgaaaactgctgtttgtggcaggaacccctggctgtgcaaataaatggggctgaggcccctgtgtgatattgaaa

SEQ ID NO: 298768 - DNA, 1750 bp, Homo sapiens
taacgcggctggtccggccacggggttatgggctcaggtggtggaggcaccggcgctccgtcatggggatccagacgagccccgtcctgctggcctccctgggggtggggctggtcactctgctcggcctggctgtgggctcctacttggttcggaggtcccgccggcctcaggtcactctcctggaccccaatgaaaagtacctgctacgactgctagacaagacgactgtgagccacaacaccaagaggttccgctttgccctgcccaccgcccaccacactctggggctgcctgtggctccttgggaccacagcaggaagcaagacatcttgttctctcaaatctctttgagtattttgagggatgcagcacatcacagacaacccttatgtagctctctgcacggtccccaggcaaacatatctacctctccacccgaattgatggcagcctggtcatcaggccatacactcctgtcaccagtgatgaggatcaaggctatgtggatcttgtcatcaaggtctacctgaagggtgtgcaccccaaatttcctgagggagggaagatgtctcagtacctggatagcctgaaggttggggatgtggtggagtttcgggggccaagcgggttgctcacttacactggaaaagggcattttaacattcagcccaacaagaaatctccaccagaaccccgagtggcgaagaaactgggaatgattgccggcgggacaggaatcaccccaatgctacagctgatccgggccatcctgaaagtccctgaagatccaacccagtgctttctgctttttgccaaccagacagaaaaggatatcatcttgcgggaggacttagaggaactgcaggcccgctatcccaatcgctttaagctctggttcactctggatcatcccccaaaagattgggcctacagcaagggctttgtgactgccgacatgatccgggaacacctgcccgctccaggggatgatgtgctggtactgctttgtgggccacccccaatggtgcagctggcctgccatcccaacttggacaaactgggctactcacaaaagatgcgattcacctactgagcatcctccagcttccctggtgctgttcgctgcagttgttccccatcagtactcaagcactataagccttagattcctttcctcagagtttcaggttttttcagttacatctagagctgaaatctggatagtacctgcaggaacaatattcctgtagccatggaagagggccaaggctcagtcactccttggatggcctcctaaatctccccgtggcaacaggtccaggagaggcccatggagcagtctcttccatggagtaagaaggaagggagcatgtacgcttggtccaagattggctagttccttgatagcatcttactctcaccttctttgtgtctgtgatgaaaggaacagtctgtgcaatgggttttacttaaacttcactgttcaacctatgagcaaatctgtatgtgtgagtataagttgagcatagcatacttccagaggtggtcttatggagatggcaagaaaggaggaaatgatttcttcagatctcaaaggagtctgaaatatcatatttctgtgtgtgtctctctcagcccctgcccaggctagagggaaacagctactgataatcgaaaactgctgtttgtggcaggaacccctggctgtgcaaataaatggggctgaggcccctgtgtgatattgaaa

SEQ ID NO: 298769 - DNA, 2008 bp, Homo sapiens
tccgacccgccccgcggcgcattgtgggatctgtcggcttgtcaggtggtggaggaaaaggcgctccgtcatggggatccagacgagccccgtcctgctggcctccctgggggtggggctggtcactctgctcggcctggctgtgggctcctacttggttcggaggtcccgccggcctcaggtcactctcctggaccccaatgaaaagtacctgctacgactgctagacaagacgactgtgagccacaacaccaagaggttccgctttgccctgcccaccgcccaccacactctggggctgcctgtgggcaaacatatctacctctccacccgaattgatggcagcctggtcatcaggccatacactcctgtcaccagtgatgaggatcaaggctatgtggatcttgtcatcaaggtctacctgaagggtgtgcaccccaaatttcctgagggagggaagatgtctcagtacctggatagcctgaaggttggggatgtggtggagtttcgggggccaagcgggttgctcacttacactggaaaagggcattttaacattcagcccaacaagaaatctccaccagaaccccgagtggcgaagaaactgggaatgattgccggcgggacaggaatcaccccaatgctacagctgatccgggccatcctgaaagtccctgaagatccaacccagtgctttctgctttttgccaaccagacagaaaaggatatcatcttgcgggaggacttagaggaactgcaggcccgctatcccaatcgctttaagctctggttcactctggatcatcccccaaaaggtatccttcccatttttggacatcccactatcccctcatcgtcaaaatcaaagccttgcccctttgtgaattctggcttcattgaaatcaaccttgcctcacactgccaactcggaagtttgagtgcacagacacagtgatctcctggtccctttcctttgggttcctgtttaccaggtgggtgacagggatggcggtgctgctaaggctcagcttgaggcaggctgagtatacccattcccagctgctgctaccacttgacactttctccagagcctttcagggccctccccagtctcatggcaccacacccccttgccagcatgtatctggagtattaagtactttcttctccccatacttcagattgggcctacagcaagggctttgtgactgccgacatgatccgggaacacctgcccgctccaggggatgatgtgctggtactgctttgtgggccacccccaatggtgcagctggcctgccatcccaacttggacaaactgggctactcacaaaagatgcgattcacctactgagcatcctccagcttccctggtgctgttcgctgcagttgttccccatcagtactcaagcactataagccttagattcctttcctcagagtttcaggttttttcagttacatctagagctgaaatctggatagtacctgcaggaacaatattcctgtagccatggaagagggccaaggctcagtcactccttggatggcctcctaaatctccccgtggcaacaggtccaggagaggcccatggagcagtctcttccatggagtaagaaggaagggagcatgtacgcttggtccaagattggctagttccttgatagcatcttactctcaccttctttgtgtctgtgatgaaaggaacagtctgtgcaatgggttttacttaaacttcactgttcaacctatgagcaaatctgtatgtgtgagtataagttgagcatagcatacttccagaggtggtcttatggagatggcaagaaaggaggaaatgatttcttcagatctcaaaggagtctgaaatatcatatttctgtgtgtgtctctctcagcccctgcccaggctagagggaaacagctactgataatcgaaaactgctgtttgtggcaggaacccctggctgtgcaaataaatggggctgaggcccctgtgtgatattgaaa

SEQ ID NO: 298770 - DNA, 835 bp, Homo sapiens
tccgacccgccccgcggcgcattgtgggatctgtcggcttgtcaggtggtggaggaaaaggcgctccgtcatggggatccagacgagccccgtcctgctggcctccctgggggtggggctggtcactctgctcggcctggctgtgggctcctacttggttcggaggtcccgccggcctcaggtcactctcctggaccccaatgaaaagtactgcagttgttccccatcagtactcaagcactataagccttagattcctttcctcagagtttcaggttttttcagttacatctagagctgaaatctggatagtacctgcaggaacaatattcctgtagccatggaagagggccaaggctcagtcactccttggatggcctcctaaatctccccgtggcaacaggtccaggagaggcccatggagcagtctcttccatggagtaagaaggaagggagcatgtacgcttggtccaagattggctagttccttgatagcatcttactctcaccttctttgtgtctgtgatgaaaggaacagtctgtgcaatgggttttacttaaacttcactgttcaacctatgagcaaatctgtatgtgtgagtataagttgagcatagcatacttccagaggtggtcttatggagatggcaagaaaggaggaaatgatttcttcagatctcaaaggagtctgaaatatcatatttctgtgtgtgtctctctcagcccctgcccaggctagagggaaacagctactgataatcgaaaactgctgtttgtggcaggaacccctggctgtgcaaataaatggggctgaggcccctgtgtgatattgaaa

SEQ ID NO: 298771 - DNA, 495 bp, Homo sapiens
  misc_feature (23)..(23): n is a, c, g, or t
  misc_feature (28)..(28): n is a, c, g, or t
gccacggtagataaggaggcatncaagnagtgactgagccttggcctcttccatggctacaggaatattgagaggcccatggagcagtctcttccatggagtaagaaggaagggagcatgtacgcttggtccaagattggctagttccttgatagcatcttactctcaccttctttgtgtctgtgatgaaaggaacagtctgtgcaatgggttttacttaaacttcactgttcaacctatgagcaaatctgtatgtgtgagtataagttgagcatagcatacttccagaggtggtcttatggagatggcaagaaaggaggaaatgatttcttcagatctcaaaggagtctgaaatatcatatttctgtgtgtgtctctctcagcccctgcccaggctagagggaaacagctactgataatcgaaaactgctgtttgtggcaggaacccctggctgtgcaaataaatggggctgaggcccctgtgtgatattgaaa

SEQ ID NO: 298772 - DNA, 1626 bp, Homo sapiens
tccgacccgccccgcggcgcattgtgggatctgtcggcttgtcaggtggtggaggaaaaggcgctccgtcatggggatccagacggtaagaccctcattcagtatcctccactgggggacccctccccatctggttctggccactcagctccggaccaggggctgtcgctgccgaccccgccccgcagggctctgggcccaccgtggatgctggggtcccgatcccgcacatccgggctcgggactccgccaggttacccctctgcccttggcatgcctccgcgctggagctcgggatcgccacccctgggacggtcaccacccaagccccgggctcttacccagcctggcggtcacgctgcctcctctacccacagagccccgtcctgctggcctccctgggggtggggctggtcactctgctcggcctggctgtgggctcctacttggttcggaggtcccgccggcctcaggtcactctcctggaccccaatgaaaagtacctgctacgactgctagacaagacggtaagttggggaagaaagggccagggtgaaggaggggaccagagtgctcctggcatggagggtacagcacccacggtggttgggatgtccaagggacgtggcagcgccaggcgcgcttggtgaaacacttgtgtcctccaccctccagactgtgagccacaacaccaagaggttccgctttgccctgcccaccgcccaccacactctggggctgcctgtgggtaaggaaagtgtggaatgggctcctttccctggtatcctcagaaggtgactcccctcctgggatctcatgaaacacgctgcttcaaccggtttgctccacacaccattccccttcccccacttggctctgcatcctccaagctgtgaggtgccactgggcccctctagagtgtggcttccatgacccccatccagctttaacactcaacagtcttgcctcttccctgcaggatttgctaattactccctctgagcaagcactactaactttttcccattgcccagacccttttggctcatctgtcaaggtcctggcagtaactggcaggaaacgctggaaataagtgtttcctcaactgggcgcttataagagatccaactgagggctcaatggggcaaatcttccctgccttgtagctccttgggaccacagcaggaagcaagacatcttgttctctcaaatctctttgagtattttgagggatgcagcacatcacagacaacccttatgtagctctctgcacggtccccaggcaaacatatctacctctccacccgaattgatggcagcctggtcatcaggccatacactcctgtcaccagtgatgaggatcaaggctatgtggatcttgtcatcaaggtaaggggctaggaagggacccaggggctgcttacccattctttctgggatttgtagaaatttctaagatttgcctgacagcaggaaatggtatgtactctgtggatgtgaagaaagtatgagctactcaggagactgaggcaggagactcacttgaacccaggaggcggaggttgcagtgagccaagattgcgccactgcactcaagcctgggcagcaagagcaaaactctgactc

SEQ ID NO: 298773 - DNA, 989 bp, Homo sapiens
tccgacccgccccgcggcgcattgtgggatctgtcggcttgtcaggtggtggaggaaaaggcgctccgtcatggggatccagacgagccccgtcctgctggcctccctgggggtggggctggtcactctgctcggcctggctgtgggctcctacttggttcggaggtcccgccggcctcaggtcactctcctggaccccaatgaaaagtacctgctacgactgctagacaagacgactgtgagccacaacaccaagaggttccgctttgccctgcccaccgcccaccacactctggggctgcctgtgggcaaacatatctacctctccacccgaattgatggcagcctggtcatcaggccatacactcctgtcaccagtgatgaggatcaaggctatgtggatcttgtcatcaaggtctacctgaagggtgtgcaccccaaatttcctgagggagggaagatgtctcagtacctggatagcctgaaggttggggatgtggtggagtttcgggggccaagcgggttgctcacttacactggaaaagggcattttaacattcagcccaacaagaaatctccaccagaaccccgagtggcgaagaaactgggaatgattgccggcgggacaggtgcattacactgagggcctttctctcccaccattgttgactgttgccatgcaaattcctaggtgaccctctgaagactggtaaccatagccaagctgttgttcatcaggggatttccagcaatgcttagaactccctagtatctgaaaaacaaaatcataagcaggtagaaaccaaaaaaaattttaactgatggaattagagaaacaaattaaatgagctttcctcattttgaatggatctaatagttttaggtgagagaagagagaagcagctaggaatgactagctaggaagaaagaaaattagcattggacactactgtgcattagacactgtgtagtctaatacactactatat

SEQ ID NO: 298774 - DNA, 546 bp, Homo sapiens
gcatcgacccactgtgtccagcccacatatttctttctgtgtatatttatacttacagcataagtataatttcttttaaaaaccactttcttcataaatatcttcagctgtgaagtaaaactatcaggtaagagatggagacagtcatttgtgtgtacatacaccacacacacaaactaacacacacacacataaaatttatggcatgtggttgtgcagtgctgttcaatcaaggcctccagaacttatatcacattctgagtatgatgtagtttatatggacagctaagtggttaattaatttcttcaatgaaactgtattgaacactgagcacttaagtgcaaagcacttaagtatagtagtgaacaagtgtttctgctcgcgcagaactcacaactgattaggggtaaggatgagaaaatcaggtgtgataaatgctgtgctagggggagcatagagttttatgggaacacataggaaggaaatctaagtcagatttggagagtcggagtggacttcctgatagtgacatctaagctaacctg

SEQ ID NO: 298775 - DNA, 552 bp, Homo sapiens
tcggcatcttggcaacatatttatgtttaagggacttaaggttaaaaggtttttgtctggcctgggaacactctatcttccctagggtttggaggtttggggaaaacttttaacaacttatcaaatatttgcaattagccattttttggagaacaaattgttactgagaatgtcataggaaatgttccctataagctgcatgctaccattactctcctgcttcttatgataatctctttagccacctagcttcatgtggtagaaagttattattttctataaagaaagaagaatgtggttcgagttcttgtaactacttctcccaaagttggaactacacagaatgactgaataagcagaatgcaaaattggggtttaattgattttgtgtgtgctgtttccaaggaccacttagtgggcccattcttatagctagaaatcgacaatatcgggagtgtttacacaaggaagtaggccttctcctacttcccacccttcagagatgagagactgctattatccatttaccagcgcaccactggaaagaatagt

SEQ ID NO: 298776 - DNA, 267 bp, Homo sapiens
ggaggttgcagtgagccgagatcacaccacttgcactccagcctgggcaatagagcgaaacttagtctcaaaaaaaaaaaaaaacaaaaaaaaacaaatgtaggcttggagctgccggtggccatctagctgtcagaaggcaagaagagatttgaaaataaggcccaggccaggcgcggtggctcacacctgtaatcccagcactttgagaggccgaggccggcggataacctgaggtcaggagttccagaccagactggccaacat

SEQ ID NO: 298777 - DNA, 1594 bp, Homo sapiens
ctggactgccgcgggggattctgggccaagatggcagcaatgaggaaggcgcttccgcggcgactggtgggcttggcgtccctccgggctgtcagcacctcatctatgggcactttaccaaagcgggtgaaaattgtggaagttggtccccgagatggactacaaaatgaaaagaatatcgtatctactccagtgaaaatcaagctgatagacatgctttctgaagcaggactctctgttatagaaaccaccagctttgtgtctcctaagtgggttccccagatgggtgaccacactgaagtcttgaagggcattcagaagtttcctggcatcaactacccagtcctgaccccaaatttgaaaggcttcgaggcagcggttgctgctggagccaaggaagtagtcatctttggagctgcctcagagctcttcaccaagaagaacatcaattgttccatagaggagagttttcagaggtttgacgcaatcctgaaggcagcgcagtcagccaatatttctgtgcgggggtacgtctcctgtgctcttggctgcccttatgaagggaagatctccccagctaaagtagctgaggtcaccaagaagttctactcaatgggctgctacgagatctccctgggggacaccattggtgtgggcaccccagggatcatgaaagacatgctgtctgctgtcatgcaggaagtgcctctggctgccctggctgtccactgccatgacacctatggtcaagccctggccaacaccttgatggccctgcagatgggagtgagtgtcgtggactcttctgtggcaggacttggaggctgtccctacgcacagggggcatcaggaaacttggccacagaagacctggtctacatgctagagggcttgggcattcacacgggtgtgaatctccagaagcttctggaagctggaaactttatctgtcaagccctgaacagaaaaactagctccaaagtggctcaggctacctgtaaactctgagccccttgcccacctgaagccctggggatgatgtggaaataggggcacacacagatgattcatggatggggacatggaaatgagaataggttaaatggtgcaggtacctcatagccagctctacacagaggtctctcctggcagaaagcaggcgaagggcaggaggagctgcttggcagaaggacctcctgcccagacctgaggagtgagaggctttgagggctgaagtctccctttgttacggaccctggcccaggagttgaatgcctgaggacgtgtgggaaccccgttccctacttagcatgatccttgagtctcctctctggatggaatccgcgagctggccacctggccaccctctacacggctccaccctgccatggccgtggggcccttgctctctgacttctcaggacacaggtcatggaggttcttcccaagctggcagaggccatttgtggaaagtggagagctacgtggtggccatctgccaactccagcatctctggaaaatctccacgctgaatgtgatttttgaaaacagcttatgtaattaaaggttgaatggcacatcataattccagca

SEQ ID NO: 298778 - DNA, 2020 bp, Homo sapiens
ctggactgccgcgggggattctgggccaagatggcagcaatgaggaaggcgcttccgcggcgactggtgggcttggcgtccctccgggctgtcagcacctcatctatgggcactttaccaaagcgggtgaaaattgtggaagttggtccccgagatggactacaaaatgaaaagaatatcgtatctactccagtgaaaatcaagctgatagacatgctttctgaagcaggactctctgttatagaaaccaccagctttgtgtctcctaagtgggttccccagatgggtgaccacactgaagtcttgaagggcattcagaagtttcctggcatcaactacccagtcctgaccccaaatttgaaaggcttcgaggcagcggttgctgctggagccaaggaagtagtcatctttggagctgcctcagagctcttcaccaagaagaacatcaattgttccatagaggagagttttcagaggtttgacgcaatcctgaaggcagcgcagtcagccaatatttctgtgcgggggtacgtctcctgtgctcttggctgcccttatgaagggaagatctccccagctaaagtagctgaggtgtgtgcatgtgtcagggcggggggtttggtgagggttggccaccttgtctgcccctgagcgcataggttcctctccccaccctttctggcaggttcctgacttcattcattcacccagctccttcattaagctcctgctgtgagcacagccctgcacttgctccctagaggcccccctcctagccgaacatgtagtccttgaagcccctggcctctatccagcctgaaaacctccaattcagtttccagtctggtcgttgaggtgattctctgaggaggggctccttacccaggagttcccatagttccttgtagtgattgaaaggccacaaccctgatgtcctctgaacagtcaccaggtcaacactgagaagaacatggcatgggaattgagtttgaccagcccaagaacttatgtcatttagtcctcaaaaccactgtgcaaatttggtattattattcccttttacagttgagaaaactgacactaaataacttgccacacaggttacaaatggtgaaatcaggtatcaaaccccattttttctctctccaaagcccacttcttcccaggatactttgtggcatccagataggtggaatggtaacagtagcaactgtttcttgagagcagctgccctgctccaggtcttagcctcagttgccacaatccttgccatatgaccaaagggtcatcaccatttttcagaagcagaaattgaagctcagaaaagtgaagttgcttgccaaggcccacagctagtgaacagcagaactaggactttaacccagcatctcgtgacttcaaaggcctgctccttcccctgcaccctgctgccccctaaaggccagccactgccgccccacactctgcagggccactggggaagcgacgtcaccatttcatttatttagcagatcactggtgtcttctggtcccctttccctgccacatccctctgcaccttgtccagcagccccgtgtgggcagcagctccttgggtgaggccatctttttttaagttcaccagtcgtatgggattaggggcccaccctattccagtatggcttattccaattggacccatattggacctattccaatatggacccattttgcagtggttttagagatgtgcaaatgggcttccaaaaatttaaatagtgatgtacctctattaaaaaatataactattggccgggcacggtggctcacgcctgtaatcccagcactttgggaggctgagatgggcagatcacaaggtcaggagatcgagaccatcctggctaacatggtgcaaccccgtctctactaaaaatacaaaaaattagccgggggtggtggtgggcgccggtagtcccagctactcgggaggctgagaaaggagaatggcgtgaacccgggaggcggagcttgcagtgagctg

SEQ ID NO: 298779 - DNA, 1597 bp, Homo sapiens
ctgaattgtgccgaattcggcacgagctccgcccagctgcaggtgttgattgcacactgatcagaaatgtgtgttaaacagccctgcctcagttctgctagccagtacgtctcctgtgctcttggctgcccttatgaagggaagatctccccagctaaagtagctgaggtgtgtgcatgtgtcagggcggggggtttggtgagggttggccaccttgtctgcccctgagcgcataggttcctctccccaccctttctggcaggttcctgacttcattcattcacccagctccttcattaagctcctgctgtgagcacagccctgcacttgctccctagaggcccccctcctagccgaacatgtagtccttgaagcccctggcctctatccagcctgaaaacctccaattcagtttccagtctggtcgttgaggtgattctctgaggaggggctccttacccaggagttcccatagttccttgtagtgattgaaaggccacaaccctgatgtcctctgaacagtcaccaggtcaacactgagaagaacatggcatgggaattgagtttgaccagcccaagaacttatgtcatttagtcctcaaaaccactgtgcaaatttggtattattattcccttttacagttgagaaaactgacactaaataacttgccacacaggttacaaatggtgaaatcaggtatcaaaccccattttttctctctccaaagcccacttcttcccaggatactttgtggcatccagataggtggaatggtaacagtagcaactgtttcttgagagcagctgccctgctccaggtcttagcctcagttgccacaatccttgccatatgaccaaagggtcatcaccatttttcagaagcagaaattgaagctcagaaaagtgaagttgcttgccaaggcccacagctagtgaacagcagaactaggactttaacccagcatctcgtgacttcaaaggcctgctccttcccctgcaccctgctgccccctaaaggccagccactgccgccccacactctgcagggccactggggaagcgacgtcaccatttcatttatttagcagatcactggtgtcttctggtcccctttccctgccacatccctctgcaccttgtccagcagccccgtgtgggcagcagctccttgggtgaggccatctttttttaagttcaccagtcgtatgggattaggggcccaccctattccagtatggcttattccaattggacccatattggacctattccaatatggacccattttgcagtggttttagagatgtgcaaatgggcttccaaaaatttaaatagtgatgtacctctattaaaaaatataactattggccgggcacggtggctcacgcctgtaatcccagcactttgggaggctgagatgggcagatcacaaggtcaggagatcgagaccatcctggctaacatggtgcaaccccgtctctactaaaaatacaaaaaattagccgggggtggtggtgggcgccggtagtcccagctactcgggaggctgagaaaggagaatggcgtgaacccgggaggcggagcttgcagtgagctg

SEQ ID NO: 298780 - DNA, 382 bp, Homo sapiens
gtctcccttggttcctagatgggtgaccacactgaagtcttgaagggcattcagaagtttcctggcatcaactacccagtcctgaccccaaatttgaaaggcttcgaggcagcggttgctgctggagccaaggaagtagtcatctttggagctgcctcagagcttccaccctgccatggccgtggggcccttgctctctgacttctcaggacacaggtcatggaggttcttcccaagctggcagaggccatttgtggaaagtggagagctacgtggtggccatctgccaactccagcatctctggaaaatctccacgctgaatgtgatttttgaaaacagcttatgtaattaaaggttgaatggcacatcataattccagca

SEQ ID NO: 298781 - DNA, 1445 bp, Homo sapiens
ctggactgccgcgggggattctgggccaagatggcagcaatgaggaaggcgcttccgcggcgactggtgggcttggcgtccctccgggctgtcagcacctcatctatgggcactttaccaaagcgggtgaaaattgtggaagttggtccccgagatggactacaaaatgaaaagaatatcgtatctactccagtgaaaatcaagctgatagacatgctttctgaagcaggactctctgttatagaaaccaccagctttgtgtctcctaagtgggttccccagatgggtgaccacactgaagtcttgaagggcattcagaagtttcctggcatcaactacccagtcctgaccccaaatttgaaaggcttcgaggcagcggtacgtctcctgtgctcttggctgcccttatgaagggaagatctccccagctaaagtagctgaggtcaccaagaagttctactcaatgggctgctacgagatctccctgggggacaccattggtgtgggcaccccagggatcatgaaagacatgctgtctgctgtcatgcaggaagtgcctctggctgccctggctgtccactgccatgacacctatggtcaagccctggccaacaccttgatggccctgcagatgggagtgagtgtcgtggactcttctgtggcaggacttggaggctgtccctacgcacagggggcatcaggaaacttggccacagaagacctggtctacatgctagagggcttgggcattcacacgggtgtgaatctccagaagcttctggaagctggaaactttatctgtcaagccctgaacagaaaaactagctccaaagtggctcaggctacctgtaaactctgagccccttgcccacctgaagccctggggatgatgtggaaataggggcacacacagatgattcatggatggggacatggaaatgagaataggttaaatggtgcaggtacctcatagccagctctacacagaggtctctcctggcagaaagcaggcgaagggcaggaggagctgcttggcagaaggacctcctgcccagacctgaggagtgagaggctttgagggctgaagtctccctttgttacggaccctggcccaggagttgaatgcctgaggacgtgtgggaaccccgttccctacttagcatgatccttgagtctcctctctggatggaatccgcgagctggccacctggccaccctctacacggctccaccctgccatggccgtggggcccttgctctctgacttctcaggacacaggtcatggaggttcttcccaagctggcagaggccatttgtggaaagtggagagctacgtggtggccatctgccaactccagcatctctggaaaatctccacgctgaatgtgatttttgaaaacagcttatgtaattaaaggttgaatggcacatcataattccagca

SEQ ID NO: 298782 - DNA, 1381 bp, Homo sapiens
ctggactgccgcgggggattctgggccaagatggcagcaatgaggaaggcgcttccgcggcgactggtgggcttggcgtccctccgggctgtcagcacctcatctatgggcactttaccaaagcgggtgaaaattgtggaagttggtccccgagatggactacaaaatgaaaagaatatcgtatctactccagtgaaaatcaagctgatagacatgctttctgaagcaggactctctgttatagaaaccaccagctttgtgtctcctaagtgggttccccagatgggtgaccacactgaagtcttgaagggcattcagaagtttcctggcatcaactacccagtcctgaccccaaatttgaaaggcttcgaggcagcggtcaccaagaagttctactcaatgggctgctacgagatctccctgggggacaccattggtgtgggcaccccagggatcatgaaagacatgctgtctgctgtcatgcaggaagtgcctctggctgccctggctgtccactgccatgacacctatggtcaagccctggccaacaccttgatggccctgcagatgggagtgagtgtcgtggactcttctgtggcaggacttggaggctgtccctacgcacagggggcatcaggaaacttggccacagaagacctggtctacatgctagagggcttgggcattcacacgggtgtgaatctccagaagcttctggaagctggaaactttatctgtcaagccctgaacagaaaaactagctccaaagtggctcaggctacctgtaaactctgagccccttgcccacctgaagccctggggatgatgtggaaataggggcacacacagatgattcatggatggggacatggaaatgagaataggttaaatggtgcaggtacctcatagccagctctacacagaggtctctcctggcagaaagcaggcgaagggcaggaggagctgcttggcagaaggacctcctgcccagacctgaggagtgagaggctttgagggctgaagtctccctttgttacggaccctggcccaggagttgaatgcctgaggacgtgtgggaaccccgttccctacttagcatgatccttgagtctcctctctggatggaatccgcgagctggccacctggccaccctctacacggctccaccctgccatggccgtggggcccttgctctctgacttctcaggacacaggtcatggaggttcttcccaagctggcagaggccatttgtggaaagtggagagctacgtggtggccatctgccaactccagcatctctggaaaatctccacgctgaatgtgatttttgaaaacagcttatgtaattaaaggttgaatggcacatcataattccagca

SEQ ID NO: 298783 - DNA, 1679 bp, Homo sapiens
ctggactgccgcgggggattctgggccaagatggcagcaatgaggaaggcgcttccgcggcgactggtgggcttggcgtccctccgggctgtcagcacctcatctatgggcactttaccaaagcgggtgaaaattgtggaagttggtccccgagatggactacaaaatgaaaagaatatcgtatctactccagtgaaaatcaagctgatagacatgctttctgaagcaggactctctgttatagaaaccaccagctttgtgtctcctaagtgggttccccagatgggtgaccacactgaagtcttgaagggcattcagaagtttcctggcatcaactacccagtcctgaccccaaatttgaaaggcttcgaggcagcggttgctgctggagccaaggaagtagtcatctttggagctgcctcagagctcttcaccaagaagaacatcaattgttccatagaggagagttttcagaggtttgacgcaatcctgaaggcagcgcagtcagccaatatttctgtgcgggggtacgtctcctgtgctcttggctgcccttatgaagggaagatctccccagctaaagtagctgaggtcaccaagaagttctactcaatgggctgctacgagatctccctgggggacaccattggtgtgggcaccccagggatcatgaaagacatgctgtctgctgtcatgcaggaagtgcctctggctgccctggctgtccactgccatgacacctatggtcaagccctggccaacaccttgatggccctgcagatgggagtgagtgtcgtggactcttctgtggcaggacttggaggctgtccctacgcacagggggcatcaggaaacttggccacagaagacctggtctacatgctagagggcttgggcattcacacgggtgtgaatctccagaagcttctggaagctggaaactttatctgtcaagccctgaacagaaaaactagctccaaagtggctcaggctacctgtaaactctgagccccttgcccacctgaagccctggggatgatgtggaaataggggcacacacagatgattcatggatggggacatggaaatgagaataggttaaatggtgcaggtacctcatagccagctctacacagaggtctctcctggcagaaagcaggcgaagggcaggaggagctgcttggcagaaggacctcctgcccagacctgaggagtgagaggctttgagggctgaagtctccctttgttacggaccctggcccaggagttgaatgcctgaggacgtgtgggaaccccgttccctacttagcatgatccttgagtctcctctctggatggaatccgcgaaggaaacttggccacagaagacctggtctacatgctagagggcttgggcattcacacgggtcgtgaatctccagaagcttccggaagctgcgataccttatattgccgaatcactgatctgacacagtagccccctattgcctcaatttagcatgtcgactccgatccccttgcccacctgaagccctggggatgatgtggaaataggggcacacacagatgattcatggatggggacatggaaatgagaataggttaaatggtgcagtacctcatagccagctctacacagagtctctcctgcagcagcgcgaagtgcattgcggtacccg

SEQ ID NO: 298784 - DNA, 1253 bp, Homo sapiens
ctggactgccgcgggggattctgggccaagatggcagcaatgaggaaggcgcttccgcggcgactggtgggcttggcgtccctccgggctgtcagcacctcatctatgggcactttaccaaagcgggtgaaaattgtggaagttggtccccgagatggactacaaaatgaaaagaatatcgtatctactccagtgaaaatcaagctgatagacatgctttctgaagcaggactctctgttatagaaaccaccagctttgtgtctcctaagtgggttccccagatgggtgaccacactgaagtcttgaagggcattcagaagtttcctggcatcaactacccagtcctgaccccaaatttgaaaggcttcgaggcagcggttgctgctggagccaaggaagtagtcatctttggagctgcctcagagctcttcaccaagaagaacatcaattgttccatagaggagagttttcagaggtttgacgcaatcctgaaggcagcgcagtcagccaatatttctgtgcgggggtacgtctcctgtgctcttggctgcccttatgaagggaagatctccccagctaaagtagctgaggtcaccaagaagttctactcaatgggctgctacgagatctccctgggggacaccattggtgtgggcaccccagggatcatgaaagacatgctgtctgctgtcatgcaggaagtgcctctggctgccctggctgtccactgccatgacacctatggtcaagccctggccaacaccttgatggccctgcagcttactgtgataccctgccctggttcctgggctttccttcagctcatgcgtttcccagccaggcagacaggaagagtgacttcctctcctatgccttgccaggcaggtaaaggggaattctgcacagctgagggaacaggttgagctgtgtgacgtctggcagtagcttcctctgacctccctcttccatcagttacttcggaaatatggatcgatgtgccaggttaagtgctgacttagacaatggtaacaagacccaatccctgccctctgggagctcatgttatggtgggtggggaagacagatggaagattacaggcgtgtaaatagcacattgtaagaccatttattcacctattaaaacctaacctaacggtgcctagtgtgctaggcactgttctcagcattaaggattcagctgtgaccaaaacagagtctctgccctcatgaggctgacactctagtactatga

SEQ ID NO: 298785 - DNA, 947 bp, Homo sapiens
ctggactgccgcgggggattctgggccaagatggcagcaatgaggaaggcgcttccgcggcgactggtgggcttggcgtccctccgggctgtcagcacctcatctatgggcactttaccaaagcgggtgaaaattgtggaagttggtccccgagatggactacaaaatgaaaagaatatcgtatctactccagtgaaaatcaagctgatagacatgctttctgaagcaggactctctgttatagaaaccaccagctttgtgtctcctaagtgggttccccagatgggtgaccacactgaagtcttgaagggcattcagaagtttcctggcatcaactacccagtcctgaccccaaatttgaaaggcttcgaggcagcggtaagaggatagcttgttggtgggggctcctgaaatgagattgatggcattggtccctgccttgtcttggcgcctcagtcccctgtcctgggatgtccatctgaatagcttgtctgtcagccagaccctggggcaaacctggccctgccactcactgctctgtgatcttgacaagttgacaagcctataaaatagggctaaatgatagtacctgaagttgtgagcatttcagaagataggatgcatgtacattgcttagcaagagccagataaaaggtaactgcttaataaatgttagctcttttgattatccacttctttagagaaatgtaaccaaactctccacaagagtttcaacagtagttgctggcatctgccaactttcttacaattttagacaagaacatctttggaggcgttggttctgtatttaggcaaaaacctttttttggctgggcacagtggctcacacctataatcccagcactttgggaggctgaggccggagaacagcttgaggccagaagcttgagaccagcctgagcaacataaggagaccttgtctctac

SEQ ID NO: 298786 - DNA, 776 bp, Homo sapiens
ctggactgccgcgggggattctgggccaagatggcagcaatgaggaaggcgcttccgcggcgactggtgggcttggcgtccctccgggctgtcagcacctcatctatgggcactttaccaaagcgggtgaaaattgtggaagttggtccccgagatggactacaaaatgaaaagaatatcgtatctactccagtgaaaatcaagctgatagacatgctttctgaagcaggactctctgttatagaaaccaccagctttgtgtctcctaagtgggttccccagatgggtgaccacactgaagtcttgaagggcattcagaagtttcctggcatcaactacccagtcctggccctgccactcactgctctgtgatcttgacaagttgacaagcctataaaatagggctaaatgatagtacctgaagttgtgagcatttcagaagataggatgcatgtacattgcttagcaagagccagataaaaggtaactgcttaataaatgttagctcttttgattatccacttctttagagaaatgtaaccaaactctccacaagagtttcaacagtagttgctggcatctgccaactttcttacaattttagacaagaacatctttggaggcgttggttctgtatttaggcaaaaacctttttttggctgggcacagtggctcacacctataatcccagcactttgggaggctgaggccggagaacagcttgaggccagaagcttgagaccagcctgagcaacataaggagaccttgtctctac

SEQ ID NO: 298787 - DNA, 637 bp, Homo sapiens
gccgaattcggcacgagctccgcccagctgcaggtgttgattgcacactgatcagaaatgtgtgttaaacagccctgcctcagttctgctagccaaaaagctcaggacactgacctcattcctcccctgtcttcccacagggtacgtctcctgtgctcttggctgcccttatgaagggaagatctccccagctaaagtagctgaggtgtgtgcatgtgtcagggcggggggtttggtgagggttggccaccttgtctgcccctgagcgcataggttcctctccccaccctttctggcaggttcctgacttcattcattcacccagctccttcattaagctcctgctgtgagcacagccctgcacttgctccctagaggcccccctcctagccgaacatgtagtccttgaagcccctggcctctatccagcctgaaaacctccaattcagtttccagtctggtcgttgaggtgattctctgaggaggggctccttacccaggagttcccatagttccttgtagtgattgaaaggccacaaccctgatgtcctctgaacagtcaccaggtcaacactgagaagaacatggcatgggaattgagtttgaccagcccaagaacttatgtcatttagtcctc

SEQ ID NO: 298788 - DNA, 263 bp, Homo sapiens
gggggattctgggccaagatggcagcaatgaggaaggcgcttccgcggcgactggtgggcttggcgtccctccgggctgtaagtgccccgagccgccgaggcggcggccctgcaggcactctgactgtcagggttgggggcttggcccgtggtgactgctctcttagaggcgaggccggacagctctcaggccagagtcgggagggcgttggagtcctggaccctcccttttcccctcaaatcctttgaaggggatgggaaaa

SEQ ID NO: 298789 - DNA, 187 bp, Homo sapiens
gtgtgcttgcctagctgagggatgggtcaccttttccttctcagaacgtagtaaatacctagatccctctaggatggaagatggcgaggtagagagaactatacgaggccgcctgcccagcttgtagatgggcccaccttccagtgcagggtaatgtgtgtgaatgggctgtgcaggtccccagaac

SEQ ID NO: 298790 - DNA, 574 bp, Homo sapiens
cgcggctgactcttgaggatcccttccatgtggacttagagcgggagctggcagacctccatgggaaagatgccgcactcttgttttcctcgtgctttgtggccaatgactcaaccctcttcaccctggctaagatgatgccaggtaaggaagcctggcatgagtgccttcgagtttttggggtttcttagtaataacaagaatatgggcaacaaagaagccttaccagaacctctcaattgaaaatcataatcctatctgggcattggttctggggtcaagcatgaaatgctgactgtacattatgggctccaggagaacgtgataccagtgaaaattcaaacttgaaacgtctcatccttgagctaattgcctcaaatatgttttgtattctaagatgatcctttggagaagtctcttaatcatttagttagctcttgattgagtttggagtgaggcagtcagatttaagagcagattaatggcctgccacaaggttattctacacctttgggccttctcacaagggaagcactaactagttattttgccaggaagaaactggcacacagtg

SEQ ID NO: 298791 - DNA, 2237 bp, Homo sapiens
gctgtatattaaggcgccggcgatcgcggcctgaggctgctcccggacaagggcaacgagcgtttcgtttggacttctcgacttgagtgcccgcctccttcgccgccgcctctgcagtcctcagcgcagtctttccacaggagccagcatacttcctgaacatggagagtgttgttcgccgctgcccattcttatcccgagtcccccaggcctttctgcagaaagcaggcaaatctctgttgttctatgcccaaaactgccccaagatgatggaagttggggccaagccagcccctcgggcattgtccactgcagcagtacactaccaacagatcaaagaaacccctccggccagtgagaaagacaaaactgctaaggccaaggtccaacagactcctgatggatcccagcagagtccagatggcacacagcttccgtctggacaccccttgcctgccacaagccagggcactgcaagcaaatgccctttcctggcagcacagatgaatcagagaggcagcagtgtcttctgcaaagccagtcttgagcttcaggaggatgtgcaggaaatgaatgccgtgaggaaagaggttgctgaaacctcagcaggccccagtgtggttagtgtgaaaaccgatggaggggatcccagtggactgctgaagaacttccaggacatcatgcaaaagcaaagaccagaaagagtgtctcatcttcttcaagataacttgccaaaatctgtttccacttttcagtatgatcgtttctttgagaaaaaaattgatgagaaaaagaatgaccacacctatcgagtttttaaaactgtgaaccggcgagcacacatcttccccatggcagatgactattcagactccctcatcaccaaaaagcaagtgtcagtctggtgcagtaatgactacctaggaatgagtcgccacccacgggtgtgtggggcagttatggacactttgaaacaacatggtgctggggcaggtggtactagaaatatttctggaactagtaaattccatgtggacttagagcgggagctggcagacctccatgggaaagatgccgcactcttgttttcctcgtgctttgtggccaatgactcaaccctcttcaccctggctaagatgatgccaggctgtgagatttactctgattctgggaaccatgcctccatgatccaagggattcgaaacagccgagtgccaaagtacatcttccgccacaatgatgtcagccacctcagagaactgctgcaaagatctgacccctcagtccccaagattgtggcatttgaaactgtccattcaatggatggggcggtgtgcccactggaagagctgtgtgatgtggcccatgagtttggagcaatcaccttcgtggatgaggtccacgcagtggggctttatggggctcgaggcggagggattggggatcgggatggagtcatgccaaaaatggacatcatttctggaacacttggcaaagcctttggttgtgttggagggtacatcgccagcacgagttctctgattgacaccgtacggtcctatgctgctggcttcatcttcaccacctctctgccacccatgctgctggctggagccctggagtctgtgcggatcctgaagagcgctgagggacgggtgcttcgccgccagcaccagcgcaacgtcaaactcatgagacagatgctaatggatgccggcctccctgttgtccactgccccagccacatcatccctgtgcgggttgcagatgctgctaaaaacacagaagtctgtgatgaactaatgagcagacataacatctacgtgcaagcaatcaattaccctacggtgccccggggagaagagctcctacggattgcccccacccctcaccacacaccccagatgatgaactacttccttgagaatctgctagtcacatggaagcaagtggggctggaactgaagcctcattcctcagctgagtgcaacttctgcaggaggccactgcattttgaagtgatgagtgaaagagagaagtcctatttctcaggcttgagcaagttggtatctgctcaggcctgagcatgacctcaattatttcacttaaccccaggccattatcatatccagatggtcttcagagttgtctttatatgtgaattaagttatattaaattttaatctatagtaaaaacatagtcctggaaataaattcttgcttaaatggtgaatctt

SEQ ID NO: 298792 - DNA, 2217 bp, Homo sapiens
  misc_feature (16)..(16): n is a, c, g, or t
ggacgcgtgggtcganccacgcgtcgcggacgcgtgggagcgtttcgtttggacttctcgacttgagtgcccgcctccttcgccgccgcctctgcagtcctcagcgcagtctttccacaggagccagcatacttcctgaacatggagagtgttgttcgccgctgcccattcttatcccgagtcccccaggcctttctgcagaaagcaggcaaatctctgttgttctatgcccaaaactgccccaagatgatggaagttggggccaagccagcccctcgggcattgtccactgcagcagtacactaccaacagatcaaagaaacccctccggccagtgagaaagacaaaactgctaaggccaaggtccaacagactcctgatggatcccagcagagtccagatggcacacagcttccgtctggacaccccttgcctgccacaagccagggcactgcaagcaaatgccctttcctggcagcacagatgaatcagagaggcagcagtgtcttctgcaaagccagtcttgagcttcaggaggatgtgcaggaaatgaatgccgtgaggaaagaggttgctgaaacctcagcaggccccagtgtggttagtgtgaaaaccgatggaggggatcccagtggactgctgaagaacttccaggacatcatgcaaaagcaaagaccagaaagagtgtctcatcttcttcaagataacttgccaaaatctgtttccacttttcagtatgatcgtttctttgagaaaaaaattgatgagaaaaagaatgaccacacctatcgagtttttaaaactgtgaaccggcgagcacacatcttccccatggcagatgactattcagactccctcatcaccaaaaagcaagtgtcagtctggtgcagtaatgactacctaggaatgagtcgccacccacgggtgtgtggggcagttatggacactttgaaacaacatggtgctggggcaggtggtactagaaatatttctggaactagtaaattccatgtggacttagagcgggagctggcagacctccatgggaaagatgccgcactcttgttttcctcgtgctttgtggccaatgactcaaccctcttcaccctggctaagatgatgccaggctgtgagatttactctgattctgggaaccatgcctccatgatccaagggattcgaaacagccgagtgccaaagtacatcttccgccacaatgatgtcagccacctcagagaactgctgcaaagatctgacccctcagtccccaagattgtggcatttgaaactgtccattcaatggatggggcggtgtgcccactggaagagctgtgtgatgtggcccatgagtttggagcaatcaccttcgtggatgaggtccacgcagtggggctttatggggctcgaggcggagggattggggatcgggatggagtcatgccaaaaatggacatcatttctggaacacttggcaaagcctttggttgtgttggagggtacatcgccagcacgagttctctgattgacaccgtacggtcctatgctgctggcttcatcttcaccacctctctgccacccatgctgctggctggagccctggagtctgtgcggatcctgaagagcgctgagggacgggtgcttcgccgccagcaccagcgcaacgtcaaactcatgagacagatgctaatggatgccggcctccctgttgtccactgccccagccacatcatccctgtgcgggttgcagatgctgctaaaaacacagaagtctgtgatgaactaatgagcagacataacatctacgtgcaagcaatcaattaccctacggtgccccggggagaagagctcctacggattgcccccacccctcaccacacaccccagatgatgaactacttccttgagaatctgctagtcacatggaagcaagtggggctggaactgaagcctcattcctcagctgagtgcaacttctgcaggaggccactgcattttgaagtgatgagtgaaagagagaagtcctatttctcaggcttgagcaagttggtatctgctcaggcctgagcatgacctcaattatttcacttaaccccaggccattatcatatccagatggtcttcagagttgtctttatatgtgaattaagttatattaaattttaatctatagtaaaaacatagtcctggaaataaattcttgcttaaatggtgaatctt

SEQ ID NO: 298793 - DNA, 2803 bp, Homo sapiens
gctgtatattaaggcgccggcgatcgcggcctgaggctgctcccggacaagggcaacgagcgtttcgtttggacttctcgacttgagtgcccgcctccttcgccgccgcctctgcagtcctcagcgcagtctttccacaggagccagcatacttcctgaacatggagagtgttgttcgccgctgcccattcttatcccgagtcccccaggcctttctgcagaaagcaggcaaatctctgttgttctatgcccaaaactgccccaagatgatggaagttggggccaagccagcccctcgggcattgtccactgcagcagtacactaccaacagatcaaagaaacccctccggccagtgagaaagacaaaactgctaaggccaaggtccaacagactcctgatggatcccagcagagtccagatggcacacagcttccgtctggacaccccttgcctgccacaagccagggcactgcaagcaaatgccctttcctggcagcacagatgaatcagagaggcagcagtgtcttctgcaaagccagtcttgagcttcaggaggatgtgcaggaaatgaatgccgtgaggaaagaggttgctgaaacctcagcaggccccagtgtggttagtgtgaaaaccgatggaggggatcccagtggactgctgaagaacttccaggacatcatgcaaaagcaaagaccagaaagagtgtctcatcttcttcaagataacttgccaaaatctgtttccacttttcagtatgatcgtttctttgagaaaaaaattgatgagaaaaagaatgaccacacctatcgagtttttaaaactgtgaaccggcgagcacacatcttccccatggcagatgactattcagactccctcatcaccaaaaagcaagtgtcagtctggtgcagtaatgactacctaggaatgagtcgccacccacgggtgtgtggggcagttatggacactttgaaacaacatggtgctggggcaggtggtactagaaatatttctggaactagtaaattccatgtggacttagagcgggagctggcagacctccatgggaaagatgccgcactcttgttttcctcgtgctttgtggccaatgactcaaccctcttcaccctggctaagatgatgccaggctgtgagatttactctgattctgggaaccatgcctccatgatccaagggattcgaaacagccgagtgccaaagtacatcttccgccacaatgatgtcagccacctcagagaactgctgcaaagatctgacccctcagtccccaagattgtggcatttgaaactgtccattcaatggatggggcggtgtgcccactggaagagctgtgtgatgtggcccatgagtttggagcaatcaccttcgtggatgaggtccacgcagtggggctttatggggctcgaggcggagggattggggatcgggatggagtcatgccaaaaatggacatcatttctggaacacttggcaaagcctttggttgtgttggagggtacatcgccagcacgagttctctgattgacaccgtacggtcctatgctgctggcttcatcttcaccacctctctgccacccatgctgctggctggagccctggagtctgtgcggatcctgaagagcgctgagggacgggtgcttcgccgccagcaccagcgcaacgtcaaactcatgagacagatgctaatggatgccggcctccctgttgtccactgccccagccacatcatccctgtgcgggttgcagatgctgctaaaaacacagaagtctgtgatgaactaatgagcagacataacatctacgtgcaagcaatcaattaccctacggtgccccggggagaagagctcctacggattgcccccacccctcaccacacaccccagatgatgaactacttccttgagaatctgctagtcacatggaagcaagtggggctggaactgaagcctcattcctcagctgagtgcaacttctgcaggaggccactgcattttgaagtgatgagtgaaagagagaagtcctatttctcaggcttgagcaagttggtatctgctcaggcctgagcatgacctcaattatttcacttaaccccaggccattatcatatccagatggtcttcagagttgtctttatatgtgaattaagttatattaaattttaatctatagtaaaaacatagtcctggaaataaaaaaaaaaaaaaaaaaaaaaaaaaaaaaaaaaaaaaaaaaaaaaaaaaaaaaaaaaaaaaaaaaaaaaaaaaaaaaaaaaaaaaaaaaaaaaaaaaaaaagagaggcggcggcgcgagcagcaataaatactacacccgcgggaaggacgaacaaaaaaccccgtccgcccccgcgccatgttatgataaagcagaaggggcgcgccacaaagagaggaggtgtggtacctatattaaatcaaacacccggagagcggccgcgacccggcgcaaaaaaaggagccgcgcgagggagagcacaacaaaacgccgagcggcccgagcacatagccagacacaagagagcaaacacaaaccacaccaccgtcgggcggcgggcagcgaacaacaaccgagggacgaacacaaccccacacaccccgcagcgggagcaaataaagaagggccccagcacgggcgggaaacaataagccaacgtcccccacgaacgcatctcacgcgggcgaccacaaaccagacgaacacaaacaccagcgccggcgccagacaacaagtcgagagcagagacgacgcaccctccaaccccacc

SEQ ID NO: 298794 - DNA, 2414 bp, Homo sapiens
gctgtatattaaggcgccggcgatcgcggcctgaggctgctcccggacaagggcaacgagcgtttcgtttggacttctcgacttgagtgcccgcctccttcgccgccgcctctgcagtcctcagcgcagttatgcccagttcttcccgctgtggggacacgaccacggaggaatccttgcttcagggactcgggaccctgctggaccccttcctcgggtttaggggatgtggggaccaggagaaagtcaggatccctaagagtcttccctgcctggatggatgagtggcttcttctccacctagattctttccacaggagccagcatacttcctgaacatggagagtgttgttcgccgctgcccattcttatcccgagtcccccaggcctttctgcagaaagcaggcaaatctctgttgttctatgcccaaaactgccccaagatgatggaagttggggccaagccagcccctcgggcattgtccactgcagcagtacactaccaacagatcaaagaaacccctccggccagtgagaaagacaaaactgctaaggccaaggtccaacagactcctgatggatcccagcagagtccagatggcacacagcttccgtctggacaccccttgcctgccacaagccagggcactgcaagcaaatgccctttcctggcagcacagatgaatcagagaggcagcagtgtcttctgcaaagccagtcttgagcttcaggaggatgtgcaggaaatgaatgccgtgaggaaagaggttgctgaaacctcagcaggccccagtgtggttagtgtgaaaaccgatggaggggatcccagtggactgctgaagaacttccaggacatcatgcaaaagcaaagaccagaaagagtgtctcatcttcttcaagataacttgccaaaatctgtttccacttttcagtatgatcgtttctttgagaaaaaaattgatgagaaaaagaatgaccacacctatcgagtttttaaaactgtgaaccggcgagcacacatcttccccatggcagatgactattcagactccctcatcaccaaaaagcaagtgtcagtctggtgcagtaatgactacctaggaatgagtcgccacccacgggtgtgtggggcagttatggacactttgaaacaacatggtgctggggcaggtggtactagaaatatttctggaactagtaaattccatgtggacttagagcgggagctggcagacctccatgggaaagatgccgcactcttgttttcctcgtgctttgtggccaatgactcaaccctcttcaccctggctaagatgatgccaggctgtgagatttactctgattctgggaaccatgcctccatgatccaagggattcgaaacagccgagtgccaaagtacatcttccgccacaatgatgtcagccacctcagagaactgctgcaaagatctgacccctcagtccccaagattgtggcatttgaaactgtccattcaatggatggggcggtgtgcccactggaagagctgtgtgatgtggcccatgagtttggagcaatcaccttcgtggatgaggtccacgcagtggggctttatggggctcgaggcggagggattggggatcgggatggagtcatgccaaaaatggacatcatttctggaacacttggcaaagcctttggttgtgttggagggtacatcgccagcacgagttctctgattgacaccgtacggtcctatgctgctggcttcatcttcaccacctctctgccacccatgctgctggctggagccctggagtctgtgcggatcctgaagagcgctgagggacgggtgcttcgccgccagcaccagcgcaacgtcaaactcatgagacagatgctaatggatgccggcctccctgttgtccactgccccagccacatcatccctgtgcgggttgcagatgctgctaaaaacacagaagtctgtgatgaactaatgagcagacataacatctacgtgcaagcaatcaattaccctacggtgccccggggagaagagctcctacggattgcccccacccctcaccacacaccccagatgatgaactacttccttgagaatctgctagtcacatggaagcaagtggggctggaactgaagcctcattcctcagctgagtgcaacttctgcaggaggccactgcattttgaagtgatgagtgaaagagagaagtcctatttctcaggcttgagcaagttggtatctgctcaggcctgagcatgacctcaattatttcacttaaccccaggccattatcatatccagatggtcttcagagttgtctttatatgtgaattaagttatattaaattttaatctatagtaaaaacatagtcctggaaataaattcttgcttaaatggtgaatctt

SEQ ID NO: 298795 - DNA, 2373 bp, Homo sapiens
gctgtatattaaggcgccggcgatcgcggcctgaggctgctcccggacaagggcaacgagcgtttcgtttggacttctcgacttgagtgcccgcctccttcgccgccgcctctgcagtcctcagcgcagttatgcccagttcttcccgctgtggggacacgaccacggaggaatccttgcttcagggactcgggaccctgctggaccccttcctcgggtttaggggatgtggggaccaggagaaagtcaggatccctaagagtcttccctgcctggatggatgagtggcttcttctccacctagattctttccacaggagccagcatacttcctgaacatggagagtgttgttcgccgctgcccattcttatcccgagtcccccaggcctttctgcagaaagcaggcaaatctctgttgttctatgcccaaaactgccccaagatgatggaagttggggccaagccagcccctcgggcattgtccactgcagcagtacactaccaacagatcaaagaaacccctccggccagtgagaaagacaaaactgctaaggccaaggtccaacagactcctgatggatcccagcagagtccagatggcacacagcttccgtctggacaccccttgcctgccacaagccagggcactgcaagcaaatgccctttcctggcagcacagatgaatcagagaggcagcagtgtcttctgcaaagccagtcttgagcttcaggaggatgtgcaggaaatgaatgccgtgaggaaagaggttgctgaaacctcagcaggccccagtgtggttagtgtgaaaaccgatggaggggatcccagtggactgctgaagaacttccaggacatcatgcaaaagcaaagaccagaaagagtgtctcatcttcttcaagataacttgccaaaatctgtttccacttttcagtatgatcgtttctttgagaaaaaaattgatgagaaaaagaatgaccacacctatcgagtttttaaaactgtgaaccggcgagcacacatcttccccatggcagatgactattcagactccctcatcaccaaaaagcaagtgtcagtctggtgcagtaatgactacctaggaatgagtcgccacccacgggtgtgtggggcagttatggacactttgaaacaacatggtgctggggcaggtggtactagaaatatttctggaactagtaaattccatgtggacttagagcgggagctggcagacctccatgggaaagatgccgcactcttgttttcctcgtgctttgtggccaatgactcaaccctcttcaccctggctaagatgatgccaggctgtgagatttactctgattctgggaaccatgcctccatgatccaagggattcgaaacagccgagtgccaaagtacatcttccgccacaatgatgtcagccacctcagagaactgctgcaaagatctgacccctcagtccccaagattgtggcatttgaaactgtccattcaatggatggggcggtgtgcccactggaagagctgtgtgatgtggcccatgagtttggagcaatcaccttcgtggatgaggtccacgcagtggggctttatggggctcgaggcggagggattggggatcgggatggagtcatgccaaaaatggacatcatttctggaacacttggcaaagcctttggttgtgttggagggtacatcgccagcacgagttctctgattgacaccgtacggtcctatgctgctggcttcatcttcaccacctctctgccacccatgctgctggctggagccctggagtctgtgcggatcctgaagagcgctgagggacgggtgcttcgccgccagcaccagcgcaacgtcaaactcatgagacagatgctaatggatgccggcctccctgttgtccactgccccagccacatcatccctgtgcgggttgcagatgctgctaaaaacacagaagtctgtgatgaactaatgagcagacataacatctacgtgcaagcaatcaattaccctacggtgccccggggagaagagctcctacggattgcccccacccctcaccacacaccccagatgatgaactacttccttgagaatctgctagtcacatggaagcaagtggggctggaactgaagcctcattcctcagctgagtgcaacttctgcaggaggccactgcattttgaagtgatgagtgaaagagagaagtcctatttctcaggcttgagcaagttggtatctgctcaggcctgagcatgacctcaattatttcacttaaccccaggccattatcatatccagatggtcttcagagttgtctttatatgtgaattaagttatattaaattttaatctatagtaaaaa

SEQ ID NO: 298796 - DNA, 2183 bp, Homo sapiens
gctgtatattaaggcgccggcgatcgcggcctgaggctgctcccggacaagggcaacgagcgtttcgtttggacttctcgacttgagtgcccgcctccttcgccgccgcctctgcagtcctcagcgcagtctttccacaggagccagcatacttcctgaacatggagagtgttgttcgccgctgcccattcttatcccgagtcccccaggcctttctgcagaaagcaggcaaatctctgttgttctatgcccaaaactgccccaagatgatggaagttggggccaagccagcccctcgggcattgtccactgcagcagtacactaccaacagatcaaagaaacccctccggccagtgagaaagacaaaactgctaaggccaaggtccaacagactcctgatggatcccagcagagtccagatggcacacagcttccgtctggacaccccttgcctgccacaagccagggcactgcaagcaaatgccctttcctggcagcacagatgaatcagagaggcagcagtgtcttctgcaaagccagtcttgagcttcaggaggatgtgcaggaaatgaatgccgtgaggaaagaggttgctgaaacctcagcaggccccagtgtggttagtgtgaaaaccgatggaggggatcccagtggactgctgaagaacttccaggacatcatgcaaaagcaaagaccagaaagagtgtctcatcttcttcaagataacttgccaaaatctgtttccacttttcagtatgatcgtttctttgagaaaaaaattgatgagaaaaagaatgaccacacctatcgagtttttaaaactgtgaaccggcgagcacacatcttccccatggcagatgactattcagactccctcatcaccaaaaagcaagtgtcagtctggtgcagtaatgactacctaggaatgagtcgccacccacgggtgtgtggggcagttatggacactttgaaacaacatggtgctggggcaggtggtactagaaatatttctggaactagtaaattccatgtggacttagagcgggagctggcagacctccatgggaaagatgccgcactcttgttttcctcgtgctttgtggccaatgactcaaccctcttcaccctggctaagatgatgccaggctgtgagatttactctgattctgggaaccatgcctccatgatccaagggattcgaaacagccgagtgccaaagtacatcttccgccacaatgatgtcagccacctcagagaactgctgcaaagatctgacccctcagtccccaagattgtggcatttgaaactgtccattcaatggatggggcggtgtgcccactggaagagctgtgtgatgtggcccatgagtttggagcaatcaccttcgtggatgaggtccacgcagtggggctttatggggctcgaggcggagggattggggatcgggatggagtcatgccatacatcgccagcacgagttctctgattgacaccgtacggtcctatgctgctggcttcatcttcaccacctctctgccacccatgctgctggctggagccctggagtctgtgcggatcctgaagagcgctgagggacgggtgcttcgccgccagcaccagcgcaacgtcaaactcatgagacagatgctaatggatgccggcctccctgttgtccactgccccagccacatcatccctgtgcgggttgcagatgctgctaaaaacacagaagtctgtgatgaactaatgagcagacataacatctacgtgcaagcaatcaattaccctacggtgccccggggagaagagctcctacggattgcccccacccctcaccacacaccccagatgatgaactacttccttgagaatctgctagtcacatggaagcaagtggggctggaactgaagcctcattcctcagctgagtgcaacttctgcaggaggccactgcattttgaagtgatgagtgaaagagagaagtcctatttctcaggcttgagcaagttggtatctgctcaggcctgagcatgacctcaattatttcacttaaccccaggccattatcatatccagatggtcttcagagttgtctttatatgtgaattaagttatattaaattttaatctatagtaaaaacatagtcctggaaataaattcttgcttaaatggtgaatctt

SEQ ID NO: 298797 - DNA, 2133 bp, Homo sapiens
tcaaccctcttcaccctggctaagatgatgccaggctgtgagatttacttcctgaacatggagagtgttgttcgccgctgcccattcttatcccgagtcccccaggcctttctgcagaaagcaggcaaatctctgttgttctatgcccaaaactgccccaagatgatggaagttggggccaagccagcccctcgggcattgtccactgcagcagtacactaccaacagatcaaagaaacccctccggccagtgagaaagacaaaactgctaaggccaaggtccaacagactcctgatggatcccagcagagtccagatggcacacagcttccgtctggacaccccttgcctgccacaagccagggcactgcaagcaaatgccctttcctggcagcacagatgaatcagagaggcagcagtgtcttctgcaaagccagtcttgagcttcaggaggatgtgcaggaaatgaatgccgtgaggaaagaggttgctgaaacctcagcaggccccagtgtggttagtgtgaaaaccgatggaggggatcccagtggactgctgaagaacttccaggacatcatgcaaaagcaaagaccagaaagagtgtctcatcttcttcaagataacttgccaaaatctgtttccacttttcagtatgatcgtttctttgagaaaaaaattgatgagaaaaagaatgaccacacctatcgagtttttaaaactgtgaaccggcgagcacacatcttccccatggcagatgactattcagactccctcatcaccaaaaagcaagtgtcagtctggtgcagtaatgactacctaggaatgagtcgccacccacgggtgtgtggggcagttatggacactttgaaacaacatggtgctggggcaggtggtactagaaatatttctggaactagtaaattccatgtggacttagagcgggagctggcagacctccatgggaaagatgccgcactcttgttttcctcgtgctttgtggccaatgactcaaccctcttcaccctggctaagatgatgccaggctgtgagatttactctgattctgggaaccatgcctccatgatccaagggattcgaaacagccgagtgccaaagtacatcttccgccacaatgatgtcagccacctcagagaactgctgcaaagatctgacccctcagtccccaagattgtggcatttgaaactgtccattcaatggatggggcggtgtgcccactggaagagctgtgtgatgtggcccatgagtttggagcaatcaccttcgtggatgaggtccacgcagtggggctttatggggctcgaggcggagggattggggatcgggatggagtcatgccaaaaatggacatcatttctggaacacttggcaaagcctttggttgtgttggagggtacatcgccagcacgagttctctgattgacaccgtacggtcctatgctgctggcttcatcttcaccacctctctgccacccatgctgctggctggagccctggagtctgtgcggatcctgaagagcgctgagggacgggtgcttcgccgccagcaccagcgcaacgtcaaactcatgagacagatgctaatggatgccggcctccctgttgtccactgccccagccacatcatccctgtgcgggttgcagatgctgctaaaaacacagaagtctgtgatgaactaatgagcagacataacatctacgtgcaagcaatcaattaccctacggtgccccggggagaagagctcctacggattgcccccacccctcaccacacaccccagatgatgaactacttccttgagaatctgctagtcacatggaagcaagtggggctggaactgaagcctcattcctcagctgagtgcaacttctgcaggaggccactgcattttgaagtgatgagtgaaagagagaagtcctatttctcaggcttgagcaagttggtatctgctcaggcctgagcatgacctcaattatttcacttaaccccaggccattatcatatccagatggtcttcagagttgtctttatatgtgaattaagttatattaaattttaatctatagtaaaaacatagtcctggaaataaattcttgcttaaatggtgaatctt

SEQ ID NO: 298798 - DNA, 2337 bp, Homo sapiens
gctgtatattaaggcgccggcgatcgcggcctgaggctgctcccggacaagggcaacgagcgtttcgtttggacttctcgacttgagtgcccgcctccttcgccgccgcctctgcagtcctcagcgcagtctttccacaggagccagcatacttcctgaacatggagagtgttgttcgccgctgcccattcttatcccgagtcccccaggcctttctgcagaaagcaggcaaatctctgttgttctatgcccaaaactgccccaagatgatggaagttggggccaagccagcccctcgggcattgtccactgcagcagtacactaccaacagatcaaagaaacccctccggccagtgagaaagacaaaactgctaaggccaaggtccaacagactcctgatggatcccagcagagtccagatggcacacagcttccgtctggacaccccttgcctgccacaagccagggcactgcaagcaaatgccctttcctggcagcacagatgaatcagagaggcagcagtgtcttctgcaaagccagtcttgagcttcaggaggatgtgcaggaaatgaatgccgtgaggaaagaggttgctgaaacctcagcaggccccagtgtggttagtgtgaaaaccgatggaggggatcccagtggactgctgaagaacttccaggacatcatgcaaaagcaaagaccagaaagagtgtctcatcttcttcaagataacttgccaaaatctgtttccacttttcagtatgatcgtttctttgagaaaaaaattgatgagaaaaagaatgaccacacctatcgagtttttaaaactgtgaaccggcgagcacacatcttccccatggcagatgactattcagactccctcatcaccaaaaagcaagtgtcagtctggtgcagtaatgactacctaggaatgagtcgccacccacgggtgtgtggggcagttatggacactttgaaacaacatggtgctggggcaggtggtactagaaatatttctggaactagtaaattccatgtggacttagagcgggagctggcagacctccatgggaaagatgccgcactcttgttttcctcgtgctttgtggccaatgactcaaccctcttcaccctggctaagatgatgccaggctgtgagatttactctgattctgggaaccatgcctccatgatccaagggattcgaaacagccgagtgccaaagtacatcttccgccacaatgatgtcagccacctcagagaactgctgcaaagatctgacccctcagtccccaagattgtggcatttgaaactgtccattcaatggatggggcggtgtgcccactggaagagctgtgtgatgtggcccatgagtttggagcaatcaccttcgtggatgaggtccacgcagtggggctttatggggctcgaggcggagggattggggatcgggatggagtcatgccaaaaatggacatcatttctggaacacttggcaaagcctttggttgtgttggagggtacatcgccagcacgagttctctgattgacaccgtacggtcctatgctgctggcttcatcttcaccacctctctgccacccatgctgctggctggagccctggagtctgtgcggatcctgaagagcgctgagggacgggtgcttcgccgccagcaccagcgcaacgtcaaactcatgagacagatgctaatggatgccggcctccctgttgtccactgccccagccacatcatccctgtgcgggttgcagatgctgctaaaaacacagaagtctgtgatgaactaatgagcagacataacatctacgtgcaagcaatcaattaccctacggtgccccggggagaagagctcctacggattgcccccacccctcaccacacaccccagatgatgaactacttccttgagaatctgctagtcacatggaagcaagtggggctggaactgaagcctcattcctcagctgagtgcaacttctgcaggaggccactgcattttgaagtgatgagtgaaagagagaagtcctatttctcaggcttgagcaagttggtatctgctcaggcctgagcatgacctcaattatttcacttaaccccaggccattatcatatccagatggtcttcagagttgtctttatatgtgaattaagttatattaaattttaatctatagtaaaaaaaaaaaaggcgcgtttacacgtctgactggaaaccttgcgtaccaactaacgcttgagacatccccttcgcagttgcgatacgataggcgaacgacgccttcaacatggacccgaagcaatgcaattgacgtaaattgtaa

SEQ ID NO: 298799 - DNA, 2184 bp, Homo sapiens
gctgtatattaaggcgccggcgatcgcggcctgaggctgctcccggacaagggcaacgagcgtttcgtttggacttctcgacttgagtgcccgcctccttcgccgccgcctctgcagtcctcagcgcagtctttccacaggagccagcatacttcctgaacatggagagtgttgttcgccgctgcccattcttatcccgagtcccccaggcctttctgcagaaagcaggcaaatctctgttgttctatgcccaaaactgccccaagatgatggaagttggggccaagccagcccctcgggcattgtccactgcagcagtacactaccaacagatcaaagaaacccctccggccagtgagaagtccagatggcacacagcttccgtctggacaccccttgcctgccacaagccagggcactgcaagcaaatgccctttcctggcagcacagatgaatcagagaggcagcagtgtcttctgcaaagccagtcttgagcttcaggaggatgtgcaggaaatgaatgccgtgaggaaagaggttgctgaaacctcagcaggccccagtgtggttagtgtgaaaaccgatggaggggatcccagtggactgctgaagaacttccaggacatcatgcaaaagcaaagaccagaaagagtgtctcatcttcttcaagataacttgccaaaatctgtttccacttttcagtatgatcgtttctttgagaaaaaaattgatgagaaaaagaatgaccacacctatcgagtttttaaaactgtgaaccggcgagcacacatcttccccatggcagatgactattcagactccctcatcaccaaaaagcaagtgtcagtctggtgcagtaatgactacctaggaatgagtcgccacccacgggtgtgtggggcagttatggacactttgaaacaacatggtgctggggcaggtggtactagaaatatttctggaactagtaaattccatgtggacttagagcgggagctggcagacctccatgggaaagatgccgcactcttgttttcctcgtgctttgtggccaatgactcaaccctcttcaccctggctaagatgatgccaggctgtgagatttactctgattctgggaaccatgcctccatgatccaagggattcgaaacagccgagtgccaaagtacatcttccgccacaatgatgtcagccacctcagagaactgctgcaaagatctgacccctcagtccccaagattgtggcatttgaaactgtccattcaatggatggggcggtgtgcccactggaagagctgtgtgatgtggcccatgagtttggagcaatcaccttcgtggatgaggtccacgcagtggggctttatggggctcgaggcggagggattggggatcgggatggagtcatgccaaaaatggacatcatttctggaacacttggcaaagcctttggttgtgttggagggtacatcgccagcacgagttctctgattgacaccgtacggtcctatgctgctggcttcatcttcaccacctctctgccacccatgctgctggctggagccctggagtctgtgcggatcctgaagagcgctgagggacgggtgcttcgccgccagcaccagcgcaacgtcaaactcatgagacagatgctaatggatgccggcctccctgttgtccactgccccagccacatcatccctgtgcgggttgcagatgctgctaaaaacacagaagtctgtgatgaactaatgagcagacataacatctacgtgcaagcaatcaattaccctacggtgccccggggagaagagctcctacggattgcccccacccctcaccacacaccccagatgatgaactacttccttgagaatctgctagtcacatggaagcaagtggggctggaactgaagcctcattcctcagctgagtgcaacttctgcaggaggccactgcattttgaagtgatgagtgaaagagagaagtcctatttctcaggcttgagcaagttggtatctgctcaggcctgagcatgacctcaattatttcacttaaccccaggccattatcatatccagatggtcttcagagttgtctttatatgtgaattaagttatattaaattttaatctatagtaaaaacatagtcctggaaataaattcttgcttaaatggtgaatctt

SEQ ID NO: 298800 - DNA, 2006 bp, Homo sapiens
gctgtatattaaggcgccggcgatcgcggcctgaggctgctcccggacaagggcaacgagcgtttcgtttggacttctcgacttgagtgcccgcctccttcgccgccgcctctgcagtcctcagcgcagttatgcccagttcttcccgctgtggggacacgaccacggaggaatccttgcttcagggactcgggaccctgctggaccccttcctcgggtttaggggatgtggggaccaggagaaagtcaggatccctaagagtcttccctgcctggatggatgagtggcttcttctccacctagattctttccacaggagccagcatacttcctgaacatggagagtgttgttcgccgctgcccattcttatcccgagtcccccaggcctttctgcagaaagcaggcaaatctctgttgttctatgcccaaaactgccccaagatgatggaagttggggccaagccagcccctcgggcattgtccactgcagcagtacactaccaacagatcaaagaaacccctccggccagtgagaaagacaaaactgctaaggccaaggtccaacagactcctgatggatcccagcagagtccagatggcacacagcttccgtctggacaccccttgcctgccacaagccagggcactgcaagcaaatgccctttcctggcagcacagatgaatcagagaggcagcagtgtcttctgcaaagccagtcttgagcttcaggaggatgtgcaggaaatgaatgccgtgaggaaagaggttgctgaaacctcagcaggccccagtgtggttagtgtgaaaaccgatggaggggatcccagtggactgctgaagaacttccaggacatcatgcaaaagcaaagaccagaaagagtgtctcatcttcttcaagataacttgccaaaatgctgtgagatttactctgattctgggaaccatgcctccatgatccaagggattcgaaacagccgagtgccaaagtacatcttccgccacaatgatgtcagccacctcagagaactgctgcaaagatctgacccctcagtccccaagattgtggcatttgaaactgtccattcaatggatggggcggtgtgcccactggaagagctgtgtgatgtggcccatgagtttggagcaatcaccttcgtggatgaggtccacgcagtggggctttatggggctcgaggcggagggattggggatcgggatggagtcatgccaaaaatggacatcatttctggaacacttggcaaagcctttggttgtgttggagggtacatcgccagcacgagttctctgattgacaccgtacggtcctatgctgctggcttcatcttcaccacctctctgccacccatgctgctggctggagccctggagtctgtgcggatcctgaagagcgctgagggacgggtgcttcgccgccagcaccagcgcaacgtcaaactcatgagacagatgctaatggatgccggcctccctgttgtccactgccccagccacatcatccctgtgcgggttgcagatgctgctaaaaacacagaagtctgtgatgaactaatgagcagacataacatctacgtgcaagcaatcaattaccctacggtgccccggggagaagagctcctacggattgcccccacccctcaccacacaccccagatgatgaactacttccttgagaatctgctagtcacatggaagcaagtggggctggaactgaagcctcattcctcagctgagtgcaacttctgcaggaggccactgcattttgaagtgatgagtgaaagagagaagtcctatttctcaggcttgagcaagttggtatctgctcaggcctgagcatgacctcaattatttcacttaaccccaggccattatcatatccagatggtcttcagagttgtctttatatgtgaattaagttatattaaattttaatctatagtaaaaacatagtcctggaaataaattcttgcttaaatggtgaatctt

SEQ ID NO: 298801 - DNA, 1897 bp, Homo sapiens
  misc_feature (44)..(44): n is a, c, g, or t
cccacgggccagttcaatcaaacagtgtcttgaaagggaaaggncctggcggactcctgatggatcccagcagagtccagatggcacacagcttccgtctggacaccccttgcctgccacaagccagggcactgcaagcaaatgccctttcctggcagcacagatgaatcagagaggcagcagtgtcttctgcaaagccagtcttgagcttcaggaggatgtgcaggaaatgaatgccgtgaggaaagaggttgctgaaacctcagcaggccccagtgtggttagtgtgaaaaccgatggaggggatcccagtggactgctgaagaacttccaggacatcatgcaaaagcaaagaccagaaagagtgtctcatcttcttcaagataacttgccaaaatctgtttccacttttcagtatgatcgtttctttgagaaaaaaattgatgagaaaaagaatgaccacacctatcgagtttttaaaactgtgaaccggcgagcacacatcttccccatggcagatgactattcagactccctcatcaccaaaaagcaagtgtcagtctggtgcagtaatgactacctaggaatgagtcgccacccacgggtgtgtggggcagttatggacactttgaaacaacatggtgctggggcaggtggtactagaaatatttctggaactagtaaattccatgtggacttagagcgggagctggcagacctccatgggaaagatgccgcactcttgttttcctcgtgctttgtggccaatgactcaaccctcttcaccctggctaagatgatgccaggctgtgagatttactctgattctgggaaccatgcctccatgatccaagggattcgaaacagccgagtgccaaagtacatcttccgccacaatgatgtcagccacctcagagaactgctgcaaagatctgacccctcagtccccaagattgtggcatttgaaactgtccattcaatggatggggcggtgtgcccactggaagagctgtgtgatgtggcccatgagtttggagcaatcaccttcgtggatgaggtccacgcagtggggctttatggggctcgaggcggagggattggggatcgggatggagtcatgccaaaaatggacatcatttctggaacacttggcaaagcctttggttgtgttggagggtacatcgccagcacgagttctctgattgacaccgtacggtcctatgctgctggcttcatcttcaccacctctctgccacccatgctgctggctggagccctggagtctgtgcggatcctgaagagcgctgagggacgggtgcttcgccgccagcaccagcgcaacgtcaaactcatgagacagatgctaatggatgccggcctccctgttgtccactgccccagccacatcatccctgtgcgggttgcagatgctgctaaaaacacagaagtctgtgatgaactaatgagcagacataacatctacgtgcaagcaatcaattaccctacggtgccccggggagaagagctcctacggattgcccccacccctcaccacacaccccagatgatgaactacttccttgagaatctgctagtcacatggaagcaagtggggctggaactgaagcctcattcctcagctgagtgcaacttctgcaggaggccactgcattttgaagtgatgagtgaaagagagaagtcctatttctcaggcttgagcaagttggtatctgctcaggcctgagcatgacctcaattatttcacttaaccccaggccattatcatatccagatggtcttcagagttgtctttatatgtgaattaagttatattaaattttaatctatagtaaaaacatagtcctggaaataaattcttgcttaaatggtgaatctt

SEQ ID NO: 298802 - DNA, 2751 bp, Homo sapiens
gctgtatattaaggcgccggcgatcgcggcctgaggctgctcccggacaagggcaacgagcgtttcgtttggacttctcgacttgagtgcccgcctccttcgccgccgcctctgcagtcctcagcgcagtctttccacaggagccagcatacttcctgaacatggagagtgttgttcgccgctgcccattcttatcccgagtcccccaggcctttctgcagaaagcaggcaaatctctgttgttctatgcccaaaactgccccaagatgatggaagttggggccaagccagcccctcgggcattgtccactgcagcagtacactaccaacagatcaaagaaacccctccggccagtgagaaagacaaaactgctaaggccaaggtccaacagactcctgatggatcccagcagagtccagatggcacacagcttccgtctggacaccccttgcctgccacaagccagggcactgcaagcaaatgccctttcctggcagcacagatgaatcagagaggcagcagtgtcttctgcaaagccagtcttgagcttcaggaggatgtgcaggaaatgaatgccgtgaggaaagaggttgctgaaacctcagcaggccccagtgtggttagtgtgaaaaccgatggaggggatcccagtggactgctgaagaacttccaggacatcatgcaaaagcaaagaccagaaagagtgtctcatcttcttcaagataacttgccaaaatctgtttccacttttcagtatgatcgtttctttgagaaaaaaattgatgagaaaaagaatgaccacacctatcgagtttttaaaactgtgaaccggcgagcacacatcttccccatggcagatgactattcagactccctcatcaccaaaaagcaagtgtcagtctggtgcagtaatgactacctaggaatgagtcgccacccacgggtgtgtggggcagttatggacactttgaaacaacatggtgctggggcaggtggtactagaaatatttctggaactagtaaattccatgtggacttagagcgggagctggcagacctccatgggaaagatgccgcactcttgttttcctcgtgctttgtggccaatgactcaaccctcttcaccctggctaagatgatgccaggctgtgagatttactctgattctgggaaccatgcctccatgatccaagggattcgaaacagccgagtgccaaagtacatcttccgccacaatgatgtcagccacctcagagaactgctgcaaagatctgacccctcagtccccaagattgtggcatttgaaactgtccattcaatggatggggcggtgtgcccactggaagagctgtgtgatgtggcccatgagtttggagcaatcaccttcgtggatgaggtccacgcagtggggctttatggggctcgaggcggagggattggggatcgggatggagtcatgccaaaaatggacatcatttctggaacacttggcaaagcctttggttgtgttggagggtacatcgccagcacgagttctctgattgacaccgtacggtcctatgctgctggcttcatcttcaccacctctctgccacccatgctgctggctggagccctggagtctgtgcggatcctgaagagcgctgagggacgggtgcttcgccgccagcaccagcgcaacgtcaaactcatgagacagatgctaatggatgccggcctccctgttgtccactgccccagccacatcatccctgtgcggataacatctacgtgcaagcaatcaattaccctacggtgccccggggagaagagctcctacggattgcccccacccctcaccacacaccccagatgatgaactacttccttgagaatctgctagtcacatggaagcaagtggggctggaactgaagcctcattcctcagctgagtgcaacttctgcaggaggccactgcattttgaagtgatgagtgaaagagagaagtcctatttctcaggcttgagcaagttggtatctgctcaggcctgagcatgacctcaattatttcacttaaccccaggccattatcatatccagatggtcttcagagttgtctttatatgtgaattaagttatattaaattttaatctatagtaaaaacatagtcctggaaataaaaaaaaaaaaaaaaaaaaaaaaaaaaaaaaaaaaaaaaaaaaaaaaaaaaaaaaaaaaaaaaaaaaaaaaaaaaaaaaaaaaaaaaaaaaaaaaaaaaaagagaggcggcggcgcgagcagcaataaatactacacccgcgggaaggacgaacaaaaaaccccgtccgcccccgcgccatgttatgataaagcagaaggggcgcgccacaaagagaggaggtgtggtacctatattaaatcaaacacccggagagcggccgcgacccggcgcaaaaaaaggagccgcgcgagggagagcacaacaaaacgccgagcggcccgagcacatagccagacacaagagagcaaacacaaaccacaccaccgtcgggcggcgggcagcgaacaacaaccgagggacgaacacaaccccacacaccccgcagcgggagcaaataaagaagggccccagcacgggcgggaaacaataagccaacgtcccccacgaacgcatctcacgcgggcgaccacaaaccagacgaacacaaacaccagcgccggcgccagacaacaagtcgagagcagagacgacgcaccctccaaccccacc

SEQ ID NO: 298803 - DNA, 1734 bp, Homo sapiens
tggcgtcagaggtccccgcggaggcaaggtcttcgcaaggcagtctgagctgcaggaggatggcaggaaagaagccggaggaaagaggttgctgaaacctcagcaggccccagtgtggttagtgtgaaaaccgatggaggggatcccagtggactgctgaagaacttccaggacatcatgcaaaagcaaagaccagaaagagtgtctcatcttcttcaagataacttgccaaaatctgtttccacttttcagtatgatcgtttctttgagaaaaaaattgatgagaaaaagaatgaccacacctatcgagtttttaaaactgtgaaccggcgagcacacatcttccccatggcagatgactattcagactccctcatcaccaaaaagcaagtgtcagtctggtgcagtaatgactacctaggaatgagtcgccacccacgggtgtgtggggcagttatggacactttgaaacaacatggtgctggggcaggtggtactagaaatatttctggaactagtaaattccatgtggacttagagcgggagctggcagacctccatgggaaagatgccgcactcttgttttcctcgtgctttgtggccaatgactcaaccctcttcaccctggctaagatgatgccaggctgtgagatttactctgattctgggaaccatgcctccatgatccaagggattcgaaacagccgagtgccaaagtacatcttccgccacaatgatgtcagccacctcagagaactgctgcaaagatctgacccctcagtccccaagattgtggcatttgaaactgtccattcaatggatggggcggtgtgcccactggaagagctgtgtgatgtggcccatgagtttggagcaatcaccttcgtggatgaggtccacgcagtggggctttatggggctcgaggcggagggattggggatcgggatggagtcatgccaaaaatggacatcatttctggaacacttggcaaagcctttggttgtgttggagggtacatcgccagcacgagttctctgattgacaccgtacggtcctatgctgctggcttcatcttcaccacctctctgccacccatgctgctggctggagccctggagtctgtgcggatcctgaagagcgctgagggacgggtgcttcgccgccagcaccagcgcaacgtcaaactcatgagacagatgctaatggatgccggcctccctgttgtccactgccccagccacatcatccctgtgcgggttgcagatgctgctaaaaacacagaagtctgtgatgaactaatgagcagacataacatctacgtgcaagcaatcaattaccctacggtgccccggggagaagagctcctacggattgcccccacccctcaccacacaccccagatgatgaactacttccttgagaatctgctagtcacatggaagcaagtggggctggaactgaagcctcattcctcagctgagtgcaacttctgcaggaggccactgcattttgaagtgatgagtgaaagagagaagtcctatttctcaggcttgagcaagttggtatctgctcaggcctgagcatgacctcaattatttcacttaaccccaggccattatcatatccagatggtcttcagagttgtctttatatgtgaattaagttatattaaattttaatctatagtaaaaacatagtcctggaaataaattcttgcttaaatggtgaatctt

SEQ ID NO: 298804 - DNA, 1426 bp, Homo sapiens
tttcgagcggccgcccggttatgtcaacaattaaggccccatggcagatgactattcagactccctcatcaccaaaaagcaagtgtcagtctggtgcagtaatgactacctaggaatgagtcgccacccacgggtgtgtggggcagttatggacactttgaaacaacatggtgctggggcaggtggtactagaaatatttctggaactagtaaattccatgtggacttagagcgggagctggcagacctccatgggaaagatgccgcactcttgttttcctcgtgctttgtggccaatgactcaaccctcttcaccctggctaagatgatgccaggctgtgagatttactctgattctgggaaccatgcctccatgatccaagggattcgaaacagccgagtgccaaagtacatcttccgccacaatgatgtcagccacctcagagaactgctgcaaagatctgacccctcagtccccaagattgtggcatttgaaactgtccattcaatggatggggcggtgtgcccactggaagagctgtgtgatgtggcccatgagtttggagcaatcaccttcgtggatgaggtccacgcagtggggctttatggggctcgaggcggagggattggggatcgggatggagtcatgccaaaaatggacatcatttctggaacacttggcaaagcctttggttgtgttggagggtacatcgccagcacgagttctctgattgacaccgtacggtcctatgctgctggcttcatcttcaccacctctctgccacccatgctgctggctggagccctggagtctgtgcggatcctgaagagcgctgagggacgggtgcttcgccgccagcaccagcgcaacgtcaaactcatgagacagatgctaatggatgccggcctccctgttgtccactgccccagccacatcatccctgtgcgggttgcagatgctgctaaaaacacagaagtctgtgatgaactaatgagcagacataacatctacgtgcaagcaatcaattaccctacggtgccccggggagaagagctcctacggattgcccccacccctcaccacacaccccagatgatgaactacttccttgagaatctgctagtcacatggaagcaagtggggctggaactgaagcctcattcctcagctgagtgcaacttctgcaggaggccactgcattttgaagtgatgagtgaaagagagaagtcctatttctcaggcttgagcaagttggtatctgctcaggcctgagcatgacctcaattatttcacttaaccccaggccattatcatatccagatggtcttcagagttgtctttatatgtgaattaagttatattaaattttaatctatagtaaaaacatagtcctggaaataaattcttgcttaaatggtgaatctt

SEQ ID NO: 298805 - DNA, 2010 bp, Homo sapiens
gctgtatattaaggcgccggcgatcgcggcctgaggctgctcccggacaagggcaacgagcgtttcgtttggacttctcgacttgagtgcccgcctccttcgccgccgcctctgcagtcctcagcgcagtctttccacaggagccagcatacttcctgaacatggagagtgttgttcgccgctgcccattcttatcccgagtcccccaggcctttctgcagaaagcaggcaaatctctgttgttctatgcccaaaactgccccaagatgatggaagttggggccaagccagcccctcgggcattgtccactgcagcagtacactaccaacagatcaaagaaacccctccggccagtgagaaagacaaaactgctaaggccaaggtccaacagactcctgatggatcccagcagagtccagatggcacacagcttccgtctggacaccccttgcctgccacaagccagggcactgcaagcaaatgccctttcctggcagcacagatgaatcagagaggcagcagtgtcttctgcaaagccagtcttgagcttcaggaggatgtgcaggaaatgaatgccgtgaggaaagaggttgctgaaacctcagcaggccccagtgtggttagtgtgaaaaccgatggaggggatcccagtggactgctgaagaacttccaggacatcatgcaaaagcaaagaccagaaagagtgtctcatcttcttcaagataacttgccaaaatctgtttccacttttcagtatgatcgtttctttgagaaaaaaattgatgagaaaaagaatgaccacacctatcgagtttttaaaactgtgaaccggcgagcacacatcttccccatggcagatgactattcagactccctcatcaccaaaaagcaagtgtcagtctggtgcagtaatgactacctaggaatgagtcgccacccacgggtgtgtggggcagttatggacactttgaaacaacatggtgctggggcaggtggtactagaaatatttctggaactagtaaattccatgtggacttagagcgggagctggcagacctccatgggaaagatgccgcactcttgttttcctcgtgctttgtggccaatgactcaaccctcttcaccctggctaagatgatgccaggctgtgagatttactctgattctgggaaccatgcctccatgatccaagggattcgaaacagccgagtgccaaagtacatcttccgccacaatgatgtcagccacctcagagaactgctgcaaagatctgacccctcagtccccaagattgtggcatttgaaactgtccattcaatggatggggcggtgtgcccactggaagagctgtgtgatgtggcccatgagtttggagcaatcaccttcgtggatgaggtccacgcagtggggctttatggggctcgaggcggagggattggggatcgggatggagtcatgccaaaaatggacatcatttctggaacacttggcaaagcctttggttgtgttggagggtacatcgccagcacgagttctctgattgacaccgtacggtcctatgctgctggcttcatcttcaccacctctctgccacccatgctgctggctggagccctggagtctgtgcggatcctgaagagcgctgagggacgggtgcttcgccgccagcaccagcgcaacgtcaaactcatgagacagatgctaatggatgccggcctccctgttgtccactgccccagccacatcatccctgtgcgggttgcagatgctgctaaaaacacagaagtctgtgatgaactaatgagcagacataacatctacgtgcaagcaatcaattaccctacggtgccccggggagaagagctcctacggattgcccccacccctcaccacacaccccagatgatgaactacttccttggtgagtacctggggagctgctggtgcctcactgaggagttgcataaagctgtctttgcagtgtttataattgaagcccttcagaggc

SEQ ID NO: 298806 - DNA, 1576 bp, Homo sapiens
gctgtatattaaggcgccggcgatcgcggcctgaggctgctcccggacaagggcaacgagcgtttcgtttggacttctcgacttgagtgcccgcctccttcgccgccgcctctgcagtcctcagcgcagtctttccacaggagccagcatacttcctgaacatggagagtgttgttcgccgctgcccattcttatcccgagtcccccaggcctttctgcagaaagcaggcaaatctctgttgttctatgcccaaaactgccccaagatgatggaagttggggccaagccagcccctcgggcattgtccactgcagcagtacactaccaacagatcaaagaaacccctccggccagtgagaaagacaaaactgctaaggccaaggtccaacagactcctgatggatcccagcagagtccagatggcacacagcttccgtctggacaccccttgcctgccacaagccagggcactgcaagcaaatgccctttcctggcagcacagatgaatcagagaggcagcagtgtcttctgcaaagccagtcttgagcttcaggaggatgtgcaggaaatgaatgccgtgaggaaagaggttgctgaaacctcagcaggccccagtgtggttagtgtgaaaaccgatggaggggatcccagtggactgctgaagaacttccaggacatcatgcaaaagcaaagaccagaaagagtgtctcatcttcttcaagataacttgccaaaatctgtttccacttttcagtatgatcgtttctttgagaaaaaaattgatgagaaaaagaatgaccacacctatcgagtttttaaaactgtgaaccggcgagcacacatcttccccatggcagatgactattcagactccctcatcaccaaaaagcaagtgtcagtctggtgcagtaatgactacctaggaatgagtcgccacccacgggtgtgtggggcagttatggacactttgaaacaacatggtgctggggcaggtggtactagaaatatttctggaactagtaaattccatgtggacttagagcgggagctggcagacctccatgggaaagatgccgcactcttgttttcctcgtgctttgtggccaatgactcaaccctcttcaccctggctaagatgatgccaggtaaggaagcctggcatgagtgccttcgagtttttggggtttcttagtaataacaagaatatgggcaacaaagaagccttaccagaacctctcaattgaaaatcataatcctatctgggcattggttctggggtcaagcatgaaatgctgactgtacattatgggctccaggagaacgtgataccagtgaaaattcaaacttgaaacgtctcatccttgagctaattgcctcaaatatgttttgtattctaagatgatcctttggagaagtctcttaatcatttagttagctcttgattgagtttggagtgaggcagtcagatttaagagcagattaatggcctgccacaaggttattctacacctttgggccttctcacaagggaagcactaactagttattttgccaggaagaaactggcacacagtg

SEQ ID NO: 298807 - DNA, 1856 bp, Homo sapiens
gctgtatattaaggcgccggcgatcgcggcctgaggctgctcccggacaagggcaacgagcgtttcgtttggacttctcgacttgagtgcccgcctccttcgccgccgcctctgcagtcctcagcgcagtctttccacaggagccagcatacttcctgaacatggagagtgttgttcgccgctgcccattcttatcccgagtcccccaggcctttctgcagaaagcaggcaaatctctgttgttctatgcccaaaactgccccaagatgatggaagttggggccaagccagcccctcgggcattgtccactgcagcagtacactaccaacagatcaaagaaacccctccggccagtgagaaagacaaaactgctaaggccaaggtccaacagactcctgatggatcccagcagagtccagatggcacacagcttccgtctggacaccccttgcctgccacaagccagggcactgcaagcaaatgccctttcctggcagcacagatgaatcagagaggcagcagtgtcttctgcaaagccagtcttgagcttcaggaggatgtgcaggaaatgaatgccgtgaggaaagaggttgctgaaacctcagcaggccccagtgtggttagtgtgaaaaccgatggaggggatcccagtggactgctgaagaacttccaggacatcatgcaaaagcaaagaccagaaagagtgtctcatcttcttcaagataacttgccaaaatctgtttccacttttcagtatgatcgtttctttgagaaaaaaattgatgagaaaaagaatgaccacacctatcgagtttttaaaactgtgaaccggcgagcacacatcttccccatggcagatgactattcagactccctcatcaccaaaaagcaagtgtcagtctggtgcagtaatgactacctaggaatgagtcgccacccctcaccacacaccccagatgatgaactacttccttgagaatctgctagtcacatggaagcaagtggggctggaactgaagcctcattcctcagctgagtgcaacttctgcaggaggccactgcattttgaagtgatgagtgaaagagagaagtcctatttctcaggcttgagcaagttggtatctgctcaggcctgagcatgacctcaattatttcacttaaccccaggccattatcatatccagatggtcttcagagttgtctttatatgtgaattaagttatattaaattttaatctatagtaaaaacatagtcctggaaataaaaaaaaaaaaaaaaaaaaaaaaaaaaaaaaaaaaaaaaaaaaaaaaaaaaaaaaaaaaaaaaaaaaaaaaaaaaaaaaaaaaaaaaaaaaaaaaaaaaaagagaggcggcggcgcgagcagcaataaatactacacccgcgggaaggacgaacaaaaaaccccgtccgcccccgcgccatgttatgataaagcagaaggggcgcgccacaaagagaggaggtgtggtacctatattaaatcaaacacccggagagcggccgcgacccggcgcaaaaaaaggagccgcgcgagggagagcacaacaaaacgccgagcggcccgagcacatagccagacacaagagagcaaacacaaaccacaccaccgtcgggcggcgggcagcgaacaacaaccgagggacgaacacaaccccacacaccccgcagcgggagcaaataaagaagggccccagcacgggcgggaaacaataagccaacgtcccccacgaacgcatctcacgcgggcgaccacaaaccagacgaacacaaacaccagcgccggcgccagacaacaagtcgagagcagagacgacgcaccctccaaccccacc

SEQ ID NO: 298808 - DNA, 1249 bp, Homo sapiens
gctgtatattaaggcgccggcgatcgcggcctgaggctgctcccggacaagggcaacgagcgtttcgtttggacttctcgacttgagtgcccgcctccttcgccgccgcctctgcagtcctcagcgcagtctttccacaggagccagcatacttcctgaacatggagagtgttgttcgccgctgcccattcttatcccgagtcccccaggcctttctgcagaaagcaggcaaatctctgttgttctatgcccaaaactgccccaagatgatggaagttggggccaagccagcccctcgggcattgtccactgcagcagtacactaccaacagatcaaagaaacccctccggccagtgagaaagacaaaactgctaaggccaaggtccaacagactcctgatggatcccagcagagtccagatggcacacagcttccgtctggacaccccttgcctgccacaagccagggcactgcaagcaaatgccctttcctggcagcacagatgaatcagagaggcagcagtgtcttctgcaaagccagtcttgagcttcaggaggatgtgcaggaaatgaatgccgtgaggaaagaggttgctgaaacctcagcaggccccagtgtggttagtgtgaaaaccgatggaggggatcccagtggactgctgaagaacttccaggacatcatgcaaaagcaaagaccagaaagagtgtctcatcttcttcaagataacttgccaaaatctgtttccacttttcagtatgatcgtttctttgagaaaaaaattgatgagaaaaagaatgaccacacctatcgagtttttaaaactgtgaaccggcgagcacacatcttccccatggcagatgactattcagactccctcatcaccaaaaagcaagtgtcagtctggtgcagtaatgactacctaggaatgagtcgccacccctcaccacacaccccagatgatgaactacttccttgagaatctgctagtcacatggaagcaagtggggctggaactgaagcctcattcctcagctgagtgcaacttctgcaggaggccactgcattttgaagtgatgagtgaaagagagaagtcctatttctcaggcttgagcaagttggtatctgctcaggcctgagcatgacctcaattatttcacttaaccccaggccattatcatatccagatggtcttcagagttgtctttatatgtgaattaagttatattaaattttaatctatagtaaaaa

SEQ ID NO: 298809 - DNA, 1367 bp, Homo sapiens
ctagctacttgggaggctgaggcggaaggaatacttgagcccaggaggttgaggctgcagagagctatgatcatgccactgcactccagcctgggtgacagagcaagaccctgtctctaaaaaaaaaaggaagattagatatccttttatagtcatgcattgcttaacgatgggggatgtgttctgagaattgcatcactaggcgatttcatcattgtgcaaacaccatagagtgtacttacataaacctagattatatagcctaccgcacacctaggctttgtggtatggcgtgttgctcctaggctgcaaacctgtacaacatgttactgtattggatactgttggcaacaccatggtatttgtgtatctaaacatacctaaacatagaaaaggtacagtaaaaatacagtattataatcttatgggaccaccatcatatatgtggtcgtcattgactgagacatcattaatgtggtgcatgactactccaatcagtccaggaacaaattaaaaagataaggagaaaagtcagtgctttgaggctccacaacaccttgctgtgtccatttagagcaatttacagctgttgctgtaattaatgaagctatctcctcccaggcaaagcctttggttgtgttggagggtacatcgccagcacgagttctctgattgacaccgtacggtcctatgctgctggcttcatcttcaccacctctctgccacccatgctgctggctggagccctggagtctgtgcggatcctgaagagcgctgagggacgggtgcttcgccgccagcaccagcgcaacgtcaaactcatgagacagatgctaatggatgccggcctccctgttgtccactgccccagccacatcatccctgtgcgggttgcagatgctgctaaaaacacagaagtctgtgatgaactaatgagcagacataacatctacgtgcaagcaatcaattaccctacggtgccccggggagaagagctcctacggattgcccccacccctcaccacacaccccagatgatgaactacttccttgagaatctgctagtcacatggaagcaagtggggctggaactgaagcctcattcctcagctgagtgcaacttctgcaggaggccactgcattttgaagtgatgagtgaaagagagaagtcctatttctcaggcttgagcaagttggtatctgctcaggcctgagcatgacctcaattatttcacttaaccccaggccattatcatatccagatggtcttcagagttgtctttatatgtgaattaagttatattaaattttaatctatagtaaaaacatagtcctggaaataaattcttgcttaaatggtgaatctt

SEQ ID NO: 298810 - DNA, 1063 bp, Homo sapiens
gctgtatattaaggcgccggcgatcgcggcctgaggctgctcccggacaagggcaacgagcgtttcgtttggacttctcgacttgagtgcccgcctccttcgccgccgcctctgcagtcctcagcgcagtctttccacaggagccagcatacttcctgaacatggagagtgttgttcgccgctgcccattcttatcccgagtcccccaggcctttctgcagaaagcaggcaaatctctgttgttctatgcccaaaactgccccaagatgatggaagttggggccaagccagcccctcgggcattgtccactgcagcagtacactaccaacagatcaaagaaacccctccggccagtgagaaagacaaaactgctaaggccaaggtccaacagactcctgatggatcccagcagagtccagatggcacacagcttccgtctggacaccccttgcctgccacaagccagggcactgcaagcaaatgccctttcctggcagcacagatgaatcagagaggcagcagtgtcttctgcaaagccagtcttgagcttcaggaggatgtgcaggaaatgaatgccgtgaggaaagaggttgctgaaacctcagcaggccccagtgtggttagtgtgaaaaccgatggaggggatcccagtggactgctgaagaacttccaggacatcatgcaaaagcaaagaccagaaagagtgtctcatcttcttcaagataacttgccaaaatctgtttccacttttcagtatgatcgtttctttgagaaaaaaattgatgagaaaaagaatgaccacacctatcgagtttttaaaactgtgaaccggcgagcacacatcttccccatggcagatgactattcagactccctcatcaccaaaaagcaagtgtcagtctggtgcagtaatgactacctaggaatgagtcgccacccctcaccacacaccccagatgatgaactacttccttggtgagtacctggggagctgctggtgcctcactgaggagttgcataaagctgtctttgcagtgtttataattgaagcccttcagaggc

SEQ ID NO: 298811 - DNA, 1048 bp, Homo sapiens
gctgtatattaaggcgccggcgatcgcggcctgaggctgctcccggacaagggcaacgagcgtttcgtttggacttctcgacttgagtgcccgcctccttcgccgccgcctctgcagtcctcagcgcagttatgcccagttcttcccgctgtggggacacgaccacggaggaatccttgcttcagggactcgggaccctgctggaccccttcctcgggtttaggggatgtggggaccaggagaaagtcaggatccctaagagtcttccctgcctggatggatgagtggcttcttctccacctagattctttccacaggagccagcatacttcctgaacatggagagtgttgttcgccgctgcccattcttatcccgagtcccccaggcctttctgcagaaagcaggcaaatctctgttgttctatgcccaaaactgccccaagatgatggaagttggggccaagccagcccctcgggcattgtccactgcagcagtacactaccaacagatcaaagaaacccctccggccagtgagaaagacaaaactgctaaggccaaggtccaacagactcctgatggatcccagcagagtccagatggcacacagcttccgtctggacaccccttgcctgccacaagccagggcactgcaagcaaatgccctttcctggcagcacagatgaatcagagaggcagcagtgtcttctgcaaagccagtcttgagcttcaggaggatgtgcaggaaatgaatgccgtgaggaaagaggttgctgaaacctcagcaggccccagtgtggttagtgtgaaaaccgatggaggggatcccagtggactgctgaagaacttccaggaggccactgcattttgaagtgatgagtgaaagagagaagtcctatttctcaggcttgagcaagttggtatctgctcaggcctgagcatgacctcaattatttcacttaaccccaggccattatcatatccagatggtcttcagagttgtctttatatgtgaattaagttatattaaattttaatctatagtaaaaa

SEQ ID NO: 298812 - DNA, 470 bp, Homo sapiens
aactttggttatgcttggccttttttgtgaactaggccataagccatttttgacaatatgtttggaagatattgtgaactcagaatagaaagttggtcccatttgtttcttgttacttttgttccagaggttgctgaaacctcagcaggccccagtgtggttagtgtgaaaaccgatggaggggatcccagtggactgctgaagaacttccaggacatcatgcaaaagcaaagaccagaaagagtgtctcatcttcttcaagataacttgccaaaatgtaagtctcattgttatttgcctgatgtagaaaagaatttataattcaaatgtacattagattaaatataaaattgcatggtgaggctgggcacagtagctcatacctgtaatcccagcactttgggaggctgaagcgggagaagatcacttgaggccaggagtttgaggccagccttggcaacatagcaaga

SEQ ID NO: 298813 - DNA, 757 bp, Homo sapiens
gcgtttcgtttggacttctcgacttgagtgcccgcctccttcgccgccgcctctgcagtcctcagcgcaggtgagggcccgcgcggtaggtgcggcgccggccgaggaagccccggggtgtcctgccagccgtggcaccgctgccccgggtgctgggaccccatcccccactgtcccagtcacccgccgccttgaggtcagcgtttatcctccagatcttttgcctagacggccgcctcagtttccccctttcggccccttccggctattcccggttgaacccgccgctttagaattcccttctcatacccctcccgtcattctcgagacctcgaccgcgggtcacctctgacccccactgccggaggactgccttctttctccagactcaactccctcgactttataagcccctgcgcgtccccagtgaggcccaaggcgctggccctcatacccctaccctcatttgtgcccctcctttctcagttatgcccagttcttcccgctgtggggacacgaccacggaggaatccttgcttcagggactcgggaccctgctggaccccttcctcgggtttaggggatgtggggaccaggagaaagtcaggatccctaagagtcttccctgcctggatggatgagtggcttcttctccacctagatgtaagccaagatgtcttatctgcactgtgcatctccctaagaaacctctggcctcccaaacctgttcttgacctttccctcatccttccgcccc

SEQ ID NO: 298814 - DNA, 2398 bp, Homo sapiens
gggaaagggaatgactgtagtaaatgatacatattttccttttttataatttatcactttattctttgacagtttatttgttttggagaggaagtggcctatcaattatgggttatgtgcaattggattttgaaaaataaaacaagctatttaggaattgaacatgagatatatggaaatataatttggtttttgttaatctcatcctctccaccttgtgtagataggttattgctagttatgatatttatttctaaaatatgttatttgaactgtgaaaagtggttcatatagtacactttgtggaacaattttatatcattaccccgatgaaaagttcaatctctggatatttaatgataacactcaggtaagggctacaaacgctgtaaattaagaacaagatattattaatgtaaaagcgctgggctgtttccttatcccacacaaagaatcttttaccttggtatatgtggatatggtatattaccttggtgtatgtatatgtgtgtatacgcacacactcatacaactgagaagcctatagtatatggttaatttttggagaaaagggtgttttattgtgggttacagatcataagtgagtgaatagatgtaattccttgatgcacaccaatagatgtgttcccattgacatcttagaagtattgtatgaagaggaggacctagggcttgaaatgaaatgagaatcaatcaattgcaacattacatgatggaataatgagaagagatactgaaactagaggatttttcatctatcaaagcttgataaattaggttgtgcaaaaacttggcagtggctttctagagatgaaactggagacatgttagtgctggataaatcatttaaaattaccatttaatttattttctacattgtttatctgaagactcagaaaatccacatatttgagcttaccagactcttgggtgcattgctgttctatcttctgcttcaacagttaggaaaataaagaccaatatgaatttggaatgtcagaatttctgacataacacattggcgaggagtatggaatgtaagggtcggtgaaagtttcatatcctggaacatcttgcattgccaattgaaagacataaaagtatgcagaatcaaaataatatgtgtccactttcatgtgtaagtgaaacatattctttacaccaactattgaagcagttgctcctagaaacctagtttctccagatttcccaagtggaaaatatttagtatgttttaagcttacattcaattactccagagtcttaggacccaaccatatacttccttttattttttattaaagaaaatgacttgttattttgtaacggctgagtcctgtgatcaaataaaagcatcagttcaatatatcagggaaattgcatgttacccagcaactgaaataataaaattcaagctctctttttctaaatgggccagagacctgatgagaaagtctccaggaagccaaactttaacatactttgtccatttttagttaggttcttggtgccaagttgtcatccctgatgcattagttgctttcagtgcattgaatgaattttatttttacttcctatgttgtaagaatggttttgaatagaaggtcagtgatggtacagattcgtataattttaaaacatgattagatggtagtgaagtgttatgagtgaggaggtataattgatgtcatgaggaagtgagtactgaatggttctatgatttaaggtaaagcagcagttgtagtaagtgtattttacaaatacacatgtaaatagaggtttacctggaaatatgtacgttctaaaaggtcaattttttaattttattttttgctggttatcctggccaagtgtcttcagaactcatccaagttacgagacgaaataaactaaaatcacctcattaatttttttcccttagttacaaccaaatgaatttatgtaatctctgaatgaactacatccctattccagccgctgatgaatatgttctccagcacaaggcagcattaaaaggaaatacttttcagtatttcttttcatgccaaaaaacctacagaataattttccaaacagtcctttattcgtaattataagaattaaacaatctaaaatattaaagatttaccctccagcacattcactgggtaaagaccatttaatttgccctctcagggaatttgaaataaattatttgtcctggatattctttaaaaactttttatttattcagcaaattttggcaaaaaaatttctttctttgcttaaaacattctggtactatataaggaacaacaaactaaaatgtatgtagtgttattttgtaatctcatcactatcaataaagctgcattcaataagaccttagtcaatgact

SEQ ID NO: 298815 - DNA, 409 bp, Homo sapiens
cagtctgtgctataacgtgtcacaggtgacttaataaagctaagtacagcatacagtaaagatactgtatggaaaagagggtcacctgcggggagggaaaaggcttcataaaggagatgtctctggaaagatgttcacttgtttgcttcatagacttcgaaagcaattctttctaggcagagagaaggtacaagaaaaggttctgaggcatgaaacatgcaggcaagttcatagaactccatctaatcagctccattaggctgtagtgtagattgaaatgaagcgataagagatgtggctggagaaactgaaaagggaccacagaaagaagagcattgaatgccaggctgagtttagcctatgtggcaatgtttcccaagtgtattttcaagataccccaacacacaca

SEQ ID NO: 298816 - DNA, 4454 bp, Homo sapiens
agtccagacaaccggcttccagctggggctggggaaagggggttggaggggtgcgccccccccccacgccccttaggggtgggggacgcgggctcagagttccagggacccaggaatgcccccccgccagccccctcggcaggcggggggagggctcagccgggagtttggcaaactcctccccgcgttgagtcattcgcctctgggaggtttaggaagcggctccgggtcggtggccccaggacagggaagagcgggcgctatggggagccggacgccagagtcccctctccacgccgtgcagctgcgctggggcccccggcgccgacccccgctgctgccgctgctgttgctgctgctgccgccgccacccagggtcgggggcttcaacttagacgcggaggccccagcagtactctcggggcccccgggctccttcttcggattctcagtggagttttaccggccgggaacagacggggtcagtgtgctggtgggagcacccaaggctaataccagccagccaggagtgctgcagggtggtgctgtctacctctgtccttggggtgccagccccacacagtgcacccccattgaatttgacagcaaaggctctcggctcctggagtcctcactgtccagctcagagggagaggagcctgtggagtacaagtccttgcagtggttcggggcaacagttcgagcccatggctcctccatcttggcatgcgctccactgtacagctggcgcacagagaaggagccactgagcgaccccgtgggcacctgctacctctccacagataacttcacccgaattctggagtatgcaccctgccgctcagatttcagctgggcagcaggacagggttactgccaaggaggcttcagtgccgagttcaccaagactggccgtgtggttttaggtggaccaggaagctatttctggcaaggccagatcctgtctgccactcaggagcagattgcagaatcttattaccccgagtacctgatcaacctggttcaggggcagctgcagactcgccaggccagttccatctatgatgacagctacctaggatactctgtggctgttggtgaattcagtggtgatgacacagaagactttgttgctggtgtgcccaaagggaacctcacttacggctatgtcaccatccttaatggctcagacattcgatccctctacaacttctcaggggaacagatggcctcctactttggctatgcagtggccgccacagacgtcaatggggacgggctggatgacttgctggtgggggcacccctgctcatggatcggacccctgacgggcggcctcaggaggtgggcagggtctacgtctacctgcagcacccagccggcatagagcccacgcccacccttaccctcactggccatgatgagtttggccgatttggcagctccttgacccccctgggggacctggaccaggatggctacaatgatgtggccatcggggctccctttggtggggagacccagcagggagtagtgtttgtatttcctgggggcccaggagggctgggctctaagccttcccaggttctgcagcccctgtgggcagccagccacaccccagacttctttggctctgcccttcgaggaggccgagacctggatggcaatggatatcctgatctgattgtggggtcctttggtgtggacaaggctgtggtatacaggggccgccccatcgtgtccgctagtgcctccctcaccatcttccccgccatgttcaacccagaggagcggagctgcagcttagaggggaaccctgtggcctgcatcaaccttagcttctgcctcaatgcttctggaaaacacgttgctgactccattggtttcacagtggaacttcagctggactggcagaagcagaagggaggggtacggcgggcactgttcctggcctccaggcaggcaaccctgacccagaccctgctcatccagaatggggctcgagaggattgcagagagatgaagatctacctcaggaacgagtcagaatttcgagacaaactctcgccgattcacatcgctctcaacttctccttggacccccaagccccagtggacagccacggcctcaggccagccctacattatcagagcaagagccggatagaggacaaggctcagatcttgctggactgtggagaagacaacatctgtgtgcctgacctgcagctggaagtgtttggggagcagaaccatgtgtacctgggtgacaagaatgccctgaacctcactttccatgcccagaatgtgggtgagggtggcgcctatgaggctgagcttcgggtcaccgcccctccagaggctgagtactcaggactcgtcagacacccagggaacttctccagcctgagctgtgactactttgccgtgaaccagagccgcctgctggtgtgtgacctgggcaaccccatgaaggcaggagccagtctgtggggtggccttcggtttacagtccctcatctccgggacactaagaaaaccatccagtttgacttccagatcctcagcaagaatctcaacaactcgcaaagcgacgtggtttcctttcggctctccgtggaggctcaggcccaggtcaccctgaacggtgtctccaagcctgaggcagtgctattcccagtaagcgactggcatccccgagaccagcctcagaaggaggaggacctgggacctgctgtccaccatgtctatgagctcatcaaccaaggccccagctccattagccagggtgtgctggaactcagctgtccccaggctctggaaggtcagcagctcctatatgtgaccagagttacgggactcaactgcaccaccaatcaccccattaacccaaagggcctggagttggatcccgagggttccctgcaccaccagcaaaaacgggaagctccaagccgcagctctgcttcctcgggacctcagatcctgaaatgcccggaggctgagtgtttcaggctgcgctgtgagctcgggcccctgcaccaacaagagagccaaagtctgcagttgcatttccgagtctgggccaagactttcttgcagcgggagcaccagccatttagcctgcagtgtgaggctgtgtacaaagccctgaagatgccctaccgaatcctgcctcggcagctgccccaaaaagagcgtcaggtggccacagctgtgcaatggaccaaggcagaaggcagctatggcgtcccactgtggatcatcatcctagccatcctgtttggcctcctgctcctaggtctactcatctacatcctctacaagcttggattcttcaaacgctccctcccatatggcaccgccatggaaaaagctcagctcaagcctccagccacctctgatgcctgagtcctcccaatttcagactcccattcctgaagaaccagtccccccaccctcattctactgaaaaggaggggtctgggtacttcttgaaggtgctgacggccagggagaagctcctctccccagcccagagacatacttgaagggccagagccaggggggtgaggagctggggatccctcccccccatgcactgtgaaggacccttgtttacacataccctcttcatggatgggggaactcagatccagggacagaggccccagcctccctgaagcctttgcattttggagagtttcctgaaacaacttggaaagataactaggaaatccattcacagttctttgggccagacatgccacaaggacttcctgtccagctccaacctgcaaagatctgtcctcagccttgccagagatccaaaagaagcccccagctaagaacctggaacttggggagttaagacctggcagctctggacagccccaccctggtgggccaacaaagaacactaactatgcatggtgccccaggaccagctcaggacagatgccacacaaggatagatgctggcccagggcccagagcccagctccaaggggaatcagaactcaaatggggccagatccagcctggggtctggagttgatctggaacccagactcagacattggcacctaatccaggcagatccaggactatatttgggcctgctccagacctgatcctggaggcccagttcaccctgatttaggagaagccaggaatttcccaggaccctgaaggggccatgatggcaacagatctggaacctcagcctggccagacacaggccctccctgttccccagagaaaggggagcccactgtcctgggcctgcagaatttgggttctgcctgccagctgcactgatgctgcccctcatctctctgcccaacccttccctcaccttggcaccagacacccaggacttatttaaactctgttgcaagtgcaataaatctgacccagtgcccccactgaccagaactagaaaaaaaaaact

SEQ ID NO: 298817 - DNA, 4681 bp, Homo sapiens
agtccagacaaccggcttccagctggggctggggaaagggggttggaggggtgcgccccccccccacgccccttaggggtgggggacgcgggctcagagttccagggacccaggaatgcccccccgccagccccctcggcaggcggggggagggctcagccgggagtttggcaaactcctccccgcgttgagtcattcgcctctgggaggtttaggaagcggctccgggtcggtggccccaggacagggaagagcgggcgctatggggagccggacgccagagtcccctctccacgccgtgcagctgcgctggggcccccggcgccgacccccgctgctgccgctgctgttgctgctgctgccgccgccacccagggtcgggggcttcaacttagacgcggaggccccagcagtactctcggggcccccgggctccttcttcggattctcagtggagttttaccggccgggaacagacggggtcagtgtgctggtgggagcacccaaggctaataccagccagccaggagtgctgcagggtggtgctgtctacctctgtccttggggtgccagccccacacagtgcacccccattgaatttgacagcaaaggctctcggctcctggagtcctcactgtccagctcagagggagaggagcctgtggagtacaagtccttgcagtggttcggggcaacagttcgagcccatggctcctccatcttggcatgcgctccactgtacagctggcgcacagagaaggagccactgagcgaccccgtgggcacctgctacctctccacagataacttcacccgaattctggagtatgcaccctgccgctcagatttcagctgggcagcaggacagggttactgccaaggaggcttcagtgccgagttcaccaagactggccgtgtggttttaggtggaccaggaagctatttctggcaaggccagatcctgtctgccactcaggagcagattgcagaatcttattaccccgagtacctgatcaacctggttcaggggcagctgcagactcgccaggccagttccatctatgatgacagctacctaggatactctgtggctgttggtgaattcagtggtgatgacacagaagactttgttgctggtgtgcccaaagggaacctcacttacggctatgtcaccatccttaatggctcagacattcgatccctctacaacttctcaggggaacagatggcctcctactttggctatgcagtggccgccacagacgtcaatggggacgggctggatgacttgctggtgggggcacccctgctcatggatcggacccctgacgggcggcctcaggaggtgggcagggtctacgtctacctgcagcacccagccggcatagagcccacgcccacccttaccctcactggccatgatgagtttggccgatttggcagctccttgacccccctgggggacctggaccaggatggctacaatgatgtggccatcggggctccctttggtggggagacccagcagggagtagtgtttgtatttcctgggggcccaggagggctgggctctaagccttcccaggttctgcagcccctgtgggcagccagccacaccccagacttctttggctctgcccttcgaggaggccgagacctggatggcaatggatatcctggtgagttgtgcctgaggccccttttcaccttaaaattccctggtcactgacccctactctctcttctgcacctttccttaagttcctgggtgcagttctggctaattccaacagagggcgctgtcttctcacttcaacctccctgagcgttgaaaccaggaggggttaggaagaaaggatcctgatctggggcttgctgtaagaggtgatttcttgacttcttacagatctgattgtggggtcctttggtgtggacaaggctgtggtatacaggggccgccccatcgtgtccgctagtgcctccctcaccatcttccccgccatgttcaacccagaggagcggagctgcagcttagaggggaaccctgtggcctgcatcaaccttagcttctgcctcaatgcttctggaaaacacgttgctgactccattggtttcacagtggaacttcagctggactggcagaagcagaagggaggggtacggcgggcactgttcctggcctccaggcaggcaaccctgacccagaccctgctcatccagaatggggctcgagaggattgcagagagatgaagatctacctcaggaacgagtcagaatttcgagacaaactctcgccgattcacatcgctctcaacttctccttggacccccaagccccagtggacagccacggcctcaggccagccctacattatcagagcaagagccggatagaggacaaggctcagatcttgctggactgtggagaagacaacatctgtgtgcctgacctgcagctggaagtgtttggggagcagaaccatgtgtacctgggtgacaagaatgccctgaacctcactttccatgcccagaatgtgggtgagggtggcgcctatgaggctgagcttcgggtcaccgcccctccagaggctgagtactcaggactcgtcagacacccagggaacttctccagcctgagctgtgactactttgccgtgaaccagagccgcctgctggtgtgtgacctgggcaaccccatgaaggcaggagccagtctgtggggtggccttcggtttacagtccctcatctccgggacactaagaaaaccatccagtttgacttccagatcctcagcaagaatctcaacaactcgcaaagcgacgtggtttcctttcggctctccgtggaggctcaggcccaggtcaccctgaacggtgtctccaagcctgaggcagtgctattcccagtaagcgactggcatccccgagaccagcctcagaaggaggaggacctgggacctgctgtccaccatgtctatgagctcatcaaccaaggccccagctccattagccagggtgtgctggaactcagctgtccccaggctctggaaggtcagcagctcctatatgtgaccagagttacgggactcaactgcaccaccaatcaccccattaacccaaagggcctggagttggatcccgagggttccctgcaccaccagcaaaaacgggaagctccaagccgcagctctgcttcctcgggacctcagatcctgaaatgcccggaggctgagtgtttcaggctgcgctgtgagctcgggcccctgcaccaacaagagagccaaagtctgcagttgcatttccgagtctgggccaagactttcttgcagcgggagcaccagccatttagcctgcagtgtgaggctgtgtacaaagccctgaagatgccctaccgaatcctgcctcggcagctgccccaaaaagagcgtcaggtggccacagctgtgcaatggaccaaggcagaaggcagctatggcgtcccactgtggatcatcatcctagccatcctgtttggcctcctgctcctaggtctactcatctacatcctctacaagcttggattcttcaaacgctccctcccatatggcaccgccatggaaaaagctcagctcaagcctccagccacctctgatgcctgagtcctcccaatttcagactcccattcctgaagaaccagtccccccaccctcattctactgaaaaggaggggtctgggtacttcttgaaggtgctgacggccagggagaagctcctctccccagcccagagacatacttgaagggccagagccaggggggtgaggagctggggatccctcccccccatgcactgtgaaggacccttgtttacacataccctcttcatggatgggggaactcagatccagggacagaggccccagcctccctgaagcctttgcattttggagagtttcctgaaacaacttggaaagataactaggaaatccattcacagttctttgggccagacatgccacaaggacttcctgtccagctccaacctgcaaagatctgtcctcagccttgccagagatccaaaagaagcccccagctaagaacctggaacttggggagttaagacctggcagctctggacagccccaccctggtgggccaacaaagaacactaactatgcatggtgccccaggaccagctcaggacagatgccacacaaggatagatgctggcccagggcccagagcccagctccaaggggaatcagaactcaaatggggccagatccagcctggggtctggagttgatctggaacccagactcagacattggcacctaatccaggcagatccaggactatatttgggcctgctccagacctgatcctggaggcccagttcaccctgatttaggagaagccaggaatttcccaggaccctgaaggggccatgatggcaacagatctggaacctcagcctggccagacacaggccctccctgttccccagagaaaggggagcccactgtcctgggcctgcagaatttgggttctgcctgccagctgcactgatgctgcccctcatctctctgcccaacccttccctcaccttggcaccagacacccaggacttatttaaactctgttgcaagtgcaataaatctgacccagtgcccccactgaccagaactagaaaaaaaaaact

SEQ ID NO: 298818 - DNA, 4303 bp, Homo sapiens
agtccagacaaccggcttccagctggggctggggaaagggggttggaggggtgcgccccccccccacgccccttaggggtgggggacgcgggctcagagttccagggacccaggaatgcccccccgccagccccctcggcaggcggggggagggctcagccgggagtttggcaaactcctccccgcgttgagtcattcgcctctgggaggtttaggaagcggctccgggtcggtggccccaggacagggaagagcgggcgctatggggagccggacgccagagtcccctctccacgccgtgcagctgcgctggggcccccggcgccgacccccgctgctgccgctgctgttgctgctgctgccgccgccacccagggtcgggggcttcaacttagacgcggaggccccagcagtactctcggggcccccgggctccttcttcggattctcagtggagttttaccggccgggaacagacggggtcagtgtgctggtgggagcacccaaggctaataccagccagccaggagtgctgcagggtggtgctgtctacctctgtccttggggtgccagccccacacagtgcacccccattgaatttgacagcaaaggctctcggctcctggagtcctcactgtccagctcagagggagaggagcctgtggagtacaagtccttgcagtggttcggggcaacagttcgagcccatggctcctccatcttggcatgcgctccactgtacagctggcgcacagagaaggagccactgagcgaccccgtgggcacctgctacctctccacagataacttcacccgaattctggagtatgcaccctgccgctcagatttcagctgggcagcaggacagggttactgccaaggaggcttcagtgccgagttcaccaagactggccgtgtggttttaggtggaccaggaagctatttctggcaaggccagatcctgtctgccactcaggagcagattgcagaatcttattaccccgagtacctgatcaacctggttcaggggcagctgcagactcgccaggccagttccatctatgatgacagctacctaggatactctgtggctgttggtgaattcagtggtgatgacacagaagactttgttgctggtgtgcccaaagggaacctcacttacggctatgtcaccatccttaatggctcagacattcgatccctctacaacttctcaggggaacagatggcctcctactttggctatgcagtggccgccacagacgtcaatggggacgggctggatgacttgctggtgggggcacccctgctcatggatcggacccctgacgggcggcctcaggaggtgggcagggtctacgtctacctgcagcacccagccggcatagagcccacgcccacccttaccctcactggccatgatgagtttggccgatttggcagctccttgacccccctgggggacctggaccaggatggctacaatgatgtggccatcggggctccctttggtggggagacccagcagggagtagtgtttgtatttcctgggggcccaggagggctgggctctaagccttcccaggttctgcagcccctgtgggcagccagccacaccccagacttctttggctctgcccttcgaggaggccgagacctggatggcaatggatatcctgatctgattgtggggtcctttggtgtggacaaggctgtggtatacaggggccgccccatcgtgtccgctagtgcctccctcaccatcttccccgccatgttcaacccagaggagcggagctgcagcttagaggggaaccctgtggcctgcatcaaccttagcttctgcctcaatgcttctggaaaacacgttgctgactccattggtttcacagtggaacttcagctggactggcagaagcagaagggaggggtacggcgggcactgttcctggcctccaggcaggcaaccctgacccagaccctgctcatccagaatggggctcgagaggattgcagagagatgaagatctacctcaggaacgagtcagaatttcgagacaaactctcgccgattcacatcgctctcaacttctccttggacccccaagccccagtggacagccacggcctcaggccagccctacattatcagagcaagagccggatagaggacaaggctcagatcttgctggactgtggagaagacaacatctgtgtgcctgacctgcagctggaagtgtttggaacttctccagcctgagctgtgactactttgccgtgaaccagagccgcctgctggtgtgtgacctgggcaaccccatgaaggcaggagccagtctgtggggtggccttcggtttacagtccctcatctccgggacactaagaaaaccatccagtttgacttccagatcctcagcaagaatctcaacaactcgcaaagcgacgtggtttcctttcggctctccgtggaggctcaggcccaggtcaccctgaacggtgtctccaagcctgaggcagtgctattcccagtaagcgactggcatccccgagaccagcctcagaaggaggaggacctgggacctgctgtccaccatgtctatgagctcatcaaccaaggccccagctccattagccagggtgtgctggaactcagctgtccccaggctctggaaggtcagcagctcctatatgtgaccagagttacgggactcaactgcaccaccaatcaccccattaacccaaagggcctggagttggatcccgagggttccctgcaccaccagcaaaaacgggaagctccaagccgcagctctgcttcctcgggacctcagatcctgaaatgcccggaggctgagtgtttcaggctgcgctgtgagctcgggcccctgcaccaacaagagagccaaagtctgcagttgcatttccgagtctgggccaagactttcttgcagcgggagcaccagccatttagcctgcagtgtgaggctgtgtacaaagccctgaagatgccctaccgaatcctgcctcggcagctgccccaaaaagagcgtcaggtggccacagctgtgcaatggaccaaggcagaaggcagctatggcgtcccactgtggatcatcatcctagccatcctgtttggcctcctgctcctaggtctactcatctacatcctctacaagcttggattcttcaaacgctccctcccatatggcaccgccatggaaaaagctcagctcaagcctccagccacctctgatgcctgagtcctcccaatttcagactcccattcctgaagaaccagtccccccaccctcattctactgaaaaggaggggtctgggtacttcttgaaggtgctgacggccagggagaagctcctctccccagcccagagacatacttgaagggccagagccaggggggtgaggagctggggatccctcccccccatgcactgtgaaggacccttgtttacacataccctcttcatggatgggggaactcagatccagggacagaggccccagcctccctgaagcctttgcattttggagagtttcctgaaacaacttggaaagataactaggaaatccattcacagttctttgggccagacatgccacaaggacttcctgtccagctccaacctgcaaagatctgtcctcagccttgccagagatccaaaagaagcccccagctaagaacctggaacttggggagttaagacctggcagctctggacagccccaccctggtgggccaacaaagaacactaactatgcatggtgccccaggaccagctcaggacagatgccacacaaggatagatgctggcccagggcccagagcccagctccaaggggaatcagaactcaaatggggccagatccagcctggggtctggagttgatctggaacccagactcagacattggcacctaatccaggcagatccaggactatatttgggcctgctccagacctgatcctggaggcccagttcaccctgatttaggagaagccaggaatttcccaggaccctgaaggggccatgatggcaacagatctggaacctcagcctggccagacacaggccctccctgttccccagagaaaggggagcccactgtcctgggcctgcagaatttgggttctgcctgccagctgcactgatgctgcccctcatctctctgcccaacccttccctcaccttggcaccagacacccaggacttatttaaactctgttgcaagtgcaataaatctgacccagtgcccccactgaccagaactagaaaaaaaaaact

SEQ ID NO: 298819 - DNA, 3269 bp, Homo sapiens
ttctagttctgacccagcgctgcccctttgtcctccccagatggcctcctactttggctatgcagtggccgccacagacgtcaatggggacgggctggatgacttgctggtgggggcacccctgctcatggatcggacccctgacgggcggcctcaggaggtgggcagggtctacgtctacctgcagcacccagccggcatagagcccacgcccacccttaccctcactggccatgatgagtttggccgatttggcagctccttgacccccctgggggacctggaccaggatggctacaatgatgtggccatcggggctccctttggtggggagacccagcagggagtagtgtttgtatttcctgggggcccaggagggctgggctctaagccttcccaggttctgcagcccctgtgggcagccagccacaccccagacttctttggctctgcccttcgaggaggccgagacctggatggcaatggatatcctgatctgattgtggggtcctttggtgtggacaaggctgtggtatacaggggccgccccatcgtgtccgctagtgcctccctcaccatcttccccgccatgttcaacccagaggagcggagctgcagcttagaggggaaccctgtggcctgcatcaaccttagcttctgcctcaatgcttctggaaaacacgttgctgactccattggtttcacagtggaacttcagctggactggcagaagcagaagggaggggtacggcgggcactgttcctggcctccaggcaggcaaccctgacccagaccctgctcatccagaatggggctcgagaggattgcagagagatgaagatctacctcaggaacgagtcagaatttcgagacaaactctcgccgattcacatcgctctcaacttctccttggacccccaagccccagtggacagccacggcctcaggccagccctacattatcagagcaagagccggatagaggacaaggctcagatcttgctggactgtggagaagacaacatctgtgtgcctgacctgcagctggaagtgtttggggagcagaaccatgtgtacctgggtgacaagaatgccctgaacctcactttccatgcccagaatgtgggtgagggtggcgcctatgaggctgagcttcgggtcaccgcccctccagaggctgagtactcaggactcgtcagacacccagggaacttctccagcctgagctgtgactactttgccgtgaaccagagccgcctgctggtgtgtgacctgggcaaccccatgaaggcaggagccagtctgtggggtggccttcggtttacagtccctcatctccgggacactaagaaaaccatccagtttgacttccagatcctcagcaagaatctcaacaactcgcaaagcgacgtggtttcctttcggctctccgtggaggctcaggcccaggtcaccctgaacggtgtctccaagcctgaggcagtgctattcccagtaagcgactggcatccccgagaccagcctcagaaggaggaggacctgggacctgctgtccaccatgtctatgagctcatcaaccaaggccccagctccattagccagggtgtgctggaactcagctgtccccaggctctggaaggtcagcagctcctatatgtgaccagagttacgggactcaactgcaccaccaatcaccccattaacccaaagggcctggagttggatcccgagggttccctgcaccaccagcaaaaacgggaagctccaagccgcagctctgcttcctcgggacctcagatcctgaaatgcccggaggctgagtgtttcaggctgcgctgtgagctcgggcccctgcaccaacaagagagccaaagtctgcagttgcatttccgagtctgggccaagactttcttgcagcgggagcaccagccatttagcctgcagtgtgaggctgtgtacaaagccctgaagatgccctaccgaatcctgcctcggcagctgccccaaaaagagcgtcaggtggccacagctgtgcaatggaccaaggcagaaggcagctatggcgtcccactgtggatcatcatcctagccatcctgtttggcctcctgctcctaggtctactcatctacatcctctacaagcttggattcttcaaacgctccctcccatatggcaccgccatggaaaaagctcagctcaagcctccagccacctctgatgcctgagtcctcccaatttcagactcccattcctgaagaaccagtccccccaccctcattctactgaaaaggaggggtctgggtacttcttgaaggtgctgacggccagggagaagctcctctccccagcccagagacatacttgaagggccagagccaggggggtgaggagctggggatccctcccccccatgcactgtgaaggacccttgtttacacataccctcttcatggatgggggaactcagatccagggacagaggccccagcctccctgaagcctttgcattttggagagtttcctgaaacaacttggaaagataactaggaaatccattcacagttctttgggccagacatgccacaaggacttcctgtccagctccaacctgcaaagatctgtcctcagccttgccagagatccaaaagaagcccccagctaagaacctggaacttggggagttaagacctggcagctctggacagccccaccctggtgggccaacaaagaacactaactatgcatggtgccccaggaccagctcaggacagatgccacacaaggatagatgctggcccagggcccagagcccagctccaaggggaatcagaactcaaatggggccagatccagcctggggtctggagttgatctggaacccagactcagacattggcacctaatccaggcagatccaggactatatttgggcctgctccagacctgatcctggaggcccagttcaccctgatttaggagaagccaggaatttcccaggaccctgaaggggccatgatggcaacagatctggaacctcagcctggccagacacaggccctccctgttccccagagaaaggggagcccactgtcctgggcctgcagaatttgggttctgcctgccagctgcactgatgctgcccctcatctctctgcccaacccttccctcaccttggcaccagacacccaggacttatttaaactctgttgcaagtgcaataaatctgacccagtgcccccactgaccagaactagaaaaaaaaaact

SEQ ID NO: 298820 - DNA, 2858 bp, Homo sapiens
ttctcaacgggtgatgcggttgggaaaatcaatgcagaggacacacattctggcgcttgggcatcagtttcctgtgtccaggttacagaggagtcctaattctattgaccccacattcactcttggcaggggccgccccatcgtgtccgctagtgcctccctcaccatcttccccgccatgttcaacccagaggagcggagctgcagcttagaggggaaccctgtggcctgcatcaaccttagcttctgcctcaatgcttctggaaaacacgttgctgactccattggtttcacagtggaacttcagctggactggcagaagcagaagggaggggtacggcgggcactgttcctggcctccaggcaggcaaccctgacccagaccctgctcatccagaatggggctcgagaggattgcagagagatgaagatctacctcaggaacgagtcagaatttcgagacaaactctcgccgattcacatcgctctcaacttctccttggacccccaagccccagtggacagccacggcctcaggccagccctacattatcagagcaagagccggatagaggacaaggctcagatcttgctggactgtggagaagacaacatctgtgtgcctgacctgcagctggaagtgtttggggagcagaaccatgtgtacctgggtgacaagaatgccctgaacctcactttccatgcccagaatgtgggtgagggtggcgcctatgaggctgagcttcgggtcaccgcccctccagaggctgagtactcaggactcgtcagacacccagggaacttctccagcctgagctgtgactactttgccgtgaaccagagccgcctgctggtgtgtgacctgggcaaccccatgaaggcaggagccagtctgtggggtggccttcggtttacagtccctcatctccgggacactaagaaaaccatccagtttgacttccagatcctcagcaagaatctcaacaactcgcaaagcgacgtggtttcctttcggctctccgtggaggctcaggcccaggtcaccctgaacggtgtctccaagcctgaggcagtgctattcccagtaagcgactggcatccccgagaccagcctcagaaggaggaggacctgggacctgctgtccaccatgtctatgagctcatcaaccaaggccccagctccattagccagggtgtgctggaactcagctgtccccaggctctggaaggtcagcagctcctatatgtgaccagagttacgggactcaactgcaccaccaatcaccccattaacccaaagggcctggagttggatcccgagggttccctgcaccaccagcaaaaacgggaagctccaagccgcagctctgcttcctcgggacctcagatcctgaaatgcccggaggctgagtgtttcaggctgcgctgtgagctcgggcccctgcaccaacaagagagccaaagtctgcagttgcatttccgagtctgggccaagactttcttgcagcgggagcaccagccatttagcctgcagtgtgaggctgtgtacaaagccctgaagatgccctaccgaatcctgcctcggcagctgccccaaaaagagcgtcaggtggccacagctgtgcaatggaccaaggcagaaggcagctatggcgtcccactgtggatcatcatcctagccatcctgtttggcctcctgctcctaggtctactcatctacatcctctacaagcttggattcttcaaacgctccctcccatatggcaccgccatggaaaaagctcagctcaagcctccagccacctctgatgcctgagtcctcccaatttcagactcccattcctgaagaaccagtccccccaccctcattctactgaaaaggaggggtctgggtacttcttgaaggtgctgacggccagggagaagctcctctccccagcccagagacatacttgaagggccagagccaggggggtgaggagctggggatccctcccccccatgcactgtgaaggacccttgtttacacataccctcttcatggatgggggaactcagatccagggacagaggccccagcctccctgaagcctttgcattttggagagtttcctgaaacaacttggaaagataactaggaaatccattcacagttctttgggccagacatgccacaaggacttcctgtccagctccaacctgcaaagatctgtcctcagccttgccagagatccaaaagaagcccccagctaagaacctggaacttggggagttaagacctggcagctctggacagccccaccctggtgggccaacaaagaacactaactatgcatggtgccccaggaccagctcaggacagatgccacacaaggatagatgctggcccagggcccagagcccagctccaaggggaatcagaactcaaatggggccagatccagcctggggtctggagttgatctggaacccagactcagacattggcacctaatccaggcagatccaggactatatttgggcctgctccagacctgatcctggaggcccagttcaccctgatttaggagaagccaggaatttcccaggaccctgaaggggccatgatggcaacagatctggaacctcagcctggccagacacaggccctccctgttccccagagaaaggggagcccactgtcctgggcctgcagaatttgggttctgcctgccagctgcactgatgctgcccctcatctctctgcccaacccttccctcaccttggcaccagacacccaggacttatttaaactctgttgcaagtgcaataaatctgacccagtgcccccactgaccagaactagaaaaaaaaaact

SEQ ID NO: 298821 - DNA, 2240 bp, Homo sapiens
  misc_feature (14)..(14): n is a, c, g, or t
cgatctgactacgnggctggaagtgtttggggagcagaaccatgtgtacctgggtgacaagaatgccctgaacctcactttccatgcccagaatgtgggtgagggtggcgcctatgaggctgagcttcgggtcaccgcccctccagaggctgagtactcaggactcgtcagacacccagggaacttctccagcctgagctgtgactactttgccgtgaaccagagccgcctgctggtgtgtgacctgggcaaccccatgaaggcaggagccagtctgtggggtggccttcggtttacagtccctcatctccgggacactaagaaaaccatccagtttgacttccagatcctcagcaagaatctcaacaactcgcaaagcgacgtggtttcctttcggctctccgtggaggctcaggcccaggtcaccctgaacggtgtctccaagcctgaggcagtgctattcccagtaagcgactggcatccccgagaccagcctcagaaggaggaggacctgggacctgctgtccaccatgtctatgagctcatcaaccaaggccccagctccattagccagggtgtgctggaactcagctgtccccaggctctggaaggtcagcagctcctatatgtgaccagagttacgggactcaactgcaccaccaatcaccccattaacccaaagggcctggagttggatcccgagggttccctgcaccaccagcaaaaacgggaagctccaagccgcagctctgcttcctcgggacctcagatcctgaaatgcccggaggctgagtgtttcaggctgcgctgtgagctcgggcccctgcaccaacaagagagccaaagtctgcagttgcatttccgagtctgggccaagactttcttgcagcgggagcaccagccatttagcctgcagtgtgaggctgtgtacaaagccctgaagatgccctaccgaatcctgcctcggcagctgccccaaaaagagcgtcaggtggccacagctgtgcaatggaccaaggcagaaggcagctatggcgtcccactgtggatcatcatcctagccatcctgtttggcctcctgctcctaggtctactcatctacatcctctacaagcttggattcttcaaacgctccctcccatatggcaccgccatggaaaaagctcagctcaagcctccagccacctctgatgcctgagtcctcccaatttcagactcccattcctgaagaaccagtccccccaccctcattctactgaaaaggaggggtctgggtacttcttgaaggtgctgacggccagggagaagctcctctccccagcccagagacatacttgaagggccagagccaggggggtgaggagctggggatccctcccccccatgcactgtgaaggacccttgtttacacataccctcttcatggatgggggaactcagatccagggacagaggccccagcctccctgaagcctttgcattttggagagtttcctgaaacaacttggaaagataactaggaaatccattcacagttctttgggccagacatgccacaaggacttcctgtccagctccaacctgcaaagatctgtcctcagccttgccagagatccaaaagaagcccccagctaagaacctggaacttggggagttaagacctggcagctctggacagccccaccctggtgggccaacaaagaacactaactatgcatggtgccccaggaccagctcaggacagatgccacacaaggatagatgctggcccagggcccagagcccagctccaaggggaatcagaactcaaatggggccagatccagcctggggtctggagttgatctggaacccagactcagacattggcacctaatccaggcagatccaggactatatttgggcctgctccagacctgatcctggaggcccagttcaccctgatttaggagaagccaggaatttcccaggaccctgaaggggccatgatggcaacagatctggaacctcagcctggccagacacaggccctccctgttccccagagaaaggggagcccactgtcctgggcctgcagaatttgggttctgcctgccagctgcactgatgctgcccctcatctctctgcccaacccttccctcaccttggcaccagacacccaggacttatttaaactctgttgcaagtgcaataaatctgacccagtgcccccactgaccagaactagaaaaaaaaaact

SEQ ID NO: 298822 - DNA, 4400 bp, Homo sapiens
agtccagacaaccggcttccagctggggctggggaaagggggttggaggggtgcgccccccccccacgccccttaggggtgggggacgcgggctcagagttccagggacccaggaatgcccccccgccagccccctcggcaggcggggggagggctcagccgggagtttggcaaactcctccccgcgttgagtcattcgcctctgggaggtttaggaagcggctccgggtcggtggccccaggacagggaagagcgggcgctatggggagccggacgccagagtcccctctccacgccgtgcagctgcgctggggcccccggcgccgacccccgctgctgccgctgctgttgctgctgctgccgccgccacccagggtcgggggcttcaacttagacgcggaggccccagcagtactctcggggcccccgggctccttcttcggattctcagtggagttttaccggccgggaacagacggggtcagtgtgctggtgggagcacccaaggctaataccagccagccaggagtgctgcagggtggtgctgtctacctctgtccttggggtgccagccccacacagtgcacccccattgaatttgacagcaaaggctctcggctcctggagtcctcactgtccagctcagagggagaggagcctgtggagtacaagtccttgcagtggttcggggcaacagttcgagcccatggctcctccatcttggcatgcgctccactgtacagctggcgcacagagaaggagccactgagcgaccccgtgggcacctgctacctctccacagataacttcacccgaattctggagtatgcaccctgccgctcagatttcagctgggcagcaggacagggttactgccaaggaggcttcagtgccgagttcaccaagactggccgtgtggttttaggtggaccaggaagctatttctggcaaggccagatcctgtctgccactcaggagcagattgcagaatcttattaccccgagtacctgatcaacctggttcaggggcagctgcagactcgccaggccagttccatctatgatgacagctacctaggatactctgtggctgttggtgaattcagtggtgatgacacagaagactttgttgctggtgtgcccaaagggaacctcacttacggctatgtcaccatccttaatggctcagacattcgatccctctacaacttctcaggggaacagatggcctcctactttggctatgcagtggccgccacagacgtcaatggggacgggctggatgacttgctggtgggggcacccctgctcatggatcggacccctgacgggcggcctcaggaggtgggcagggtctacgtctacctgcagcacccagccggcatagagcccacgcccacccttaccctcactggccatgatgagtttggccgatttggcagctccttgacccccctgggggacctggaccaggatggctacaatgatgtggccatcggggctccctttggtggggagacccagcagggagtagtgtttgtatttcctgggggcccaggagggctgggctctaagccttcccaggttctgcagcccctgtgggcagccagccacaccccagacttctttggctctgcccttcgaggaggccgagacctggatggcaatggatatcctgatctgattgtggggtcctttggtgtggacaaggctgtggtatacaggggccgccccatcgtgtccgctagtgcctccctcaccatcttccccgccatgttcaacccagaggagcggagctgcagcttagaggggaaccctgtggcctgcatcaaccttagcttctgcctcaatgcttctggaaaacacgttgctgactccattggtttcacagtggaacttcagctggactggcagaagcagaagggaggggtacggcgggcactgttcctggcctccaggcaggcaaccctgacccagaccctgctcatccagaatggggctcgagaggattgcagagagatgaagatctacctcaggaacgagtcagaatttcgagacaaactctcgccgattcacatcgctctcaacttctccttggacccccaagccccagtggacagccacggcctcaggccagccctacattatcagagcaagagccggatagaggacaaggctcagatcttgctggactgtggagaagacaacatctgtgtgcctgacctgcagctggaagtgtttggggagcagaaccatgtgtacctgggtgacaagaatgccctgaacctcactttccatgcccagaatgtgggtgagggtggcgcctatgaggctgagcttcgggtcaccgcccctccagaggctgagtactcaggactcgtcagacacccagggaacttctccagcctgagctgtgactactttgccgtgaaccagagccgcctgctggtgtgtgacctgggcaaccccatgaaggcaggagccagtctgtggggtggccttcggtttacagtccctcatctccgggacactaagaaaaccatccagtttgacttccagatcctcagcaagaatctcaacaactcgcaaagcgacgtggtttcctttcggctctccgtggaggctcaggcccaggtcaccctgaacggtgtctccaagcctgaggcagtgctattcccagtaagcgactggcatccccgagaccagcctcagaaggaggaggacctgggacctgctgtccaccatgtctatgagctcatcaaccaaggccccagctccattagccagggtgtgctggaactcagctgtccccaggctctggaaggtcagcagctcctatatgtgaccagagttacgggactcaactgcaccaccaatcaccccattaacccaaagggcctggagttggatcccgagggttccctgcaccaccagcaaaaacgggaagctccaagccgcagctctgcttcctcgggacctcagatcctgaaatgcccggaggctgagtgtttcaggctgcgctgtgagctcgggcccctgcaccaacaagagagccaaagtctgcagttgcatttccgagtctgggccaagactttcttgcagcgggagcaccagccatttagcctgcagtgtgaggctgtgtacaaagccctgaagatgccctaccgaatcctgcctcggcagctgccccaaaaagagcgtcaggtggccacagctgtgcaatggaccaaggcagaaggcagctatggcgtcccactgtggatcatcatcctagccatcctgtttggcctcctgctcctaggtctactcatctacatcctctacaagcttggattcttcaaacgctccctcccatatggcaccgccatggaaaaagctcagctcaagcctccagccacctctgatgcctgagtcctcccaatttcagactcccattcctgaagaaccagtccccccaccctcattctactgaaaaggaggggtctgggtacttcttgaaggtgctgacggccagggagaagctcctctccccagcccagagacatacttgaagggccagagccaggggggtgaggagctggggatccctcccccccatgcactgtgaaggacccttgtttacacataccctcttcatggatgggggaactcagatccagggacagaggccccagcctccctgaagcctttgcattttggagagtttcctgaaacaacttggaaagataactaggaaatccattcacagttctttgggccagacatgccacaaggacttcctgtccagctccaacctgcaaagatctgtcctcagccttgccagagatctctggacagccccaccctggtgggccaacaaagaacactaactatgcatggtgccccaggaccagctcaggacagatgccacacaaggatagatgctggcccagggcccagagcccagctccaaggggaatcagaactcaaatggggccagatccagcctggggtctggagttgatctggaacccagactcagacattggcacctaatccaggcagatccaggactatatttgggcctgctccagacctgatcctggaggcccagttcaccctgatttaggagaagccaggaatttcccaggaccctgaaggggccatgatggcaacagatctggaacctcagcctggccagacacaggccctccctgttccccagagaaaggggagcccactgtcctgggcctgcagaatttgggttctgcctgccagctgcactgatgctgcccctcatctctctgcccaacccttccctcaccttggcaccagacacccaggacttatttaaactctgttgcaagtgcaataaatctgacccagtgcccccactgaccagaactagaaaaaaaaaact

SEQ ID NO: 298823 - DNA, 4615 bp, Homo sapiens
  misc_feature (4420)..(4420): n is a, c, g, or t
agtccagacaaccggcttccagctggggctggggaaagggggttggaggggtgcgccccccccccacgccccttaggggtgggggacgcgggctcagagttccagggacccaggaatgcccccccgccagccccctcggcaggcggggggagggctcagccgggagtttggcaaactcctccccgcgttgagtcattcgcctctgggaggtttaggaagcggctccgggtcggtggccccaggacagggaagagcgggcgctatggggagccggacgccagagtcccctctccacgccgtgcagctgcgctggggcccccggcgccgacccccgctgctgccgctgctgttgctgctgctgccgccgccacccagggtcgggggcttcaacttagacgcggaggccccagcagtactctcggggcccccgggctccttcttcggattctcagtggagttttaccggccgggaacagacggggtcagtgtgctggtgggagcacccaaggctaataccagccagccaggagtgctgcagggtggtgctgtctacctctgtccttggggtgccagccccacacagtgcacccccattgaatttgacagcaaaggctctcggctcctggagtcctcactgtccagctcagagggagaggagcctgtggagtacaagtccttgcagtggttcggggcaacagttcgagcccatggctcctccatcttggcatgcgctccactgtacagctggcgcacagagaaggagccactgagcgaccccgtgggcacctgctacctctccacagataacttcacccgaattctggagtatgcaccctgccgctcagatttcagctgggcagcaggacagggttactgccaaggaggcttcagtgccgagttcaccaagactggccgtgtggttttaggtggaccaggaagctatttctggcaaggccagatcctgtctgccactcaggagcagattgcagaatcttattaccccgagtacctgatcaacctggttcaggggcagctgcagactcgccaggccagttccatctatgatgacagctacctaggatactctgtggctgttggtgaattcagtggtgatgacacagaagactttgttgctggtgtgcccaaagggaacctcacttacggctatgtcaccatccttaatggctcagacattcgatccctctacaacttctcaggggaacagatggcctcctactttggctatgcagtggccgccacagacgtcaatggggacgggctggatgacttgctggtgggggcacccctgctcatggatcggacccctgacgggcggcctcaggaggtgggcagggtctacgtctacctgcagcacccagccggcatagagcccacgcccacccttaccctcactggccatgatgagtttggccgatttggcagctccttgacccccctgggggacctggaccaggatggctacaatgatgtggccatcggggctccctttggtggggagacccagcagggagtagtgtttgtatttcctgggggcccaggagggctgggctctaagccttcccaggttctgcagcccctgtgggcagccagccacaccccagacttctttggctctgcccttcgaggaggccgagacctggatggcaatggatatcctgatctgattgtggggtcctttggtgtggacaaggctgtggtatacaggggccgccccatcgtgtccgctagtgcctccctcaccatcttccccgccatgttcaacccagaggagcggagctgcagcttagaggggaaccctgtggcctgcatcaaccttagcttctgcctcaatgcttctggaaaacacgttgctgactccattggtttcacagtggaacttcagctggactggcagaagcagaagggaggggtacggcgggcactgttcctggcctccaggcaggcaaccctgacccagaccctgctcatccagaatggggctcgagaggattgcagagagatgaagatctacctcaggaacgagtcagaatttcgagacaaactctcgccgattcacatcgctctcaacttctccttggacccccaagccccagtggacagccacggcctcaggccagccctacattatcagagcaagagccggatagaggacaaggctcagatcttgctggactgtggagaagacaacatctgtgtgcctgacctgcagctggaagtgtttggggagcagaaccatgtgtacctgggtgacaagaatgccctgaacctcactttccatgcccagaatgtgggtgagggtggcgcctatgaggctgagcttcgggtcaccgcccctccagaggctgagtactcaggactcgtcagacacccagggaacttctccagcctgagctgtgactactttgccgtgaaccagagccgcctgctggtgtgtgacctgggcaaccccatgaaggcaggagccagtctgtggggtggccttcggtttacagtccctcatctccgggacactaagaaaaccatccagtttgacttccagatcctcagcaagaatctcaacaactcgcaaagcgacgtggtttcctttcggctctccgtggaggctcaggcccaggtcaccctgaacggtgtctccaagcctgaggcagtgctattcccagtaagcgactggcatccccgagaccagcctcagaaggaggaggacctgggacctgctgtccaccatgtctatgagctcatcaaccaaggccccagctccattagccagggtgtgctggaactcagctgtccccaggctctggaaggtcagcagctcctatatgtgaccagagttacgggactcaactgcaccaccaatcaccccattaacccaaagggcctggagttggatcccgagggttccctgcaccaccagcaaaaacgggaagctccaagccgcagctctgcttcctcgggacctcagatcctgaaatgcccggaggctgagtgtttcaggctgcgctgtgagctcgggcccctgcaccaacaagagagccaaagtctgcagttgcatttccgagtctgggccaagactttcttgcagcgggagcaccagccatttagcctgcagtgtgaggctgtgtacaaagccctgaagatgccctaccgaatcctgcctcggcagctgccccaaaaagagcgtcaggtggccacagctgtgcaatggaccaaggcagaaggcagctatggcgtcccactgtggatcatcatcctagccatcctgtttggcctcctgctcctaggtctactcatctacatcctctacaagcttggattcttcaaacgctccctcccatatggcaccgccatggaaaaagctcagctcaagcctccagccacctctgatgcctgagtcctcccaatttcagactcccattcctgaagaaccagtccccccaccctcattctactgaaaaggaggggtctgggtacttcttgaaggtgctgacggccagggagaagctcctctccccagcccagagacatacttgaagggccagagccaggggggtgaggagctggggatccctcccccccatgcactgtgaaggacccttgtttacacataccctcttcatggatgggggaactcagatccagggacagaggccccagcctccctgaagcctttgcattttggagagtttcctgaaacaacttggaaagataactaggaaatccattcacagttctttgggccagacatgccacaaggacttcctgtccagctccaacctgcaaagatctgtcctcagccttgccagagatccaaaagaagcccccagctaagaacctggaacttggggagttaagacctggcagctctggacagccccaccctggtgggccaacaaagaacactaactatgcatggtgccccaggaccagctcaggacagatgccacacaaggatagatgctggcccagggcccagagcccagctccaaggggaatcagaactcaaatggggccagatccagcctggggtctggagttgatctggaacccagactcagacattggcacctaatccaggcagatccaggactatatttgggcctgctccagacctgatcctggaggcccagttcaccctgatttaggagaagccaggaatttcccaggaccctgaaggggccatgatggcaacagatctggaacctcagcctggccagacacaggccctccctgttccccagagaaaggggagcccactgtcctgggcctgcagaatttgggttctgcctgccagctgcactgatgctgcccctcatctctctgcccaacccttccctcaccttggcaccagacacccaggacttatttaaactctgttgcaagtgcaataaatctgaccagntggccccccaactgaaccaagcaaagaaataaaagcaacactactaacaccaccaaaatctttgtgggacggcattgccctcgaaaaaggttttaaaaacccatgtttgggggcggggcccaatggggtaagtagacagggcatagggtgcccaagaacacggggccggaaaggtgtggttctccataaaaaacg

SEQ ID NO: 298824 - DNA, 4456 bp, Homo sapiens
agtccagacaaccggcttccagctggggctggggaaagggggttggaggggtgcgccccccccccacgccccttaggggtgggggacgcgggctcagagttccagggacccaggaatgcccccccgccagccccctcggcaggcggggggagggctcagccgggagtttggcaaactcctccccgcgttgagtcattcgcctctgggaggtttaggaagcggctccgggtcggtggccccaggacagggaagagcgggcgctatggggagccggacgccagagtcccctctccacgccgtgcagctgcgctggggcccccggcgccgacccccgctgctgccgctgctgttgctgctgctgccgccgccacccagggtcgggggcttcaacttagacgcggaggccccagcagtactctcggggcccccgggctccttcttcggattctcagtggagttttaccggccgggaacagacggggtcagtgtgctggtgggagcacccaaggctaataccagccagccaggagtgctgcagggtggtgctgtctacctctgtccttggggtgccagccccacacagtgcacccccattgaatttgacagcaaaggctctcggctcctggagtcctcactgtccagctcagagggagaggagcctgtggagtacaagtccttgcagtggttcggggcaacagttcgagcccatggctcctccatcttggcatgcgctccactgtacagctggcgcacagagaaggagccactgagcgaccccgtgggcacctgctacctctccacagataacttcacccgaattctggagtatgcaccctgccgctcagatttcagctgggcagcaggacagggttactgccaaggaggcttcagtgccgagttcaccaagactggccgtgtggttttaggtggaccaggaagctatttctggcaaggccagatcctgtctgccactcaggagcagattgcagaatcttattaccccgagtacctgatcaacctggttcaggggcagctgcagactcgccaggccagttccatctatgatgacagctacctaggatactctgtggctgttggtgaattcagtggtgatgacacagaagactttgttgctggtgtgcccaaagggaacctcacttacggctatgtcaccatccttaatggctcagacattcgatccctctacaacttctcaggggaacagatggcctcctactttggctatgcagtggccgccacagacgtcaatggggacgggctggatgacttgctggtgggggcacccctgctcatggatcggacccctgacgggcggcctcaggaggtgggcagggtctacgtctacctgcagcacccagccggcatagagcccacgcccacccttaccctcactggccatgatgagtttggccgatttggcagctccttgacccccctgggggacctggaccaggatggctacaatgatgtggccatcggggctccctttggtggggagacccagcagggagtagtgtttgtatttcctgggggcccaggagggctgggctctaagccttcccaggttctgcagcccctgtgggcagccagccacaccccagacttctttggctctgcccttcgaggaggccgagacctggatggcaatggatatcctgatctgattgtggggtcctttggtgtggacaaggctgtggtatacaggggccgccccatcgtgtccgctagtgcctccctcaccatcttccccgccatgttcaacccagaggagcggagctgcagcttagaggggaaccctgtggcctgcatcaaccttagcttctgcctcaatgcttctggaaaacacgttgctgactccattggtttcacagtggaacttcagctggactggcagaagcagaagggaggggtacggcgggcactgttcctggcctccaggcaggcaaccctgacccagaccctgctcatccagaatggggctcgagaggattgcagagagatgaagatctacctcaggaacgagtcagaatttcgagacaaactctcgccgattcacatcgctctcaacttctccttggacccccaagccccagtggacagccacggcctcaggccagccctacattatcagagcaagagccggatagaggacaaggctcagatcttgctggactgtggagaagacaacatctgtgtgcctgacctgcagctggaagtgtttggggagcagaaccatgtgtacctgggtgacaagaatgccctgaacctcactttccatgcccagaatgtgggtgagggtggcgcctatgaggctgagcttcgggtcaccgcccctccagaggctgagtactcaggactcgtcagacacccagggaacttctccagcctgagctgtgactactttgccgtgaaccagagccgcctgctggtgtgtgacctgggcaaccccatgaaggcaggagccagtctgtggggtggccttcggtttacagtccctcatctccgggacactaagaaaaccatccagtttgacttccagatcctcagcaagaatctcaacaactcgcaaagcgacgtggtttcctttcggctctccgtggaggctcaggcccaggtcaccctgaacggtgtctccaagcctgaggcagtgctattcccagtaagcgactggcatccccgagaccagcctcagaaggaggaggacctgggacctgctgtccaccatgtctatgagctcatcaaccaaggccccagctccattagccagggtgtgctggaactcagctgtccccaggctctggaaggtcagcagctcctatatgtgaccagagttacgggactcaactgcaccaccaatcaccccattaacccaaagggcctggagttggatcccgagggttccctgcaccaccagcaaaaacgggaagctccaagccgcagctctgcttcctcgggacctcagatcctgaaatgcccggaggctgagtgtttcaggctgcgctgtgagctcgggcccctgcaccaacaagagagccaaagtctgcagttgcatttccgagtctgggccaagactttcttgcagcgggagcaccagccatttagcctgcagtgtgaggctgtgtacaaagccctgaagatgccctaccgaatcctgcctcggcagctgccccaaaaagagcgtcaggtggccacagctgtgcaatggaccaaggcagaaggcagctatggcgtcccactgtggatcatcatcctagccatcctgtttggcctcctgctcctaggtctactcatctacatcctctacaagcttggattcttcaaacgctccctcccatatggcaccgccatggaaaaagctcagctcaagcctccagccacctctgatgcctgagtcctcccaatttcagactcccattcctgaagaaccagtccccccaccctcattctactgaaaaggaggggtctgggtacttcttgaaggtgctgacggccagggagaagctcctctccccagcccagagacatacttgaagggccagagccaggggggtgaggagctggggatccctcccccccatgcactgtgaaggacccttgtttacacataccctcttcatggatgggggaactcagatccagggacagaggccccagcctccctgaagcctttgcattttggagagtttcctgaaacaacttggaaagataactaggaaatccattcacagttctttgggccagacatgccacaaggacttcctgtccagctccaacctgcaaagatctgtcctcagccttgccagagatccaaaagaagcccccagctaagaacctggaacttggggagttaagacctggcagctctggacagccccaccctggtgggccaacaaagaacactaactatgcatggtgccccaggaccagctcaggacagatgccacacaaggatagatgctggcccagggcccagagcccagctccaaggggaatcagaactcaaatggggccagatccagcctggggtctggagttgatctggaacccagactcagacattggcacctaatccaggcagatccaggactatatttgggcctgctccagacctgatcctggaggcccagttcaccctgatttaggagaagccaggaatttcccaggaccctgaaggggccatgatggcaacagatctggaacctcagcctggccagacacaggccctccctgttccccagagaaaggggagcccactgtcctgggcctgcagaatttgggttctgcctgccagctgcactgatgctgcccctcatctctctgcccaacccttccctcaccttggcaccagacacccaggacttatttaaactctgttgcaagtgcaataaatctgacgtcagtgggggcactgggtcaggtcgacgcggccgcgaat

SEQ ID NO: 298825 - DNA, 1277 bp, Homo sapiens
agaggggtagtcctagcctgaattcagaggccacttttgcaggatgtagaggttggaggcactagagtcctccttattacttcttggaataagagctgtggagaaatggcagccatagtaccttaactctccctcttttcccctttatcagcttggattcttcaaacgctccctcccatatggcaccgccatggaaaaagctcagctcaagcctccagccacctctgatgcctgagtcctcccaatttcagactcccattcctgaagaaccagtccccccaccctcattctactgaaaaggaggggtctgggtacttcttgaaggtgctgacggccagggagaagctcctctccccagcccagagacatacttgaagggccagagccaggggggtgaggagctggggatccctcccccccatgcactgtgaaggacccttgtttacacataccctcttcatggatgggggaactcagatccagggacagaggccccagcctccctgaagcctttgcattttggagagtttcctgaaacaacttggaaagataactaggaaatccattcacagttctttgggccagacatgccacaaggacttcctgtccagctccaacctgcaaagatctgtcctcagccttgccagagatccaaaagaagcccccagctaagaacctggaacttggggagttaagacctggcagctctggacagccccaccctggtgggccaacaaagaacactaactatgcatggtgccccaggaccagctcaggacagatgccacacaaggatagatgctggcccagggcccagagcccagctccaaggggaatcagaactcaaatggggccagatccagcctggggtctggagttgatctggaacccagactcagacattggcacctaatccaggcagatccaggactatatttgggcctgctccagacctgatcctggaggcccagttcaccctgatttaggagaagccaggaatttcccaggaccctgaaggggccatgatggcaacagatctggaacctcagcctggccagacacaggccctccctgttccccagagaaaggggagcccactgtcctgggcctgcagaatttgggttctgcctgccagctgcactgatgctgcccctcatctctctgcccaacccttccctcaccttggcaccagacacccaggacttatttaaactctgttgcaagtgcaataaatctgacccagtgcccccactgaccagaactagaaaaaaaaaact

SEQ ID NO: 298826 - DNA, 4393 bp, Homo sapiens
agtccagacaaccggcttccagctggggctggggaaagggggttggaggggtgcgccccccccccacgccccttaggggtgggggacgcgggctcagagttccagggacccaggaatgcccccccgccagccccctcggcaggcggggggagggctcagccgggagtttggcaaactcctccccgcgttgagtcattcgcctctgggaggtttaggaagcggctccgggtcggtggccccaggacagggaagagcgggcgctatggggagccggacgccagagtcccctctccacgccgtgcagctgcgctggggcccccggcgccgacccccgctgctgccgctgctgttgctgctgctgccgccgccacccagggtcgggggcttcaacttagacgcggaggccccagcagtactctcggggcccccgggctccttcttcggattctcagtggagttttaccggccgggaacagacggggtcagtgtgctggtgggagcacccaaggctaataccagccagccaggagtgctgcagggtggtgctgtctacctctgtccttggggtgccagccccacacagtgcacccccattgaatttgacagcaaaggctctcggctcctggagtcctcactgtccagctcagagggagaggagcctgtggagtacaagtccttgcagtggttcggggcaacagttcgagcccatggctcctccatcttggcatgcgctccactgtacagctggcgcacagagaaggagccactgagcgaccccgtgggcacctgctacctctccacagataacttcacccgaattctggagtatgcaccctgccgctcagatttcagctgggcagcaggacagggttactgccaaggaggcttcagtgccgagttcaccaagactggccgtgtggttttaggtggaccaggaagctatttctggcaaggccagatcctgtctgccactcaggagcagattgcagaatcttattaccccgagtacctgatcaacctggttcaggggcagctgcagactcgccaggccagttccatctatgatgacagctacctaggatactctgtggctgttggtgaattcagtggtgatgacacagaagactttgttgctggtgtgcccaaagggaacctcacttacggctatgtcaccatccttaatggctcagacattcgatccctctacaacttctcaggggaacagatggcctcctactttggctatgcagtggccgccacagacgtcaatggggacgggctggatgacttgctggtgggggcacccctgctcatggatcggacccctgacgggcggcctcaggaggtgggcagggtctacgtctacctgcagcacccagccggcatagagcccacgcccacccttaccctcactggccatgatgagtttggccgatttggcagctccttgacccccctgggggacctggaccaggatggctacaatgatgtggccatcggggctccctttggtggggagacccagcagggagtagtgtttgtatttcctgggggcccaggagggctgggctctaagccttcccaggttctgcagcccctgtgggcagccagccacaccccagacttctttggctctgcccttcgaggaggccgagacctggatggcaatggatatcctgatctgattgtggggtcctttggtgtggacaaggctgtggtatacaggggccgccccatcgtgtccgctagtgcctccctcaccatcttccccgccatgttcaacccagaggagcggagctgcagcttagaggggaaccctgtggcctgcatcaaccttagcttctgcctcaatgcttctggaaaacacgttgctgactccattggtttcacagtggaacttcagctggactggcagaagcagaagggaggggtacggcgggcactgttcctggcctccaggcaggcaaccctgacccagaccctgctcatccagaatggggctcgagaggattgcagagagatgaagatctacctcaggaacgagtcagaatttcgagacaaactctcgccgattcacatcgctctcaacttctccttggacccccaagccccagtggacagccacggcctcaggccagccctacattatcagagcaagagccggatagaggacaaggctcagatcttgctggactgtggagaagacaacatctgtgtgcctgacctgcagctggaagtgtttggggagcagaaccatgtgtacctgggtgacaagaatgccctgaacctcactttccatgcccagaatgtgggtgagggtggcgcctatgaggctgagcttcgggtcaccgcccctccagaggctgagtactcaggactcgtcagacacccagggaacttctccagcctgagctgtgactactttgccgtgaaccagagccgcctgctggtgtgtgacctgggcaaccccatgaaggcaggagccagtctgtggggtggccttcggtttacagtccctcatctccgggacactaagaaaaccatccagtttgacttccagatcctcagcaagaatctcaacaactcgcaaagcgacgtggtttcctttcggctctccgtggaggctcaggcccaggtcaccctgaacggtgtctccaagcctgaggcagtgctattcccagtaagcgactggcatccccgagaccagcctcagaaggaggaggacctgggacctgctgtccaccatgtctatgagctcatcaaccaaggccccagctccattagccagggtgtgctggaactcagctgtccccaggctctggaaggtcagcagctcctatatgtgaccagagttacgggactcaactgcaccaccaatcaccccattaacccaaagggcctggagttggatcccgagggttccctgcaccaccagcaaaaacgggaagctccaagccgcagctctgcttcctcgggacctcagatcctgaaatgcccggaggctgagtgtttcaggctgcgctgtgagctcgggcccctgcaccaacaagagagccaaagtctgcagttgcatttccgagtctgggccaagactttcttgcagcgggagcaccagccatttagcctgcagtgtgaggctgtgtacaaagccctgaagatgccctaccgaatcctgcctcggcagctgccccaaaaagagcgtcaggtggccacagctgtgcaatggaccaaggcagaaggcagctatggcgtcccactgtggatcatcatcctagccatcctgtttggcctcctgctcctaggtctactcatctacatcctctacaagcttggattcttcaaacgctccctcccatatggcaccgccatggaaaaagctcagctcaagcctccagccacctctgatgcctgagtcctcccaatttcagactcccattcctgaagaaccagtccccccaccctcattctactgaaaaggaggggtctgggtacttcttgaaggtgctgacggccagggagaagctcctctccccagcccagagacatacttgaagggccagagccaggggggtgaggagctggggatccctcccccccatgcactgtgaaggacccttgtttacacataccctcttcatggatgggggaactcagatccagggacagaggccccagcctccctgaagcctttgcattttggagagtttcctgaaacaacttggaaagataactaggaaatccattcacagttctttgggccagacatgccacaaggacttcctgtccagctccaacctgcaaagatctgtcctcagccttgccagagatccaaaagaagcccccagctaagaacctggaacttggggagttaagacctggcagctctggacagccccaccctggtgggccaacaaagaacactaactatgcatggtgccccaggaccagctcaggacagatgccacacaaggatagatgctggcccagggcccagagcccagctccaaggggaatcagaactcaaatggggccagatccagcctggggtctggagttgatctggaacccagactcagacattggcacctaatccaggcagatccaggactatatttgggcctgctccagacctgatcctggaggcccagttcaccctgatttaggagaagccaggaatttcccaggaccctgaaggggccatgatggcaacagatctggaacctcagcctggccagacacaggccctccctgttccccagagaaaggggagcccactgtcctgggcctgcagaatttgggttctgcctgccagctgcactgatgctgcccctcatctctctgcccaacccttccctcaccttgcactgtttgactgtggtacgagctcgattgt

SEQ ID NO: 298827 - DNA, 555 bp, Homo sapiens
gaactggactacacctggtggccacaaagaacactatgtgccaggacagctcaggacagatgccacacaaggatagatgctggcccagggcccagagcccagctccaaggggaatcagaactcaaatggggccagatccagcctggggtctggagttgatctggaacccagactcagacattggcacctaatccaggcagatccaggactatatttgggcctgctccagacctgatcctggaggcccagttcaccctgatttaggagaagccaggaatttcccaggaccctgaaggggccatgatggcaacagatctggaacctcagcctggccagacacaggccctccctgttccccagagaaaggggagcccactgtcctgggcctgcagaatttgggttctgcctgccagctgcactgatgctgcccctcatctctctgcccaacccttccctcaccttggcaccagacacccaggacttatttaaactctgttgcaagtgcaataaatctgacccagtgcccccactgaccagaactagaaaaaaaaaact

SEQ ID NO: 298828 - DNA, 3442 bp, Homo sapiens
agtccagacaaccggcttccagctggggctggggaaagggggttggaggggtgcgccccccccccacgccccttaggggtgggggacgcgggctcagagttccagggacccaggaatgcccccccgccagccccctcggcaggcggggggagggctcagccgggagtttggcaaactcctccccgcgttgagtcattcgcctctgggaggtttaggaagcggctccgggtcggtggccccaggacagggaagagcgggcgctatggggagccggacgccagagtcccctctccacgccgtgcagctgcgctggggcccccggcgccgacccccgctgctgccgctgctgttgctgctgctgccgccgccacccagggtcgggggcttcaacttagacgcggaggccccagcagtactctcggggcccccgggctccttcttcggattctcagtggagttttaccggccgggaacagacggggtcagtgtgctggtgggagcacccaaggctaataccagccagccaggagtgctgcagggtggtgctgtctacctctgtccttggggtgccagccccacacagtgcacccccattgaatttgacagcaaaggctctcggctcctggagtcctcactgtccagctcagagggagaggagcctgtggagtacaagtccttgcagtggttcggggcaacagttcgagcccatggctcctccatcttggcatgcgctccactgtacagctggcgcacagagaaggagccactgagcgaccccgtgggcacctgctacctctccacagataacttcacccgaattctggagtatgcaccctgccgctcagatttcagctgggcagcaggacagggttactgccaaggaggcttcagtgccgagttcaccaagactggccgtgtggttttaggtggaccaggaagctatttctggcaaggccagatcctgtctgccactcaggagcagattgcagaatcttattaccccgagtacctgatcaacctggttcaggggcagctgcagactcgccaggccagttccatctatgatgacagctacctaggatactctgtggctgttggtgaattcagtggtgatgacacagaagactttgttgctggtgtgcccaaagggaacctcacttacggctatgtcaccatccttaatggctcagacattcgatccctctacaacttctcaggggaacagatggcctcctactttggctatgcagtggccgccacagacgtcaatggggacgggctggatgacttgctggtgggggcacccctgctcatggatcggacccctgacgggcggcctcaggaggtgggcagggtctacgtctacctgcagcacccagccggcatagagcccacgcccacccttaccctcactggccatgatgagtttggccgatttggcagctccttgacccccctgggggacctggaccaggatggctacaatgatgtggccatcggggctccctttggtggggagacccagcagggagtagtgtttgtatttcctgggggcccaggagggctgggctctaagccttcccaggttctgcagcccctgtgggcagccagccacaccccagacttctttggctctgcccttcgaggaggccgagacctggatggcaatggatatcctgatctgattgtggggtcctttggtgtggacaaggctgtggtatacaggggccgccccatcgtgtccgctagtgcctccctcaccatcttccccgccatgttcaacccagaggagcggagctgcagcttagaggggaaccctgtggcctgcatcaaccttagcttctgcctcaatgcttctggaaaacacgttgctgactccattggtttcacagtggaacttcagctggactggcagaagcagaagggaggggtacggcgggcactgttcctggcctccaggcaggcaaccctgacccagaccctgctcatccagaatggggctcgagaggattgcagagagatgaagatctacctcaggaacgagtcagaatttcgagacaaactctcgccgattcacatcgctctcaacttctccttggacccccaagccccagtggacagccacggcctcaggccagccctacattatcagagcaagagccggatagaggacaaggctcagatcttgctggactgtggagaagacaacatctgtgtgcctgacctgcagctggaagtgtttggggagcagaaccatgtgtacctgggtgacaagaatgccctgaacctcactttccatgcccagaatgtgggtgagggtggcgcctatgaggctgagcttcgggtcaccgcccctccagaggctgagtactcaggactcgtcagacacccagggaacttctccagcctgagctgtgactactttgccgtgaaccagagccgcctgctggtgtgtgacctgggcaaccccatgaaggcaggagccagtctgtggggtggccttcggtttacagtccctcatctccgggacactaagaaaaccatccagtttgacttccagatcctcagcaagaatctcaacaactcgcaaagcgacgtggtttcctttcggctctccgtggaggctcaggcccaggtcaccctgaacggtgtctccaagcctgaggcagtgctattcccagtaagcgactggcatccccgagaccagcctcagaaggaggaggacctgggacctgctgtccaccatgtctatgagctcatcaaccaaggccccagctccattagccagggtgtgctggaactcagctgtccccaggctctggaaggtcagcagctcctatatgtgaccagagttacgggactcaactgcaccaccaatcaccccattaacccaaagggcctggagttggatcccgagggttccctgcaccaccagcaaaaacgggaagctccaagccgcagctctgcttcctcgggacctcagatcctgaaatgcccggaggctgagtgtttcaggctgcgctgtgagctcgggcccctgcaccaacaagagagccaaagtctgcagttgcatttccgagtctgggccaagactttcttgcagcgggagcaccagccatttagcctgcagtgtgaggctgtgtacaaagccctgaagatgccctaccgaatcctgcctcggcagctgccccaaaaagagcgtcaggtggccacagctgtgcaatggaccaaggcagaaggcagctatggcgtcccactgtggatcatcatcctagccatcctgtttggcctcctgctcctaggtctactcatctacatcctctacaagcttggattcttcaaacgctccctcccatatggcaccgccatggagtaaatggcatgccatttactccatggcgggggtgtagacgaaccggatgtcagcggcatcccctaaggc

SEQ ID NO: 298829 - DNA, 3643 bp, Homo sapiens
agtccagacaaccggcttccagctggggctggggaaagggggttggaggggtgcgccccccccccacgccccttaggggtgggggacgcgggctcagagttccagggacccaggaatgcccccccgccagccccctcggcaggcggggggagggctcagccgggagtttggcaaactcctccccgcgttgagtcattcgcctctgggaggtttaggaagcggctccgggtcggtggccccaggacagggaagagcgggcgctatggggagccggacgccagagtcccctctccacgccgtgcagctgcgctggggcccccggcgccgacccccgctgctgccgctgctgttgctgctgctgccgccgccacccagggtcgggggcttcaacttagacgcggaggccccagcagtactctcggggcccccgggctccttcttcggattctcagtggagttttaccggccgggaacagacggggtcagtgtgctggtgggagcacccaaggctaataccagccagccaggagtgctgcagggtggtgctgtctacctctgtccttggggtgccagccccacacagtgcacccccattgaatttgacagcaaaggctctcggctcctggagtcctcactgtccagctcagagggagaggagcctgtggagtacaagtccttgcagtggttcggggcaacagttcgagcccatggctcctccatcttggcatgcgctccactgtacagctggcgcacagagaaggagccactgagcgaccccgtgggcacctgctacctctccacagataacttcacccgaattctggagtatgcaccctgccgctcagatttcagctgggcagcaggacagggttactgccaaggaggcttcagtgccgagttcaccaagactggccgtgtggttttaggtggaccaggaagctatttctggcaaggccagatcctgtctgccactcaggagcagattgcagaatcttattaccccgagtacctgatcaacctggttcaggggcagctgcagactcgccaggccagttccatctatgatgacagctacctaggatactctgtggctgttggtgaattcagtggtgatgacacagaagactttgttgctggtgtgcccaaagggaacctcacttacggctatgtcaccatccttaatggctcagacattcgatccctctacaacttctcaggggaacagatggcctcctactttggctatgcagtggccgccacagacgtcaatggggacgggctggatgacttgctggtgggggcacccctgctcatggatcggacccctgacgggcggcctcaggaggtgggcagggtctacgtctacctgcagcacccagccggcatagagcccacgcccacccttaccctcactggccatgatgagtttggccgatttggcagctccttgacccccctgggggacctggaccaggatggctacaatgatgtggccatcggggctccctttggtggggagacccagcagggagtagtgtttgtatttcctgggggcccaggagggctgggctctaagccttcccaggttctgcagcccctgtgggcagccagccacaccccagacttctttggctctgcccttcgaggaggccgagacctggatggcaatggatatcctgatctgattgtggggtcctttggtgtggacaaggctgtggtatacaggggccgccccatcgtgtccgctagtgcctccctcaccatcttccccgccatgttcaacccagaggagcggagctgcagcttagaggggaaccctgtggcctgcatcaaccttagcttctgcctcaatgcttctggaaaacacgttgctgactccattggtttcacagtggaacttcagctggactggcagaagcagaagggaggggtacggcgggcactgttcctggcctccaggcaggcaaccctgacccagaccctgctcatccagaatggggctcgagaggattgcagagagatgaagatctacctcaggaacgagtcagaatttcgagacaaactctcgccgattcacatcgctctcaacttctccttggacccccaagccccagtggacagccacggcctcaggccagccctacattatcagagcaagagccggatagaggacaaggctcagatcttgctggactgtggagaagacaacatctgtgtgcctgacctgcagctggaagtgtttggggagcagaaccatgtgtacctgggtgacaagaatgccctgaacctcactttccatgcccagaatgtgggtgagggtggcgcctatgaggctgagcttcgggtcaccgcccctccagaggctgagtactcaggactcgtcagacacccagggaacttctccagcctgagctgtgactactttgccgtgaaccagagccgcctgctggtgtgtgacctgggcaaccccatgaaggcaggagccagtctgtggggtggccttcggtttacagtccctcatctccgggacactaagaaaaccatccagtttgacttccagatcctcagcaagaatctcaacaactcgcaaagcgacgtggtttcctttcggctctccgtggaggctcaggcccaggtcaccctgaacggtgtctccaagcctgaggcagtgctattcccagtaagcgactggcatccccgagaccagcctcagaaggaggaggacctgggacctgctgtccaccatgtctatgagctcatcaaccaaggccccagctccattagccagggtgtgctggaactcagctgtccccaggctctggaaggtcagcagctcctatatgtgaccagagttacgggactcaactgcaccaccaatcaccccattaacccaaagggcctggaggtgagatcctgaacactggcatggggaagaggagcagattcagaggaccaaggctgaggggttggggaaggttgctgggggcctgcaagaggcaatgaggatgtgcctatagctagggttgagggtcacaaggcccaaagttacctcaaaatcctctggaggaaaaaggactttcatccactgtgtttctttctgcctgaactatcccttctttgtttcccggcatacccctagggcccagttatgtgccacctcctctaggaagccttcttcaaaccttttcctctgggcccgaatgcctgttttatagttcatttactcattaacatctaattaaataagtgactgtactgaacactgttaggcccaggaaatattgcaccaaacagaactgacaaggtctccacgttcatggaacttacattctagtgaagggtgatagacatagaaaagaaaaagagaaggagaaaaattaacagggattgaaaggtgatgaagtgaagagttaataagctgtagggacactatttaaattggatcatagaaaaacctcttgaagacgtcacagctgaactgaggcctgaaagataaggttgaacctgtctataagactcagggatgagcattccaaaccaagggaacatccagtgcaaaaacaggaacacagacctaattatttacttaagcatctcctccagtgtgatctccaagaaccaagttttcctcatttccatattt

SEQ ID NO: 298830 - DNA, 2870 bp, Homo sapiens
agtccagacaaccggcttccagctggggctggggaaagggggttggaggggtgcgccccccccccacgccccttaggggtgggggacgcgggctcagagttccagggacccaggaatgcccccccgccagccccctcggcaggcggggggagggctcagccgggagtttggcaaactcctccccgcgttgagtcattcgcctctgggaggtttaggaagcggctccgggtcggtggccccaggacagggaagagcgggcgctatggggagccggacgccagagtcccctctccacgccgtgcagctgcgctggggcccccggcgccgacccccgctgctgccgctgctgttgctgctgctgccgccgccacccagggtcgggggcttcaacttagacgcggaggccccagcagtactctcggggcccccgggctccttcttcggattctcagtggagttttaccggccgggaacagacggggtcagtgtgctggtgggagcacccaaggctaataccagccagccaggagtgctgcagggtggtgctgtctacctctgtccttggggtgccagccccacacagtgcacccccattgaatttgacagcaaaggctctcggctcctggagtcctcactgtccagctcagagggagaggagcctgtggagtacaagtccttgcagtggttcggggcaacagttcgagcccatggctcctccatcttggcatgcgctccactgtacagctggcgcacagagaaggagccactgagcgaccccgtgggcacctgctacctctccacagataacttcacccgaattctggagtatgcaccctgccgctcagatttcagctgggcagcaggacagggttactgccaaggaggcttcagtgccgagttcaccaagactggccgtgtggttttaggtggaccaggaagctatttctggcaaggccagatcctgtctgccactcaggagcagattgcagaatcttattaccccgagtacctgatcaacctggttcaggggcagctgcagactcgccaggccagttccatctatgatgacagctacctaggatactctgtggctgttggtgaattcagtggtgatgacacagaagactttgttgctggtgtgcccaaagggaacctcacttacggctatgtcaccatccttaatggctcagacattcgatccctctacaacttctcaggggaacagatggcctcctactttggctatgcagtggccgccacagacgtcaatggggacgggctggatgacttgctggtgggggcacccctgctcatggatcggacccctgacgggcggcctcaggaggtgggcagggtctacgtctacctgcagcacccagccggcatagagcccacgcccacccttaccctcactggccatgatgagtttggccgatttggcagctccttgacccccctgggggacctggaccaggatggctacaatgatgtggccatcggggctccctttggtggggagacccagcagggagtagtgtttgtatttcctgggggcccaggagggctgggctctaagccttcccaggttctgcagcccctgtgggcagccagccacaccccagacttctttggctctgcccttcgaggaggccgagacctggatggcaatggatatcctgatctgattgtggggtcctttggtgtggacaaggctgtggtatacaggggccgccccatcgtgtccgctagtgcctccctcaccatcttccccgccatgttcaacccagaggagcggagctgcagcttagaggggaaccctgtggcctgcatcaaccttagcttctgcctcaatgcttctggaaaacacgttgctgactccattggtttcacagtggaacttcagctggactggcagaagcagaagggaggggtacggcgggcactgttcctggcctccaggcaggcaaccctgacccagaccctgctcatccagaatggggctcgagaggattgcagagagatgaagatctacctcaggaacgagtcagaatttcgagacaaactctcgccgattcacatcgctctcaacttctccttggacccccaagccccagtggacagccacggcctcaggccagccctacattatcagagcaagagccggatagaggacaaggctcagatcttgctggactgtggagaagacaacatctgtgtgcctgacctgcagctggaagtgtttggggagcagaaccatgtgtacctgggtgacaagaatgccctgaacctcactttccatgcccagaatgtgggtgagggtggcgcctatgaggctgagcttcgggtcaccgcccctccagaggctgagtactcaggactcgtcagacacccaggggtgagatgagactctcgagtgggatttgggaggatacccctctagaggggacaccaaaacctgaccagtgcccaccccatctccagaacttctccagcctgagctgtgactactttgccgtgaaccagagccgcctgctggtgtgtgacctgggcaaccccatgaaggcaggagccagtctgtggggtggccttcggtttacagtccctcatctccgggacactaagaaaaccatccagtttgacttccagatcctcaggtagggagtgagtgtgtctaggctggggctgagctggggacggaagggagggctgggcgccattctcactggctgcactccagcacctcagtcttgcctccatcccacagcaagaatctcaacaactcgcaaagcgacgtggtttcctttcggctctccgtggaggctcaggcccaggtcaccctgaacgggtcagtgccaggcaaaatggggtct

SEQ ID NO: 298831 - DNA, 388 bp, Homo sapiens
catggggctggggtcctcctgtgctatttgtacaaataaacctgaggcaggaaaaaaaaaaaaaaaaaaactggaggcccagttcaccctgatttaggagaagccaggaatttcccaggaccctgaaggggccatgatggcaacagatctggaacctcagcctggccagacacaggccctccctgttccccagagaaaggggagcccactgtcctgggcctgcagaatttgggttctgcctgccagctgcactgatgctgcccctcatctctctgcccaacccttccctcaccttggcaccagacacccaggacttatttaaactctgttgcaagtgcaataaatctgacccagtgcccccactgaccagaactagaaaaaaaaaact

SEQ ID NO: 298832 - DNA, 494 bp, Homo sapiens
cctctcaaggctgccctgctccccaggctcagatcttgctggactgtggagaagacaacatctgtgtgcctgacctgcagctggaagtgtttgggtaagtagggctgacggtaagctagggagctccaggtgcacctggcacctgaaaaaatcagctagggacatactagctgtgtcgccttgggaagttgctgagctgctctgagctttaactcctttgtctgtatagtgggaatagtagcatttatttctcagactttttggaaagattaaatgaaataatctacataaaaaatctagcctagtgcctgccatagagttagaactcagtaagcagtgtctattgttactttattattactctttttttttttttgagacggagtcatgcccttgtcacccaggctggagtgcagtggcgcaatctcggctcactgcaacctccgcctcccaggttcaagcgattctctgcctcagcgtcccaagtagctggg

SEQ ID NO: 298833 - DNA, 447 bp, Homo sapiens
cagaaccaagagggaagagtgggaatgggacagaaaatgcaaggagagtttctccagggctttttctctagactctcgctcatacctgcattccccttgctcagggacaaggaaagagctgagagctgatgatcagagacctcaggtcttctgacgtgatggaattcagagtgtccgggatttctagcactaggattggggtggggtggcaagacagggtatcgagatgcctgggtttgcccttcccctcaggctggatgacttgctggtgggggcacccctgctcatggatcggacccctgacgggcggcctcaggaggtgggcagggtctacgtctacctgcagcacccagccggcatagagcccacgcccacccttaccctcactggccatgatgagtttggccgatttggcagctccttgacccccctgggggacctggacca

SEQ ID NO: 298834 - DNA, 193 bp, Homo sapiens
gaagagagactctttgggatccatatactggatcttatctgggtacccggtccagcttgggtgtaaaactcatccattgccaccaatctttatgaacagcagaaggtataaagattgactggcctggggactgtcttagctcctgaagccaggggagagtaaggttctctgactgagaaactctccatgccca

SEQ ID NO: 298835 - DNA, 489 bp, Homo sapiens
gtgttatgtttagttgttatgtctcttttctctcctttaatctgaaatagtttctcatcattttttctcttacatggcactaacactcatgacagttatttgcagactaattcatgattgtctggtttttcactattagattcagcttatgcaatttttggaagagaaactacatgtgtaatatattgttcttcttagtggatcatgtcagggggtgcaaaatgtcaatttatctcattcctggtgatgttacttttgatcacttggtaaagaaagtgtttactagttcctcacctctctgtggaaagggacacagctgaagccatgccttttacatagggtgctctcttgcctacacagttgtaaccgggagtggttcaagacaagacatagactcaacagttttgatgatgaattgtggaaaagaacatagcactaaccaggaattagacaagaaacagaataacagaatttctcagaaacaaacac

SEQ ID NO: 298836 - DNA, 361 bp, Homo sapiens
gtgatctgcctgcctcagccacccaaaatgctgggattacaggtgtgagccaccacatctggccaagaataatttttttattgtggtagaaaacatttaccatcttaacatttttaagtgtacagtacagtagtagtaactacatccaccctgtggtgcaacagagctttagaactttttaaatcttacaaaactgaaacaaaactgaacttcccctttcctcctccccccatccctgtcaacctgcactgtattttctttttctgagggtttgacttttcttttaggtttttttttctttaccaaaaatacagaaggtttcacgaatttttgtgtcatccttgcacagtggccatgctaa

SEQ ID NO: 298837 - DNA, 902 bp, Homo sapiens
cgccctcgcggaggaggtggtgttccgccctcctagtcgcagcaagcgcggaactggggttgcggcgtctaagtgtttccggtggattcccagggactgtcggaggtgtggactctgcctgcctacctggtctgggaagatgttctaccatatctccctagagcacgaaatcctgctgcacccgcgctacttcggccccaacttgctcaacacggtgaagcagaagctcttcaccgaggtggaggggacctgcacagggaagtatggctttgtaattgctgtcaccaccattgacaatattggtgctggtgtgatccagccaggccgaggctttgtcctttatccagttaagtacaaggccattgttttccggccatttaaaggggaggtcgtggatgctgttgtcactcaggtcaacaaggttggactcttcacagaaattgggcccatgtcttgcttcatctctcgacattccatcccttcagagatggagtttgatcctaactccaacccaccatgttacaagacaatggatgaggatattgtgattcagcaggacgatgagatccgcttaaagattgtggggacccgtgtggacaagaatgacatttttgctattggctccctgatggacgattacttggggcttgtaagctgagcctggtggcctcctacccttggtcctactctaggaagtgtgattgtcacacttatcatgttgtccagaggtccagtctggctgctgttgtggaggcaaggaaggcaactcatcccagaaggcatctggtgcttcttgtagcttaactactgcctcctcatttttcagtatgtgttctaagtataaaaagtccttggttctcatggaaaaaaaaaaaggggggcccaaaatatcctccgaggcc

SEQ ID NO: 298838 - DNA, 1636 bp, Homo sapiens
cgccctcgcggaggaggtggtgttccgccctcctagtcgcagcaagcgcggaactggggttgcggcgtctaagtgtttccggtggattcccagggactgtcggaggtgtggactctgcctgcctacctggtctgggaagatgttctaccatatctccctagagcacgaaatcctgctgcacccgcgctacttcggccccaacttgctcaacacggtgaagcagaagctcttcaccgaggtggaggggacctgcacagggaagtatggctttgtaattgctgtcaccaccattgacaatattggtgctggtgtgatccagccaggccgaggctttgtcctttatccagttaagtacaaggccattgttttccggccatttaaaggggaggtcgtggatgctgttgtcactcaggtcaacaaggttggactcttcacagaaattgggcccatgtcttgcttcatctctcgacattccatcccttcagagatggagtttgatcctaactccaacccaccatgttacaagacaatggatgaggatattgtgattcagcaggacgatgagatccgcttaaagattgtggggacccgtgtggacaagaatgacatttttgctattggctccctgatggacgattacttggggcttgtaagctgagcctggtggcctcctacccttggtcctactctaggaagtgtgattgtcacacttatcatgttgtccagaggtccagtctggctgctgttgtggaggcaaggaaggcaactcatcccagaaggcatctggtgcttcttgtagcttaactactgcctcctcatttttcagtatgtgttctaagtataaaaagtccttggttctcatggaaaaaaaaaaaaaaaaaacaaaaaaaccttgtgcgtggcgcgcggcctgggcgcccttggaaaaaacgtttcatcaaaaccaactgcgcgtggggcgagcgggggccccaggatgggtataggggacccgtgggcaaaaagcgggttccgataggggaaacccgggcgccaaagaaaacaggggcgggggggtttctcccccacccaagattaaaaaaaaagcggccggggggcgggaaaccacgaggggcggtcctgagaaaaacactctccagagagggagggcgcctgaggggggccaacaaaaaccgggagagcttatataaacaccgaggagagcgccccaacggcaaagagccccagatactaaaatttaaccgccgggcgctgtgggggtgatcaaacacaggaagcaaccagaacaaggctgaaaactagaaaagagaaagggagaggacaaaagctaaacagagcagagctatgaaaccgaacatcaagcgacatcaaaggaagaacacgcagaggaaatggaacgacaaaaaggagaagaagagaggagacagagaaagaagaaaagaagcgaaagagacaccaagaaaaacgagaagaacgcagaaggaagaaagagagaagagagggggaagagagagaggaggaggaagacagagaggaagagagaggatacaccgaacaaggagcaaacagagagaaagggaagaacagcagagaggaagaaaaagagaacagagacacggagaggaagaaacaagca

SEQ ID NO: 298839 - DNA, 2874 bp, Homo sapiens
ggcacgaggttccgagttgcgatgctgtacttctctttgttttgggcggctcggcctctgcagagatgtgggcagctggtcaggatggccattcgggctcagcacagcaacgcagcccagactcagactggggaagcaaacaggggctggacaggccaggagagcctgtcggacagtgatcctgagatgtgggagttgctgcagagggagaaggacaggcagtgtcgtggcctggagctcattgcctcagagaacttctgcagccgagctgcgctggaggccctggggtcctgtctgaacaacaagtactcggagggttatcctggcaagagatactatgggggagcagaggtggtggatgaaattgagctgctgtgccagcgccgggccttggaagcctttgacctggatcctgcacagtggggagtcaatgtccagccctactccgggtccccagccaacctggccgtctacacagcccttctgcaacctcacgaccggatcatggggctggacctgcccgatgggggccatctcacccacggctacatgtctgacgtcaagcggatatcagccacgtccatcttcttcgagtctatgccctataagctcaaccccaaaactggcctcattgactacaaccagctggcactgactgctcgacttttccggccacggctcatcatagctggcaccagcgcctatgctcgcctcattgactacgcccgcatgagagaggtgtgtgatgaagtcaaagcacacctgctggcagacatggcccacatcagtggcctggtggctgccaaggtgattccctcgcctttcaagcacgcggacatcgtcaccaccactactcacaagactcttcgaggggccaggtcagggctcatcttctaccggaaaggggtgaaggctgtggaccccaagactggccgggagatcccttacacatttgaggaccgaatcaactttgccgtgttcccatccctgcaggggggcccccacaatcatgccattgctgcagtagctgtggccctaaagcaggcctgcacccccatgttccgggagtactccctgcaggttctgaagaatgctcgggccatggcagatgccctgctagagcgaggctactcactggtatcaggtggtactgacaaccacctggtgctggtggacctgcggcccaagggcctggatggagctcgggctgagcgggtgctagagcttgtatccatcactgccaacaagaacacctgtcctggagaccgaagtgccatcacaccgggcggcctgcggcttggggccccagccttaacttctcgacagttccgtgaggatgacttccggagagttgtggactttatagatgaaggggtcaacattggcttagaggtgaagagcaagactgccaagctccaggatttcaaatccttcctgcttaaggactcagaaacaagtcagcgtctggccaacctcaggcaacgggtggagcagtttgccagggccttccccatgcctggttttgatgagcattgaaggcacctgggaaatgaggcccacagactcaaagttactctccttccccctacctgggccagtgaaatagaaagcctttctattttttggtgcgggagggaagacctctcacttagggcaagagccaggtatagtctcccttcccagaatttgtaactgagaagatcttttctttttcctttttttggtaacaagacttagaaggagggcccaggcactttctgtttgaacccctgtcatgatcacagtgtcagagacgcgtcctctttcttggggaagttgaggagtgcccttcagagccagtagcaggcaggggtgggtaggcaccctccttcctgtttttatctaataaaatgctaacctgcaaaaaaaaaaaaaaaaaaaaaaaaaatcagactatgtcggaggtgtggactctgcctgcctacctggtctgggaagatgttctaccatgtgagcagggctcagggtggcggcaagggctgggtggaaaggaagagcaaggccaggcgccggcgcgagactccccttgtcgtccaataacctgccagcgcctggcctggtcgccatcccacttttctccgcagatctccctagagcacgaaatcctgctgcacccgcgctacttcggccccaacttgctcaacacggtgaagcagaagctcttcaccgaggtggaggggacctgcacagggaagtatggctttgtaattgctgtcaccaccattgacaatattggtgctggtgtgatccagccaggccgaggctttgtcctttatccagttaagtacaaggccattgttttccggccatttaaaggggaggtcgtggatgctgttgtcactcaggtcaacaaggttggactcttcacagaaattgggcccatgtcttgcttcatctctcgacattccatcccttcagagatggagtttgatcctaactccaacccaccatgttacaagacaatggatgaggatattgtgattcagcaggacgatgagatccgcttaaagattgtggggacccgtgtggacaagaatgacatttttgctattggctccctgatggacgattacttggggcttgtaagctgagcctggtggcctcctacccttggtcctactctaggaagtgtgattgtcacacttatcatgttgtccagaggtccagtctggctgctgttgtggaggcaaggaaggcaactcatcccagaaggcatctggtgcttcttgtagcttaactactgcctcctcatttttcagtatgtgttctaagtataaaaagtccttggttctcatggaaaaaaaaaaaggggggcccaaaatatcctccgaggcc

SEQ ID NO: 298840 - DNA, 4277 bp, Homo sapiens
ggcacgaggttccgagttgcgatgctgtacttctctttgttttgggcggctcggcctctgcagagatgtgggcagctggtcaggatggccattcgggctcagcacagcaacgcagcccagactcagactggggaagcaaacaggggctggacaggccaggagagcctgtcggacagtgatcctgagatgtgggagttgctgcagagggagaaggacaggcagtgtcgtggcctggagctcattgcctcagagaacttctgcagccgagctgcgctggaggccctggggtcctgtctgaacaacaagtactcggagggttatcctggcaagagatactatgggggagcagaggtggtggatgaaattgagctgctgtgccagcgccgggccttggaagcctttgacctggatcctgcacagtggggagtcaatgtccagccctactccgggtccccagccaacctggccgtctacacagcccttctgcaacctcacgaccggatcatggggctggacctgcccgatgggggccatctcacccacggctacatgtctgacgtcaagcggatatcagccacgtccatcttcttcgagtctatgccctataagctcaaccccaaaactggcctcattgactacaaccagctggcactgactgctcgacttttccggccacggctcatcatagctggcaccagcgcctatgctcgcctcattgactacgcccgcatgagagaggtgtgtgatgaagtcaaagcacacctgctggcagacatggcccacatcagtggcctggtggctgccaaggtgattccctcgcctttcaagcacgcggacatcgtcaccaccactactcacaagactcttcgaggggccaggtcagggctcatcttctaccggaaaggggtgaaggctgtggaccccaagactggccgggagatcccttacacatttgaggaccgaatcaactttgccgtgttcccatccctgcaggggggcccccacaatcatgccattgctgcagtagctgtggccctaaagcaggcctgcacccccatgttccgggagtactccctgcaggttctgaagaatgctcgggccatggcagatgccctgctagagcgaggctactcactggtatcaggtggtactgacaaccacctggtgctggtggacctgcggcccaagggcctggatggagctcgggctgagcgggtgctagagcttgtatccatcactgccaacaagaacacctgtcctggagaccgaagtgccatcacaccgggcggcctgcggcttggggccccagccttaacttctcgacagttccgtgaggatgacttccggagagttgtggactttatagatgaaggggtcaacattggcttagaggtgaagagcaagactgccaagctccaggatttcaaatccttcctgcttaaggactcagaaacaagtcagcgtctggccaacctcaggcaacgggtggagcagtttgccagggccttccccatgcctggttttgatgagcattgaaggcacctgggaaatgaggcccacagactcaaagttactctccttccccctacctgggccagtgaaatagaaagcctttctattttttggtgcgggagggaagacctctcacttagggcaagagccaggtatagtctcccttcccagaatttgtaactgagaagatcttttctttttcctttttttggtaacaagacttagaaggagggcccaggcactttctgtttgaacccctgtcatgatcacagtgtcagagacgcgtcctctttcttggggaagttgaggagtgcccttcagagccagtagcaggcaggggtgggtaggcaccctccttcctgtttttatctaataaaatgctaacctgcaaaaaaaaaaaaaaaaaaaaaaaaaatcagactatgtcggaggtgtggactctgcctgcctacctggtctgggaagatgttctaccatatctccctagagcacgaaatcctgctgcacccgcgctacttcggccccaacttgctcaacacggtgaagcagaagctcttcaccgaggtggaggggacctgcacagggaaagtgagtgtcgagctcaccgcaccgccagatcgttcgatgcgcacacggggcgctatacctgcaacccctccccaactcctactcgtcctgccacccactctggggacccctctcctctctcaggcagccagttgcttcctgctttgggttcccagggcgccctctgcaatgctggacaataagacttccttctctcagctgagatgggtcattcattgactcctcaaacattttaaaaacccttggtgtgtgccaggacccgtgttgggctcagaacaaggtagaatgggaacaagatagaatgaggacagcccctgtggagctcacagtgtaatcattgttcctgtgtctgctctccctctgtcattctgctggttttctcttatcccctgtgcccagggaccacacaccatgggcctctatatatcttctgaatgaatgaccagaaaaagcagatcgagagtttgggggaggaaggaagtagcctgggatttgaccatctctgggctttgcacagaggggcctctctgatattaatgagctgggacccagctcagggcagtggagtacttgggcctccagcatcagaaaaacctgcaggaacatgcagattcctgagcctccttattccctacagaatcaagactgtctggggcagacctgagaatctgcattttaagaagatgattctcaggcatcccgaagattgagatctgttgcctcaaggactccagccttcttggacatttattgtgaaattaccagaacagcatttggtcttacacatactgatctctgttctgtcttcttttggtcattaagctctctgggagcagaggtgctatctacttgtccttttgctctccccgaccctacccccaagagctcagcgacttttattgcagatgtctttagaggctcttggacacacagtgtcttcctgtttctcatcctccttgcaggttggactcttcacagaaattgggcccatgtcttgcttcatctctcgacattccatcccttcagagatggagtttgatcctaactccaacccaccatgttacaagacaatggatgaggatattgtgattcagcaggacgatgagatccgcttaaagattgtggggacccgtgtggacaagaatgacatttttgctattggctccctgatggacgattacttggggcttgtaagctgagcctggtggcctcctacccttggtcctactctaggaagtgtgattgtcacacttatcatgttgtccagaggtccagtctggctgctgttgtggaggcaaggaaggcaactcatcccagaaggcatctggtgcttcttgtagcttaactactgcctcctcatttttcagtatgtgttctaagtataaaaagtccttggttctcatggaaaaaaaaaaaaaaaaaacaaaaaaaccttgtgcgtggcgcgcggcctgggcgcccttggaaaaaacgtttcatcaaaaccaactgcgcgtggggcgagcgggggccccaggatgggtataggggacccgtgggcaaaaagcgggttccgataggggaaacccgggcgccaaagaaaacaggggcgggggggtttctcccccacccaagattaaaaaaaaagcggccggggggcgggaaaccacgaggggcggtcctgagaaaaacactctccagagagggagggcgcctgaggggggccaacaaaaaccgggagagcttatataaacaccgaggagagcgccccaacggcaaagagccccagatactaaaatttaaccgccgggcgctgtgggggtgatcaaacacaggaagcaaccagaacaaggctgaaaactagaaaagagaaagggagaggacaaaagctaaacagagcagagctatgaaaccgaacatcaagcgacatcaaaggaagaacacgcagaggaaatggaacgacaaaaaggagaagaagagaggagacagagaaagaagaaaagaagcgaaagagacaccaagaaaaacgagaagaacgcagaaggaagaaagagagaagagagggggaagagagagaggaggaggaagacagagaggaagagagaggatacaccgaacaaggagcaaacagagagaaagggaagaacagcagagaggaagaaaaagagaacagagacacggagaggaagaaacaagca

SEQ ID NO: 298841 - DNA, 4571 bp, Homo sapiens
ggcacgaggttccgagttgcgatgctgtacttctctttgttttgggcggctcggcctctgcagagatgtgggcagctggtcaggatggccattcgggctcagcacagcaacgcagcccagactcagactggggaagcaaacaggggctggacaggccaggagagcctgtcggacagtgatcctgagatgtgggagttgctgcagagggagaaggacaggcagtgtcgtggcctggagctcattgcctcagagaacttctgcagccgagctgcgctggaggccctggggtcctgtctgaacaacaagtactcggagggttatcctggcaagagatactatgggggagcagaggtggtggatgaaattgagctgctgtgccagcgccgggccttggaagcctttgacctggatcctgcacagtggggagtcaatgtccagccctactccgggtccccagccaacctggccgtctacacagcccttctgcaacctcacgaccggatcatggggctggacctgcccgatgggggccatctcacccacggctacatgtctgacgtcaagcggatatcagccacgtccatcttcttcgagtctatgccctataagctcaaccccaaaactggcctcattgactacaaccagctggcactgactgctcgacttttccggccacggctcatcatagctggcaccagcgcctatgctcgcctcattgactacgcccgcatgagagaggtgtgtgatgaagtcaaagcacacctgctggcagacatggcccacatcagtggcctggtggctgccaaggtgattccctcgcctttcaagcacgcggacatcgtcaccaccactactcacaagactcttcgaggggccaggtcagggctcatcttctaccggaaaggggtgaaggctgtggaccccaagactggccgggagatcccttacacatttgaggaccgaatcaactttgccgtgttcccatccctgcaggggggcccccacaatcatgccattgctgcagtagctgtggccctaaagcaggcctgcacccccatgttccgggagtactccctgcaggttctgaagaatgctcgggccatggcagatgccctgctagagcgaggctactcactggtatcaggtggtactgacaaccacctggtgctggtggacctgcggcccaagggcctggatggagctcgggctgagcgggtgctagagcttgtatccatcactgccaacaagaacacctgtcctggagaccgaagtgccatcacaccgggcggcctgcggcttggggccccagccttaacttctcgacagttccgtgaggatgacttccggagagttgtggactttatagatgaaggggtcaacattggcttagaggtgaagagcaagactgccaagctccaggatttcaaatccttcctgcttaaggactcagaaacaagtcagcgtctggccaacctcaggcaacgggtggagcagtttgccagggccttccccatgcctggttttgatgagcattgaaggcacctgggaaatgaggcccacagactcaaagttactctccttccccctacctgggccagtgaaatagaaagcctttctattttttggtgcgggagggaagacctctcacttagggcaagagccaggtatagtctcccttcccagaatttgtaactgagaagatcttttctttttcctttttttggtaacaagacttagaaggagggcccaggcactttctgtttgaacccctgtcatgatcacagtgtcagagacgcgtcctctttcttggggaagttgaggagtgcccttcagagccagtagcaggcaggggtgggtaggcaccctccttcctgtttttatctaataaaatgctaacctgcaaaaaaaaaaaaaaaaaaaaaaaaaatcagactatgtcggaggtgtggactctgcctgcctacctggtctgggaagatgttctaccatgtgagcagggctcagggtggcggcaagggctgggtggaaaggaagagcaaggccaggcgccggcgcgagactccccttgtcgtccaataacctgccagcgcctggcctggtcgccatcccacttttctccgcagatctccctagagcacgaaatcctgctgcacccgcgctacttcggccccaacttgctcaacacggtgaagcagaagctcttcaccgaggtggaggggacctgcacagggaaagtgagtgtcgagctcaccgcaccgccagatcgttcgatgcgcacacggggcgctatacctgcaacccctccccaactcctactcgtcctgccacccactctggggacccctctcctctctcaggcagccagttgcttcctgctttgggttcccagggcgccctctgcaatgctggacaataagacttccttctctcagctgagatgggtcattcattgactcctcaaacattttaaaaacccttggtgtgtgccaggacccgtgttgggctcagaacaaggtagaatgggaacaagatagaatgaggacagcccctgtggagctcacagtgtaatcattgttcctgtgtctgctctccctctgtcattctgctggttttctcttatcccctgtgcccagggaccacacaccatgggcctctatatatcttctgaatgaatgaccagaaaaagcagatcgagagtttgggggaggaaggaagtagcctgggatttgaccatctctgggctttgcacagaggggcctctctgatattaatgagctgggacccagctcagggcagtggagtacttgggcctccagcatcagaaaaacctgcaggaacatgcagattcctgagcctccttattccctacagaatcaagactgtctggggcagacctgagaatctgcattttaagaagatgattctcaggcatcccgaagattgagatctgttgcctcaaggactccagccttcttggacatttattgtgaaattaccagaacagcatttggtcttacacatactgatctctgttctgtcttcttttggtcattaagctctctgggagcagaggtgctatctacttgtccttttgctctccccgaccctacccccaagagctcagcgacttttattgcagatgtctttagaggctcttggacacacagtgtcttcctgtttctcatcctccttgcaggtatggctttgtaattgctgtcaccaccattgacaatattggtgctggtgtgatccagccaggccgaggctttgtcctttatccagttaagtacaaggccattgttttccggccatttaaaggggaggtcgtggatgctgttgtcactcaggtcaacaaggttggactcttcacagaaattgggcccatgtcttgcttcatctctcgacattccatcccttcagagatggagtttgatcctaactccaacccaccatgttacaagacaatggatgaggatattgtgattcagcaggacgatgagatccgcttaaagattgtggggacccgtgtggacaagaatgacatttttgctattggctccctgatggacgattacttggggcttgtaagctgagcctggtggcctcctacccttggtcctactctaggaagtgtgattgtcacacttatcatgttgtccagaggtccagtctggctgctgttgtggaggcaaggaaggcaactcatcccagaaggcatctggtgcttcttgtagcttaactactgcctcctcatttttcagtatgtgttctaagtataaaaagtccttggttctcatggaaaaaaaaaaaaaaaaaacaaaaaaaccttgtgcgtggcgcgcggcctgggcgcccttggaaaaaacgtttcatcaaaaccaactgcgcgtggggcgagcgggggccccaggatgggtataggggacccgtgggcaaaaagcgggttccgataggggaaacccgggcgccaaagaaaacaggggcgggggggtttctcccccacccaagattaaaaaaaaagcggccggggggcgggaaaccacgaggggcggtcctgagaaaaacactctccagagagggagggcgcctgaggggggccaacaaaaaccgggagagcttatataaacaccgaggagagcgccccaacggcaaagagccccagatactaaaatttaaccgccgggcgctgtgggggtgatcaaacacaggaagcaaccagaacaaggctgaaaactagaaaagagaaagggagaggacaaaagctaaacagagcagagctatgaaaccgaacatcaagcgacatcaaaggaagaacacgcagaggaaatggaacgacaaaaaggagaagaagagaggagacagagaaagaagaaaagaagcgaaagagacaccaagaaaaacgagaagaacgcagaaggaagaaagagagaagagagggggaagagagagaggaggaggaagacagagaggaagagagaggatacaccgaacaaggagcaaacagagagaaagggaagaacagcagagaggaagaaaaagagaacagagacacggagaggaagaaacaagca

SEQ ID NO: 298842 - DNA, 3809 bp, Homo sapiens
ggcacgaggttccgagttgcgatgctgtacttctctttgttttgggcggctcggcctctgcagagatgtgggcagctggtcaggatggccattcgggctcagcacagcaacgcagcccagactcagactggggaagcaaacaggggctggacaggccaggagagcctgtcggacagtgatcctgagatgtgggagttgctgcagagggagaaggacaggcagtgtcgtggcctggagctcattgcctcagagaacttctgcagccgagctgcgctggaggccctggggtcctgtctgaacaacaagtactcggagggttatcctggcaagagatactatgggggagcagaggtggtggatgaaattgagctgctgtgccagcgccgggccttggaagcctttgacctggatcctgcacagtggggagtcaatgtccagccctactccgggtccccagccaacctggccgtctacacagcccttctgcaacctcacgaccggatcatggggctggacctgcccgatgggggccatctcacccacggctacatgtctgacgtcaagcggatatcagccacgtccatcttcttcgagtctatgccctataagctcaaccccaaaactggcctcattgactacaaccagctggcactgactgctcgacttttccggccacggctcatcatagctggcaccagcgcctatgctcgcctcattgactacgcccgcatgagagaggtgtgtgatgaagtcaaagcacacctgctggcagacatggcccacatcagtggcctggtggctgccaaggtgattccctcgcctttcaagcacgcggacatcgtcaccaccactactcacaagactcttcgaggggccaggtcagggctcatcttctaccggaaaggggtgaaggctgtggaccccaagactggccgggagatcccttacacatttgaggaccgaatcaactttgccgtgttcccatccctgcaggggggcccccacaatcatgccattgctgcagtagctgtggccctaaagcaggcctgcacccccatgttccgggagtactccctgcaggttctgaagaatgctcgggccatggcagatgccctgctagagcgaggctactcactggtatcaggtggtactgacaaccacctggtgctggtggacctgcggcccaagggcctggatggagctcgggctgagcgggtgctagagcttgtatccatcactgccaacaagaacacctgtcctggagaccgaagtgccatcacaccgggcggcctgcggcttggggccccagccttaacttctcgacagttccgtgaggatgacttccggagagttgtggactttatagatgaaggggtcaacattggcttagaggtgaagagcaagactgccaagctccaggatttcaaatccttcctgcttaaggactcagaaacaagtcagcgtctggccaacctcaggcaacgggtggagcagtttgccagggccttccccatgcctggttttgatgagcattgaaggcacctgggaaatgaggcccacagactcaaagttactctccttccccctacctgggccagtgaaatagaaagcctttctattttttggtgcgggagggaagacctctcacttagggcaagagccaggtatagtctcccttcccagaatttgtaactgagaagatcttttctttttcctttttttggtaacaagacttagaaggagggcccaggcactttctgtttgaacccctgtcatgatcacagtgtcagagacgcgtcctctttcttggggaagttgaggagtgcccttcagagccagtagcaggcaggggtgggtaggcaccctccttcctgtttttatctaataaaatgctaacctgcaaaaaaaaaaaaaaaaaaaaaaaaaatcagactatgtcggaggtgtggactctgcctgcctacctggtctgggaagatgttctaccatgtgagcagggctcagggtggcggcaagggctgggtggaaaggaagagcaaggccaggcgccggcgcgagactccccttgtcgtccaataacctgccagcgcctggcctggtcgccatcccacttttctccgcagatctccctagagcacgaaatcctgctgcacccgcgctacttcggccccaacttgctcaacacggtgaagcagaagctcttcaccgaggtggaggggacctgcacagggaaaatcaagactgtctggggcagacctgagaatctgcattttaagaagatgattctcaggcatcccgaagattgagatctgttgcctcaaggactccagccttcttggacatttattgtgaaattaccagaacagcatttggtcttacacatactgatctctgttctgtcttcttttggtcattaagctctctgggagcagaggtatggctttgtaattgctgtcaccaccattgacaatattggtgctggtgtgatccagccaggccgaggctttgtcctttatccagttaagtacaaggccattgttttccggccatttaaaggggaggtcgtggatgctgttgtcactcaggtcaacaaggttggactcttcacagaaattgggcccatgtcttgcttcatctctcgacattccatcccttcagagatggagtttgatcctaactccaacccaccatgttacaagacaatggatgaggatattgtgattcagcaggacgatgagatccgcttaaagattgtggggacccgtgtggacaagaatgacatttttgctattggctccctgatggacgattacttggggcttgtaagctgagcctggtggcctcctacccttggtcctactctaggaagtgtgattgtcacacttatcatgttgtccagaggtccagtctggctgctgttgtggaggcaaggaaggcaactcatcccagaaggcatctggtgcttcttgtagcttaactactgcctcctcatttttcagtatgtgttctaagtataaaaagtccttggttctcatggaaaaaaaaaaaaaaaaaacaaaaaaaccttgtgcgtggcgcgcggcctgggcgcccttggaaaaaacgtttcatcaaaaccaactgcgcgtggggcgagcgggggccccaggatgggtataggggacccgtgggcaaaaagcgggttccgataggggaaacccgggcgccaaagaaaacaggggcgggggggtttctcccccacccaagattaaaaaaaaagcggccggggggcgggaaaccacgaggggcggtcctgagaaaaacactctccagagagggagggcgcctgaggggggccaacaaaaaccgggagagcttatataaacaccgaggagagcgccccaacggcaaagagccccagatactaaaatttaaccgccgggcgctgtgggggtgatcaaacacaggaagcaaccagaacaaggctgaaaactagaaaagagaaagggagaggacaaaagctaaacagagcagagctatgaaaccgaacatcaagcgacatcaaaggaagaacacgcagaggaaatggaacgacaaaaaggagaagaagagaggagacagagaaagaagaaaagaagcgaaagagacaccaagaaaaacgagaagaacgcagaaggaagaaagagagaagagagggggaagagagagaggaggaggaagacagagaggaagagagaggatacaccgaacaaggagcaaacagagagaaagggaagaacagcagagaggaagaaaaagagaacagagacacggagaggaagaaacaagca

SEQ ID NO: 298843 - DNA, 3755 bp, Homo sapiens
ggcacgaggttccgagttgcgatgctgtacttctctttgttttgggcggctcggcctctgcagagatgtgggcagctggtcaggatggccattcgggctcagcacagcaacgcagcccagactcagactggggaagcaaacaggggctggacaggccaggagagcctgtcggacagtgatcctgagatgtgggagttgctgcagagggagaaggacaggcagtgtcgtggcctggagctcattgcctcagagaacttctgcagccgagctgcgctggaggccctggggtcctgtctgaacaacaagtactcggagggttatcctggcaagagatactatgggggagcagaggtggtggatgaaattgagctgctgtgccagcgccgggccttggaagcctttgacctggatcctgcacagtggggagtcaatgtccagccctactccgggtccccagccaacctggccgtctacacagcccttctgcaacctcacgaccggatcatggggctggacctgcccgatgggggccatctcacccacggctacatgtctgacgtcaagcggatatcagccacgtccatcttcttcgagtctatgccctataagctcaaccccaaaactggcctcattgactacaaccagctggcactgactgctcgacttttccggccacggctcatcatagctggcaccagcgcctatgctcgcctcattgactacgcccgcatgagagaggtgtgtgatgaagtcaaagcacacctgctggcagacatggcccacatcagtggcctggtggctgccaaggtgattccctcgcctttcaagcacgcggacatcgtcaccaccactactcacaagactcttcgaggggccaggtcagggctcatcttctaccggaaaggggtgaaggctgtggaccccaagactggccgggagatcccttacacatttgaggaccgaatcaactttgccgtgttcccatccctgcaggggggcccccacaatcatgccattgctgcagtagctgtggccctaaagcaggcctgcacccccatgttccgggagtactccctgcaggttctgaagaatgctcgggccatggcagatgccctgctagagcgaggctactcactggtatcaggtggtactgacaaccacctggtgctggtggacctgcggcccaagggcctggatggagctcgggctgagcgggtgctagagcttgtatccatcactgccaacaagaacacctgtcctggagaccgaagtgccatcacaccgggcggcctgcggcttggggccccagccttaacttctcgacagttccgtgaggatgacttccggagagttgtggactttatagatgaaggggtcaacattggcttagaggtgaagagcaagactgccaagctccaggatttcaaatccttcctgcttaaggactcagaaacaagtcagcgtctggccaacctcaggcaacgggtggagcagtttgccagggccttccccatgcctggttttgatgagcattgaaggcacctgggaaatgaggcccacagactcaaagttactctccttccccctacctgggccagtgaaatagaaagcctttctattttttggtgcgggagggaagacctctcacttagggcaagagccaggtatagtctcccttcccagaatttgtaactgagaagatcttttctttttcctttttttggtaacaagacttagaaggagggcccaggcactttctgtttgaacccctgtcatgatcacagtgtcagagacgcgtcctctttcttggggaagttgaggagtgcccttcagagccagtagcaggcaggggtgggtaggcaccctccttcctgtttttatctaataaaatgctaacctgcaaaaaaaaaaaaaaaaaaaaaaaaaatcagactatgtcggaggtgtggactctgcctgcctacctggtctgggaagatgttctaccatatctccctagagcacgaaatcctgctgcacccgcgctacttcggccccaacttgctcaacacggtgaagcagaagctcttcaccgaggtggaggggacctgcacagggaaagtgagtgtcgagctcaccgcaccgccagatcgttcgatgcgcacacggggcgctatacctgcaacccctccccaactcctactcgtcctgccacccactctggggacccctctcctctctcaggcagccagttgcttcctgctttgggttcccagggcgccctctgcaatgctggacaataagacttccttctctcagctgagatgggtcattcattgactcctcaaacattttaaaaacccttggtgtgtgccaggacccgtgttgggctcagaacaaggtatggctttgtaattgctgtcaccaccattgacaatattggtgctggtgtgatccagccaggccgaggctttgtcctttatccagttaagtacaaggccattgttttccggccatttaaaggggaggtcgtggatgctgttgtcactcaggtcaacaaggttggactcttcacagaaattgggcccatgtcttgcttcatctctcgacattccatcccttcagagatggagtttgatcctaactccaacccaccatgttacaagacaatggatgaggatattgtgattcagcaggacgatgagatccgcttaaagattgtggggacccgtgtggacaagaatgacatttttgctattggctccctgatggacgattacttggggcttgtaagctgagcctggtggcctcctacccttggtcctactctaggaagtgtgattgtcacacttatcatgttgtccagaggtccagtctggctgctgttgtggaggcaaggaaggcaactcatcccagaaggcatctggtgcttcttgtagcttaactactgcctcctcatttttcagtatgtgttctaagtataaaaagtccttggttctcatggaaaaaaaaaaaaaaaaaacaaaaaaaccttgtgcgtggcgcgcggcctgggcgcccttggaaaaaacgtttcatcaaaaccaactgcgcgtggggcgagcgggggccccaggatgggtataggggacccgtgggcaaaaagcgggttccgataggggaaacccgggcgccaaagaaaacaggggcgggggggtttctcccccacccaagattaaaaaaaaagcggccggggggcgggaaaccacgaggggcggtcctgagaaaaacactctccagagagggagggcgcctgaggggggccaacaaaaaccgggagagcttatataaacaccgaggagagcgccccaacggcaaagagccccagatactaaaatttaaccgccgggcgctgtgggggtgatcaaacacaggaagcaaccagaacaaggctgaaaactagaaaagagaaagggagaggacaaaagctaaacagagcagagctatgaaaccgaacatcaagcgacatcaaaggaagaacacgcagaggaaatggaacgacaaaaaggagaagaagagaggagacagagaaagaagaaaagaagcgaaagagacaccaagaaaaacgagaagaacgcagaaggaagaaagagagaagagagggggaagagagagaggaggaggaagacagagaggaagagagaggatacaccgaacaaggagcaaacagagagaaagggaagaacagcagagaggaagaaaaagagaacagagacacggagaggaagaaacaagca

SEQ ID NO: 298844 - DNA, 3747 bp, Homo sapiens
ggcacgaggttccgagttgcgatgctgtacttctctttgttttgggcggctcggcctctgcagagatgtgggcagctggtcaggatggccattcgggctcagcacagcaacgcagcccagactcagactggggaagcaaacaggggctggacaggccaggagagcctgtcggacagtgatcctgagatgtgggagttgctgcagagggagaaggacaggcagtgtcgtggcctggagctcattgcctcagagaacttctgcagccgagctgcgctggaggccctggggtcctgtctgaacaacaagtactcggagggttatcctggcaagagatactatgggggagcagaggtggtggatgaaattgagctgctgtgccagcgccgggccttggaagcctttgacctggatcctgcacagtggggagtcaatgtccagccctactccgggtccccagccaacctggccgtctacacagcccttctgcaacctcacgaccggatcatggggctggacctgcccgatgggggccatctcacccacggctacatgtctgacgtcaagcggatatcagccacgtccatcttcttcgagtctatgccctataagctcaaccccaaaactggcctcattgactacaaccagctggcactgactgctcgacttttccggccacggctcatcatagctggcaccagcgcctatgctcgcctcattgactacgcccgcatgagagaggtgtgtgatgaagtcaaagcacacctgctggcagacatggcccacatcagtggcctggtggctgccaaggtgattccctcgcctttcaagcacgcggacatcgtcaccaccactactcacaagactcttcgaggggccaggtcagggctcatcttctaccggaaaggggtgaaggctgtggaccccaagactggccgggagatcccttacacatttgaggaccgaatcaactttgccgtgttcccatccctgcaggggggcccccacaatcatgccattgctgcagtagctgtggccctaaagcaggcctgcacccccatgttccgggagtactccctgcaggttctgaagaatgctcgggccatggcagatgccctgctagagcgaggctactcactggtatcaggtggtactgacaaccacctggtgctggtggacctgcggcccaagggcctggatggagctcgggctgagcgggtgctagagcttgtatccatcactgccaacaagaacacctgtcctggagaccgaagtgccatcacaccgggcggcctgcggcttggggccccagccttaacttctcgacagttccgtgaggatgacttccggagagttgtggactttatagatgaaggggtcaacattggcttagaggtgaagagcaagactgccaagctccaggatttcaaatccttcctgcttaaggactcagaaacaagtcagcgtctggccaacctcaggcaacgggtggagcagtttgccagggccttccccatgcctggttttgatgagcattgaaggcacctgggaaatgaggcccacagactcaaagttactctccttccccctacctgggccagtgaaatagaaagcctttctattttttggtgcgggagggaagacctctcacttagggcaagagccaggtatagtctcccttcccagaatttgtaactgagaagatcttttctttttcctttttttggtaacaagacttagaaggagggcccaggcactttctgtttgaacccctgtcatgatcacagtgtcagagacgcgtcctctttcttggggaagttgaggagtgcccttcagagccagtagcaggcaggggtgggtaggcaccctccttcctgtttttatctaataaaatgctaacctgcaaaaaaaaaaaaaaaaaaaaaaaaaatcagactatgtcggaggtgtggactctgcctgcctacctggtctgggaagatgttctaccatatctccctagagcacgaaatcctgctgcacccgcgctacttcggccccaacttgctcaacacggtgaagcagaagctcttcaccgaggtggaggggacctgcacagggaactcaggcatcccgaagattgagatctgttgcctcaaggactccagccttcttggacatttattgtgaaattaccagaacagcatttggtcttacacatactgatctctgttctgtcttcttttggtcattaagctctctgggagcagaggtgctatctacttgtccttttgctctccccgaccctacccccaagagctcagcgacttttattgcagatgtctttagaggctcttggacacacagtgtcttcctgtttctcatcctccttgcaggtatggctttgtaattgctgtcaccaccattgacaatattggtgctggtgtgatccagccaggccgaggctttgtcctttatccagttaagtacaaggccattgttttccggccatttaaaggggaggtcgtggatgctgttgtcactcaggtcaacaaggttggactcttcacagaaattgggcccatgtcttgcttcatctctcgacattccatcccttcagagatggagtttgatcctaactccaacccaccatgttacaagacaatggatgaggatattgtgattcagcaggacgatgagatccgcttaaagattgtggggacccgtgtggacaagaatgacatttttgctattggctccctgatggacgattacttggggcttgtaagctgagcctggtggcctcctacccttggtcctactctaggaagtgtgattgtcacacttatcatgttgtccagaggtccagtctggctgctgttgtggaggcaaggaaggcaactcatcccagaaggcatctggtgcttcttgtagcttaactactgcctcctcatttttcagtatgtgttctaagtataaaaagtccttggttctcatggaaaaaaaaaaaaaaaaaacaaaaaaaccttgtgcgtggcgcgcggcctgggcgcccttggaaaaaacgtttcatcaaaaccaactgcgcgtggggcgagcgggggccccaggatgggtataggggacccgtgggcaaaaagcgggttccgataggggaaacccgggcgccaaagaaaacaggggcgggggggtttctcccccacccaagattaaaaaaaaagcggccggggggcgggaaaccacgaggggcggtcctgagaaaaacactctccagagagggagggcgcctgaggggggccaacaaaaaccgggagagcttatataaacaccgaggagagcgccccaacggcaaagagccccagatactaaaatttaaccgccgggcgctgtgggggtgatcaaacacaggaagcaaccagaacaaggctgaaaactagaaaagagaaagggagaggacaaaagctaaacagagcagagctatgaaaccgaacatcaagcgacatcaaaggaagaacacgcagaggaaatggaacgacaaaaaggagaagaagagaggagacagagaaagaagaaaagaagcgaaagagacaccaagaaaaacgagaagaacgcagaaggaagaaagagagaagagagggggaagagagagaggaggaggaagacagagaggaagagagaggatacaccgaacaaggagcaaacagagagaaagggaagaacagcagagaggaagaaaaagagaacagagacacggagaggaagaaacaagca

SEQ ID NO: 298845 - DNA, 3799 bp, Homo sapiens
ggcacgaggttccgagttgcgatgctgtacttctctttgttttgggcggctcggcctctgcagagatgtgggcagctggtcaggatggccattcgggctcagcacagcaacgcagcccagactcagactggggaagcaaacaggggctggacaggccaggagagcctgtcggacagtgatcctgagatgtgggagttgctgcagagggagaaggacaggcagtgtcgtggcctggagctcattgcctcagagaacttctgcagccgagctgcgctggaggccctggggtcctgtctgaacaacaagtactcggagggttatcctggcaagagatactatgggggagcagaggtggtggatgaaattgagctgctgtgccagcgccgggccttggaagcctttgacctggatcctgcacagtggggagtcaatgtccagccctactccgggtccccagccaacctggccgtctacacagcccttctgcaacctcacgaccggatcatggggctggacctgcccgatgggggccatctcacccacggctacatgtctgacgtcaagcggatatcagccacgtccatcttcttcgagtctatgccctataagctcaaccccaaaactggcctcattgactacaaccagctggcactgactgctcgacttttccggccacggctcatcatagctggcaccagcgcctatgctcgcctcattgactacgcccgcatgagagaggtgtgtgatgaagtcaaagcacacctgctggcagacatggcccacatcagtggcctggtggctgccaaggtgattccctcgcctttcaagcacgcggacatcgtcaccaccactactcacaagactcttcgaggggccaggtcagggctcatcttctaccggaaaggggtgaaggctgtggaccccaagactggccgggagatcccttacacatttgaggaccgaatcaactttgccgtgttcccatccctgcaggggggcccccacaatcatgccattgctgcagtagctgtggccctaaagcaggcctgcacccccatgttccgggagtactccctgcaggttctgaagaatgctcgggccatggcagatgccctgctagagcgaggctactcactggtatcaggtggtactgacaaccacctggtgctggtggacctgcggcccaagggcctggatggagctcgggctgagcgggtgctagagcttgtatccatcactgccaacaagaacacctgtcctggagaccgaagtgccatcacaccgggcggcctgcggcttggggccccagccttaacttctcgacagttccgtgaggatgacttccggagagttgtggactttatagatgaaggggtcaacattggcttagaggtgaagagcaagactgccaagctccaggatttcaaatccttcctgcttaaggactcagaaacaagtcagcgtctggccaacctcaggcaacgggtggagcagtttgccagggccttccccatgcctggttttgatgagcattgaaggcacctgggaaatgaggcccacagactcaaagttactctccttccccctacctgggccagtgaaatagaaagcctttctattttttggtgcgggagggaagacctctcacttagggcaagagccaggtatagtctcccttcccagaatttgtaactgagaagatcttttctttttcctttttttggtaacaagacttagaaggagggcccaggcactttctgtttgaacccctgtcatgatcacagtgtcagagacgcgtcctctttcttggggaagttgaggagtgcccttcagagccagtagcaggcaggggtgggtaggcaccctccttcctgtttttatctaataaaatgctaacctgcaaaaaaaaaaaaaaaaaaaaaaaaaatcagactatgtcggaggtgtggactctgcctgcctacctggtctgggaagatgttctaccatatctccctagagcacgaaatcctgctgcacccgcgctacttcggccccaacttgctcaacacggtgaagcagaagctcttcaccgaggtggaggggacctgcacagggaaaatcaagactgtctggggcagacctgagaatctgcattttaagaagatgattctcaggcatcccgaagattgagatctgttgcctcaaggactccagccttcttggacatttattgtgaaattaccagaacagcatttggtcttacacatactgatctctgttctgtcttcttttggtcattaagctctctgggagcagaggtgctatctacttgtccttttgctctccccgaccctacccccaagagctcagcgacttttattgcagatgtctttagaggctcttggacacacagtgtcttcctgtttctcatcctccttgcaggtatggctttgtaattgctgtcaccaccattgacaatattggtgctggtgtgatccagccaggccgaggctttgtcctttatccagttaagtacaaggccattgttttccggccatttaaaggggaggtcgtggatgctgttgtcactcaggtcaacaaggttggactcttcacagaaattgggcccatgtcttgcttcatctctcgacattccatcccttcagagatggagtttgatcctaactccaacccaccatgttacaagacaatggatgaggatattgtgattcagcaggacgatgagatccgcttaaagattgtggggacccgtgtggacaagaatgacatttttgctattggctccctgatggacgattacttggggcttgtaagctgagcctggtggcctcctacccttggtcctactctaggaagtgtgattgtcacacttatcatgttgtccagaggtccagtctggctgctgttgtggaggcaaggaaggcaactcatcccagaaggcatctggtgcttcttgtagcttaactactgcctcctcatttttcagtatgtgttctaagtataaaaagtccttggttctcatggaaaaaaaaaaaaaaaaaacaaaaaaaccttgtgcgtggcgcgcggcctgggcgcccttggaaaaaacgtttcatcaaaaccaactgcgcgtggggcgagcgggggccccaggatgggtataggggacccgtgggcaaaaagcgggttccgataggggaaacccgggcgccaaagaaaacaggggcgggggggtttctcccccacccaagattaaaaaaaaagcggccggggggcgggaaaccacgaggggcggtcctgagaaaaacactctccagagagggagggcgcctgaggggggccaacaaaaaccgggagagcttatataaacaccgaggagagcgccccaacggcaaagagccccagatactaaaatttaaccgccgggcgctgtgggggtgatcaaacacaggaagcaaccagaacaaggctgaaaactagaaaagagaaagggagaggacaaaagctaaacagagcagagctatgaaaccgaacatcaagcgacatcaaaggaagaacacgcagaggaaatggaacgacaaaaaggagaagaagagaggagacagagaaagaagaaaagaagcgaaagagacaccaagaaaaacgagaagaacgcagaaggaagaaagagagaagagagggggaagagagagaggaggaggaagacagagaggaagagagaggatacaccgaacaaggagcaaacagagagaaagggaagaacagcagagaggaagaaaaagagaacagagacacggagaggaagaaacaagca

SEQ ID NO: 298846 - DNA, 847 bp, Homo sapiens
cgccctcgcggaggaggtggtgttccgccctcctagtcgcagcaagcgcggaactggggttgcggcgtctaagtgtttccggtggattcccagggactgtcggaggtgtggactctgcctgcctacctggtctgggaagatgttctaccatatctccctagagcacgaaatcctgctgcacccgcgctacttcggccccaacttgctcaacacggtgaagcagaagctcttcaccgaggtggaggggacctgcacagggaagtatggctttgtaattgctgtcaccaccattgacaatattggtgctggtgtgatccagccaggccgaggctttgtcctttatccagttaagtacaaggccattgttttccggccatttaaaggggaggtcgtggatgctgttgtcactcaggtcaacaaggttggactcttcacagaaattgggcccatgtcttgcttcatctctcgacattccatcccttcagagatggagtttgatcctaactccaacccaccatgttacaagacaatggatgaggatattgtgattcagcaggacgatgagatccgcttaaagattgtggggacccgtgtggacaagaatgacatttttgctattggctccctgatggacgattacttggggcttgtaagctgagcctggtggcctcctacccttggtcctactctaggaagtgtgattgtcacacttatcatgttgtccagaggtccagtctggctgctgttgtggaggcaaggaaggcaactcatcccagaaggcatctggtgcttcttgtatcacgccactgcactccagcttgggtaacaagagcgaaactccgcctca

SEQ ID NO: 298847 - DNA, 3639 bp, Homo sapiens
ggcacgaggttccgagttgcgatgctgtacttctctttgttttgggcggctcggcctctgcagagatgtgggcagctggtcaggatggccattcgggctcagcacagcaacgcagcccagactcagactggggaagcaaacaggggctggacaggccaggagagcctgtcggacagtgatcctgagatgtgggagttgctgcagagggagaaggacaggcagtgtcgtggcctggagctcattgcctcagagaacttctgcagccgagctgcgctggaggccctggggtcctgtctgaacaacaagtactcggagggttatcctggcaagagatactatgggggagcagaggtggtggatgaaattgagctgctgtgccagcgccgggccttggaagcctttgacctggatcctgcacagtggggagtcaatgtccagccctactccgggtccccagccaacctggccgtctacacagcccttctgcaacctcacgaccggatcatggggctggacctgcccgatgggggccatctcacccacggctacatgtctgacgtcaagcggatatcagccacgtccatcttcttcgagtctatgccctataagctcaaccccaaaactggcctcattgactacaaccagctggcactgactgctcgacttttccggccacggctcatcatagctggcaccagcgcctatgctcgcctcattgactacgcccgcatgagagaggtgtgtgatgaagtcaaagcacacctgctggcagacatggcccacatcagtggcctggtggctgccaaggtgattccctcgcctttcaagcacgcggacatcgtcaccaccactactcacaagactcttcgaggggccaggtcagggctcatcttctaccggaaaggggtgaaggctgtggaccccaagactggccgggagatcccttacacatttgaggaccgaatcaactttgccgtgttcccatccctgcaggggggcccccacaatcatgccattgctgcagtagctgtggccctaaagcaggcctgcacccccatgttccgggagtactccctgcaggttctgaagaatgctcgggccatggcagatgccctgctagagcgaggctactcactggtatcaggtggtactgacaaccacctggtgctggtggacctgcggcccaagggcctggatggagctcgggctgagcgggtgctagagcttgtatccatcactgccaacaagaacacctgtcctggagaccgaagtgccatcacaccgggcggcctgcggcttggggccccagccttaacttctcgacagttccgtgaggatgacttccggagagttgtggactttatagatgaaggggtcaacattggcttagaggtgaagagcaagactgccaagctccaggatttcaaatccttcctgcttaaggactcagaaacaagtcagcgtctggccaacctcaggcaacgggtggagcagtttgccagggccttccccatgcctggttttgatgagcattgaaggcacctgggaaatgaggcccacagactcaaagttactctccttccccctacctgggccagtgaaatagaaagcctttctattttttggtgcgggagggaagacctctcacttagggcaagagccaggtatagtctcccttcccagaatttgtaactgagaagatcttttctttttcctttttttggtaacaagacttagaaggagggcccaggcactttctgtttgaacccctgtcatgatcacagtgtcagagacgcgtcctctttcttggggaagttgaggagtgcccttcagagccagtagcaggcaggggtgggtaggcaccctccttcctgtttttatctaataaaatgctaacctgcaaaaaaaaaaaaaaaaaaaaaaaaaatcagactatgtcggaggtgtggactctgcctgcctacctggtctgggaagatgttctaccatatctccctagagcacgaaatcctgctgcacccgcgctacttcggccccaacttgctcaacacggtgaagcagaagctcttcaccgaggtggaggggacctgcacagggaaaatcaagactgtctggggcagacctgagaatctgcattttaagaagatgattctcaggcatcccgaagattgagatctgttgcctcaaggactccagccttcttggacatttattgtgaaattaccagaacagcatttggtcttacacatactgatctctgttctgtcttcttttggtcattaagctctctgggagcagaggtgctatctacttgtccttttgctctccccgaccctacccccaagagctcagcgacttttattgcagatgtctttagaggctcttggacacacagtgtcttcctgtttctcatcctccttgcaggttggactcttcacagaaattgggcccatgtcttgcttcatctctcgacattccatcccttcagagatggagtttgatcctaactccaacccaccatgttacaagacaatggatgaggatattgtgattcagcaggacgatgagatccgcttaaagattgtggggacccgtgtggacaagaatgacatttttgctattggctccctgatggacgattacttggggcttgtaagctgagcctggtggcctcctacccttggtcctactctaggaagtgtgattgtcacacttatcatgttgtccagaggtccagtctggctgctgttgtggaggcaaggaaggcaactcatcccagaaggcatctggtgcttcttgtagcttaactactgcctcctcatttttcagtatgtgttctaagtataaaaagtccttggttctcatggaaaaaaaaaaaaaaaaaacaaaaaaaccttgtgcgtggcgcgcggcctgggcgcccttggaaaaaacgtttcatcaaaaccaactgcgcgtggggcgagcgggggccccaggatgggtataggggacccgtgggcaaaaagcgggttccgataggggaaacccgggcgccaaagaaaacaggggcgggggggtttctcccccacccaagattaaaaaaaaagcggccggggggcgggaaaccacgaggggcggtcctgagaaaaacactctccagagagggagggcgcctgaggggggccaacaaaaaccgggagagcttatataaacaccgaggagagcgccccaacggcaaagagccccagatactaaaatttaaccgccgggcgctgtgggggtgatcaaacacaggaagcaaccagaacaaggctgaaaactagaaaagagaaagggagaggacaaaagctaaacagagcagagctatgaaaccgaacatcaagcgacatcaaaggaagaacacgcagaggaaatggaacgacaaaaaggagaagaagagaggagacagagaaagaagaaaagaagcgaaagagacaccaagaaaaacgagaagaacgcagaaggaagaaagagagaagagagggggaagagagagaggaggaggaagacagagaggaagagagaggatacaccgaacaaggagcaaacagagagaaagggaagaacagcagagaggaagaaaaagagaacagagacacggagaggaagaaacaagca

SEQ ID NO: 298848 - DNA, 3675 bp, Homo sapiens
ggcacgaggttccgagttgcgatgctgtacttctctttgttttgggcggctcggcctctgcagagatgtgggcagctggtcaggatggccattcgggctcagcacagcaacgcagcccagactcagactggggaagcaaacaggggctggacaggccaggagagcctgtcggacagtgatcctgagatgtgggagttgctgcagagggagaaggacaggcagtgtcgtggcctggagctcattgcctcagagaacttctgcagccgagctgcgctggaggccctggggtcctgtctgaacaacaagtactcggagggttatcctggcaagagatactatgggggagcagaggtggtggatgaaattgagctgctgtgccagcgccgggccttggaagcctttgacctggatcctgcacagtggggagtcaatgtccagccctactccgggtccccagccaacctggccgtctacacagcccttctgcaacctcacgaccggatcatggggctggacctgcccgatgggggccatctcacccacggctacatgtctgacgtcaagcggatatcagccacgtccatcttcttcgagtctatgccctataagctcaaccccaaaactggcctcattgactacaaccagctggcactgactgctcgacttttccggccacggctcatcatagctggcaccagcgcctatgctcgcctcattgactacgcccgcatgagagaggtgtgtgatgaagtcaaagcacacctgctggcagacatggcccacatcagtggcctggtggctgccaaggtgattccctcgcctttcaagcacgcggacatcgtcaccaccactactcacaagactcttcgaggggccaggtcagggctcatcttctaccggaaaggggtgaaggctgtggaccccaagactggccgggagatcccttacacatttgaggaccgaatcaactttgccgtgttcccatccctgcaggggggcccccacaatcatgccattgctgcagtagctgtggccctaaagcaggcctgcacccccatgttccgggagtactccctgcaggttctgaagaatgctcgggccatggcagatgccctgctagagcgaggctactcactggtatcaggtggtactgacaaccacctggtgctggtggacctgcggcccaagggcctggatggagctcgggctgagcgggtgctagagcttgtatccatcactgccaacaagaacacctgtcctggagaccgaagtgccatcacaccgggcggcctgcggcttggggccccagccttaacttctcgacagttccgtgaggatgacttccggagagttgtggactttatagatgaaggggtcaacattggcttagaggtgaagagcaagactgccaagctccaggatttcaaatccttcctgcttaaggactcagaaacaagtcagcgtctggccaacctcaggcaacgggtggagcagtttgccagggccttccccatgcctggttttgatgagcattgaaggcacctgggaaatgaggcccacagactcaaagttactctccttccccctacctgggccagtgaaatagaaagcctttctattttttggtgcgggagggaagacctctcacttagggcaagagccaggtatagtctcccttcccagaatttgtaactgagaagatcttttctttttcctttttttggtaacaagacttagaaggagggcccaggcactttctgtttgaacccctgtcatgatcacagtgtcagagacgcgtcctctttcttggggaagttgaggagtgcccttcagagccagtagcaggcaggggtgggtaggcaccctccttcctgtttttatctaataaaatgctaacctgcaaaaaaaaaaaaaaaaaaaaaaaaaatcagactatgtcggaggtgtggactctgcctgcctacctggtctgggaagatgttctaccatatctccctagagcacgaaatcctgctgcacccgcgctacttcggccccaacttgctcaacacggtgaagcagaagctcttcaccgaggtggaggggacctgcacagggaaagtgagtgtcgagctcaccgcaccgccagatcgttcgatgcgcacacggggcgctatacctgcaacccctccccaactcctactcgtcctgccacccactctggggacccctctcctctctcaggcagccagttgcttcctgctttgggttcccagggcgccctctgcaatgctggacaataagacttccttctctcagctgagatgggtcattcattgactcctcaaacattttaaaaacccttggtgtgtgccaggacccgtgttgggctcagaacaaggtagaatgggaacaagatagaatgaggacagcccctgtggagctcacagtgtaatcattgttcctgtgtctgctctccctctgtcattctgctggttttctcttatcccctgtgcccagggaccacacaccatgggcctctatatatcttctgaatgaatgaccagaaaaagcagatcgagagtttgggggaggaaggaagtagcctgggatttgaccatctctgggctttgcacagaggggcctctctgatattaatgagctgggacccagctcagggcagtggagtacttgggcctccagcatcagaaaaacctgcaggaacatgcagattcctgagcctccttattccctacagaatcaagactgtctggggcagacctgagaatctgcattttaagaagatgattctcaggcatcccgaagattgagatctgttgcctcaaggactccagccttcttggacatttattgtgaaattaccagaacagcatttggtcttacacatactgatctctgttctgtcttcttttggtcattaagctctctgggagcagaggtgctatctacttgtccttttgctctccccgaccctacccccaagagctcagcgacttttattgcagatgtctttagaggctcttggacacacagtgtcttcctgtttctcatcctccttgcaggttggactcttcacagaaattgggcccatgtcttgcttcatctctcgacattccatcccttcagagatggagtttgatcctaactccaacccaccatgttacaagacaatggatgaggatattgtgattcagcaggacgatgagatccgcttaaagattgtggggacccgtgtggacaagaatgacatttttgctattggctccctgatggacgattacttggggcttgtaagctgagcctggtggcctcctacccttggtcctactctaggaagtgtgattgtcacacttatcatgttgtccagaggtccagtctggctgctgttgtggaggcaaggaaggcaactcatcccagaaggcatctggtgcttcttgtagcttaactactgcctcctcatttttcagtatgtgttctagttttaaagtctctggctttcacaaaaaaaaaaggggggggctaaaatatcccgaggggccagtttgccgtccctttgtaaagggcccaagggaggttaaaaaagcaggcggggtaacagcgggggaacgcgctggtcttgagaacccttggcgggtgccacccacaaagtgggaaaattttgagcccgcgatggtt

SEQ ID NO: 298849 - DNA, 342 bp, Homo sapiens
atccatttaaagtgctaacctagatctcactttcctttcagtccatcccttcagagatggagtttgatcctaactccaacccaccatgttacaagacaatggatgaggtgagtggacagaaagaagtcagggagacaaggagagaatcagccatcctgagggagaatattggcctggggatggctgagtacagatggtccccgaattaccatggcttgattcatgattttatgactttacgatggtgtgaaagtgatgtgcattcaatatgcccccgggcttacagtgaagtgattgtgatgtaacttctcataaactgaggagcatctgtacactgttccc

SEQ ID NO: 298850 - DNA, 402 bp, Homo sapiens
ccatatgagatgtgaaatagagaagtggaattgtagggacggggagaaattgccagcctgggcaacagagcaagactccatctcaaaaaataaaaataaataaaaaataaaaaaataaaagagcaaactatttccaaataccatagaataacttacataaaagtaatataactgtattgtaagtagaagctagcactggttttattaatttagtgactattcattttatctaaatcagtgaagatttactgtcattgtttattagtctgtatatattaaaatatgatatcattaatgtacttacaaaatagtatgtcactgtttttatgttcattcttaaaaacataacctgtattaataaatgtgaacatttgcttggtatctctttggaacaaattagta

SEQ ID NO: 298851 - DNA, 697 bp, Homo sapiens
  misc_feature (36)..(36): n is a, c, g, or t
  misc_feature (46)..(46): n is a, c, g, or t
  misc_feature (140)..(140): n is a, c, g, or t
  misc_feature (189)..(189): n is a, c, g, or t
  misc_feature (205)..(205): n is a, c, g, or t
  misc_feature (231)..(231): n is a, c, g, or t
cctcctgccccgcttgggtcttcttagtttggttcntttgtccctnttgttcaacccatccatgttagctctaagaaggtttgaataagccatctaaacttattcacttcttggagctcacccaagtcctgatcttcttnttccaatcgtagctctttacagacacttgttgtttcgggctcaaagccntccacagtactttctnttgaaatggtttggttcgaccgtcanactcttcaaggtatatagacgctgcccgacgtccggcacttctgaaaaagtctggtcagctccgtcaggaactgctcgctctccaacaacaccatcgcggcgacgctggctcgactccctccgcctcgtgccgaattcggcttgtagtgagccgagatcgcgccactgtgctccagcctgggcaacagagcaagactccatctcaaaaaataaaaataaataaaaaataaaaaaataaaagagcaaactatttccaaataccatagaattaatttagtgactattcattttatctaaatcagtgaagatttactgtcattgtttattagtctgtatatattaaaatatgatatcattaatgtacttacaaaatagtatgtcactgtttttatgttcattcttaaaaacataacctgtattaataaatgtgaacatttgcttggtatctctttggaacaaattagta

SEQ ID NO: 298852 - DNA, 3910 bp, Homo sapiens
  misc_feature (3)..(3): n is a, c, g, or t
  misc_feature (5)..(5): n is a, c, g, or t
ggngnggggcgcacagagccagaggggcttgcgagcggcggctgagggaccgcggggagggggcgccgagcggctccagcgcagagactctcactgcacgccggaggccccttcctcgctccgcccgcgcgaccgcgcgccccagtcccgccccgccccgctaaccgccccagacacagcgctcgccgagggtcgcttggaccctgatcttacccgtgggcaccctgcgctctgcctgccgcgaagaccggctccccgacccgcagaagtcaggagagagggtgaagcggagcagcccgaggcggggcagcctcccggagcagcgccgcgcagagcccgggacaatggggccgcggcggctgctgctggtggccgcctgcttcagtctgtgcggcccgctgttgtctgcccgcacccgggcccgcaggccagaatcaaaagcaacaaatgccaccttagatccccggtcatttcttctcaggaaccccaatgataaatatgaaccattttgggaggatgaggagaaaaatgaaagtgggttaactgaatacagattagtctccatcaataaaagcagtcctcttcaaaaacaacttcctgcattcatctcagaagatgcctccggatatttgaccagctcctggctgacactctttgtcccatctgtgtacaccggagtgtttgtagtcagcctcccactaaacatcatggccatcgttgtgttcatcctgaaaatgaaggtcaagaagccggcggtggtgtacatgctgcacctggccacggcagatgtgctgtttgtgtctgtgctcccctttaagatcagctattacttttccggcagtgattggcagtttgggtctgaattgtgtcgcttcgtcactgcagcattttactgtaacatgtacgcctctatcttgctcatgacagtcataagcattgaccggtttctggctgtggtgtatcccatgcagtccctctcctggcgtactctgggaagggcttccttcacttgtctggccatctgggctttggccatcgcaggggtagtgcctctgctcctcaaggagcaaaccatccaggtgcccgggctcaacatcactacctgtcatgatgtgctcaatgaaaccctgctcgaaggctactatgcctactacttctcagccttctctgctgtcttcttttttgtgccgctgatcatttccacggtctgttatgtgtctatcattcgatgtcttagctcttccgcagttgccaaccgcagcaagaagtcccgggctttgttcctgtcagctgctgttttctgcatcttcatcatttgcttcggacccacaaacgtcctcctgattgcgcattactcattcctttctcacacttccaccacagaggctgcctactttgcctacctcctctgtgtctgtgtcagcagcataagctgctgcatcgaccccctaatttactattacgcttcctctgagtgccagaggtacgtctacagtatcttatgctgcaaagaaagttccgatcccagcagttataacagcagtgggcagttgatggcaagtaaaatggatacctgctctagtaacctgaataacagcatatacaaaaagctgttaacttaggaaaagggactgctgggaggttaaaaagaaaagtttataaaagtgaataacctgaggattctattagtccccacccaaactttattgattcacctcctaaaacaacagatgtacgacttgcatacctgctttttatgggagctgtcaagcatgtatttttgtcaattaccagaaagataacaggacgagatgacggtgttattccaagggaatattgccaatgctacagtaataaatgaatgtcacttctggatatagctaggtgacatatacatacttacatgtgtgtatatgtagatgtatgcacacacatatattatttgcagtgcagtatagaataggcactttaaaacactctttccccgcaccccagcaattatgaaaataatctctgattccctgatttaatatgcaaagtctaggttggtagagtttagccctgaacatttcatggtgttcatcaacagtgagagactccatagtttgggcttgtaccacttttgcaaataagtgtattttgaaattgtttgacggcaaggtttaagttattaagaggtaagacttagtactatctgtgcgtagaagttctagtgttttcaattttaaacatatccaagtttgaattcctaaaattatggaaacagatgaaaagcctctgttttgatatgggtagtattttttacattttacacactgtacacataagccaaaactgagcataagtcctctagtgaatgtaggctggctttcagagtaggctattcctgagagctgcatgtgtccgcccccgatggaggactccaggcagcagacacatgccagggccatgtcagacacagattggccagaaaccttcctgctgagcctcacagcagtgagactggggccactacatttgctccatcctcctgggattggctgtgaactgatcatgtttatgagaaactggcaaagcagaatgtgatatcctaggaggtaatgaccatgaaagacttctctacccatcttaaaaacaacgaaagaaggcatggacttctggatgcccatccactgggtgtaaacacatctagtagttgttctgaaatgtcagttctgatatggaagcacccattatgcgctgtggccactccaataggtgctgagtgtacagagtggaataagacagagacctgccctcaagagcaaagtagatcatgcatagagtgtgatgtatgtgtaataaatatgtttcacacaaacaaggcctgtcagctaaagaagtttgaacatttgggttactatttcttgtggttataacttaatgaaaacaatgcagtacaggacatatattttttaaaataagtctgatttaattgggcactatttatttacaaatgttttgctcaatagattgctcaaatcaggttttcttttaagaatcaatcatgtcagtctgcttagaaataacagaagaaaatagaattgacattgaaatctaggaaaattattctataatttccatttacttaagacttaatgagactttaaaagcattttttaacctcctaagtatcaagtatagaaaatcttcatggaattcacaaagtaatttggaaattaggttgaaacatatctcttatcttacgaaaaaatggtagcattttaaacaaaatagaaagttgcaaggcaaatgtttatttaaaagagcaggccaggcgcggtggctcacgcctgtaatcccagcactttgggaggctgaggcgggtggatcacgaggtcaggagatcgagaccatcctggctaacacggtgaaacccgtctctactaaaaatgcaaaaaaaattagccgggcgtggtggcaggcacctgtagtcccagctactcgggaggctgaggcaggagactggcgtgaacccaggaggcggaccttgtagtgagccgagatcgcgccactgtgctccagcctgggcaacagagcaagactccatctcaaaaaataaaaataaataaaaaataaaaaaataaaagagcaaactatttccaaataccatagaataacttacataaaagtaatataactgtattgtaagtagaagctagcactggttttattaatttagtgactattcattttatctaaatcagtgaagatttactgtcattgtttattagtctgtatatattaaaatatgatatcattaatgtacttacaaaatagtatgtcactgtttttatgttcattcttaaaaacataacctgtattaataaatgtgaacatttgcttggtatctctttggaacaaattagta

SEQ ID NO: 298853 - DNA, 3940 bp, Homo sapiens
  misc_feature (3)..(3): n is a, c, g, or t
  misc_feature (5)..(5): n is a, c, g, or t
ggngnggggcgcacagagccagaggggcttgcgagcggcggctgagggaccgcggggagggggcgccgagcggctccagcgcagagactctcactgcacgccggaggccccttcctcgctccgcccgcgcgaccgcgcgccccagtcccgccccgccccgctaaccgccccagacacagcgctcgccgagggtcgcttggaccctgatcttacccgtgggcaccctgcgctctgcctgccgcgaagaccggctccccgacccgcagaagtcaggagagagggtgaagcggagcagcccgaggcggggcagcctcccggagcagcgccgcgcagagcccgggacaatggggccgcggcggctgctgctggtggccgcctgcttcagtctgtgcggcccgctgttgtctgcccgcacccgggcccgcaggccagaatcaaaagcaacaaatgccaccttagatccccggtcatttcttctcaggaaccccaatgataaatatgaaccattttgggaggatgaggagaaaaatgaaagtgggttaactgaatacagattagtctccatcaataaaagcagtcctcttcaaaaacaacttcctgcattcatctcagaagatgcctccggatatttgaccagctcctggctgacactctttgtcccatctgtgtacaccggagtgtttgtagtcagcctcccactaaacatcatggccatcgttgtgttcatcctgaaaatgaaggtcaagaagccggcggtggtgtacatgctgcacctggccacggcagatgtgctgtttgtgtctgtgctcccctttaagatcagctattacttttccggcagtgattggcagtttgggtctgaattgtgtcgcttcgtcactgcagcattttactgtaacatgtacgcctctatcttgctcatgacagtcataagcattgaccggtttctggctgtggtgtatcccatgcagtccctctcctggcgtactctgggaagggcttccttcacttgtctggccatctgggctttggccatcgcaggggtagtgcctctgctcctcaaggagcaaaccatccaggtgcccgggctcaacatcactacctgtcatgatgtgctcaatgaaaccctgctcgaaggctactatgcctactacttctcagccttctctgctgtcttcttttttgtgccgctgatcatttccacggtctgttatgtgtctatcattcgatgtcttagctcttccgcagttgccaaccgcagcaagaagtcccgggctttgttcctgtcagctgctgttttctgcatcttcatcatttgcttcggacccacaaacgtcctcctgattgcgcattactcattcctttctcacacttccaccacagaggctgcctactttgcctacctcctctgtgtctgtgtcagcagcataagctgctgcatcgaccccctaatttactattacgcttcctctgagtgccagaggtacgtctacagtatcttatgctgcaaagaaagttccgatcccagcagttataacagcagtgggcagttgatggcaagtaaaatggatacctgctctagtaacctgaataacagcatatacaaaaagctgttaacttaggaaaagggactgctgggaggttaaaaagaaaagtttataaaagtgaataacctgaggattctattagtccccacccaaactttattgattcacctcctaaaacaacagatgtacgacttgcatacctgctttttatgggagctgtcaagcatgtatttttgtcaattaccagaaagataacaggacgagatgacggtgttattccaagggaatattgccaatgctacagtaataaatgaatgtcacttctggatatagctaggtgacatatacatacttacatgtgtgtatatgtagatgtatgcacacacatatattatttgcagtgcagtatagaataggcactttaaaacactctttccccgcaccccagcaattatgaaaataatctctgattccctgatttaatatgcaaagtctaggttggtagagtttagccctgaacatttcatggtgttcatcaacagtgagagactccatagtttgggcttgtaccacttttgcaaataagtgtattttgaaattgtttgacggcaaggtttaagttattaagaggtaagacttagtactatctgtgcgtagaagttctagtgttttcaattttaaacatatccaagtttgaattcctaaaattatggaaacagatgaaaagcctctgttttgatatgggtagtattttttacattttacacactgtacacataagccaaaactgagcataagtcctctagtgaatgtaggctggctttcagagtaggctattcctgagagctgcatgtgtccgcccccgatggaggactccaggcagcagacacatgccagggccatgtcagacacagattggccagaaaccttcctgctgagcctcacagcagtgagactggggccactacatttgctccatcctcctgggattggctgtgaactgatcatgtttatgagaaactggcaaagcagaatgtgatatcctaggaggtaatgaccatgaaagacttctctacccatcttaaaaacaacgaaagaaggcatggacttctggatgcccatccactgggtgtaaacacatctagtagttgttctgaaatgtcagttctgatatggaagcacccattatgcgctgtggccactccaataggtgctgagtgtacagagtggaataagacagagacctgccctcaagagcaaagtagatcatgcatagagtgtgatgtatgtgtaataaatatgtttcacacaaacaaggcctgtcagctaaagaagtttgaacatttgggttactatttcttgtggttataacttaatgaaaacaatgcagtacaggacatatattttttaaaataagtctgatttaattgggcactatttatttacaaatgttttgctcaatagattgctcaaatcaggttttcttttaagaatcaatcatgtcagtctgcttagaaataacagaagaaaatagaattgacattgaaatctaggaaaattattctataatttccatttacttaagacttaatgagactttaaaagcattttttaacctcctaagtatcaagtatagaaaatcttcatggaattcacaaagtaatttggaaattaggttgaaacatatctcttatcttacgaaaaaatggtagcattttaaacaaaatagaaagttgcaaggcaaatgtttatttaaaagagcaggccaggcgcggtggctcacgcctgtaatcccagcactttgggaggctgaggcgggtggatcacgaggtcaggagatcgagaccatcctggctaacacggtgaaacccgtctctactaaaaatgcaaaaaaaattagccgggcgtggtggcaggcacctgtagtcccagctactcgggaggctgaggcaggagactggcgtgaacccaggaggcggaccttgtagtgagccgagatcgcgccactgtgctccagcctgggcaacagagcaagactccatctcaaaaaataaaaataaataaaaaataaaaaaataaaagagcaaaaaaaaaaaaaacaaaaaaatgtgcccgggccgctcgggaccctaaaaagaggttttcatgaaaacccatctgttgtgggggccgggggccccctgaggggataatgagaaaccatggcgccgacaacgtggtccaccaagagaaagacctcgggaagcgacaaagcgcggcgcgttctccacccgaaataaaaaaaaccgcccgggcgggaacaccagaggtttctagacacaaactcaaggggagatgacaagaagcaagacacgggggcatacacagaggagcgccacgaaagccagaaatac

SEQ ID NO: 298854 - DNA, 4165 bp, Homo sapiens
  misc_feature (3)..(3): n is a, c, g, or t
  misc_feature (5)..(5): n is a, c, g, or t
ggngnggggcgcacagagccagaggggcttgcgagcggcggctgagggaccgcggggagggggcgccgagcggctccagcgcagagactctcactgcacgccggaggccccttcctcgctccgcccgcgcgaccgcgcgccccagtcccgccccgccccgctaaccgccccagacacagcgctcgccgagggtcgcttggaccctgatcttacccgtgggcaccctgcgctctgcctgccgcgaagaccggctccccgacccgcagaagtcaggagagagggtgaagcggagcagcccgaggcggggcagcctcccggagcagcgccgcgcagagcccgggacaatggggccgcggcggctgctgctggtggccgcctgcttcagtctgtgcggcccgctgttgtctgcccgcacccgggcccgcaggccagaatcaaaagcaacaaatgccaccttagatccccggtcatttcttctcaggaaccccaatgataaatatgaaccattttgggaggatgaggagaaaaatgaaagtgggttaactgaatacagattagtctccatcaataaaagcagtcctcttcaaaaacaacttcctgcattcatctcagaagatgcctccggatatttgaccagctcctggctgacactctttgtcccatctgtgtacaccggagtgtttgtagtcagcctcccactaaacatcatggccatcgttgtgttcatcctgaaaatgaaggtcaagaagccggcggtggtgtacatgctgcacctggccacggcagatgtgctgtttgtgtctgtgctcccctttaagatcagctattacttttccggcagtgattggcagtttgggtctgaattgtgtcgcttcgtcactgcagcattttactgtaacatgtacgcctctatcttgctcatgacagtcataagcattgaccggtttctggctgtggtgtatcccatgcagtccctctcctggcgtactctgggaagggcttccttcacttgtctggccatctgggctttggccatcgcaggggtagtgcctctgctcctcaaggagcaaaccatccaggtgcccgggctcaacatcactacctgtcatgatgtgctcaatgaaaccctgctcgaaggctactatgcctactacttctcagccttctctgctgtcttcttttttgtgccgctgatcatttccacggtctgttatgtgtctatcattcgatgtcttagctcttccgcagttgccaaccgcagcaagaagtcccgggctttgttcctgtcagctgctgttttctgcatcttcatcatttgcttcggacccacaaacgtcctcctgattgcgcattactcattcctttctcacacttccaccacagaggctgcctactttgcctacctcctctgtgtctgtgtcagcagcataagctgctgcatcgaccccctaatttactattacgcttcctctgagtgccagaggtacgtctacagtatcttatgctgcaaagaaagttccgatcccagcagttataacagcagtgggcagttgatggcaagtaaaatggatacctgctctagtaacctgaataacagcatatacaaaaagctgttaacttaggaaaagggactgctgggaggttaaaaagaaaagtttataaaagtgaataacctgaggattctattagtccccacccaaactttattgattcacctcctaaaacaacagatgtacgacttgcatacctgctttttatgggagctgtcaagcatgtatttttgtcaattaccagaaagataacaggacgagatgacggtgttattccaagggaatattgccaatgctacagtaataaatgaatgtcacttctggatatagctaggtgacatatacatacttacatgtgtgtatatgtagatgtatgcacacacatatattatttgcagtgcagtatagaataggcactttaaaacactctttccccgcaccccagcaattatgaaaataatctctgattccctgatttaatatgcaaagtctaggttggtagagtttagccctgaacatttcatggtgttcatcaacagtgagagactccatagtttgggcttgtaccacttttgcaaataagtgtattttgaaattgtttgacggcaaggtttaagttattaagaggtaagacttagtactatctgtgcgtagaagttctagtgttttcaattttaaacatatccaagtttgaaaggtcgtccccgctaaacaaaacgatcttatgttggaggcacaacacctcacgactggaacaacgaccctctgatttgtggatacctggcgccggtcttacgcctttaccttcttcgttcttctttcttaagggccaatcgttctttttatacgcaggcaccaatcctgttggcatttacaaccaatcctaaactctaaaacaatcggggtcccaccgctaagaagagaaaaagaccctttggtacaccgccaatctttaacaaaacggggtgttaccccggtttgccattaaatggggttgaaaaaattgggatacaccgtgcattgtgcattttcacgaatgtttatagggcataaattccctggaaacggaaccgccttttgggccaaaacttgggcttcggtccagctcaccctgactcggacggactccaggcagcagacacatgccagggccatgtcagacacagattggccagaaaccttcctgctgagcctcacagcagtgagactggggccactacatttgctccatcctcctgggattggctgtgaactgatcatgtttatgagaaactggcaaagcagaatgtgatatcctaggaggtaatgaccatgaaagacttctctacccatcttaaaaacaacgaaagaaggcatggacttctggatgcccatccactgggtgtaaacacatctagtagttgttctgaaatgtcagttctgatatggaagcacccattatgcgctgtggccactccaataggtgctgagtgtacagagtggaataagacagagacctgccctcaagagcaaagtagatcatgcatagagtgtgatgtatgtgtaataaatatgtttcacacaaacaaggcctgtcagctaaagaagtttgaacatttgggttactatttcttgtggttataacttaatgaaaacaatgcagtacaggacatatattttttaaaataagtctgatttaattgggcactatttatttacaaatgttttgctcaatagattgctcaaatcaggttttcttttaagaatcaatcatgtcagtctgcttagaaataacagaagaaaatagaattgacattgaaatctaggaaaattattctataatttccatttacttaagacttaatgagactttaaaagcattttttaacctcctaagtatcaagtatagaaaatcttcatggaattcacaaagtaatttggaaattaggttgaaacatatctcttatcttacgaaaaaatggtagcattttaaacaaaatagaaagttgcaaggcaaatgtttatttaaaagagcaggccaggcgcggtggctcacgcctgtaatcccagcactttgggaggctgaggcgggtggatcacgaggtcaggagatcgagaccatcctggctaacacggtgaaacccgtctctactaaaaatgcaaaaaaaattagccgggcgtggtggcaggcacctgtagtcccagctactcgggaggctgaggcaggagactggcgtgaacccaggaggcggaccttgtagtgagccgagatcgcgccactgtgctccagcctgggcaacagagcaagactccatctcaaaaaataaaaataaataaaaaataaaaaaataaaagagcaaactatttccaaataccatagaataacttacataaaagtaatataactgtattgtaagtagaagctagcactggttttattaatttagtgactattcattttatctaaatcagtgaagatttactgtcattgtttattagtctgtatatattaaaatatgatatcattaatgtacttacaaaatagtatgtcactgtttttatgttcattcttaaaaacataacctgtattaataaatgtgaacatttgcttggtatctctttggaacaaattagta

SEQ ID NO: 298855 - DNA, 3856 bp, Homo sapiens
  misc_feature (3)..(3): n is a, c, g, or t
  misc_feature (5)..(5): n is a, c, g, or t
ggngnggggcgcacagagccagaggggcttgcgagcggcggctgagggaccgcggggagggggcgccgagcggctccagcgcagagactctcactgcacgccggaggccccttcctcgctccgcccgcgcgaccgcgcgccccagtcccgccccgccccgctaaccgccccagacacagcgctcgccgagggtcgcttggaccctgatcttacccgtgggcaccctgcgctctgcctgccgcgaagaccggctccccgacccgcagaagtcaggagagagggtgaagcggagcagcccgaggcggggcagcctcccggagcagcgccgcgcagagcccgggacaatggggccgcggcggctgctgctggtggccgcctgcttcagtctgtgcggcccgctgttgtctgcccgcacccgggcccgcaggccagaatcaaaagcaacaaatgccaccttagatccccggtcatttcttctcaggaaccccaatgataaatatgaaccattttgggaggatgaggagaaaaatgaaagtgggttaactgaatacagattagtctccatcaataaaagcagtcctcttcaaaaacaacttcctgcattcatctcagaagatgcctccggatatttgaccagctcctggctgacactctttgtcccatctgtgtacaccggagtgtttgtagtcagcctcccactaaacatcatggccatcgttgtgttcatcctgaaaatgaaggtcaagaagccggcggtggtgtacatgctgcacctggccacggcagatgtgctgtttgtgtctgtgctcccctttaagatcagctattacttttccggcagtgattggcagtttgggtctgaattgtgtcgcttcgtcactgcagcattttactgtaacatgtacgcctctatcttgctcatgacagtcataagcattgaccggtttctggctgtggtgtatcccatgcagtccctctcctggcgtactctgggaagggcttccttcacttgtctggccatctgggctttggccatcgcaggggtagtgcctctgctcctcaaggagcaaaccatccaggtgcccgggctcaacatcactacctgtcatgatgtgctcaatgaaaccctgctcgaaggctactatgcctactacttctcagccttctctgctgtcttcttttttgtgccgctgatcatttccacggtctgttatgtgtctatcattcgatgtcttagctcttccgcagttgccaaccgcagcaagaagtcccgggctttgttcctgtcagctgctgttttctgcatcttcatcatttgcttcggacccacaaacgtcctcctgattgcgcattactcattcctttctcacacttccaccacagaggctgcctactttgcctacctcctctgtgtctgtgtcagcagcataagctgctgcatcgaccccctaatttactattacgcttcctctgagtgccagaggtacgtctacagtatcttatgctgcaaagaaagttccgatcccagcagttataacagcagtgggcagttgatggcaagtaaaatggatacctgctctagtaacctgaataacagcatatacaaaaagctgttaacttaggaaaagggactgctgggaggttaaaaagaaaagtttataaaagtgaataacctgaggattctattagtccccacccaaactttattgattcacctcctaaaacaacagatgtacgacttgcatacctgctttttatgggagctgtcaagcatgtatttttgtcaattaccagaaagataacaggacgagatgacggtgttattccaagggaatattgccaatgctacagtaataaatgaatgtcacttctggatatagctaggtgacatatacatacttacatgtgtgtatatgtagatgtatgcacacacatatattatttgcagtgcagtatagaataggcactttaaaacactctttccccgcaccccagcaattatgaaaataatctctgattccctgatttaatatgcaaagtctaggttggtagagtttagccctgaacatttcatggtgttcatcaacagtgagagactccatagtttgggcttgtaccacttttgcaaataagtgtattttgaaattgtttgacggcaaggtttaagttattaagaggtaagacttagtactatctgtgcgtagaagttctagtgttttcaattttaaacatatccaagtttgaattcctaaaattatggaaacagatgaaaagcctctgttttgatatgggtagtattttttacattttacacactgtacacataagccaaaactgagcataagtcctctagtgaatgtaggctggctttcagagtaggctattcctgagagctgcatgtgtccgcccccgatggaggactccaggcagcagacacatgccagggccatgtcagacacagattggccagaaaccttcctgctgagcctcacagcagtgagactggggccactacatttgctccatcctcctgggattggctgtgaactgatcatgtttatgagaaactggcaaagcagaatgtgatatcctaggaggtaatgaccatgaaagacttctctacccatcttacatctagtagttgttctgaaatgtcagttctgatatggaagcacccattatgcgctgtggccactccaataggtgctgagtgtacagagtggaataagacagagacctgccctcaagagcaaagtagatcatgcatagagtgtgatgtatgtgtaataaatatgtttcacacaaacaaggcctgtcagctaaagaagtttgaacatttgggttactatttcttgtggttataacttaatgaaaacaatgcagtacaggacatatattttttaaaataagtctgatttaattgggcactatttatttacaaatgttttgctcaatagattgctcaaatcaggttttcttttaagaatcaatcatgtcagtctgcttagaaataacagaagaaaatagaattgacattgaaatctaggaaaattattctataatttccatttacttaagacttaatgagactttaaaagcattttttaacctcctaagtatcaagtatagaaaatcttcatggaattcacaaagtaatttggaaattaggttgaaacatatctcttatcttacgaaaaaatggtagcattttaaacaaaatagaaagttgcaaggcaaatgtttatttaaaagagcaggccaggcgcggtggctcacgcctgtaatcccagcactttgggaggctgaggcgggtggatcacgaggtcaggagatcgagaccatcctggctaacacggtgaaacccgtctctactaaaaatgcaaaaaaaattagccgggcgtggtggcaggcacctgtagtcccagctactcgggaggctgaggcaggagactggcgtgaacccaggaggcggaccttgtagtgagccgagatcgcgccactgtgctccagcctgggcaacagagcaagactccatctcaaaaaataaaaataaataaaaaataaaaaaataaaagagcaaactatttccaaataccatagaataacttacataaaagtaatataactgtattgtaagtagaagctagcactggttttattaatttagtgactattcattttatctaaatcagtgaagatttactgtcattgtttattagtctgtatatattaaaatatgatatcattaatgtacttacaaaatagtatgtcactgtttttatgttcattcttaaaaacataacctgtattaataaatgtgaacatttgcttggtatctctttggaacaaattagta

SEQ ID NO: 298856 - DNA, 3330 bp, Homo sapiens
  misc_feature (3)..(3): n is a, c, g, or t
  misc_feature (5)..(5): n is a, c, g, or t
ggngnggggcgcacagagccagaggggcttgcgagcggcggctgagggaccgcggggagggggcgccgagcggctccagcgcagagactctcactgcacgccggaggccccttcctcgctccgcccgcgcgaccgcgcgccccagtcccgccccgccccgctaaccgccccagacacagcgctcgccgagggtcgcttggaccctgatcttacccgtgggcaccctgcgctctgcctgccgcgaagaccggctccccgacccgcagaagtcaggagagagggtgaagcggagcagcccgaggcggggcagcctcccggagcagcgccgcgcagagcccgggacaatggggccgcggcggctgctgctggtggccgcctgcttcagtctgtgcggcccgctgttgtctgcccgcacccgggcccgcaggccagaatcaaaagcaacaaatgccaccttagatccccggtcatttcttctcaggaaccccaatgataaatatgaaccattttgggaggatgaggagaaaaatgaaagtgggttaactgaatacagattagtctccatcaataaaagcagtcctcttcaaaaacaacttcctgcattcatctcagaagatgcctccggatatttgaccagctcctggctgacactctttgtcccatctgtgtacaccggagtgtttgtagtcagcctcccactaaacatcatggccatcgttgtgttcatcctgaaaatgaaggtcaagaagccggcggtggtgtacatgctgcacctggccacggcagatgtgctgtttgtgtctgtgctcccctttaagatcagctattacttttccggcagtgattggcagtttgggtctgaattgtgtcgcttcgtcactgcagcattttactgtaacatgtacgcctctatcttgctcatgacagtcataagcattgaccggtttctggctgtggtgtatcccatgcagtccctctcctggcgtactctgggaagggcttccttcacttgtctggccatctgggctttggccatcgcaggggtagtgcctctgctcctcaaggagcaaaccatccaggtgcccgggctcaacatcactacctgtcatgatgtgctcaatgaaaccctgctcgaaggctactatgcctactacttctcagccttctctgctgtcttcttttttgtgccgctgatcatttccacggtctgttatgtgtctatcattcgatgtcttagctcttccgcagttgccaaccgcagcaagaagtcccgggctttgttcctgtcagctgctgttttctgcatcttcatcatttgcttcggacccacaaacgtcctcctgattgcgcattactcattcctttctcacacttccaccacagaggctgcctactttgcctacctcctctgtgtctgtgtcagcagcataagctgctgcatcgaccccctaatttactattacgcttcctctgagtgccagaggtacgtctacagtatcttatgctgcaaagaaagttccgatcccagcagttataacagcagtgggcagttgatggcaagtaaaatggatacctgctctagtaacctgaataacagcatatacaaaaagctgttaacttaggaaaagggactgctgggaggttaaaaagaaaagtttataaaagtgaataacctgaggattctattagtccccacccaaactttattgattcacctcctaaaacaacagatgtacgacttgcatacctgctttttatgggagctgtcaagcatgtatttttgtcaattaccagaaagataacaggacgagatgacggtgttattccaagggaatattgccaatgctacagtaataaatgaatgtcacttctggatatagctaggtgacatatacatacttacatgtgtgtatatgtagatgtatgcacacacatatattatttgcagtgcagtatagaataggcactttaaaacactctttccccgcaccccagcaattatgaaaataatctctgattccctgatttaatatgcaaagtctaggttggtagagtttagccctgaacatttcatggtgttcatcaacagtgagagactccatagtttgggcttgtaccacttttgcaaataagtgtattttgaaattgtttgacggcaaggtttaagttattaagaggtaagacttagtactatctgtgcgtagaagttctagtgttttcaattttaaacatatccaagtttgaattcctaaaattatggaaacagatgaaaagcctctgttttgatatgggtagtattttttacattttacacactgtacacataagccaaaactgagcataagtcctctagtgaatgtaggctggctttcagagtaggctattcctgagagctgcatgtgtccgcccccgatggaggactccaggcagcagacacatgccagggccatgtcagacacagattggccagaaaccttcctgctgagcctcacagcagtgagactggggccactacatttgctccatcctcctgggattggctgtgaactgatcatgtttatgagaaactggcaaagcagaatgtgatatcctaggaggtaatgaccatgaaagacttctctacccatcttaaaaacaacgaaagaaggcatggacttctggatgcccatccactgggtgtaaacacatctagtagttgttctgaaatgtcagttctgatatggaagcacccattatgcgctgtggccactccaataggtgctgagtgtacagagtggaataagacagagacctgccctcaagagcaaagtagatcatgcatagagtgtgatgtatgtgtaataaatatgtttcacacaaacaaggcctgtcagctaaagaagtttgaacatttgggttactatttcttgtggttataacttaatgaaaacaatgcagtacaggacatatattttttaaaataagtctgatttaattgggcactatttatttacaaatgttttgctcaatagattgctcaaatcaggttttcttttaagaatcaatcatgtcagtctgcttagaaataacagaagaataacttacataaaagtaatataactgtattgtaagtagaagctagcactggttttattaatttagtgactattcattttatctaaatcagtgaagatttactgtcattgtttattagtctgtatatattaaaatatgatatcattaatgtacttacaaaatagtatgtcactgtttttatgttcattcttaaaaacataacctgtattaataaatgtgaacatttgcttggtatctctttggaacaaattagta

SEQ ID NO: 298857 - DNA, 674 bp, Homo sapiens
  misc_feature (3)..(3): n is a, c, g, or t
  misc_feature (5)..(5): n is a, c, g, or t
ggngnggggcgcacagagccagaggggcttgcgagcggcggctgagggaccgcggggagggggcgccgagcggctccagcgcagagactctcactgcacgccggaggccccttcctcgctccgcccgcgcgaccgcgcgccccagtcccgccccgccccgctaaccgccccagacacagcgctcgccgagggtcgcttggaccctgatcttacccgtgggcaccctgcgctctgcctgccgcgaagaccggctccccgacccgcagaagtcaggagagagggtgaagcggagcagcccgaggcggggcagcctcccggagcagcgccgcgcagagcccgggacaatggggccgcggcggctgctgctggtggccgcctgcttcagtctgtgcggcccgctgttgtctgcccgcacccgggcccgcaggccagtcacgtttaggtggggcgtgccacccccttcgcgggcccagccgatgcccctttggactcgatcttggagggtgcagcccgcctgccacggggtgttggatatggaggaggatggagcggaagccccctgggggagcctgcagtcctgcgttgcacttgtcattgtgtttctcccaggaccacccccaaaaagaaaagctctcacgttgctccaccaataaacgtttcgatctttaaaatat

SEQ ID NO: 298858 - DNA, 493 bp, Homo sapiens
caacttggcccaaagcaatagcaattataaaatgccattaattacaagaggcatccctactttagagatgttaacatgacaagaacataaaaaaaaaataaataaactttcaattgaacttttcatgttatgaaatatctttctataacatccttttaaattaacgtacaatattccatcagcagtaacgtatttaaccaagaatgttttagtagaaatttgggttgcttctaattttggatatcataaataaggctgcaataaagttcttaaacatatctctttgcacgtgtaagtattgccttaggagtcattcccagaaataaaaatgctaggtccaaagaaatgcaaatttctaaggatttggatatatgtcaagttgtaacccaggatgtttgagacaatttctactcctacctgccgtgtatgaagataagctcttccccatcctgaaacctgtatgtttgggaaaacaacaacaacaaaaaaaaca

SEQ ID NO: 298859 - DNA, 402 bp, Homo sapiens
acatagatgttcccaaaggacagtatgtagcacctgcggtgccggctgagtcacttgtagatggtgtgaaaaatgagaatttttatatacagactcctgaagagtgtcatgtgtctttaaaggaagatgtatccatttctcctggtgaatttgaacataattttcttggtgaaaataaggtttctgaagtatacagtgggaaaacaaatagtaatgctataacatcatgggcacaaaaactgaagcagaaccaaccaaagagagcacatgtagaagatggaggttcaagatctaaacaaggaaatgagcaaagtaagaagacaccaattgagaaagtaggtgactagtcactttccctgcgggctccagtactgatgattatgtgggtttagtacacgctca

SEQ ID NO: 298860 - DNA, 7352 bp, Homo sapiens
acatagatgttcccaaaggacagtatgtagcacctgcggtgccggctgagtcacttgtagatggtgtgaaaaatgagaatttttatatacagactcctgaagagtgtcatgtgtctttaaaggaagatgtatccatttctcctggtgaatttgaacataattttcttggtgaaaataaggtttctgaagtatacagtgggaaaacaaatagtaatgctataacatcatgggcacaaaaactgaagcagaaccaaccaaagagagcacatgtagaagatggaggttcaagatctaaacaaggaaatgagcaaagtaagaagacaccaattgagaaatctgattttgctgctgctacacatcctcgtgctttttacctcagtaaaccagatgaaactccaaatgcttggatgtctgattcaggaacaggattgacttactggaaactagaggaaaaggatatgcaccactctttgcctgaaactttagagaagacgttcatatcattgtcttccacagatgtgtcaccaaaccagtctaatactagtaatgagatgaagctaccgtcactgaaggatatttattataaaaaacaaagggaaaacaagcagttacctgagaggaatctcacttctgcttccaacccaaatcatccaccagaggtcctgactctagatcctacgttacacatgaagccaaagcagcagatttcagggattcaacctcacggccttccgaatgcccttgatgacagaatatccttttccccggactctgttctagagcctagtatgtctagtccctctgacatagactcattttcacaagcaagtaatgtcacttctcagttacctggatttccaaaatatccctcacacacaaaagcttctccggtggactcttggaaaaatcagacattccaaaacgaaagtaggaccagttccacgtttccgtcagtatataccattactagtaatgatatctcggtcaacactgtagatgaagaaaacactgtcatggttgcttcggcctcagtcagtcagtcccagcttccaggtacagccaacagtgtcccagaatgcatttcattgacttccttggaagatcctgtgatattgtctaagattaggcagaatctgaaggaaaagcatgctcgacacatagcagatcttcgagcttattatgaatcagaaataaatagtttgaaacagaagctggaggcaaaagaaatctctggagttgaagattggaagataaccaatcaaattcttgtagacagatgtggccaattagatagtgctttgcatgaagctactagtcgcgtgagaacacttgaaaataagaataacttactggaaattgaagtgaatgatttgagagaacgcttcagtgcagccagcagtgcttccaaaattttgcaggaacgaattgaagaaatgagaacaagcagtaaagaaaaagacaataccatcattcgactaaaatctagactgcaagatttagaagaagcatttgagaatgcttacaaactctcagatgataaagaagctcaactaaaacaagagaacaaaatgtttcaagatcttttaggagagtatgagtcccttggaaaagaacacaggagagtaaaggatgcattaaatacaactgagaataaattgcttgatgcatatactcagatttctgatttgaaaagaatgatttcaaaacttgaagctcaggtcaagcaagtagaacatgaaaatatgttaagccttcgtcataattctagaattcacgtgagaccctcgcgtgccaacacactagcaacttcagacgtcagcaggcggaaatggctgattccaggtgcagagtattccatctttactggccagcctctggacacccaggacagtaacgtggataaccagctggaggaaacctgtagcctagggcaccgttcacctctggaaaaggattcttcacctggaagttcatcaacaagcttgttgataaaaaagcaaagagagacttcagacacgccgatcatgagagctttaaaagaacttgatgagggaaaaatatttaaaaattgggggacacagacagagaaagaggacacctcaaatataaatcctcggcaaactgaaacttcagttaatgcaagtcgttctccagaaaagtgtgcccaacagagacaaaagagacttaattcggcctcacagagatcatcatctttaccaccttcaaatcgtaaatcaagtactccaacaaaaagagagattatgctaacaccagtgactgtggcttatagtccaaagcgatcccctaaagaaaacttgtccccaggatttagtcatctgcttagcaaaaatgagagcagtccaattcgatttgatatacttttggatgatttagatactgttcctgtgtctacattacaacgtaccaatccaagaaagcaactccagtttcttcctctagatgactcggaagcgataaccatgttaatcatagctcttgccctgaaccggtgccaaatggagtgaagaaagtatctgtgagaacagcctgggagaagaataaatcagttagctatgaacagtgtaagccggtttcagtcactccacaggggaatgattttgaatatacagcaaaaattcggaccctagctgaaacagaacgattttttgatgaacttacaaaagaaaaggaccagattgaggcagcactaagcaggatgccttctcctggaggacgaatcactttacagacaagattaaatcaggaagccttggaagatcgtttggaaaggattaatcgagaactgggttcagttcgcatgacgctaaagaaattccatgttttgcgcacctctgcaaatctttgagatttgtagccattaaattttgagacatttttgtttgcactaatgtataattatgcagtcagaaaaggcaaactattttgtactgtttataagccttcaaacagtagttttacaatcatgctattcttacacttgctattttatacttcaaatagccacatattttcaagatatttttgttatgctcaggaatctcttgtatattttactatttaaaaagcattatttttaaatagtatctgtctccaatttatatcaagaataaggaaatataaacagaggaagcagcttgtttctaaacaaatagtgttatccttttacaattaactgcacatcaattttatagacttgttctacattgtaaatacaattcagtttttaaaaaataaagcttaatagcttccataatgatagactagtacatgctgaatacataaacaattacagtgtaccttggatttcagttgtgttgaggtttttaaaaaatgataatgcaattcctatttgaaacgtgtcttagagtgaatatcagaatagtaataatggactcttggaaagctttgaaaactacatgaatataactcattttctttaaactttattgtctgtaagagaaaaaagagagattgtaattctctaattttatcttttctaaaaaagttaaacaattggagagccctctctggaggtctctcagagtagctctctgcccattgttctgaattaacttgtgtcccaccctggacaataaatggacagataaaccctttgaaatacaagccaccaccccgtgagggattaagagggcagcctggttttcttagtgtgcatggcttcagctgtccgtcatagttgtcatctggatatgttcacccctttccactccttcaccctggccaaaaggaaaatatttccactgtaggtgctgtaagaacactagactttagatcatcacaatctactgtatttgttaatggacagggagtgtgtccggatggagcctggtgccttcccctcggccttgcagagggctccagcccactgcctctgtggtagccgctggctctcagaagtagcacgtgggcaggagtctctcctctgatccaggagcattggcaggtttgtgttgggactgctggttaagttggagctgtgtaactacttagtttttggtagccaatcagaacgcagtgccccacatattccagctcggtacatgttgataaacagactcatccaaactttcaaaatggattcgtactaaacatgctcaggttttaaattttggtttgcttttgagcttttcctctttatgtggctcttaataataagtagttagaatgaacccaagccatcccagttattccaaagcaggctctcaaatgacctttgaggcacccttcacctggctggtccccaggccaggggtccacagccctgctccctttctcagcaaggagggtggcctgtctgacagtgcagttgaacctttgctccctactctgcaacttttgaagacttcaggctaatcaaaattacttataattagaatcaagtgcctttattcttgttttttatttttattttatttatttatttttttagatggagttttgcccttgttgcccaggctggagtgcaatggcatgatctcagctcactgcaacctctgcctcccgggttcaagcgattctcctgcctcagcctgctgggtagctgggattacaggcatctgccaccacgcccggctaattttgtgtgtgtgtatatgtctatgtgtgtgtgtgtatgtatatatctttttttttttttttagtagagatggtgtttcaccatattggccaggctggtctcaaactcctgaactcatgtgatccgcctgccttggcccctcaaagtgctgggattacaggcatgagccaccacacccggcctattcttggtattctttattcttggttttctagcctttagaaaaaaaaaatctagtcttggtaaagaaaatgttcattttaatcaagctccagtacagcttgtgtcaagacctagtaagaccacctttaatgtgttcctggatatgacattaaaaactaacttgaaaattgttaggatatttccttgttccctacttttattgtaaaatctactacattcttaagaattaaaaaatgccatttcagaagagatgatagttttatcttgccaaggaattatcttcttagtagcctatattggcttattccaaaaaaggcgttaacctccatcaaaacatcttctgcgcctctctctcagcatatgctttgatatttgaagtgtgtaatagattggagctatcagtcacttatttctaaaaaatgtattcttttttcttcatagctgtgaagagggataccaaggaaagttctttctgctgtctttctctttggtaatgcttatcttatgaacactcaactgaaaaaacactccacctaaaagcaggaaagatggcaattctaaatagcagctattatccccgggtataaactatttttgttgttggcttggggctttgctgcaggtattaatagtttaaagaaaaaaaaaaaaaaaaccctaagcaaatctgccacctctgggaagtgccttttaaaatgcaaatagaaagtgaactctcccctgatgcctggatctgcccccttcctttcccttgctaagcctctgtttgcaggagctactcctgaggtatggaaatggtctttgcaactgaaggacttttccaactgaagcaacagttgtagctaaagtggccgtgctagggttgtgcagagctgggctcaggggacaagaaaggagagacttggagccagagagacctgggtcacatcctggcacaggcctgcctttctcagctataagatgaaataagaaaactcctttcattaagggagattttgtaaagtgcctggtgcttagtaagtgctcaagaaatattatatttcagattcattgagttaagtaggtttttgaggtagcatccttttttttttttttttggaaagggagtctcaagttctggtgtggcccaggctggggagtgcagtgggtgtggatactgggctcactggcaacctggtctccggggttccaagctattctcctggcctaagcctcccgtgtaggtgggattacaggtgcataccacgcctggttaatttttgtattttcggtagagacggggttctcaccatgttggccatcctggtcttgaacttctgaccccaaatgatctgcctgccttggcctcccaaagtgttgggattacaggcgtgagccactgcgcccagccttgaggtagcatactttctgaaataaaaaagtagattatgtccgaagcagttgacctaaaaactgccttggactgacatttgttaggtggtctaagatgttctcttcacgctttgcaaaaaaatgagcttttttggagtttaaattaagcatccctctggtgtgtttggttttttagccaccaaaaatttaacaaatttgataacctgtcacgtgtaagttcagaaagcactttggtcttaattggtgacttgggggttatttggtataaatataggttctttttctaaaaattattgccagtatcctccaaataattgccccttcaaatgtttcatctaaaggtgacagcttgtgggcagaaccatgcacaggaagtgcctgccagtgggtgttaggagatgtaggtggagtctgtgatagccaaccaaaagctatccccttctcgcccagaaaagccacgtgctttgctggacgctacttgaaatctgaactctgcacctacatatgtagtaaaattagagacttttgtcactttaatttttagattatctcaagttttcactagatttcaatgtgccacttgtgctatgagtctttaagaagctttaaaaaataaatgcacacctgtagccttttaccattcagacaggtagattatatttacctgtcatgagggaccatgtatggttgacagttgcaggtttgattaaatccactatattgcacaaattttgctggaaataatttcctgccctgccaagagctctatggtagtttgataataaactactaccccagtattcttaggaactgtgttactaagtcttttctgcctgatttgtactttatttccatagacccctcagatatgtgaggaatcaagccataaatgtgcatttgctggacattatgtaccatgtcatctctatgactacagatttcaaggataatttttacatctaacaatttcactgtaacagtgaccgataatgtgagaaatgtgctttttacagtgctgctggtgggtagacaagtgcttgctgcagttgtttctgaatctagccagatgctggagtcgtgaagctgtaagctccgcgggagcagggaccatctctctttcttgcactacaggcactcaataaatacttgtggctgtgaa

SEQ ID NO: 298861 - DNA, 7446 bp, Homo sapiens
  misc_feature (7357)..(7357): n is a, c, g, or t
acatagatgttcccaaaggacagtatgtagcacctgcggtgccggctgagtcacttgtagatggtgtgaaaaatgagaatttttatatacagactcctgaagagtgtcatgtgtctttaaaggaagatgtatccatttctcctggtgaatttgaacataattttcttggtgaaaataaggtttctgaagtatacagtgggaaaacaaatagtaatgctataacatcatgggcacaaaaactgaagcagaaccaaccaaagagagcacatgtagaagatggaggttcaagatctaaacaaggaaatgagcaaagtaagaagacaccaattgagaaatctgattttgctgctgctacacatcctcgtgctttttacctcagtaaaccagatgaaactccaaatgcttggatgtctgattcaggaacaggattgacttactggaaactagaggaaaaggatatgcaccactctttgcctgaaactttagagaagacgttcatatcattgtcttccacagatgtgtcaccaaaccagtctaatactagtaatgagatgaagctaccgtcactgaaggatatttattataaaaaacaaagggaaaacaagcagttacctgagaggaatctcacttctgcttccaacccaaatcatccaccagaggtcctgactctagatcctacgttacacatgaagccaaagcagcagatttcagggattcaacctcacggccttccgaatgcccttgatgacagaatatccttttccccggactctgttctagagcctagtatgtctagtccctctgacatagactcattttcacaagcaagtaatgtcacttctcagttacctggatttccaaaatatccctcacacacaaaagcttctccggtggactcttggaaaaatcagacattccaaaacgaaagtaggaccagttccacgtttccgtcagtatataccattactagtaatgatatctcggtcaacactgtagatgaagaaaacactgtcatggttgcttcggcctcagtcagtcagtcccagcttccaggtacagccaacagtgtcccagaatgcatttcattgacttccttggaagatcctgtgatattgtctaagattaggcagaatctgaaggaaaagcatgctcgacacatagcagatcttcgagcttattatgaatcagaaataaatagtttgaaacagaagctggaggcaaaagaaatctctggagttgaagattggaagataaccaatcaaattcttgtagacagatgtggccaattagatagtgctttgcatgaagctactagtcgcgtgagaacacttgaaaataagaataacttactggaaattgaagtgaatgatttgagagaacgcttcagtgcagccagcagtgcttccaaaattttgcaggaacgaattgaagaaatgagaacaagcagtaaagaaaaagacaataccatcattcgactaaaatctagactgcaagatttagaagaagcatttgagaatgcttacaaactctcagatgataaagaagctcaactaaaacaagagaacaaaatgtttcaagatcttttaggagagtatgagtcccttggaaaagaacacaggagagtaaaggatgcattaaatacaactgagaataaattgcttgatgcatatactcagatttctgatttgaaaagaatgatttcaaaacttgaagctcaggtcaagcaagtagaacatgaaaatatgttaagccttcgtcataattctagaattcacgtgagaccctcgcgtgccaacacactagcaacttcagacgtcagcaggcggaaatggctgattccaggtgcagagtattccatctttactggccagcctctggacacccaggacagtaacgtggataaccagctggaggaaacctgtagcctagggcaccgttcacctctggaaaaggattcttcacctggaagttcatcaacaagcttgttgataaaaaagcaaagagagacttcagacacgccgatcatgagagctttaaaagaacttgatgagggaaaaatatttaaaaattgggggacacagacagagaaagaggacacctcaaatataaatcctcggcaaactgaaacttcagttaatgcaagtcgttctccagaaaagtgtgcccaacagagacaaaagagacttaattcggcctcacagagatcatcatctttaccaccttcaaatcgtaaatcaagtactccaacaaaaagagagattatgctaacaccagtgactgtggcttatagtccaaagcgatcccctaaagaaaacttgtccccaggatttagtcatctgcttagcaaaaatgagagcagtccaattcgatttgatatacttttggatgatttagatactgttcctgtgtctacattacaacgtaccaatccaagaaagcaactccagtttcttcctctagatgactcggaagcgataaccatgttaatcatagctcttgccctgaaccggtgccaaatggagtgaagaaagtatctgtgagaacagcctgggagaagaataaatcagttagctatgaacagtgtaagccggtttcagtcactccacaggggaatgattttgaatatacagcaaaaattcggaccctagctgaaacagaacgattttttgatgaacttacaaaagaaaaggaccagattgaggcagcactaagcaggatgccttctcctggaggacgaatcactttacagacaagattaaatcaggaagccttggaagatcgtttggaaaggattaatcgagaactgggttcagttcgcatgacgctaaagaaattccatgttttgcgcacctctgcaaatctttgagatttgtagccattaaattttgagacatttttgtttgcactaatgtataattatgcagtcagaaaaggcaaactattttgtactgtttataagccttcaaacagtagttttacaatcatgctattcttacacttgctattttatacttcaaatagccacatattttcaagatatttttgttatgctcaggaatctcttgtatattttactatttaaaaagcattatttttaaatagtatctgtctccaatttatatcaagaataaggaaatataaacagaggaagcagcttgtttctaaacaaatagtgttatccttttacaattaactgcacatcaattttatagacttgttctacattgtaaatacaattcagtttttaaaaaataaagcttaatagcttccataatgatagactagtacatgctgaatacataaacaattacagtgtaccttggatttcagttgtgttgaggtttttaaaaaatgataatgcaattcctatttgaaacgtgtcttagagtgaatatcagaatagtaataatggactcttggaaagctttgaaaactacatgaatataactcattttctttaaactttattgtctgtaagagaaaaaagagagattgtaattctctaattttatcttttctaaaaaagttaaacaattggagagccctctctggaggtctctcagagtagctctctgcccattgttctgaattaacttgtgtcccaccctggacaataaatggacagataaaccctttgaaatacaagccaccaccccgtgagggattaagagggcagcctggttttcttagtgtgcatggcttcagctgtccgtcatagttgtcatctggatatgttcacccctttccactccttcaccctggccaaaaggaaaatatttccactgtaggtgctgtaagaacactagactttagatcatcacaatctactgtatttgttaatggacagggagtgtgtccggatggagcctggtgccttcccctcggccttgcagagggctccagcccactgcctctgtggtagccgctggctctcagaagtagcacgtgggcaggagtctctcctctgatccaggagcattggcaggtttgtgttgggactgctggttaagttggagctgtgtaactacttagtttttggtagccaatcagaacgcagtgccccacatattccagctcggtacatgttgataaacagactcatccaaactttcaaaatggattcgtactaaacatgctcaggttttaaattttggtttgcttttgagcttttcctctttatgtggctcttaataataagtagttagaatgaacccaagccatcccagttattccaaagcaggctctcaaatgacctttgaggcacccttcacctggctggtccccaggccaggggtccacagccctgctccctttctcagcaaggagggtggcctgtctgacagtgcagttgaacctttgctccctactctgcaacttttgaagacttcaggctaatcaaaattacttataattagaatcaagtgcctttattcttgttttttatttttattttatttatttatttttttagatggagttttgcccttgttgcccaggctggagtgcaatggcatgatctcagctcactgcaacctctgcctcccgggttcaagcgattctcctgcctcagcctgctgggtagctgggattacaggcatctgccaccacgcccggctaattttgtgtgtgtgtatatgtctatgtgtgtgtgtgtatgtatatatctttttttttttttttagtagagatggtgtttcaccatattggccaggctggtctcaaactcctgaactcatgtgatccgcctgccttggcccctcaaagtgctgggattacaggcatgagccaccacacccggcctattcttggtattctttattcttggttttctagcctttagaaaaaaaaaatctagtcttggtaaagaaaatgttcattttaatcaagctccagtacagcttgtgtcaagacctagtaagaccacctttaatgtgttcctggatatgacattaaaaactaacttgaaaattgttaggatatttccttgttccctacttttattgtaaaatctactacattcttaagaattaaaaaatgccatttcagaagagatgatagttttatcttgccaaggaattatcttcttagtagcctatattggcttattccaaaaaaggcgttaacctccatcaaaacatcttctgcgcctctctctcagcatatgctttgatatttgaagtgtgtaatagattggagctatcagtcacttatttctaaaaaatgtattcttttttcttcatagctgtgaagagggataccaaggaaagttctttctgctgtctttctctttggtaatgcttatcttatgaacactcaactgaaaaaacactccacctaaaagcaggaaagatggcaattctaaatagcagctattatccccgggtataaactatttttgttgttggcttggggctttgctgcaggtattaatagtttaaagaaaaaaaaaaaaaaaaccctaagcaaatctgccacctctgggaagtgccttttaaaatgcaaatagaaagtgaactctcccctgatgcctggatctgcccccttcctttcccttgctaagcctctgtttgcaggagctactcctgaggtatggaaatggtctttgcaactgaaggacttttccaactgaagcaacagttgtagctaaagtggccgtgctagggttgtgcagagctgggctcaggggacaagaaaggagagacttggagccagagagacctgggtcacatcctggcacaggcctgcctttctcagctataagatgaaataagaaaactcctttcattaagggagattttgtaaagtgcctggtgcttagtaagtgctcaagaaatattatatttcagattcattgagttaagtaggtttttgaggtagcatccttttttttttttttttggaaagggagtctcaagttctggtgtggcccaggctggggagtgcagtgggtgtggatactgggctcactggcaacctggtctccggggttccaagctattctcctggcctaagcctcccgtgtaggtgggattacaggtgcataccacgcctggttaatttttgtattttcggtagagacggggttctcaccatgttggccatcctggtcttgaacttctgaccccaaatgatctgcctgccttggcctcccaaagtgttgggattacaggcgtgagccactgcgcccagccttgaggtagcatactttctgaaataaaaaagtagattatgtccgaagcagttgacctaaaaactgccttggactgacatttgttaggtggtctaagatgttctcttcacgctttgcaaaaaaatgagcttttttggagtttaaattaagcatccctctggtgtgtttggttttttagccaccaaaaatttaacaaatttgataacctgtcacgtgtaagttcagaaagcactttggtcttaattggtgacttgggggttatttggtataaatataggttctttttctaaaaattattgccagtatcctccaaataattgccccttcaaatgtttcatctaaaggtgacagcttgtgggcagaaccatgcacaggaagtgcctgccagtgggtgttaggagatgtaggtggagtctgtgatagccaaccaaaagctatccccttctcgcccagaaaagccacgtgctttgctggacgctacttgaaatctgaactctgcacctacatatgtagtaaaattagagacttttgtcactttaatttttagattatctcaagttttcactagatttcaatgtgccacttgtgctatgagtctttaagaagctttaaaaaataaatgcacacctgtagccttttaccattcagacaggtagattatatttacctgtcatgagggaccatgtatggttgacagttgcaggtttgattaaatccactatattgcacaaattttgctggaaataatttcctgccctgccaagagctctatggtagtttgataataaactactaccccagtattcttaggaactgtgttactaagtcttttctgcctgatttgtactttatttccatagacccctcagatatgtgaggaatcaagccataaatgtgcatttgctggacattatgtaccatgtcatctctatgactacagatttcaaggataatttttacatctaacaatttcactgtaacagtgaccgataatgtgagaaatgtgctttttacagtgctgctggtgggtagacaagtgcttgctgcagttgtttctgaatctagccagatgctggagtcgtgaagctgtaagctccgcgggagcagggaccatctctctttcttgcactacaggcactcaataaatacttgtggctgtgaaaaaanaaagcttcatcatttttaataaatcaggataaaaaaactcgaggggagccccgttaccaattcgcccttattaagtcggtttaaattct

SEQ ID NO: 298862 - DNA, 7377 bp, Homo sapiens
acatagatgttcccaaaggacagtatgtagcacctgcggtgccggctgagtcacttgtagatggtgtgaaaaatgagaatttttatatacagactcctgaagagtgtcatgtgtctttaaaggaagatgtatccatttctcctggtgaatttgaacataattttcttggtgaaaataaggtttctgaagtatacagtgggaaaacaaatagtaatgctataacatcatgggcacaaaaactgaagcagaaccaaccaaagagagcacatgtagaagatggaggttcaagatctaaacaaggaaatgagcaaagtaagaagacaccaattgagaaatctgattttgctgctgctacacatcctcgtgctttttacctcagtaaaccagatgaaactccaaatgcttggatgtctgattcaggaacaggattgacttactggaaactagaggaaaaggatatgcaccactctttgcctgaaactttagagaagacgttcatatcattgtcttccacagatgtgtcaccaaaccagtctaatactagtaatgagatgaagctaccgtcactgaaggatatttattataaaaaacaaagggaaaacaagcagttacctgagaggaatctcacttctgcttccaacccaaatcatccaccagaggtcctgactctagatcctacgttacacatgaagccaaagcagcagatttcagggattcaacctcacggccttccgaatgcccttgatgacagaatatccttttccccggactctgttctagagcctagtatgtctagtccctctgacatagactcattttcacaagcaagtaatgtcacttctcagttacctggatttccaaaatatccctcacacacaaaagcttctccggtggactcttggaaaaatcagacattccaaaacgaaagtaggaccagttccacgtttccgtcagtatataccattactagtaatgatatctcggtcaacactgtagatgaagaaaacactgtcatggttgcttcggcctcagtcagtcagtcccagcttccaggtacagccaacagtgtcccagaatgcatttcattgacttccttggaagatcctgtgatattgtctaagattaggcagaatctgaaggaaaagcatgctcgacacatagcagatcttcgagcttattatgaatcagaaataaatagtttgaaacagaagctggaggcaaaagaaatctctggagttgaagattggaagataaccaatcaaattcttgtagacagatgtggccaattagatagtgctttgcatgaagctactagtcgcgtgagaacacttgaaaataagaataacttactggaaattgaagtgaatgatttgagagaacgcttcagtgcagccagcagtgcttccaaaattttgcaggaacgaattgaagaaatgagaacaagcagtaaagaaaaagacaataccatcattcgactaaaatctagactgcaagatttagaagaagcatttgagaatgcttacaaactctcagatgataaagaagctcaactaaaacaagagaacaaaatgtttcaagatcttttaggagagtatgagtcccttggaaaagaacacaggagagtaaaggatgcattaaatacaactgagaataaattgcttgatgcatatactcagatttctgatttgaaaagaatgatttcaaaacttgaagctcaggtcaagcaagtagaacatgaaaatatgttaagccttcgtcataattctagaattcacgtgagaccctcgcgtgccaacacactagcaacttcagacgtcagcaggcggaaatggctgattccaggtgcagagtattccatctttactggccagcctctggacacccaggacagtaacgtggataaccagctggaggaaacctgtagcctagggcaccgttcacctctggaaaaggattcttcacctggaagttcatcaacaagcttgttgataaaaaagcaaagagagacttcagacacgccgatcatgagagctttaaaagaacttgatgagggaaaaatatttaaaaattgggggacacagacagagaaagaggacacctcaaatataaatcctcggcaaactgaaacttcagttaatgcaagtcgttctccagaaaagtgtgcccaacagagacaaaagagacttaattcggcctcacagagatcatcatctttaccaccttcaaatcgtaaatcaagtactccaacaaaaagagagattatgctaacaccagtgactgtggcttatagtccaaagcgatcccctaaagaaaacttgtccccaggatttagtcatctgcttagcaaaaatgagagcagtccaattcgatttgatatacttttggatgatttagatactgttcctgtgtctacattacaacgtaccaatccaagaaagcaactccagtttcttcctctagatgactcggaagcgataaccatgttaatcatagctcttgccctgaaccggtgccaaatggagtgaagaaagtatctgtgagaacagcctgggagaagaataaatcagttagctatgaacagtgtaagccggtttcagtcactccacaggggaatgattttgaatatacagcaaaaattcggaccctagctgaaacagaacgattttttgatgaacttacaaaagaaaaggaccagattgaggcagcactaagcaggatgccttctcctggaggacgaatcactttacagacaagattaaatcaggaagccttggaagatcgtttggaaaggattaatcgagaactgggttcagttcgcatgacgctaaagaaattccatgttttgcgcacctctgcaaatctttgagatttgtagccattaaattttgagacatttttgtttgcactaatgtataattatgcagtcagaaaaggcaaactattttgtactgtttataagccttcaaacagtagttttacaatcatgctattcttacacttgctattttatacttcaaatagccacatattttcaagatatttttgttatgctcaggaatctcttgtatattttactatttaaaaagcattatttttaaatagtatctgtctccaatttatatcaagaataaggaaatataaacagaggaagcagcttgtttctaaacaaatagtgttatccttttacaattaactgcacatcaattttatagacttgttctacattgtaaatacaattcagtttttaaaaaataaagcttaatagcttccataatgatagactagtacatgctgaatacataaacaattacagtgtaccttggatttcagttgtgttgaggtttttaaaaaatgataatgcaattcctatttgaaacgtgtcttagagtgaatatcagaatagtaataatggactcttggaaagctttgaaaactacatgaatataactcattttctttaaactttattgtctgtaagagaaaaaagagagattgtaattctctaattttatcttttctaaaaaagttaaacaattggagagccctctctggaggtctctcagagtagctctctgcccattgttctgaattaacttgtgtcccaccctggacaataaatggacagataaaccctttgaaatacaagccaccaccccgtgagggattaagagggcagcctggttttcttagtgtgcatggcttcagctgtccgtcatagttgtcatctggatatgttcacccctttccactccttcaccctggccaaaaggaaaatatttccactgtaggtgctgtaagaacactagactttagatcatcacaatctactgtatttgttaatggacagggagtgtgtccggatggagcctggtgccttcccctcggccttgcagagggctccagcccactgcctctgtggtagccgctggctctcagaagtagcacgtgggcaggagtctctcctctgatccaggagcattggcaggtttgtgttgggactgctggttaagttggagctgtgtaactacttagtttttggtagccaatcagaacgcagtgccccacatattccagctcggtacatgttgataaacagactcatccaaactttcaaaatggattcgtactaaacatgctcaggttttaaattttggtttgcttttgagcttttcctctttatgtggctcttaataataagtagttagaatgaacccaagccatcccagttattccaaagcaggctctcaaatgacctttgaggcacccttcacctggctggtccccaggccaggggtccacagccctgctccctttctcagcaaggagggtggcctgtctgacagtgcagttgaacctttgctccctactctgcaacttttgaagacttcaggctaatcaaaattacttataattagaatcaagtgcctttattcttgttttttatttttattttatttatttatttttttagatggagttttgcccttgttgcccaggctggagtgcaatggcatgatctcagctcactgcaacctctgcctcccgggttcaagcgattctcctgcctcagcctgctgggtagctgggattacaggcatctgccaccacgcccggctaattttgtgtgtgtgtatatgtctatgtgtgtgtgtgtatgtatatatctttttttttttttttagtagagatggtgtttcaccatattggccaggctggtctcaaactcctgaactcatgtgatccgcctgccttggcccctcaaagtgctgggattacaggcatgagccaccacacccggcctattcttggtattctttattcttggttttctagcctttagaaaaaaaaaatctagtcttggtaaagaaaatgttcattttaatcaagctccagtacagcttgtgtcaagacctagtaagaccacctttaatgtgttcctggatatgacattaaaaactaacttgaaaattgttaggatatttccttgttccctacttttattgtaaaatctactacattcttaagaattaaaaaatgccatttcagaagagatgatagttttatcttgccaaggaattatcttcttagtagcctatattggcttattccaaaaaaggcgttaacctccatcaaaacatcttctgcgcctctctctcagcatatgctttgatatttgaagtgtgtaatagattggagctatcagtcacttatttctaaaaaatgtattcttttttcttcatagctgtgaagagggataccaaggaaagttctttctgctgtctttctctttggtaatgcttatcttatgaacactcaactgaaaaaacactccacctaaaagcaggaaagatggcaattctaaatagcagctattatccccgggtataaactatttttgttgttggcttggggctttgctgcaggtattaatagtttaaagaaaaaaaaaaaaaaaaccctaagcaaatctgccacctctgggaagtgccttttaaaatgcaaatagaaagtgaactctcccctgatgcctggatctgcccccttcctttcccttgctaagcctctgtttgcaggagctactcctgaggtatggaaatggtctttgcaactgaaggacttttccaactgaagcaacagttgtagctaaagtggccgtgctagggttgtgcagagctgggctcaggggacaagaaaggagagacttggagccagagagacctgggtcacatcctggcacaggcctgcctttctcagctataagatgaaataagaaaactcctttcattaagggagattttgtaaagtgcctggtgcttagtaagtgctcaagaaatattatatttcagattcattgagttaagtaggtttttgaggtagcatccttttttttttttttttggaaagggagtctcaagttctggtgtggcccaggctggggagtgcagtgggtgtggatactgggctcactggcaacctggtctccggggttccaagctattctcctggcctaagcctcccgtgtaggtgggattacaggtgcataccacgcctggttaatttttgtattttcggtagagacggggttctcaccatgttggccatcctggtcttgaacttctgaccccaaatgatctgcctgccttggcctcccaaagtgttgggattacaggcgtgagccactgcgcccagccttgaggtagcatactttctgaaataaaaaagtagattatgtccgaagcagttgacctaaaaactgccttggactgacatttgttaggtggtctaagatgttctcttcacgctttgcaaaaaaatgagcttttttggagtttaaattaagcatccctctggtgtgtttggttttttagccaccaaaaatttaacaaatttgataacctgtcacgtgtaagttcagaaagcactttggtcttaattggtgacttgggggttatttggtataaatataggttctttttctaaaaattattgccagtatcctccaaataattgccccttcaaatgtttcatctaaaggtgacagcttgtgggcagaaccatgcacaggaagtgcctgccagtgggtgttaggagatgtaggtggagtctgtgatagccaaccaaaagctatccccttctcgcccagaaaagccacgtgctttgctggacgctacttgaaatctgaactctgcacctacatatgtagtaaaattagagacttttgtcactttaatttttagattatctcaagttttcactagatttcaatgtgccacttgtgctatgagtctttaagaagctttaaaaaataaatgcacacctgtagccttttaccattcagacaggtagattatatttacctgtcatgagggaccatgtatggttgacagttgcaggtttgattaaatccactatattgcacaaattttgctggaaataatttcctgccctgccaagagctctatggtagtttgataataaactactaccccagtattcttaggaactgtgttactaagtcttttctgcctgatttgtactttatttccatagacccctcagatatgtgaggaatcaagccataaatgtgcatttgctggacattatgtaccatgtcatctctatgactacagatttcaaggataatttttacatctaacaatttcactgtaacagtgaccgataatgtgagaaatgtgctttttacagtgctgctggtgggtagacaagtgcttgctgcagttgtttctgaatctagccagatgctggagtcgtgaagctgtaagctccgcgggagcagggaccatctctctttcttgcactacaggcactcaataaatacttgtggctgtgaaaaaaaaccaacccagggcggccgct

SEQ ID NO: 298863 - DNA, 4073 bp, Homo sapiens
  misc_feature (4008)..(4008): n is a, c, g, or t
  misc_feature (4035)..(4035): n is a, c, g, or t
acatagatgttcccaaaggacagtatgtagcacctgcggtgccggctgagtcacttgtagatggtgtgaaaaatgagaatttttatatacagactcctgaagagtgtcatgtgtctttaaaggaagatgtatccatttctcctggtgaatttgaacataattttcttggtgaaaataaggtttctgaagtatacagtgggaaaacaaatagtaatgctataacatcatgggcacaaaaactgaagcagaaccaaccaaagagagcacatgtagaagatggaggttcaagatctaaacaaggaaatgagcaaagtaagaagacaccaattgagaaatctgattttgctgctgctacacatcctcgtgctttttacctcagtaaaccagatgaaactccaaatgcttggatgtctgattcaggaacaggattgacttactggaaactagaggaaaaggatatgcaccactctttgcctgaaactttagagaagacgttcatatcattgtcttccacagatgtgtcaccaaaccagtctaatactagtaatgagatgaagctaccgtcactgaaggatatttattataaaaaacaaagggaaaacaagcagttacctgagaggaatctcacttctgcttccaacccaaatcatccaccagaggtcctgactctagatcctacgttacacatgaagccaaagcagcagatttcagggattcaacctcacggccttccgaatgcccttgatgacagaatatccttttccccggactctgttctagagcctagtatgtctagtccctctgacatagactcattttcacaagcaagtaatgtcacttctcagttacctggatttccaaaatatccctcacacacaaaagcttctccggtggactcttggaaaaatcagacattccaaaacgaaagtaggaccagttccacgtttccgtcagtatataccattactagtaatgatatctcggtcaacactgtagatgaagaaaacactgtcatggttgcttcggcctcagtcagtcagtcccagcttccaggtacagccaacagtgtcccagaatgcatttcattgacttccttggaagatcctgtgatattgtctaagattaggcagaatctgaaggaaaagcatgctcgacacatagcagatcttcgagcttattatgaatcagaaataaatagtttgaaacagaagctggaggcaaaagaaatctctggagttgaagattggaagataaccaatcaaattcttgtagacagatgtggccaattagatagtgctttgcatgaagctactagtcgcgtgagaacacttgaaaataagaataacttactggaaattgaagtgaatgatttgagagaacgcttcagtgcagccagcagtgcttccaaaattttgcaggaacgaattgaagaaatgagaacaagcagtaaagaaaaagacaataccatcattcgactaaaatctagactgcaagatttagaagaagcatttgagaatgcttacaaactctcagatgataaagaagctcaactaaaacaagagaacaaaatgtttcaagatcttttaggagagtatgagtcccttggaaaagaacacaggagagtaaaggatgcattaaatacaactgagaataaattgcttgatgcatatactcagatttctgatttgaaaagaatgatttcaaaacttgaagctcaggtcaagcaagtagaacatgaaaatatgttaagccttcgtcataattctagaattcacgtgagaccctcgcgtgccaacacactagcaacttcagacgtcagcaggcggaaatggctgattccaggtgcagagtattccatctttactggccagcctctggacacccaggacagtaacgtggataaccagctggaggaaacctgtagcctagggcaccgttcacctctggaaaaggattcttcacctggaagttcatcaacaagcttgttgataaaaaagcaaagagagacttcagacacgccgatcatgagagctttaaaagaacttgatgagggaaaaatatttaaaaattgggggacacagacagagaaagaggacacctcaaatataaatcctcggcaaactgaaacttcagttaatgcaagtcgttctccagaaaagtgtgcccaacagagacaaaagagacttaattcggcctcacagagatcatcatctttaccaccttcaaatcgtaaatcaagtactccaacaaaaagagagattatgctaacaccagtgactgtggcttatagtccaaagcgatcccctaaagaaaacttgtccccaggatttagtcatctgcttagcaaaaatgagagcagtccaattcgatttgatatacttttggatgatttagatactgttcctgtgtctacattacaacgtaccaatccaagaaagcaactccagtttcttcctctagatgactcggaagcgataaccatgttaatcatagctcttgccctgaaccggtgccaaatggagtgaagaaagtatctgtgagaacagcctgggagaagaataaatcagttagctatgaacagtgtaagccggtttcagtcactccacaggggaatgattttgaatatacagcaaaaattcggaccctagctgaaacagaacgattttttgatgaacttacaaaagaaaaggaccagattgaggcagcactaagcaggatgccttctcctggaggacgaatcactttacagacaagattaaatcaggaagccttggaagatcgtttggaaaggattaatcgagaactgggttcagttcgcatgacgctaaagaaattccatgttttgcgcacctctgcaaatctttgagatttgtagccattaaattttgagacatttttgtttgcactaatgtataattatgcagtcagaaaaggcaaactattttgtactgtttataagccttcaaacagtagttttacaatcatgctattcttacacttgctattttatacttcaaatagccacatattttcaagatatttttgttatgctcaggaatctcttgtatattttactatttaaaaagcattatttttaaatagtatctgtctccaatttatatcaagaataaggaaatataaacagaggaagcagcttgtttctaaacaaatagtgttatccttttacaattaactgcacatcaattttatagacttgttctacattgtaaatacaattcagtttttaaaaaataaagcttaatagcttccataatgatagactagtacatgctgaatacataaacaattacagtgtaccttggatttcagttgtgttgaggtttttaaaaaatgataatgcaattcctatttgaaacgtgtcttagagtgaatatcagaatagtaataatggactcttggaaagctttgaaaactacatgaatataactcattttctttaaactttattgtctgtaagagaaaaaagagagattgtaattctctaattttatcttttctaaaaaagttaaacaattggagagccctctctggaggtctctcagagtagctctctgcccattgttctgaattaacttgtgtcccaccctggacaataaatggacagataaaccctttgaaatacaagccaccaccccgtgagggattaagagggcagcctggttttcttagtgtgcatggcttcagctgtccgtcatagttgtcatctggatatgttcacccctttccactccttcaccctggccaaaaggaaaatatttccactgtaggtgctgtaagaacactagactttagatcatcacaatctactgtatttgttaatggacagggagtgtgtccggatggagcctggtgccttcccctcggccttgcagagggctccagcccactgcctctgtggtagccgctggctctcagaagtagcacgtgggcaggagtctctcctctgatccaggagcattggcagatggagttttgcccttgttgcantgagctgagatctgccactgcactccngcctgggtgacagagcaagactccctcaaaacccataa

SEQ ID NO: 298864 - DNA, 7377 bp, Homo sapiens
acatagatgttcccaaaggacagtatgtagcacctgcggtgccggctgagtcacttgtagatggtgtgaaaaatgagaatttttatatacagactcctgaagagtgtcatgtgtctttaaaggaagatgtatccatttctcctggtgaatttgaacataattttcttggtgaaaataaggtttctgaagtatacagtgggaaaacaaatagtaatgctataacatcatgggcacaaaaactgaagcagaaccaaccaaagagagcacatgtagaagatggaggttcaagatctaaacaaggaaatgagcaaagtaagaagacaccaattgagaaatctgattttgctgctgctacacatcctcgtgctttttacctcagtaaaccagatgaaactccaaatgcttggatgtctgattcaggaacaggattgacttactggaaactagaggaaaaggatatgcaccactctttgcctgaaactttagagaagacgttcatatcattgtcttccacagatgtgtcaccaaaccagtctaatactagtaatgagatgaagctaccgtcactgaaggatatttattataaaaaacaaagggaaaacaagcagttacctgagaggaatctcacttctgcttccaacccaaatcatccaccagaggtcctgactctagatcctacgttacacatgaagccaaagcagcagatttcagggattcaacctcacggccttccgaatgcccttgatgacagaatatccttttccccggactctgttctagagcctagtatgtctagtccctctgacatagactcattttcacaagcaagtaatgtcacttctcagttacctggatttccaaaatatccctcacacacaaaagcttctccggtggactcttggaaaaatcagacattccaaaacgaaagtaggaccagttccacgtttccgtcagtatataccattactagtaatgatatctcggtcaacactgtagatgaagaaaacactgtcatggttgcttcggcctcagtcagtcagtcccagcttccaggtacagccaacagtgtcccagaatgcatttcattgacttccttggaagatcctgtgatattgtctaagattaggcagaatctgaaggaaaagcatgctcgacacatagcagatcttcgagcttattatgaatcagaaataaatagtttgaaacagaagctggaggcaaaagaaatctctggagttgaagattggaagataaccaatcaaattcttgtagacagatgtggccaattagatagtgctttgcatgaagctactagtcgcgtgagaacacttgaaaataagaataacttactggaaattgaagtgaatgatttgagagaacgcttcagtgcagccagcagtgcttccaaaattttgcaggaacgaattgaagaaatgagaacaagcagtaaagaaaaagacaataccatcattcgactaaaatctagactgcaagatttagaagaagcatttgagaatgcttacaaactctcagatgataaagaagctcaactaaaacaagagaacaaaatgtttcaagatcttttaggagagtatgagtcccttggaaaagaacacaggagagtaaaggatgcattaaatacaactgagaataaattgcttgatgcatatactcagatttctgatttgaaaagaatgatttcaaaacttgaagctcaggtcaagcaagtagaacatgaaaatatgttaagccttcgtcataattctagaattcacgtgagaccctcgcgtgccaacacactagcaacttcagacgtcagcaggcggaaatggctgattccaggtgcagagtattccatctttactggccagcctctggacacccaggacagtaacgtggataaccagctggaggaaacctgtagcctagggcaccgttcacctctggaaaaggattcttcacctggaagttcatcaacaagcttgttgataaaaaagcaaagagagacttcagacacgccgatcatgagagctttaaaagaacttgatgagggaaaaatatttaaaaattgggggacacagacagagaaagaggacacctcaaatataaatcctcggcaaactgaaacttcagttaatgcaagtcgttctccagaaaagtgtgcccaacagagacaaaagagacttaattcggcctcacagagatcatcatctttaccaccttcaaatcgtaaatcaagtactccaacaaaaagagagattatgctaacaccagtgactgtggcttatagtccaaagcgatcccctaaagaaaacttgtccccaggatttagtcatctgcttagcaaaaatgagagcagtccaattcgatttgatatacttttggatgatttagatactgttcctgtgtctacattacaacgtaccaatccaagaaagcaactccagtttcttcctctagatgactcggaagaaaaaacttattctgagaaagccaccgataaccatgttaatcatagctcttgccctgaaccggtgccaaatggagtgaagaaagtatctgtgagaacagcctgggagaagaataaatcagttagctatgaacagtgtaagccggtttcagtcactccacaggggaatgattttgaatatacagcaaaaattcggaccctagctgaaacagaacgattttttgatgaacttacaaaagaaaaggaccagattgaggcagcactaagcaggatgccttctcctggaggacgaatcactttacagacaagattaaatcaggaagccttggaagatcgtttggaaaggattaatcgagaactgggttcagttcgcatgacgctaaagaaattccatgttttgcgcacctctgcaaatctttgagatttgtagccattaaattttgagacatttttgtttgcactaatgtataattatgcagtcagaaaaggcaaactattttgtactgtttataagccttcaaacagtagttttacaatcatgctattcttacacttgctattttatacttcaaatagccacatattttcaagatatttttgttatgctcaggaatctcttgtatattttactatttaaaaagcattatttttaaatagtatctgtctccaatttatatcaagaataaggaaatataaacagaggaagcagcttgtttctaaacaaatagtgttatccttttacaattaactgcacatcaattttatagacttgttctacattgtaaatacaattcagtttttaaaaaataaagcttaatagcttccataatgatagactagtacatgctgaatacataaacaattacagtgtaccttggatttcagttgtgttgaggtttttaaaaaatgataatgcaattcctatttgaaacgtgtcttagagtgaatatcagaatagtaataatggactcttggaaagctttgaaaactacatgaatataactcattttctttaaactttattgtctgtaagagaaaaaagagagattgtaattctctaattttatcttttctaaaaaagttaaacaattggagagccctctctggaggtctctcagagtagctctctgcccattgttctgaattaacttgtgtcccaccctggacaataaatggacagataaaccctttgaaatacaagccaccaccccgtgagggattaagagggcagcctggttttcttagtgtgcatggcttcagctgtccgtcatagttgtcatctggatatgttcacccctttccactccttcaccctggccaaaaggaaaatatttccactgtaggtgctgtaagaacactagactttagatcatcacaatctactgtatttgttaatggacagggagtgtgtccggatggagcctggtgccttcccctcggccttgcagagggctccagcccactgcctctgtggtagccgctggctctcagaagtagcacgtgggcaggagtctctcctctgatccaggagcattggcaggtttgtgttgggactgctggttaagttggagctgtgtaactacttagtttttggtagccaatcagaacgcagtgccccacatattccagctcggtacatgttgataaacagactcatccaaactttcaaaatggattcgtactaaacatgctcaggttttaaattttggtttgcttttgagcttttcctctttatgtggctcttaataataagtagttagaatgaacccaagccatcccagttattccaaagcaggctctcaaatgacctttgaggcacccttcacctggctggtccccaggccaggggtccacagccctgctccctttctcagcaaggagggtggcctgtctgacagtgcagttgaacctttgctccctactctgcaacttttgaagacttcaggctaatcaaaattacttataattagaatcaagtgcctttattcttgttttttatttttattttatttatttatttttttagatggagttttgcccttgttgcccaggctggagtgcaatggcatgatctcagctcactgcaacctctgcctcccgggttcaagcgattctcctgcctcagcctgctgggtagctgggattacaggcatctgccaccacgcccggctaattttgtgtgtgtgtatatgtctatgtgtgtgtgtgtatgtatatatctttttttttttttttagtagagatggtgtttcaccatattggccaggctggtctcaaactcctgaactcatgtgatccgcctgccttggcccctcaaagtgctgggattacaggcatgagccaccacacccggcctattcttggtattctttattcttggttttctagcctttagaaaaaaaaaatctagtcttggtaaagaaaatgttcattttaatcaagctccagtacagcttgtgtcaagacctagtaagaccacctttaatgtgttcctggatatgacattaaaaactaacttgaaaattgttaggatatttccttgttccctacttttattgtaaaatctactacattcttaagaattaaaaaatgccatttcagaagagatgatagttttatcttgccaaggaattatcttcttagtagcctatattggcttattccaaaaaaggcgttaacctccatcaaaacatcttctgcgcctctctctcagcatatgctttgatatttgaagtgtgtaatagattggagctatcagtcacttatttctaaaaaatgtattcttttttcttcatagctgtgaagagggataccaaggaaagttctttctgctgtctttctctttggtaatgcttatcttatgaacactcaactgaaaaaacactccacctaaaagcaggaaagatggcaattctaaatagcagctattatccccgggtataaactatttttgttgttggcttggggctttgctgcaggtattaatagtttaaagaaaaaaaaaaaaaaaaccctaagcaaatctgccacctctgggaagtgccttttaaaatgcaaatagaaagtgaactctcccctgatgcctggatctgcccccttcctttcccttgctaagcctctgtttgcaggagctactcctgaggtatggaaatggtctttgcaactgaaggacttttccaactgaagcaacagttgtagctaaagtggccgtgctagggttgtgcagagctgggctcaggggacaagaaaggagagacttggagccagagagacctgggtcacatcctggcacaggcctgcctttctcagctataagatgaaataagaaaactcctttcattaagggagattttgtaaagtgcctggtgcttagtaagtgctcaagaaatattatatttcagattcattgagttaagtaggtttttgaggtagcatccttttttttttttttttggaaagggagtctcaagttctggtgtggcccaggctggggagtgcagtgggtgtggatactgggctcactggcaacctggtctccggggttccaagctattctcctggcctaagcctcccgtgtaggtgggattacaggtgcataccacgcctggttaatttttgtattttcggtagagacggggttctcaccatgttggccatcctggtcttgaacttctgaccccaaatgatctgcctgccttggcctcccaaagtgttgggattacaggcgtgagccactgcgcccagccttgaggtagcatactttctgaaataaaaaagtagattatgtccgaagcagttgacctaaaaactgccttggactgacatttgttaggtggtctaagatgttctcttcacgctttgcaaaaaaatgagcttttttggagtttaaattaagcatccctctggtgtgtttggttttttagccaccaaaaatttaacaaatttgataacctgtcacgtgtaagttcagaaagcactttggtcttaattggtgacttgggggttatttggtataaatataggttctttttctaaaaattattgccagtatcctccaaataattgccccttcaaatgtttcatctaaaggtgacagcttgtgggcagaaccatgcacaggaagtgcctgccagtgggtgttaggagatgtaggtggagtctgtgatagccaaccaaaagctatccccttctcgcccagaaaagccacgtgctttgctggacgctacttgaaatctgaactctgcacctacatatgtagtaaaattagagacttttgtcactttaatttttagattatctcaagttttcactagatttcaatgtgccacttgtgctatgagtctttaagaagctttaaaaaataaatgcacacctgtagccttttaccattcagacaggtagattatatttacctgtcatgagggaccatgtatggttgacagttgcaggtttgattaaatccactatattgcacaaattttgctggaaataatttcctgccctgccaagagctctatggtagtttgataataaactactaccccagtattcttaggaactgtgttactaagtcttttctgcctgatttgtactttatttccatagacccctcagatatgtgaggaatcaagccataaatgtgcatttgctggacattatgtaccatgtcatctctatgactacagatttcaaggataatttttacatctaacaatttcactgtaacagtgaccgataatgtgagaaatgtgctttttacagtgctgctggtgggtagacaagtgcttgctgcagttgtttctgaatctagccagatgctggagtcgtgaagctgtaagctccgcgggagcagggaccatctctctttcttgcactacaggcactcaataaatacttgtggctgtgaa

SEQ ID NO: 298865 - DNA, 7310 bp, Homo sapiens
acatagatgttcccaaaggacagtatgtagcacctgcggtgccggctgagtcacttgtagatggtgtgaaaaatgagaatttttatatacagactcctgaagagtgtcatgtgtctttaaaggaagatgtatccatttctcctggtgaatttgaacataattttcttggtgaaaataaggtttctgaagtatacagtgggaaaacaaatagtaatgctataacatcatgggcacaaaaactgaagcagaaccaaccaaagagagcacatgtagaagatggaggttcaagatctaaacaaggaaatgagcaaagtaagaagacaccaattgagaaatctgattttgctgctgctacacatcctcgtgctttttacctcagtaaaccagatgaaactccaaatgcttggatgtctgattcaggaacaggattgacttactggaaactagaggaaaaggatatgcaccactctttgcctgaaactttagagaagacgttcatatcattgtcttccacagatgtgtcaccaaaccagtctaatactagtaatgagatgaagctaccgtcactgaaggatatttattataaaaaacaaagggaaaacaagcagttacctgagaggaatctcacttctgcttccaacccaaatcatccaccagaggtcctgactctagatcctacgttacacatgaagccaaagcagcagatttcagggattcaacctcacggccttccgaatgcccttgatgacagaatatccttttccccggactctgttctagagcctagtatgtctagtccctctgacatagactcattttcacaagcaagtaatgtcacttctcagttacctggatttccaaaatatccctcacacacaaaagcttctccggtggactcttggaaaaatcagacattccaaaacgaaagtaggaccagttccacgtttccgtcagtatataccattactagtaatgatatctcggtcaacactgtagatgaagaaaacactgtcatggttgcttcggcctcagtcagtcagtcccagcttccaggattaggcagaatctgaaggaaaagcatgctcgacacatagcagatcttcgagcttattatgaatcagaaataaatagtttgaaacagaagctggaggcaaaagaaatctctggagttgaagattggaagataaccaatcaaattcttgtagacagatgtggccaattagatagtgctttgcatgaagctactagtcgcgtgagaacacttgaaaataagaataacttactggaaattgaagtgaatgatttgagagaacgcttcagtgcagccagcagtgcttccaaaattttgcaggaacgaattgaagaaatgagaacaagcagtaaagaaaaagacaataccatcattcgactaaaatctagactgcaagatttagaagaagcatttgagaatgcttacaaactctcagatgataaagaagctcaactaaaacaagagaacaaaatgtttcaagatcttttaggagagtatgagtcccttggaaaagaacacaggagagtaaaggatgcattaaatacaactgagaataaattgcttgatgcatatactcagatttctgatttgaaaagaatgatttcaaaacttgaagctcaggtcaagcaagtagaacatgaaaatatgttaagccttcgtcataattctagaattcacgtgagaccctcgcgtgccaacacactagcaacttcagacgtcagcaggcggaaatggctgattccaggtgcagagtattccatctttactggccagcctctggacacccaggacagtaacgtggataaccagctggaggaaacctgtagcctagggcaccgttcacctctggaaaaggattcttcacctggaagttcatcaacaagcttgttgataaaaaagcaaagagagacttcagacacgccgatcatgagagctttaaaagaacttgatgagggaaaaatatttaaaaattgggggacacagacagagaaagaggacacctcaaatataaatcctcggcaaactgaaacttcagttaatgcaagtcgttctccagaaaagtgtgcccaacagagacaaaagagacttaattcggcctcacagagatcatcatctttaccaccttcaaatcgtaaatcaagtactccaacaaaaagagagattatgctaacaccagtgactgtggcttatagtccaaagcgatcccctaaagaaaacttgtccccaggatttagtcatctgcttagcaaaaatgagagcagtccaattcgatttgatatacttttggatgatttagatactgttcctgtgtctacattacaacgtaccaatccaagaaagcaactccagtttcttcctctagatgactcggaagaaaaaacttattctgagaaagccaccgataaccatgttaatcatagctcttgccctgaaccggtgccaaatggagtgaagaaagtatctgtgagaacagcctgggagaagaataaatcagttagctatgaacagtgtaagccggtttcagtcactccacaggggaatgattttgaatatacagcaaaaattcggaccctagctgaaacagaacgattttttgatgaacttacaaaagaaaaggaccagattgaggcagcactaagcaggatgccttctcctggaggacgaatcactttacagacaagattaaatcaggaagccttggaagatcgtttggaaaggattaatcgagaactgggttcagttcgcatgacgctaaagaaattccatgttttgcgcacctctgcaaatctttgagatttgtagccattaaattttgagacatttttgtttgcactaatgtataattatgcagtcagaaaaggcaaactattttgtactgtttataagccttcaaacagtagttttacaatcatgctattcttacacttgctattttatacttcaaatagccacatattttcaagatatttttgttatgctcaggaatctcttgtatattttactatttaaaaagcattatttttaaatagtatctgtctccaatttatatcaagaataaggaaatataaacagaggaagcagcttgtttctaaacaaatagtgttatccttttacaattaactgcacatcaattttatagacttgttctacattgtaaatacaattcagtttttaaaaaataaagcttaatagcttccataatgatagactagtacatgctgaatacataaacaattacagtgtaccttggatttcagttgtgttgaggtttttaaaaaatgataatgcaattcctatttgaaacgtgtcttagagtgaatatcagaatagtaataatggactcttggaaagctttgaaaactacatgaatataactcattttctttaaactttattgtctgtaagagaaaaaagagagattgtaattctctaattttatcttttctaaaaaagttaaacaattggagagccctctctggaggtctctcagagtagctctctgcccattgttctgaattaacttgtgtcccaccctggacaataaatggacagataaaccctttgaaatacaagccaccaccccgtgagggattaagagggcagcctggttttcttagtgtgcatggcttcagctgtccgtcatagttgtcatctggatatgttcacccctttccactccttcaccctggccaaaaggaaaatatttccactgtaggtgctgtaagaacactagactttagatcatcacaatctactgtatttgttaatggacagggagtgtgtccggatggagcctggtgccttcccctcggccttgcagagggctccagcccactgcctctgtggtagccgctggctctcagaagtagcacgtgggcaggagtctctcctctgatccaggagcattggcaggtttgtgttgggactgctggttaagttggagctgtgtaactacttagtttttggtagccaatcagaacgcagtgccccacatattccagctcggtacatgttgataaacagactcatccaaactttcaaaatggattcgtactaaacatgctcaggttttaaattttggtttgcttttgagcttttcctctttatgtggctcttaataataagtagttagaatgaacccaagccatcccagttattccaaagcaggctctcaaatgacctttgaggcacccttcacctggctggtccccaggccaggggtccacagccctgctccctttctcagcaaggagggtggcctgtctgacagtgcagttgaacctttgctccctactctgcaacttttgaagacttcaggctaatcaaaattacttataattagaatcaagtgcctttattcttgttttttatttttattttatttatttatttttttagatggagttttgcccttgttgcccaggctggagtgcaatggcatgatctcagctcactgcaacctctgcctcccgggttcaagcgattctcctgcctcagcctgctgggtagctgggattacaggcatctgccaccacgcccggctaattttgtgtgtgtgtatatgtctatgtgtgtgtgtgtatgtatatatctttttttttttttttagtagagatggtgtttcaccatattggccaggctggtctcaaactcctgaactcatgtgatccgcctgccttggcccctcaaagtgctgggattacaggcatgagccaccacacccggcctattcttggtattctttattcttggttttctagcctttagaaaaaaaaaatctagtcttggtaaagaaaatgttcattttaatcaagctccagtacagcttgtgtcaagacctagtaagaccacctttaatgtgttcctggatatgacattaaaaactaacttgaaaattgttaggatatttccttgttccctacttttattgtaaaatctactacattcttaagaattaaaaaatgccatttcagaagagatgatagttttatcttgccaaggaattatcttcttagtagcctatattggcttattccaaaaaaggcgttaacctccatcaaaacatcttctgcgcctctctctcagcatatgctttgatatttgaagtgtgtaatagattggagctatcagtcacttatttctaaaaaatgtattcttttttcttcatagctgtgaagagggataccaaggaaagttctttctgctgtctttctctttggtaatgcttatcttatgaacactcaactgaaaaaacactccacctaaaagcaggaaagatggcaattctaaatagcagctattatccccgggtataaactatttttgttgttggcttggggctttgctgcaggtattaatagtttaaagaaaaaaaaaaaaaaaaccctaagcaaatctgccacctctgggaagtgccttttaaaatgcaaatagaaagtgaactctcccctgatgcctggatctgcccccttcctttcccttgctaagcctctgtttgcaggagctactcctgaggtatggaaatggtctttgcaactgaaggacttttccaactgaagcaacagttgtagctaaagtggccgtgctagggttgtgcagagctgggctcaggggacaagaaaggagagacttggagccagagagacctgggtcacatcctggcacaggcctgcctttctcagctataagatgaaataagaaaactcctttcattaagggagattttgtaaagtgcctggtgcttagtaagtgctcaagaaatattatatttcagattcattgagttaagtaggtttttgaggtagcatccttttttttttttttttggaaagggagtctcaagttctggtgtggcccaggctggggagtgcagtgggtgtggatactgggctcactggcaacctggtctccggggttccaagctattctcctggcctaagcctcccgtgtaggtgggattacaggtgcataccacgcctggttaatttttgtattttcggtagagacggggttctcaccatgttggccatcctggtcttgaacttctgaccccaaatgatctgcctgccttggcctcccaaagtgttgggattacaggcgtgagccactgcgcccagccttgaggtagcatactttctgaaataaaaaagtagattatgtccgaagcagttgacctaaaaactgccttggactgacatttgttaggtggtctaagatgttctcttcacgctttgcaaaaaaatgagcttttttggagtttaaattaagcatccctctggtgtgtttggttttttagccaccaaaaatttaacaaatttgataacctgtcacgtgtaagttcagaaagcactttggtcttaattggtgacttgggggttatttggtataaatataggttctttttctaaaaattattgccagtatcctccaaataattgccccttcaaatgtttcatctaaaggtgacagcttgtgggcagaaccatgcacaggaagtgcctgccagtgggtgttaggagatgtaggtggagtctgtgatagccaaccaaaagctatccccttctcgcccagaaaagccacgtgctttgctggacgctacttgaaatctgaactctgcacctacatatgtagtaaaattagagacttttgtcactttaatttttagattatctcaagttttcactagatttcaatgtgccacttgtgctatgagtctttaagaagctttaaaaaataaatgcacacctgtagccttttaccattcagacaggtagattatatttacctgtcatgagggaccatgtatggttgacagttgcaggtttgattaaatccactatattgcacaaattttgctggaaataatttcctgccctgccaagagctctatggtagtttgataataaactactaccccagtattcttaggaactgtgttactaagtcttttctgcctgatttgtactttatttccatagacccctcagatatgtgaggaatcaagccataaatgtgcatttgctggacattatgtaccatgtcatctctatgactacagatttcaaggataatttttacatctaacaatttcactgtaacagtgaccgataatgtgagaaatgtgctttttacagtgctgctggtgggtagacaagtgcttgctgcagttgtttctgaatctagccagatgctggagtcgtgaagctgtaagctccgcgggagcagggaccatctctctttcttgcactacaggcactcaataaatacttgtggctgtgaa

SEQ ID NO: 298866 - DNA, 5576 bp, Homo sapiens
aaagaccccacctccacacaccatcacattgaagattagggcttcaacatgtatgtttggtgtgggggcggggggcaagatacagacatttagtccatagcactgtatgtcttaaaattattgtttaaggcaccgttcacctctggaaaaggattcttcacctggaagttcatcaacaagcttgttgataaaaaagcaaagagagacttcagacacgccgatcatgagagctttaaaagaacttgatgagggaaaaatatttaaaaattgggggacacagacagagaaagaggacacctcaaatataaatcctcggcaaactgaaacttcagttaatgcaagtcgttctccagaaaagtgtgcccaacagagacaaaagagacttaattcggcctcacagagatcatcatctttaccaccttcaaatcgtaaatcaagtactccaacaaaaagagagattatgctaacaccagtgactgtggcttatagtccaaagcgatcccctaaagaaaacttgtccccaggatttagtcatctgcttagcaaaaatgagagcagtccaattcgatttgatatacttttggatgatttagatactgttcctgtgtctacattacaacgtaccaatccaagaaagcaactccagtttcttcctctagatgactcggaagaaaaaacttattctgagaaagccaccgataaccatgttaatcatagctcttgccctgaaccggtgccaaatggagtgaagaaagtatctgtgagaacagcctgggagaagaataaatcagttagctatgaacagtgtaagccggtttcagtcactccacaggggaatgattttgaatatacagcaaaaattcggaccctagctgaaacagaacgattttttgatgaacttacaaaagaaaaggaccagattgaggcagcactaagcaggatgccttctcctggaggacgaatcactttacagacaagattaaatcaggaagccttggaagatcgtttggaaaggattaatcgagaactgggttcagttcgcatgacgctaaagaaattccatgttttgcgcacctctgcaaatctttgagatttgtagccattaaattttgagacatttttgtttgcactaatgtataattatgcagtcagaaaaggcaaactattttgtactgtttataagccttcaaacagtagttttacaatcatgctattcttacacttgctattttatacttcaaatagccacatattttcaagatatttttgttatgctcaggaatctcttgtatattttactatttaaaaagcattatttttaaatagtatctgtctccaatttatatcaagaataaggaaatataaacagaggaagcagcttgtttctaaacaaatagtgttatccttttacaattaactgcacatcaattttatagacttgttctacattgtaaatacaattcagtttttaaaaaataaagcttaatagcttccataatgatagactagtacatgctgaatacataaacaattacagtgtaccttggatttcagttgtgttgaggtttttaaaaaatgataatgcaattcctatttgaaacgtgtcttagagtgaatatcagaatagtaataatggactcttggaaagctttgaaaactacatgaatataactcattttctttaaactttattgtctgtaagagaaaaaagagagattgtaattctctaattttatcttttctaaaaaagttaaacaattggagagccctctctggaggtctctcagagtagctctctgcccattgttctgaattaacttgtgtcccaccctggacaataaatggacagataaaccctttgaaatacaagccaccaccccgtgagggattaagagggcagcctggttttcttagtgtgcatggcttcagctgtccgtcatagttgtcatctggatatgttcacccctttccactccttcaccctggccaaaaggaaaatatttccactgtaggtgctgtaagaacactagactttagatcatcacaatctactgtatttgttaatggacagggagtgtgtccggatggagcctggtgccttcccctcggccttgcagagggctccagcccactgcctctgtggtagccgctggctctcagaagtagcacgtgggcaggagtctctcctctgatccaggagcattggcaggtttgtgttgggactgctggttaagttggagctgtgtaactacttagtttttggtagccaatcagaacgcagtgccccacatattccagctcggtacatgttgataaacagactcatccaaactttcaaaatggattcgtactaaacatgctcaggttttaaattttggtttgcttttgagcttttcctctttatgtggctcttaataataagtagttagaatgaacccaagccatcccagttattccaaagcaggctctcaaatgacctttgaggcacccttcacctggctggtccccaggccaggggtccacagccctgctccctttctcagcaaggagggtggcctgtctgacagtgcagttgaacctttgctccctactctgcaacttttgaagacttcaggctaatcaaaattacttataattagaatcaagtgcctttattcttgttttttatttttattttatttatttatttttttagatggagttttgcccttgttgcccaggctggagtgcaatggcatgatctcagctcactgcaacctctgcctcccgggttcaagcgattctcctgcctcagcctgctgggtagctgggattacaggcatctgccaccacgcccggctaattttgtgtgtgtgtatatgtctatgtgtgtgtgtgtatgtatatatctttttttttttttttagtagagatggtgtttcaccatattggccaggctggtctcaaactcctgaactcatgtgatccgcctgccttggcccctcaaagtgctgggattacaggcatgagccaccacacccggcctattcttggtattctttattcttggttttctagcctttagaaaaaaaaaatctagtcttggtaaagaaaatgttcattttaatcaagctccagtacagcttgtgtcaagacctagtaagaccacctttaatgtgttcctggatatgacattaaaaactaacttgaaaattgttaggatatttccttgttccctacttttattgtaaaatctactacattcttaagaattaaaaaatgccatttcagaagagatgatagttttatcttgccaaggaattatcttcttagtagcctatattggcttattccaaaaaaggcgttaacctccatcaaaacatcttctgcgcctctctctcagcatatgctttgatatttgaagtgtgtaatagattggagctatcagtcacttatttctaaaaaatgtattcttttttcttcatagctgtgaagagggataccaaggaaagttctttctgctgtctttctctttggtaatgcttatcttatgaacactcaactgaaaaaacactccacctaaaagcaggaaagatggcaattctaaatagcagctattatccccgggtataaactatttttgttgttggcttggggctttgctgcaggtattaatagtttaaagaaaaaaaaaaaaaaaaccctaagcaaatctgccacctctgggaagtgccttttaaaatgcaaatagaaagtgaactctcccctgatgcctggatctgcccccttcctttcccttgctaagcctctgtttgcaggagctactcctgaggtatggaaatggtctttgcaactgaaggacttttccaactgaagcaacagttgtagctaaagtggccgtgctagggttgtgcagagctgggctcaggggacaagaaaggagagacttggagccagagagacctgggtcacatcctggcacaggcctgcctttctcagctataagatgaaataagaaaactcctttcattaagggagattttgtaaagtgcctggtgcttagtaagtgctcaagaaatattatatttcagattcattgagttaagtaggtttttgaggtagcatccttttttttttttttttggaaagggagtctcaagttctggtgtggcccaggctggggagtgcagtgggtgtggatactgggctcactggcaacctggtctccggggttccaagctattctcctggcctaagcctcccgtgtaggtgggattacaggtgcataccacgcctggttaatttttgtattttcggtagagacggggttctcaccatgttggccatcctggtcttgaacttctgaccccaaatgatctgcctgccttggcctcccaaagtgttgggattacaggcgtgagccactgcgcccagccttgaggtagcatactttctgaaataaaaaagtagattatgtccgaagcagttgacctaaaaactgccttggactgacatttgttaggtggtctaagatgttctcttcacgctttgcaaaaaaatgagcttttttggagtttaaattaagcatccctctggtgtgtttggttttttagccaccaaaaatttaacaaatttgataacctgtcacgtgtaagttcagaaagcactttggtcttaattggtgacttgggggttatttggtataaatataggttctttttctaaaaattattgccagtatcctccaaataattgccccttcaaatgtttcatctaaaggtgacagcttgtgggcagaaccatgcacaggaagtgcctgccagtgggtgttaggagatgtaggtggagtctgtgatagccaaccaaaagctatccccttctcgcccagaaaagccacgtgctttgctggacgctacttgaaatctgaactctgcacctacatatgtagtaaaattagagacttttgtcactttaatttttagattatctcaagttttcactagatttcaatgtgccacttgtgctatgagtctttaagaagctttaaaaaataaatgcacacctgtagccttttaccattcagacaggtagattatatttacctgtcatgagggaccatgtatggttgacagttgcaggtttgattaaatccactatattgcacaaattttgctggaaataatttcctgccctgccaagagctctatggtagtttgataataaactactaccccagtattcttaggaactgtgttactaagtcttttctgcctgatttgtactttatttccatagacccctcagatatgtgaggaatcaagccataaatgtgcatttgctggacattatgtaccatgtcatctctatgactacagatttcaaggataatttttacatctaacaatttcactgtaacagtgaccgataatgtgagaaatgtgctttttacagtgctgctggtgggtagacaagtgcttgctgcagttgtttctgaatctagccagatgctggagtcgtgaagctgtaagctccgcgggagcagggaccatctctctttcttgcactacaggcactcaataaatacttgtggctgtgaa

SEQ ID NO: 298867 - DNA, 4968 bp, Homo sapiens
gcactgatcaaatgtgtccatttcttctggtgaaatgtgtgaagcacctcctaggctcctcttgtactgttctcacttcagcagagccaaagaattatcctcttccagttggttgtattgctattactagaatttccatatactcaatgtgtcaaacatattgagaatattttaaagtacagcagttatttggaatagttgaaaggctaattcatattgtccagtttaaaagaaatcataagatgtttcgtgtagaaagccaaataattgtaattttagtgtttatacttgctcttttgctaaaagaaaggtcagtttggtggtgattatagaacttggtatagaattctaattaaacttttcccattgttttcacctaggaagccttggaagatcgtttggaaaggattaatcgagaactgggttcagttcgcatgacgctaaagaaattccatgttttgcgcacctctgcaaatctttgagatttgtagccattaaattttgagacatttttgtttgcactaatgtataattatgcagtcagaaaaggcaaactattttgtactgtttataagccttcaaacagtagttttacaatcatgctattcttacacttgctattttatacttcaaatagccacatattttcaagatatttttgttatgctcaggaatctcttgtatattttactatttaaaaagcattatttttaaatagtatctgtctccaatttatatcaagaataaggaaatataaacagaggaagcagcttgtttctaaacaaatagtgttatccttttacaattaactgcacatcaattttatagacttgttctacattgtaaatacaattcagtttttaaaaaataaagcttaatagcttccataatgatagactagtacatgctgaatacataaacaattacagtgtaccttggatttcagttgtgttgaggtttttaaaaaatgataatgcaattcctatttgaaacgtgtcttagagtgaatatcagaatagtaataatggactcttggaaagctttgaaaactacatgaatataactcattttctttaaactttattgtctgtaagagaaaaaagagagattgtaattctctaattttatcttttctaaaaaagttaaacaattggagagccctctctggaggtctctcagagtagctctctgcccattgttctgaattaacttgtgtcccaccctggacaataaatggacagataaaccctttgaaatacaagccaccaccccgtgagggattaagagggcagcctggttttcttagtgtgcatggcttcagctgtccgtcatagttgtcatctggatatgttcacccctttccactccttcaccctggccaaaaggaaaatatttccactgtaggtgctgtaagaacactagactttagatcatcacaatctactgtatttgttaatggacagggagtgtgtccggatggagcctggtgccttcccctcggccttgcagagggctccagcccactgcctctgtggtagccgctggctctcagaagtagcacgtgggcaggagtctctcctctgatccaggagcattggcaggtttgtgttgggactgctggttaagttggagctgtgtaactacttagtttttggtagccaatcagaacgcagtgccccacatattccagctcggtacatgttgataaacagactcatccaaactttcaaaatggattcgtactaaacatgctcaggttttaaattttggtttgcttttgagcttttcctctttatgtggctcttaataataagtagttagaatgaacccaagccatcccagttattccaaagcaggctctcaaatgacctttgaggcacccttcacctggctggtccccaggccaggggtccacagccctgctccctttctcagcaaggagggtggcctgtctgacagtgcagttgaacctttgctccctactctgcaacttttgaagacttcaggctaatcaaaattacttataattagaatcaagtgcctttattcttgttttttatttttattttatttatttatttttttagatggagttttgcccttgttgcccaggctggagtgcaatggcatgatctcagctcactgcaacctctgcctcccgggttcaagcgattctcctgcctcagcctgctgggtagctgggattacaggcatctgccaccacgcccggctaattttgtgtgtgtgtatatgtctatgtgtgtgtgtgtatgtatatatctttttttttttttttagtagagatggtgtttcaccatattggccaggctggtctcaaactcctgaactcatgtgatccgcctgccttggcccctcaaagtgctgggattacaggcatgagccaccacacccggcctattcttggtattctttattcttggttttctagcctttagaaaaaaaaaatctagtcttggtaaagaaaatgttcattttaatcaagctccagtacagcttgtgtcaagacctagtaagaccacctttaatgtgttcctggatatgacattaaaaactaacttgaaaattgttaggatatttccttgttccctacttttattgtaaaatctactacattcttaagaattaaaaaatgccatttcagaagagatgatagttttatcttgccaaggaattatcttcttagtagcctatattggcttattccaaaaaaggcgttaacctccatcaaaacatcttctgcgcctctctctcagcatatgctttgatatttgaagtgtgtaatagattggagctatcagtcacttatttctaaaaaatgtattcttttttcttcatagctgtgaagagggataccaaggaaagttctttctgctgtctttctctttggtaatgcttatcttatgaacactcaactgaaaaaacactccacctaaaagcaggaaagatggcaattctaaatagcagctattatccccgggtataaactatttttgttgttggcttggggctttgctgcaggtattaatagtttaaagaaaaaaaaaaaaaaaaccctaagcaaatctgccacctctgggaagtgccttttaaaatgcaaatagaaagtgaactctcccctgatgcctggatctgcccccttcctttcccttgctaagcctctgtttgcaggagctactcctgaggtatggaaatggtctttgcaactgaaggacttttccaactgaagcaacagttgtagctaaagtggccgtgctagggttgtgcagagctgggctcaggggacaagaaaggagagacttggagccagagagacctgggtcacatcctggcacaggcctgcctttctcagctataagatgaaataagaaaactcctttcattaagggagattttgtaaagtgcctggtgcttagtaagtgctcaagaaatattatatttcagattcattgagttaagtaggtttttgaggtagcatccttttttttttttttttggaaagggagtctcaagttctggtgtggcccaggctggggagtgcagtgggtgtggatactgggctcactggcaacctggtctccggggttccaagctattctcctggcctaagcctcccgtgtaggtgggattacaggtgcataccacgcctggttaatttttgtattttcggtagagacggggttctcaccatgttggccatcctggtcttgaacttctgaccccaaatgatctgcctgccttggcctcccaaagtgttgggattacaggcgtgagccactgcgcccagccttgaggtagcatactttctgaaataaaaaagtagattatgtccgaagcagttgacctaaaaactgccttggactgacatttgttaggtggtctaagatgttctcttcacgctttgcaaaaaaatgagcttttttggagtttaaattaagcatccctctggtgtgtttggttttttagccaccaaaaatttaacaaatttgataacctgtcacgtgtaagttcagaaagcactttggtcttaattggtgacttgggggttatttggtataaatataggttctttttctaaaaattattgccagtatcctccaaataattgccccttcaaatgtttcatctaaaggtgacagcttgtgggcagaaccatgcacaggaagtgcctgccagtgggtgttaggagatgtaggtggagtctgtgatagccaaccaaaagctatccccttctcgcccagaaaagccacgtgctttgctggacgctacttgaaatctgaactctgcacctacatatgtagtaaaattagagacttttgtcactttaatttttagattatctcaagttttcactagatttcaatgtgccacttgtgctatgagtctttaagaagctttaaaaaataaatgcacacctgtagccttttaccattcagacaggtagattatatttacctgtcatgagggaccatgtatggttgacagttgcaggtttgattaaatccactatattgcacaaattttgctggaaataatttcctgccctgccaagagctctatggtagtttgataataaactactaccccagtattcttaggaactgtgttactaagtcttttctgcctgatttgtactttatttccatagacccctcagatatgtgaggaatcaagccataaatgtgcatttgctggacattatgtaccatgtcatctctatgactacagatttcaaggataatttttacatctaacaatttcactgtaacagtgaccgataatgtgagaaatgtgctttttacagtgctgctggtgggtagacaagtgcttgctgcagttgtttctgaatctagccagatgctggagtcgtgaagctgtaagctccgcgggagcagggaccatctctctttcttgcactacaggcactcaataaatacttgtggctgtgaa

SEQ ID NO: 298868 - DNA, 3645 bp, Homo sapiens
  misc_feature (2564)..(2564): n is a, c, g, or t
acatagatgttcccaaaggacagtatgtagcacctgcggtgccggctgagtcacttgtagatggtgtgaaaaatgagaatttttatatacagactcctgaagagtgtcatgtgtctttaaaggaagatgtatccatttctcctggtgaatttgaacataattttcttggtgaaaataaggtttctgaagtatacagtgggaaaacaaatagtaatgctataacatcatgggcacaaaaactgaagcagaaccaaccaaagagagcacatgtagaagatggaggttcaagatctaaacaaggaaatgagcaaagtaagaagacaccaattgagaaatctgattttgctgctgctacacatcctcgtgctttttacctcagtaaaccagatgaaactccaaatgcttggatgtctgattcaggaacaggattgacttactggaaactagaggaaaaggatatgcaccactctttgcctgaaactttagagaagacgttcatatcattgtcttccacagatgtgtcaccaaaccaggtcctgactctagatcctacgttacacatgaagccaaagcagcagatttcagggattcaacctcacggccttccgaatgcccttgatgacagaatatccttttccccggactctgttctagagcctagtatgtctagtccctctgacatagactcattttcacaagcaagtaatgtcacttctcagttacctggatttccaaaatatccctcacacacaaaagcttctccggtggactcttggaaaaatcagacattccaaaacgaaagtaggaccagttccacgtttccgtcagtatataccattactagtaatgatatctcggtcaacactgtagatgaagaaaacactgtcatggttgcttcggcctcagtcagtcagtcccagcttccaggtacagccaacagtgtcccagaatgcatttcattgacttccttggaagatcctgtgatattgtctaagattaggcagaatctgaaggaaaagcatgctcgacacatagcagatcttcgagcttattatgaatcagaaataaatagtttgaaacagaagctggaggcaaaagaaatctctggagttgaagattggaagataaccaatcaaattcttgtagacagatgtggccaattagatagtgctttgcatgaagctactagtcgcgtgagaacacttgaaaataagaataacttactggaaattgaagtgaatgatttgagagaacgcttcagtgcagccagcagtgcttccaaaattttgcaggaacgaattgaagaaatgagaacaagcagtaaagaaaaagacaataccatcattcgactaaaatctagactgcaagatttagaagaagcatttgagaatgcttacaaactctcagatgataaagaagctcaactaaaacaagagaacaaaatgtttcaagatcttttaggagagtatgagtcccttggaaaagaacacaggagagtaaaggatgcattaaatacaactgagaataaattgcttgatgcatatactcagatttctgatttgaaaagaatgatttcaaaacttgaagctcaggtcaagcaagtagaacatgaaaatatgttaagccttcgtcataattctagaattcacgtgagaccctcgcgtgccaacacactagcaacttcagacgtcagcaggcggaaatggctgattccaggtgcagagtattccatctttactggccagcctctggacacccaggacagtaacgtggataaccagctggaggaaacctgtagcctagggcaccgttcacctctggaaaaggattcttcacctggaagttcatcaacaagcttgttgataaaaaagcaaagagagacttcagacacgccgatcatgagagctttaaaagaacttgatgagggaaaaatatttaaaaattgggggacacagacagagaaagaggacacctcaaatataaatcctcggcaaactgaaacttcagttaatgcaagtcgttctccagaaaagtgtgcccaacagagacaaaagagacttaattcggcctcacagagatcatcatctttaccaccttcaaatcgtaaatcaagtactccaacaaaaagagagattatgctaacaccagtgactgtggcttatagtccaaagcgatcccctaaagaaaacttgtccccaggatttagtcatctgcttagcaaaaatgagagcagtccaattcgaaaaaacttattctgagaaagccaccgataaccatgttaatcatagctcttgccctgaaccggtgccaaatggagtgaagaaagtatctgtgagaacagcctgggagaagaataaatcagttagctatgaacagtgtaagccggtttcagtcactccacaggggaatgattttgaatatacagcaaaaattcggaccctagctgaaacagaacgattttttgatgaacttacaaaagaaaaggaccagattgaggcagcactaagcaggatgccttctcctggaggacgaatcactttacagacaagattaaatcaggtganatgtcttagcttgaatctgctttagaggcttgatgccagtcagtgttccagttatctaagaggggtttaaaaaatcatggcacagtgaaaattagacacactgaagcagcagtcaaaacttttagcttttacgggaagtgtttgattatagcaattttataactgcaagctagctttcaggaataaaaattgattttacctttagacttagagaagaaggtgttcatgcccttgtattttcaagaaactaacttgagagcaaatggcaatatgcttttcaacagattttacactaagttagtgctcacagattgcctctctttttgtttgatttctccctcctcaaatctgtaatttatttctgaactcctttccattagcaagcagataaaatggttacactttggaaactgaatagctgtagaggttcaaaaagtgagccgtaggccgggcgcaggggctcacgcctataatcccagcactttgggaggctgaggctggtgtatcacctgaggtcaggagttccagccactgtgcccagcccccaacttctttttttctgactttgtctttttgttctgataaatattagtcaataatttataggccgggcgtggtggctcatgccggtaatcccagcactttgggaggctgatgcaggcgggtcacctgaggtcaggagttcgagaccagcctggcccacatggtgaaaccccgtctctactaaagtacaaaaattagccgggcatggtgtgggggtgggcgcctgtaattccagctactcgggaggctgaggcaggagaattgctcgaacctggaaggtggaggttgcagtgagccaagatggtgccactgcactccagcctgggtaatagagcaagactcagtcttaaaaaaaaaaataaataaactttcaattgaacttttcatgttatgaaatatctttctataacatccttttaaattaacgtacaatattccatcagcagtaacgtatttaaccaagaatgttttagtagaaatttgggttgcttctaattttggatatcataaataaggctgcaataaagttcttaaacat

SEQ ID NO: 298869 - DNA, 4899 bp, Homo sapiens
acatagatgttcccaaaggacagtatgtagcacctgcggtgccggctgagtcacttgtagatggtgtgaaaaatgagaatttttatatacagactcctgaagagtgtcatgtgtctttaaaggaagatgtatccatttctcctggtgaatttgaacataattttcttggtgaaaataaggtttctgaagtatacagtgggaaaacaaatagtaatgctataacatcatgggcacaaaaactgaagcagaaccaaccaaagagagcacatgtagaagatggaggttcaagatctaaacaaggaaatgagcaaagtaagaagacaccaattgagaaatctgattttgctgctgctacacatcctcgtgctttttacctcagtaaaccagatgaaactccaaatgcttggatgtctgattcaggaacaggattgacttactggaaactagaggaaaaggatatgcaccactctttgcctgaaactttagagaagacgttcatatcattgtcttccacagatgtgtcaccaaaccagtctaatactagtaatgagatgaagctaccgtcactgaaggatatttattataaaaaacaaagggaaaacaagcagttacctgagaggaatctcacttctgcttccaacccaaatcatccaccagaggtcctgactctagatcctacgttacacatgaagccaaagcagcagatttcagggattcaacctcacggccttccgaatgcccttgatgacagaatatccttttccccggactctgttctagagcctagtatgtctagtccctctgacatagactcattttcacaagcaagtaatgtcacttctcagttacctggatttccaaaatatccctcacacacaaaagcttctccggtggactcttggaaaaatcagacattccaaaacgaaagtaggaccagttccacgtttccgtcagtatataccattactagtaatgatatctcggtcaacactgtagatgaagaaaacactgtcatggttgcttcggcctcagtcagtcagtcccagcttccaggtacagccaacagtgtcccagaatgcatttcattgacttccttggaagatcctgtgatattgtctaagattaggcagaatctgaaggaaaagcatgctcgacacatagcagatcttcgagcttattatgaatcagaaataaatagtttgaaacagaagctggaggcaaaagaaatctctggagttgaagattggaagataaccaatcaaattcttgtagacagatgtggccaattagatagtgctttgcatgaagctactagtcgcgtgagaacacttgaaaataagaataacttactggaaattgaagtgaatgatttgagagaacgcttcagtgcagccagcagtgcttccaaaattttgcaggaacgaattgaagaaatgagaacaagcagtaaagaaaaagacaataccatcattcgactaaaatctagactgcaagatttagaagaagcatttgagaatgcttacaaactctcagatgataaagaagctcaactaaaacaagagaacaaaatgtttcaagatcttttaggagagtatgagtcccttggaaaagaacacaggagagtaaaggatgcattaaatacaactgagaataaattgcttgatgcatatactcagatttctgatttgaaaagaatgatttcaaaacttgaagctcaggtcaagcaagtagaacatgaaaatatgttaagccttcgtcataattctagaattcacgtgagaccctcgcgtgccaacacactagcaacttcagacgtcagcaggcggaaatggctgattccaggtgcagagtattccatctttactggccagcctctggacacccaggacagtaacgtggataaccagctggaggaaacctgtagcctagggcaccgttcacctctggaaaaggattcttcacctggaagttcatcaacaagcttgttgataaaaaagcaaagagagacttcagacacgccgatcatgagagctttaaaagaacttgatgagggaaaaatatttaaaaattgggggacacagacagagaaagaggacacctcaaatataaatcctcggcaaactgaaacttcagttaatgcaagtcgttctccagaaaagtgtgcccaacagagacaaaagagacttaattcggcctcacagagatcatcatctttaccaccttcaaatcgtaaatcaagtactccaacaaaaagagagattatgctaacaccagtgactgtggcttatagtccaaagcgatcccctaaagaaaacttgtccccaggatttagtcatctgcttagcaaaaatgagagcagtccaattcgatttgatatacttttggatgatttagatactgttcctgtgtctacattacaacgtaccaatccaagaaagcaactccagtttcttcctctagatgactcggaagaaaaaacttattctgagaaagccaccgataaccatgttaatcatagctcttgccctgaaccggtgccaaatggagtgaagaaagtatctgtgagaacagcctgggagaagaataaatcagttagctatgaacagtgtaagccggtttcagtcactccacaggggaatgattttgaatatacagcaaaaattcggaccctagctgaaacagaacgattttttgatgaacttacaaaagaaaaggaccagattgaggcagcactaagcaggatgccttctcctggaggacgaatcactttacagacaagattaaatcagctgtgaagagggataccaaggaaagttctttctgctgtctttctctttggtaatgcttatcttatgaacactcaactgaaaaaacactccacctaaaagcaggaaagatggcaattctaaatagcagctattatccccgggtataaactatttttgttgttggcttggggctttgctgcaggtattaatagtttaaagaaaaaaaaaaaaaaaaccctaagcaaatctgccacctctgggaagtgccttttaaaatgcaaatagaaagtgaactctcccctgatgcctggatctgcccccttcctttcccttgctaagcctctgtttgcaggagctactcctgaggtatggaaatggtctttgcaactgaaggacttttccaactgaagcaacagttgtagctaaagtggccgtgctagggttgtgcagagctgggctcaggggacaagaaaggagagacttggagccagagagacctgggtcacatcctggcacaggcctgcctttctcagctataagatgaaataagaaaactcctttcattaagggagattttgtaaagtgcctggtgcttagtaagtgctcaagaaatattatatttcagattcattgagttaagtaggtttttgaggtagcatccttttttttttttttttggaaagggagtctcaagttctggtgtggcccaggctggggagtgcagtgggtgtggatactgggctcactggcaacctggtctccggggttccaagctattctcctggcctaagcctcccgtgtaggtgggattacaggtgcataccacgcctggttaatttttgtattttcggtagagacggggttctcaccatgttggccatcctggtcttgaacttctgaccccaaatgatctgcctgccttggcctcccaaagtgttgggattacaggcgtgagccactgcgcccagccttgaggtagcatactttctgaaataaaaaagtagattatgtccgaagcagttgacctaaaaactgccttggactgacatttgttaggtggtctaagatgttctcttcacgctttgcaaaaaaatgagcttttttggagtttaaattaagcatccctctggtgtgtttggttttttagccaccaaaaatttaacaaatttgataacctgtcacgtgtaagttcagaaagcactttggtcttaattggtgacttgggggttatttggtataaatataggttctttttctaaaaattattgccagtatcctccaaataattgccccttcaaatgtttcatctaaaggtgacagcttgtgggcagaaccatgcacaggaagtgcctgccagtgggtgttaggagatgtaggtggagtctgtgatagccaaccaaaagctatccccttctcgcccagaaaagccacgtgctttgctggacgctacttgaaatctgaactctgcacctacatatgtagtaaaattagagacttttgtcactttaatttttagattatctcaagttttcactagatttcaatgtgccacttgtgctatgagtctttaagaagctttaaaaaataaatgcacacctgtagccttttaccattcagacaggtagattatatttacctgtcatgagggaccatgtatggttgacagttgcaggtttgattaaatccactatattgcacaaattttgctggaaataatttcctgccctgccaagagctctatggtagtttgataataaactactaccccagtattcttaggaactgtgttactaagtcttttctgcctgatttgtactttatttccatagacccctcagatatgtgaggaatcaagccataaatgtgcatttgctggacattatgtaccatgtcatctctatgactacagatttcaaggataatttttacatctaacaatttcactgtaacagtgaccgataatgtgagaaatgtgctttttacagtgctgctggtgggtagacaagtgcttgctgcagttgtttctgaatctagccagatgctggagtcgtgaagctgtaagctccgcgggagcagggaccatctctctttcttgcactacaggcactcaataaatacttgtggctgtgaa

SEQ ID NO: 298870 - DNA, 3091 bp, Homo sapiens
acatagatgttcccaaaggacagtatgtagcacctgcggtgccggctgagtcacttgtagatggtgtgaaaaatgagaatttttatatacagactcctgaagagtgtcatgtgtctttaaaggaagatgtatccatttctcctggtgaatttgaacataattttcttggtgaaaataaggtttctgaagtatacagtgggaaaacaaatagtaatgctataacatcatgggcacaaaaactgaagcagaaccaaccaaagagagcacatgtagaagatggaggttcaagatctaaacaaggaaatgagcaaagtaagaagacaccaattgagaaatctgattttgctgctgctacacatcctcgtgctttttacctcagtaaaccagatgaaactccaaatgcttggatgtctgattcaggaacaggattgacttactggaaactagaggaaaaggatatgcaccactctttgcctgaaactttagagaagacgttcatatcattgtcttccacagatgtgtcaccaaaccagtctaatactagtaatgagatgaagctaccgtcactgaaggatatttattataaaaaacaaagggaaaacaagcagttacctgagaggaatctcacttctgcttccaacccaaatcatccaccagaggtcctgactctagatcctacgttacacatgaagccaaagcagcagatttcagggattcaacctcacggccttccgaatgcccttgatgacagaatatccttttccccggactctgttctagagcctagtatgtctagtccctctgacatagactcattttcacaagcaagtaatgtcacttctcagttacctggatttccaaaatatccctcacacacaaaagcttctccggtggactcttggaaaaatcagacattccaaaacgaaagtaggaccagttccacgtttccgtcagtatataccattactagtaatgatatctcggtcaacactgtagatgaagaaaacactgtcatggttgcttcggcctcagtcagtcagtcccagcttccaggtacagccaacagtgtcccagaatgcatttcattgacttccttggaagatcctgtgatattgtctaagattaggcagaatctgaaggaaaagcatgctcgacacatagcagatcttcgagcttattatgaatcagaaataaatagtttgaaacagaagctggaggcaaaagaaatctctggagttgaagattggaagataaccaatcaaattcttgtagacagatgtggccaattagatagtgctttgcatgaagctactagtcgcgtgagaacacttgaaaataagaataacttactggaaattgaagtgaatgatttgagagaacgcttcagtgcagccagcagtgcttccaaaattttgcaggaacgaattgaagaaatgagaacaagcagtaaagaaaaagacaataccatcattcgactaaaatctagactgcaagatttagaagaagcatttgagaatgcttacaaactctcagatgataaagaagctcaactaaaacaagagaacaaaatgtttcaagatcttttaggagagtatgagtcccttggaaaagaacacaggagagtaaaggatgcattaaatacaactgagaataaattgcttgatgcatatactcagatttctgatttgaaaagaatgatttcaaaacttgaagctcaggtcaagcaagtagaacatgaaaatatgttaagccttcgtcataattctagaattcacgtgagaccctcgcgtgccaacacactagcaacttcagacgtcagcaggcggaaatggctgattccaggtgcagagtattccatctttactggccagcctctggacacccaggacagtaacgtggataaccagctggaggaaacctgtagcctagggcaccgttcacctctggaaaaggattcttcacctggaagttcatcaacaagcttgttgataaaaaagcaaagagagacttcagacacgccgatcatgagagctttaaaagaacttgatgagggaaaaatatttaaaaattgggggacacagacagagaaagaggacacctcaaatataaatcctcggcaaactgaaacttcagttaatgcaagtcgttctccagaaaagtgtgcccaacagagacaaaagagacttaattcggcctcacagagatcatcatctttaccaccttcaaatcgtaaatcaagtactccaacaaaaagagagattatgctaacaccagtgactgtggcttatagtccaaagcgatcccctaaagaaaacttgtccccaggatttagtcatctgcttagcaaaaatgagagcagtccaattcgatttgatatacttttggatgatttagatactgttcctgtgtctacattacaacgtaccaatccaagaaagcaactccagtttcttcctctagatgactcggaagaaaaaacttattctgagaaagccaccgataaccatgttaatcatagctcttgccctgaaccggtgccaaatggagtgaagaaagtatctgtgagaacagcctgggagaagaataaatcagttagctatgaacagtgtaagccggtttcagtcactccacaggggaatgattttgaatatacagcaaaaattcggaccctagctgaaacagaacgattttttgatgaacttacaaaagaaaaggaccagattgaggcagcactaagcaggatgccttctcctggaggacgaatcactttacagacaagattaaatcagacccctcagatatgtgaggaatcaagccataaatgtgcatttgctggacattatgtaccatgtcatctctatgactacagatttcaaggataatttttacatctaacaatttcactgtaacagtgaccgataatgtgagaaatgtgctttttacagtgctgctggtgggtagacaagtgcttgctgcagttgtttctgaatctagccagatgctggagtcgtgaagctgtaagctccgcgggagcagggaccatctctctttcttgcactacaggcactcaataaatacttgtggctgtgaa

SEQ ID NO: 298871 - DNA, 1375 bp, Homo sapiens
tttcttagagatttcaattgcttttaaaagtttgggaagccctctctttggttctttaatgtcttaattttgagaacctgacttttattttactttgaaaggctactacttttagaatattttacttccatgagctctgccaagcttccccacctgtgctcagtggcacagtatgggtttgtgggattacaggcgtgagccactgcgcccagccttgaggtagcatactttctgaaataaaaaagtagattatgtccgaagcagttgacctaaaaactgccttggactgacatttgttaggtggtctaagatgttctcttcacgctttgcaaaaaaatgagcttttttggagtttaaattaagcatccctctggtgtgtttggttttttagccaccaaaaatttaacaaatttgataacctgtcacgtgtaagttcagaaagcactttggtcttaattggtgacttgggggttatttggtataaatataggttctttttctaaaaattattgccagtatcctccaaataattgccccttcaaatgtttcatctaaaggtgacagcttgtgggcagaaccatgcacaggaagtgcctgccagtgggtgttaggagatgtaggtggagtctgtgatagccaaccaaaagctatccccttctcgcccagaaaagccacgtgctttgctggacgctacttgaaatctgaactctgcacctacatatgtagtaaaattagagacttttgtcactttaatttttagattatctcaagttttcactagatttcaatgtgccacttgtgctatgagtctttaagaagctttaaaaaataaatgcacacctgtagccttttaccattcagacaggtagattatatttacctgtcatgagggaccatgtatggttgacagttgcaggtttgattaaatccactatattgcacaaattttgctggaaataatttcctgccctgccaagagctctatggtagtttgataataaactactaccccagtattcttaggaactgtgttactaagtcttttctgcctgatttgtactttatttccatagacccctcagatatgtgaggaatcaagccataaatgtgcatttgctggacattatgtaccatgtcatctctatgactacagatttcaaggataatttttacatctaacaatttcactgtaacagtgaccgataatgtgagaaatgtgctttttacagtgctgctggtgggtagacaagtgcttgctgcagttgtttctgaatctagccagatgctggagtcgtgaagctgtaagctccgcgggagcagggaccatctctctttcttgcactacaggcactcaataaatacttgtggctgtgaa

SEQ ID NO: 298872 - DNA, 4091 bp, Homo sapiens
  misc_feature (2794)..(2794): n is a, c, g, or t
acatagatgttcccaaaggacagtatgtagcacctgcggtgccggctgagtcacttgtagatggtgtgaaaaatgagaatttttatatacagactcctgaagagtgtcatgtgtctttaaaggaagatgtatccatttctcctggtgaatttgaacataattttcttggtgaaaataaggtttctgaagtatacagtgggaaaacaaatagtaatgctataacatcatgggcacaaaaactgaagcagaaccaaccaaagagagcacatgtagaagatggaggttcaagatctaaacaaggaaatgagcaaagtaagaagacaccaattgagaaatctgattttgctgctgctacacatcctcgtgctttttacctcagtaaaccagatgaaactccaaatgcttggatgtctgattcaggaacaggattgacttactggaaactagaggaaaaggatatgcaccactctttgcctgaaactttagagaagacgttcatatcattgtcttccacagatgtgtcaccaaaccagtctaatactagtaatgagatgaagctaccgtcactgaaggatatttattataaaaaacaaagggaaaacaagcagttacctgagaggaatctcacttctgcttccaacccaaatcatccaccagaggtcctgactctagatcctacgttacacatgaagccaaagcagcagatttcagggattcaacctcacggccttccgaatgcccttgatgacagaatatccttttccccggactctgttctagagcctagtatgtctagtccctctgacatagactcattttcacaagcaagtaatgtcacttctcagttacctggatttccaaaatatccctcacacacaaaagcttctccggtggactcttggaaaaatcagacattccaaaacgaaagtaggaccagttccacgtttccgtcagtatataccattactagtaatgatatctcggtcaacactgtagatgaagaaaacactgtcatggttgcttcggcctcagtcagtcagtcccagcttccaggtacagccaacagtgtcccagaatgcatttcattgacttccttggaagatcctgtgatattgtctaagattaggcagaatctgaaggaaaagcatgctcgacacatagcagatcttcgagcttattatgaatcagaaataaatagtttgaaacagaagctggaggcaaaagaaatctctggagttgaagattggaagataaccaatcaaattcttgtagacagatgtggccaattagatagtgctttgcatgaagctactagtcgcgtgagaacacttgaaaataagaataacttactggaaattgaagtgaatgatttgagagaacgcttcagtgcagccagcagtgcttccaaaattttgcaggaacgaattgaagaaatgagaacaagcagtaaagaaaaagacaataccatcattcgactaaaatctagactgcaagatttagaagaagcatttgagaatgcttacaaactctcagatgataaagaagctcaactaaaacaagagaacaaaatgtttcaagatcttttaggagagtatgagtcccttggaaaagaacacaggagagtaaaggatgcattaaatacaactgagaataaattgcttgatgcatatactcagatttctgatttgaaaagaatgatttcaaaacttgaagctcaggtcaagcaagtagaacatgaaaatatgttaagccttcgtcataattctagaattcacgtgagaccctcgcgtgccaacacactagcaacttcagacgtcagcaggcggaaatggctgattccaggtgcagagtattccatctttactggccagcctctggacacccaggacagtaacgtggataaccagctggaggaaacctgtagcctagggcaccgttcacctctggaaaaggattcttcacctggaagttcatcaacaagcttgttgataaaaaagcaaagagagacttcagacacgccgatcatgagagctttaaaagaacttgatgagggaaaaatatttaaaaattgggggacacagacagagaaagaggacacctcaaatataaatcctcggcaaactgaaacttcagttaatgcaagtcgttctccagaaaagtgtgcccaacagagacaaaagagacttaattcggcctcacagagatcatcatctttaccaccttcaaatcgtaaatcaagtactccaacaaaaagagagattatgctaacaccagtgactgtggcttatagtccaaagcgatcccctaaagaaaacttgtccccaggatttagtcatctgcttagcaaaaatgagagcagtccaattcgatttgatatacttttggatgatttagatactgttcctgtgtctacattacaacgtaccaatccaagaaagcaactccagtttcttcctctagatgactcggaagaaaaaacttattctgagaaagccaccgataaccatgttaatcatagctcttgccctgaaccggtgccaaatggagtgaagaaagtatctgtgagaacagcctgggagaagaataaatcagttagctatgaacagtgtaagccggtttcagtcactccacaggggaatgattttgaatatacagcaaaaattcggaccctagctgaaacagaacgattttttgatgaacttacaaaagaaaaggaccagattgaggcagcactaagcaggatgccttctcctggaggacgaatcactttacagacaagattaaatcaggtganatgtcttagcttgaatctgctttagaggcttgatgccagtcagtgttccagttatctaagaggggtttaaaaaatcatggcacagtgaaaattagacacactgaagcagcagtcaaaacttttagcttttacgggaagtgtttgattatagcaattttataactgcaagctagctttcaggaataaaaattgattttacctttagacttagagaagaaggtgttcatgcccttgtattttcaagaaactaacttgagagcaaatggcaatatgcttttcaacagattttacactaagttagtgctcacagattgcctctctttttgtttgatttctccctcctcaaatctgtaatttatttctgaactcctttccattagcaagcagataaaatggttacactttggaaactgaatagctgtagaggttcaaaaagtgagccgtaggccgggcgcaggggctcacgcctataatcccagcactttgggaggctgaggctggtgtatcacctgaggtcaggagttccagccactgtgcccagcccccaacttctttttttctgactttgtctttttgttctgataaatattagtcaataatttataggccgggcgtggtggctcatgccggtaatcccagcactttgggaggctgatgcaggcgggtcacctgaggtcaggagttcgagaccagcctggcccacatggtgaaaccccgtctctactaaagtacaaaaattagccgggcatggtgtgggggtgggcgcctgtaattccagctactcgggaggctgaggcaggagaattgctcgaacctggaaggtggaggttgcagtgagccaagatggtgccactgcactccagcctgggtaatagagcaagactcagtcttaaaaaaaaaaataaataaactttcaattgaacttttcatgttatgaaatatctttctataacatccttttaaattaacgtacaatattccatcagcagtaacgtatttaaccaagaatgttttagtagaaatttgggttgcttctaattttggatatcataaataaggctgcaataaagttcttaaacatatctctttgcacgtgtaagtattgccttaggagtcattcccagaaataaaaatgctaggtccaaagaaatgcaaatttctaaggatttggatatatgtcaagttgtaacccaggatgtttgagacaatttctactcctacctgccgtgtatgaagataagctcttccccatcctgaaacctgtatgtttgggaaaacaacaacaacaaaaaaaaca

SEQ ID NO: 298873 - DNA, 1272 bp, Homo sapiens
acatagatgttcccaaaggacagtatgtagcacctgcggtgccggctgagtcacttgtagatggtgtgaaaaatgagaatttttatatacagactcctgaagagtgtcatgtgtctttaaaggaagatgtatccatttctcctggtgaatttgaacataattttcttggtgaaaataaggtttctgaagtatacagtgggaaaacaaatagtaatgctataacatcatgggcacaaaaactgaagcagaaccaaccaaagagagcacatgtagaagatggaggttcaagatctaaacaaggaaatgagcaaagtaagaagacaccaattgagaaatctgattttgctgctgctacacatcctcgtgctttttacctcagtaaaccagatgaaactccaaatgcttggatgtctgattcaggaacaggattgacttactggaaactagaggaaaaggatatgcaccactctttgcctgaaactttagagaagacgttcatatcattgtcttccacagatgtgtcaccaaaccagtctaatactagtaatgagatgaagctaccgtcactgaaggatatttattataaaaaacaaagggaaaacaagcagttacctgagaggaatctcacttctgcttccaacccaaatcatccaccagaggtcctgactctagatcctacgttacacatgaagccaaagcagcagatttcagggattcaacctcacggccttccgaatgcccttgatgacagaatatccttttccccggactctgttctagagcctagtatgtctagtccctctgacatagactcattttcacaagcaagtaatgtcacttctcagttacctggatttccaaaatatccctcacacacaaaagcttctccggtggactcttggaaaaatcagacattccaaaacgaaagtaggaccagttccacgtttccgtcagtatataccattactagtaatgatatctcggtcaacactgtagatgaagaaaacactgtcatggttgcttcggcctcagtcagtcagtcccagcttccaggtacagccaacagtgtcccagaatgcatttcattgacttccttggaagatcctgtgatattgtctaagtatgtatttcagtgaatggcttgtaatgttaatagattttctgtgatatctgattgaaaatgatctttattgaacttcagtattgcataaagtcttagagatttagcatttttaagatggagcatataaaaactttttcacttgattgtta

SEQ ID NO: 298874 - DNA, 1780 bp, Homo sapiens
acatagatgttcccaaaggacagtatgtagcacctgcggtgccggctgagtcacttgtagatggtgtgaaaaatgagaatttttatatacagactcctgaagagtgtcatgtgtctttaaaggaagatgtatccatttctcctggtgaatttgaacataattttcttggtgaaaataaggtttctgaagtatacagtgggaaaacaaatagtaatgctataacatcatgggcacaaaaactgaagcagaaccaaccaaagagagcacatgtagaagatggaggttcaagatctaaacaaggaaatgagcaaagtaagaagacaccaattgagaaatctgattttgctgctgctacacatcctcgtgctttttacctcagtaaaccagatgaaactccaaatgcttggatgtctgattcaggaacaggattgacttactggaaactagaggaaaaggatatgcaccactctttgcctgaaactttagagaagacgttcatatcattgtcttccacagatgtgtcaccaaaccagtctaatactagtaatgagatgaagctaccgtcactgaaggatatttattataaaaaacaaagggaaaacaagcagttacctgagaggaatctcacttctgcttccaacccaaatcatccaccagaggtcctgactctagatcctacgttacacatgaagccaaagcagcagatttcagggattcaacctcacggccttccgaatgcccttgatgacagaatatccttttccccggactctgttctagagcctagtatgtctagtccctctgacatagactcattttcacaagcaagtaatgtcacttctcagttacctggatttccaaaatatccctcacacacaaaagcttctccggtggactcttggaaaaatcagacattccaaaacgaaagtaggaccagttccacgtttccgtcagtatataccattactagtaatgatatctcggtcaacactgtagatgaagaaaacactgtcatggttgcttcggcctcagtcagtcagtcccagcttccaggattaggcagaatctgaaggaaaagcatgctcgacacatagcagatcttcgagcttattatgaatcagaaataaatagtttgaaacagaagctggaggcaaaagaaatctctggagttgaagattggaagataaccaatcaaattcttgtagacagatgtggccaattagatagtgctttgcatgaagctactagtcgcgtgagaacacttgaaaataagaataacttactggaaattgaagtgaatgatttgagagaacgcttcagtgcagccagcagtgcttccaaaattttgcaggaacgaattgaagaaatgagaacaagcagtaaagaaaaagacaataccatcattcgactaaaatctagactgcaagatttagaagaagcatttgagaatgcttacaaactctcagatgataaagaagctcaactaaaacaagagaacaaaatgtttcaagatgtaagtagcgaataatagtaacttaatgacgtgattggctaaaagtaatttaggtattatactcttacaagtgattatgactttctaggcttattttattatttattgatttattttgagacagagtctcgctctgacacccaggctggagtgcagtggcaggagctcaactcactgcagcctccacctcccgggctcaggagatcttctcgcctcagcctcccaagtagctggaattacaggagcccaccactgctggccggctaa

SEQ ID NO: 298875 - DNA, 1106 bp, Homo sapiens
  misc_feature (1041)..(1041): n is a, c, g, or t
  misc_feature (1068)..(1068): n is a, c, g, or t
acatagatgttcccaaaggacagtatgtagcacctgcggtgccggctgagtcacttgtagatggtgtgaaaaatgagaatttttatatacagactcctgaagagtgtcatgtgtctttaaaggaagatgtatccatttctcctggtgaatttgaacataattttcttggtgaaaataaggtttctgaagtatacagtgggaaaacaaatagtaatgctataacatcatgggcacaaaaactgaagcagaaccaaccaaagagagcacatgtagaagatggaggttcaagatctaaacaaggaaatgagcaaagtaagaagacaccaattgagaaatctgattttgctgctgctacacatcctcgtgctttttacctcagtaaaccagatgaaactccaaatgcttggatgtctgattcaggaacaggattgacttactggaaactagaggaaaaggatatgcaccactctttgcctgaaactttagagaagacgttcatatcattgtcttccacagatgtgtcaccaaaccagtctaatactagtaatgagatgaagctaccgtcactgaaggatatttattataaaaaacaaagggaaaacaagcagttacctgagaggaatctcacttctgcttccaacccaaatcatccaccagaggtaaagttgtccacattctgccgagtgaacgtgaacaatgcttcctgactctaacttttacctcaagcttcattttccctaggagatctaaagcctactcacttcaaaacaagcaaaacaaagccgagttctgagggtaagacttcgttgttgtctggtttccaggtcctgactctagatcctacgtaggctgcagacaccatgaaataatttaagcccaaagttttaatgtttagagcctagacctctctgcaacatttttagtgtagtgaggtcctgatttcaatttttcgaaattagggtcctatcttctgttttttgagacagagttttgctctgtcgcccaggctagagcagagatggagttttgcccttgttgcantgagctgagatctgccactgcactccngcctgggtgacagagcaagactccctcaaaacccataa

SEQ ID NO: 298876 - DNA, 380 bp, Homo sapiens
attggtcctcaggagcttcattgtagtgtgtaggtttgtcttccaagctgctgatacctatttggccaattttgagctcatgagcagggaatgacagtctgtcacaaccacaacttggcccaaagcaatagcaattataaaatgccattaattacaagaggcatccctactttagagatgttaacatgacaagaacataaaagtggtgaaaagtggtacttttctattcccatgagctttgagtagaataaccccaactattcccccagaccaccaggctgtggccatagctggagtaatgctactcttcacaggcttcaggtcttgaaaaggcttctttaggttattggcatgtaaagaatgaattctacagcaggatt

SEQ ID NO: 298877 - DNA, 493 bp, Homo sapiens
ttcatttatgtttacatgaagtttgcttaagttcattaagggaagttgcaaagattgtcaaacagagggcaaagctttcagaattctttggagaaaaaagcactgagtaaataagattgattattgtatctcttttcattacttttttgggccacatagcagctatatccagaaagtgaaattgggcaacatatttaatatatgtgcaacctacacgaaaaattgataagaaatataagcaatttctctcctctctgacagaaaaaacttattctgagaaagccaccgataaccatgttaatcatagctcttgccctgaaccggtgccaaatggagtgaagaaagtatctgtgagaacagcctgggagaagaataaatcagttagctatgaacagtgtaagccggtttcagtcactccacaggggaatgattttgaatatacagcaaaaattcggaccctagctgaaacagaacgattttttgatgaacttac

SEQ ID NO: 298878 - DNA, 638 bp, Homo sapiens
ctcagtctagcttgtcagagtagcctcaataccggctatagaacctgctttatatatgctgagcgttcaataagttcttgatgaaaaagtaatagaagatatttcttgtgcctctcagttctgtcatcagttggttccgttccatttgtttctctcacagtcgggggtgatatgtgtgtgcacgcctacctcagcgggcagcccttggaggaatcacagctgagcatgctggcctgcttcctcgtctaccactctgtgccagctccacagcacctgccacctataggactagaagggagcacaagctttgctgaactgctcttcaaatttaagcagctaaaaatgccagtgcgagctttgctgagattggctcctttgcttcttggaaatccacagccaatggtgatgtgaccgtgtctggcggtgaacctaccctgaaacgtgacttctgcacaacaaacgtgaccaaacatcaaagctaaagcaatgtttataaagttttatggtataactagggggaaatgagctgcacaaacctcaatgtattttaaatctgttgctgtcatcattaacggtatatgacatataaaagcaagttaaaatttacttttgtaaataaagtttttggtttgtttcca

SEQ ID NO: 298879 - DNA, 2032 bp, Homo sapiens
aacataaatcaccaagttatcaaatcaaagaaggagataccataaatgtggatgtgacttgtccaggtgctactctagctttggctatgatctacttaaaaaccaataacagatctattgcagattggctccgagcccctgacaccatgtatttgttggactttgtgaagccagaatttctcttgcttaggacacttgctcgatgcctgattttgtgggatgatattttaccaaattccaagtgggttgacagcaatgttcctcaaattataagagaaaatagtatctctctcagtgaaatcgaattgccgtgctcagaggatttgaatttggaaactttgtcccaagcacatgtctacataattgcaggagcctgcttgtctctgggttttcgatttgctggctcagaaaacttatcagcatttaactgtttgcataaatttgccaaagattttatgacttatttgtccgcacctaatgcttctgttacaggtcctcataacctagaaacttgtctgagcgtggtgctgctgtctctcgccatggtcatggctggctcaggaaacctaaaggttttgcagctttgtcgcttcttacacatgaaaacgggtggtgaaatgaactatggttttcacttagcccaccacatggcccttggacttctatttttgggaggaggaaggtactctttgagcacatcaaattcttccattgccgctcttctctgtgccctttatccgcacttcccagctcacagcactgacaaccggtatcatctccaggctctccggcacctctatgtgctggccgcggagcccaggcttctagtgcctgtggatgtggacacaaacacgccctgctatgccctcttagaagttacctacaagggcactcagtggtatgaacaaaccaaagaagaattgatggctcctacccttcttccagaactccatcttttaaagcagattaaagtaaaaggcccaagatactgggaactgctcatagatttaagcaaaggaacacaacacttgaagtccatcctttccaaggatggggttttatatgttaaactccgggcgggtcagctctcctacaaagaagatccaatgggatggcaaagtttgttggctcagactgttgctaacaggaactctgaagcccgggctttcaagccagaaacaatctcagcattcacttctgatccagcacttctgtcatttgctgaatatttctgcaagccaactgtgaacatgggtcagaaacaggaaattctggatctcttttcttcagtactctatgaatgtgttacccaggagaccccagagatgttgcctgcatacatagcaatggatcaggctataagaagacttgggagaagagaaatgtctgagacttctgaactttggcagataaagttggtgttagagtttttcagctcccgaagccatcaggagcggctgcagaaccaccctaagcgggggctctttatgaactcggaattcctccctgttgtgaagtgcaccattgataataccctggaccagtggctacaagtcgggggtgatatgtgtgtgcacgcctacctcagcgggcagcccttggaggaatcacagctgagcatgctggcctgcttcctcgtctaccactctgtgccagctccacagcacctgccacctataggactagaagggagcacaagctttgctgaactgctcttcaaatttaagcagctaaaaatgccagtgcgagctttgctgagattggctcctttgcttcttggaaatccacagccaatggtgatgtgaccgtgtctggcggtgaacctaccctgaaacgtgacttctgcacaacaaacgtgaccaaacatcaaagctaaagcaatgtttataaagttttatggtataactagggggaaatgagctgcacaaacctcaatgtattttaaatctgttgctgtcatcattaacggtatatgacatataaaagcaagttaaaatttacttttgtaaataaagtttttggtttgtttcca

SEQ ID NO: 298880 - DNA, 3464 bp, Homo sapiens
aacataaatcaccaagttatcaaatcaaagaaggagataccataaatgtggatgtgacttgtccaggtgctactctagctttggctatgatctacttaaaaaccaataacagatctattgcagattggctccgagcccctgacaccatgtatttgttggactttgtgaagccagaatttctcttgcttaggacacttgctcgatgcctgattttgtgggatgatattttaccaaattccaagtgggttgacagcaatgttcctcaaattataagagaaaatagtatctctctcagtgaaatcgaattgccgtgctcagaggatttgaatttggaaactttgtcccaagcacatgtctacataattgcaggagcctgcttgtctctgggttttcgatttgctggctcagaaaacttatcagcatttaactgtttgcataaatttgccaaagattttatgacttatttgtccgcacctaatgcttctgttacaggtcctcataacctagaaacttgtctgagcgtggtgctgctgtctctcgccatggtcatggctggctcaggaaacctaaaggttttgcagctttgtcgcttcttacacatgaaaacgggtggtgaaatgaactatggttttcacttagcccaccacatggcccttggacttctatttttgggaggaggaaggtactctttgagcacatcaaattcttccattgccgctcttctctgtgccctttatccgcacttcccagctcacagcactgacaaccggtatcatctccaggctctccggcacctctatgtgctggccgcggagcccaggcttctagtgcctgtggatgtggacacaaacacgccctgctatgccctcttagaagttacctacaagggcactcagtggtatgaacaaaccaaagaagaattgatggctcctacccttcttccagaactccatcttttaaagcagattaaagtaaaaggcccaagatactgggaactgctcatagatttaagcaaaggaacacaacacttgaagtccatcctttccaaggatggggttttatatgttaaactccgggcgggtcagctctcctacaaagaagatccaatgggatggcaaagtttgttggctcagactgttgctaacaggaactctgaagcccgggctttcaagccagaaacaatctcagcattcacttctgatccagcacttctgtcatttgctgaatatttctgcaagccaactgtgaacatgggtcagaaacaggaaattctggatctcttttcttcagtactctatgaatgtgttacccaggagaccccagagatgttgcctgcatacatagcaatggatcaggctataagaagacttgggagaagagaaatgtctgagacttctgaactttggcagataaagttggtgttagagtttttcagctcccgaagccatcaggagcggctgcagaaccaccctaagcgggggctctttatgaactcggaattcctccctgttgtgaagtgcaccattgataataccctggaccagtggctacaagtcgggggtgatatgtgtgtgcacgcctacctcagcgggcagcccttggaggaatcacagctgagcatgctggcctgcttcctcgtctaccactctgtgccagctccacagcacctgccacctataggactagaagggagcacaagctttgctgaactgctcttcaaatttaagcagctaaaaatgccagtgcgagctttgctgagattggctcctttgcttcttggaaatccacagccaatggtgatgtgaccgtgtctggcggtgaacctaccctgaaacgtgacttctgcacaacaaacgtgaccaaacatcaaagctaaagcaatgtttataaagttttatggtataactagggggaaatgagctgcacaaacctcaatgtattttaaatctgttgctgtcatcattaacggtatatgacatataaaagcaagttaaaatttacttttgtaaataaagtttttggtttgtttccaaaaaaaatgatgattgctttagttttggacttagagaatagagcaggggttgctggagtgaatattgatttttaaagtctttgaactgtggtggtataggtgaagtgactatgcccaaaaatgccaagttttaaaagaagctatgtcataaagttttactttctgtggcaaaagagcgctttagcatttcctcagatgtcacagttgtcctgtctaaaataagtttgtacttctggtgacaatgccagacactcttatgatgtgatcaccttaaacaggagaaggagatttttgccctcagttgctcaacatgaagtactgtggactgaattgtgtcctcccagaattatatattgaggccctaatccctgtgtgactgtattaggcaatagggcatataggagattactaaggttaagtgaggtcatcataagggtggggccttaattcagtagaattggtggcctcctaagcagaggaagagagatttttctttctctctctgccatgtgaagacagtgaggagtcggccgtctgcaagccaagaagagcccttatcaggaacagacttggctagcaccttcatcgtggacctccagcctccagaattgcaagaaaatacatttccgtcgttgaaaccacccagtctgtggtattttgttatggcagcccaggcagactaatacgtgaagcctgctctaaatagataaaataagaaattactacagagggctctttagaaattgtatttaaaaacaagacaatccatatttacctaagatttacagaatgtatgtctataaaaggagggatttctggactagatgatgatgaaaaatgttcatataaaggcacctccagcttcgagttgccaacacaggaggaagaatgctccctgctgttcagatgctgatatgtgtcctgtgcttcctggatggccagtgggatcataagctggtagaagcaagaccttcatccactgacttcatatttcttccacatcctgaactgtggtgtttgactttaaaaataaattaaagcaaatagaaatgtttccattgagattttggcaaaaacccacatgacatttgcgtctgcagagtagacttggaaggcatgcacctggaggccaagtggtattctctggactctctgtccttgcatttgcgtggctgccccgaggactcgcttcttcctggatgtgaagcagaggcacgatggggctgactgagaggctgaaatgtgcttctcttcacagttacatagttttcttctaattaaaaataaattttaagtggtagattatgaaaattccatttgaatcaagattttaaaaattcaatatcaaaccagttgttactgtcttcactctccgttgtttacgattgtgtgcttttcctgaataaagaatgactggagagacaaaaaaaaa

SEQ ID NO: 298881 - DNA, 1615 bp, Homo sapiens
cggacgcgtgggtcgactgtcggcaagagattttatgacttatttgtccgcgagcctaactgcgttctgttacaggtcctcataacctagaaacttgtctgagcgtggtgctgctgtctctcgccatggtcatggctggctcaggaaacctaaaggttttgcagctttgtcgcttcttacacatgaaaacgggtggtgaaatgaactatggttttcacttagcccaccacatggcccttggacttctatttttgggaggaggaaggtactctttgagcacatcaaattcttccattgccgctcttctctgtgccctttatccgcacttcccagctcacagcactgacaaccggtatcatctccaggctctccggcacctctatgtgctggccgcggagcccaggcttctagtgcctgtggatgtggacacaaacacgccctgctatgccctcttagaagttacctacaagggcactcagtggtatgaacaaaccaaagaagaattgatggctcctacccttcttccagaactccatcttttaaagcagattaaagtaaaaggcccaagatactgggaactgctcatagatttaagcaaaggaacacaacacttgaagtccatcctttccaaggatggggttttatatgttaaactccgggcgggtcagctctcctacaaagaagatccaatgggatggcaaagtttgttggctcagactgttgctaacaggaactctgaagcccgggctttcaagccagaaacaatctcagcattcacttctgatccagcacttctgtcatttgctgaatatttctgcaagccaactgtgaacatgggtcagaaacaggaaattctggatctcttttcttcagtactctatgaatgtgttacccaggagaccccagagatgttgcctgcatacatagcaatggatcaggctataagaagacttgggagaagagaaatgtctgagacttctgaactttggcagataaagttggtgttagagtttttcagctcccgaagccatcaggagcggctgcagaaccaccctaagcgggggctctttatgaactcggaattcctccctgttgtgaagtgcaccattgataataccctggaccagtggctacaagtcgggggtgatatgtgtgtgcacgcctacctcagcgggcagcccttggaggaatcacagctgagcatgctggcctgcttcctcgtctaccactctgtgccagctccacagcacctgccacctataggactagaagggagcacaagctttgctgaactgctcttcaaatttaagcagctaaaaatgccagtgcgagctttgctgagattggctcctttgcttcttggaaatccacagccaatggtgatgtgaccgtgtctggcggtgaacctaccctgaaacgtgacttctgcacaacaaacgtgaccaaacatcaaagctaaagcaatgtttataaagttttatggtataactagggggaaatgagctgcacaaacctcaatgtattttaaatctgttgctgtcatcattaacggtatatgacatataaaagcaagttaaaatttacttttgtaaataaagtttttggtttgtttcca

SEQ ID NO: 298882 - DNA, 1836 bp, Homo sapiens
aacataaatcaccaagttatcaaatcaaagaaggagataccataaatgtggatgtgacttgtccaggtgctactctagctttggctatgatctacttaaaaaccaataacagatctattgcagattggctccgagcccctgacaccatgtatttgttggactttgtgaagccagaatttctcttgcttaggacacttgctcgatgcctgattttgtgggatgatattttaccaaattccaagtgggttgacagcaatgttcctcaaattataagagaaaatagtatctctctcagtgaaatcgaattgccgtgctcagaggatttgaatttggaaactttgtcccaagcacatgtctacataattgcaggagcctgcttgtctctgggttttcgatttgctggctcagaaaacttatcagcatttaactgtttgcataaatttgccaaagattttatgacttatttgtccgcacctaatgcttctgttacaggtcctcataacctagaaacttgtctgagcgtggtgctgctgtctctcgccatggtcatggctggctcaggaaacctaaaggttttgcagctttgtcgcttcttacacatgaaaacgggtggtgaaatgaactatggttttcacttagcccaccacatggcccttggacttctatttttgggaggaggaaggtactctttgagcacatcaaattcttccattgccgctcttctctgtgccctttatccgcacttcccagctcacagcactgacaaccggtatcatctccaggctctccggcacctctatgtgctggccgcggagcccaggcttctagtgcctgtggatgtggacacaaacacgccctgctatgccctcttagaagttacctacaagggcactcagtggtatgaacaaaccaaagaagaattgatggctcctacccttcttccagaactccatcttttaaagcagattaaagtaaaaggcccaagatactgggaactgctcatagatttaagcaaaggaacacaacacttgaagtccatcctttccaaggatggggttttatatgttaaactccgggcgggtcagctctcctacaaagaagatccaatgggatggcaaagtttgttggctcagactgttgctaacaggaactctgaagcccgggctttcaagccagaaacaatctcagcattcacttctgatccagcacttctgtcatttgctgaatatttctgcaagccaactgtgaacatgggtcagaaacaggaaattctggatctcttttcttcagtactctatgaatgtgttacccaggagaccccagagatgttgcctgcatacatagcaatggatcaggctataagaagacttgggagaagagaaatgtctgagacttctgaactttggcagataaagttggtgttagagtttttcagctcccgaagccatcaggagcggctgcagaaccaccctaagcgggggctctttatgaactcggaattcctccctgttgtgaagtgcaccattgataataccctggaccagtggctacaagtcgggggtgatatgtgtgtgcacgcctacctcagcgggcagcccttggaggaatcacagctgagcatgctggcctgcttcctcgtctaccactctgtgccagctccacagcacctgccacctataggactagaaggtcttctgaaggacctagcaggagactcaggttgaaaccctacagaacctcgccgtgtgccgccgagtcttccttgaataaggccattttctcaccctttgtctagtaactagctgactccacagctcatggtaaggggcatgtctc

SEQ ID NO: 298883 - DNA, 110 bp, Homo sapiens
cctcacattaaagtgggtttatgaccatgaacacttcgtattaataaatgtctcagcacacccaagcctgaaaatctgatctaaacctccttaacttgaattccatccac

SEQ ID NO: 298884 - DNA, 5764 bp, Homo sapiens
ctcccgcttctcctcctcctcctccacagttgcctgccctgggcgggggcgagcgcgtccggtttgctggaagcgttcggaaatggcaacttgcgcggtggaggtgttcgggctcctggaggacgaggaaaattcacgaattgtgagagtaagagttatagccggaataggccttgccaagaaggatatattgggagctagtgatccttacgtgagagtgacgttatatgacccaatgaatggagttcttacaagtgtgcaaacaaaaaccattaaaaagagtttgaatccaaagtggaatgaagaaatattattcagagttcatcctcagcagcaccggcttctttttgaagtgtttgacgaaaaccgattgacaagagatgatttcctaggtcaagtggatgttccactttatccattaccgacagaaaatccaagattggagagaccatatacatttaaggattttgttcttcatccaagaagtcacaaatcaagagttaaaggttatctgagactaaaaatgacttatttacctaaaaccagtggctcagaagatgataatgcagaacaggctgaggaattagagcctggctgggttgttttggaccaaccagatgctgcttgccatttgcagcaacaacaagaaccttctcctctacctccagggtgggaagagaggcaggatatccttggaaggacctattatgtaaaccatgaatctagaagaacacagtggaaaagaccaacccctcaggacaacctaacagatgctgagaatggcaacattcaactgcaagcacaacgtgcatttaccaccaggcggcagatatccgaggaaacagaaagtgttgacaaccaagagtcttccgagaactgggaaattataagagaagatgaagccaccatgtatagcagccaggccttcccatcacctccaccgtcaagtaacttggatgttccaactcatcttgcagaagaattgaatgccagactcaccatttttggaaattcagccgtgagccagccagcatcgagctcaaatcattccagcagaagaggcagcttacaagcctatacttttgaggaacaacctacacttcctgtgcttttgcctacttcatctggattaccaccaggttgggaagaaaaacaagatgaaagaggaagatcatattatgtagatcacaattccagaacgactacttggacaaagcccactgtacaggccacagtggagaccagtcagctgacctcaagccagagttctgcaggccctcaatcacaagcctccaccagtgattcaggccagcaggtgacccagccatctgaaattgagcaaggattccttcctaaaggctgggaagtccggcatgcaccaaatgggaggcctttctttattgaccacaacactaaaaccaccacctgggaagatccaagattgaaaattccagcccatctgagaggaaagacatcacttgatacttccaatgatctagggcctttacctccaggatgggaagagagaactcacacagatggaagaatcttctacataaatcacaatataaaaagaacacaatgggaagatcctcggttggagaatgtagcaataactggaccagcagtgccctactccagggattacaaaagaaagtatgagttcttccgaagaaagttgaagaagcagaatgacattccaaacaaatttgaaatgaaacttcgccgagcaactgttcttgaagactcttaccggagaattatgggtgtcaagagagcagacttcctgaaggctcgactgtggattgagtttgatggtgaaaagggattggattatggaggagttgccagagaatggttcttcctgatctcaaaggaaatgtttaacccttattatgggttgtttgaatattctgctacggacaattataccctacagataaatccaaactctggattgtgtaacgaagatcacctctcttacttcaagtttattggtcgggtagctggaatggcagtttatcatggcaaactgttggatggttttttcatccgcccattttacaagatgatgcttcacaaaccaataacccttcatgatatggaatctgtggatagtgaatattacaattccctaagatggattcttgaaaatgacccaacagaattggacctcaggtttatcatagatgaagaactttttggacagacacatcaacatgagctgaaaaatggtggatcagaaatagttgtcaccaataagaacaaaaaggaatatatttatcttgtaatacaatggcgatttgtaaaccgaatccagaagcaaatggctgcttttaaagagggattctttgaactaataccacaggatctcatcaaaatttttgatgaaaatgaactagagcttcttatgtgtggactgggagatgttgatgtgaatgactggagggaacatacaaagtataaaaatggctacagtgcaaatcatcaggttatacagtggttttggaaggctgttttaatgatggattcagaaaaaagaataagattacttcagtttgtcactggcacatctcgggtgcctatgaatggatttgctgaactatacggttcaaatggaccacagtcatttacagttgaacagtggggtactcctgaaaagctgccaagagctcatacctgttttaatcgcctggacttgccaccttatgaatcatttgaagaattatgggataaacttcagatggcaattgaaaacacccagggctttgatggagttgattagattacaaataacaatctgtagtgtttttactgccatagttttataaccaaaatcttgacttaaaattttccggggaactactaaaatgtggccactgagtcttcccagatcttgaagaaaatcatataaaaagcatttgaagaaatagtacgacaacttatttttaatcacttttaaataatgtgttgcatttacacagttgtttcattctgtctttagagttaggtgcctgcctaaagccaggcaccaccacacctggctttagagttcacacaataggatataagtcctgtatgacttaaatagtgaattttgtccttaacatttacctcttgtatagtatctgccaggcagttttttcttaaactactgagatgataactgtgaaatatttgtgatacgtgtcatgtgtgaaaagtttgatgcattttgagatggaaaactgaaatttggaaaaagaaatactttactattgagtaaactacaatatatttagtgctactcgcagctatttattattttgtagacctgccttatgcaccttactgcctagatttttgggaaaaaactttggaaagtgtgttacctatatttctagccaactaactcacagaaaaactgtttacttcttcactttcgaagtatttggcttttgttaatatgcagttttactaaacagatggttcataagacatgtgaagcaaattcatatttgcaatgggtaaaaagtattaaagcctttctcttgcctgcatatcctattgaccattggtatagtcatcactttttcatattttagtgtagttagaagaattccttcttcaaacattaaagatccacaaagcagtatttctaaatatgccttgaagaactaaatgaagtgtatagcacttgcctttactagatattctttacacttgtacaattatgtagtaaatgtatgtttacagggtttatcatgtttacagattaagctaatttctgtagtcgcatttttatatttttagtatcactctagtaaaaaaaccaaataatttgtttaaaataaccaaagagttgttataatgcataatttgtattaaatttattactatttcttatgccttttaaaatactgtttactatgaagacaatgtttttaattacaaatccagaattctgtaggcaaaatgctacagttcatatcttcctttaaccaaactgaagtacataaagaccatgtacatgtattcatcaaacgtttattgaatgctgcgtgcctagcgctgtgctatgctctggggtaagagttgtcagcttcagagaagctgagtcctgatcctcaaggaacttgcaaatgtgtctatgaatttgtaaaacaatcaaaagtaggcgtaagcagaataaggcaaaagggaaagtgttctaggttccagcacacctgcaaagataaagtgtgccaagactgtatttatatttcatacttatattgtttcatccttatattggaatgattatatagaaaatgctcttaaaaagattaaacctatttctcagtatggtatcttggtgatttaggaataattgtaaatatatgttacgaatcttcttaaatatatatatatacacaccctgtgagaactgtaaaaagtacctctggttcttggtttaagtttgtggggtataacatgatgagtactcattagcacctgatagaaatctgaaatgtgacagtagcaaaaccactttctactttccaaacaccacagcatcagcatggtttaggggaagcaattcacagattaatgtaccctgcgttttgtcttcaccattgtcaaccagcagtcaaggatgagcaccaggtatagtcctggtttgatatctcaccagccatgtgaactgaagcagcttacttaacctctctggattcatatttcttcatctgtcaaatgagagtaatcatgcccaccctcattgtcatgccagattgtcagaagttccagacagatgagaaagcaaaaagtactttgtaaagtgttatacaatcagaaggtgctttgtgctgaccgtcagattgtgtcaagtcaggtgtgcaaattgaccacactcccaaagaatcatttaaaagtaaagtgacttctaagagacaaggaagtaggaacatttctgatattaaatatataaataatatggatacacatgtgtatatctgtatatggatcttaccatcataattcattttcttcatatcagcaaagtaatagtaatgtgggccaatgcattttggaaatgtcctcattatgtagaatggaatgtgaaaattatttttgttaaaacaggattttgccacaattatttaaatattatgtttgtgaactatctaagcatgagaaaatacaaagctttctttgtatctggctgatactcatttggatgattctgtgactcatagaacatgatgttaaatgagaccagactcaactgccaccagtccccagctgcagaccttcatccccttcatctcccactaggggctcgtggtctggaagaaacatgtatcaagcaacacagccccttatcccagatagaaaagtgtctcaaatgcattctactgcgggacagtcagtaggatcattttcataaagcaaggacatcatatgtttctagaaattacaagcatataactttagcctacaatctcttattaaaaatttttaacaaaattgtattacaaatgcatttcatcagaactcaaatttaaatggtgtttgttttgggtttttatttataatgctgaagttattccatataagtatcaagttaaacacaattcattttgattataaactatttgactttttaaaatcttctgacacagtaaatatatatatcaagattgatgtatcaaaatttattgcacactttaaagtgtaaaatcattttttaaaatcttgaatccacaaataaagttctattctgattttaaaaaacaaaaaaaaa

SEQ ID NO: 298885 - DNA, 942 bp, Homo sapiens
ctcccgcttctcctcctcctcctccacagttgcctgccctgggcgggggcgagcgcgtccggtttgctggaagcgttcggaaatggcaacttgcgcggtggaggtgttcgggctcctggaggacgaggtaggccctgctaattgcagatttctcatctcaccgccttccagcagagccagttgatcttaaagaaaatagtgccaaagaattggaaaaaactactttaaagttcatatggaaccaaaaaagagcccgcatcgccaagtcaatcctaagccaaaagaacaaagctggaggcatcacactacctgacttcaaactatactacaaggctacagtaaccaaaacagcatggtactggtaccaaaacagagatatagatcaatggaacagaacagagccctcagaaataatgccacatatctacaactatctgatctttgacaaacctgagaaaaacaagcaatggggaaaggattccctatttaataaatggtgctgggaaaactggctagccatatgtagaaagctgaaactggatcccttccttacaccttatacaaaaatcaattcaagatggattaaagatttaaacgttagacctaaaaccataaaaaccctagaagaaaacctaggcattaccattcaggacataggcgtgggcaaggacttcatgtccaaaacaccaaaagcaatggcaacaaaagccaaaattgacaaatgggatctaattaactaaagagcttctgcacagcaaaagaaactaccatcagagtgaacaggcaacctacaacatgggagaaaattttcgcaacctactcatctgacaaagggctaatatccagaatctacaatgaactcaaacaaatttacaagaaaaaaacaaacaaccccatcaaaaagtgggcgaaggacatgaacagacacttctcaaaagaaga

SEQ ID NO: 298886 - DNA, 4601 bp, Homo sapiens
catttcctaaagagcggggcaaaagaaatgaccagttagtggtgatccctgagaactgatcgttattccttttgatattatagcctgacagtgatagattttagaaggagaaaatattgtgtcacatatttaggaaataaagtataaattgacttttacaagagaatattttaaatatccattgatgttagaaaacatggtaacagactgactttgattattttaaaatttgtgtgtattgttctttatttactctaccaaaaaaggaagatccaagattgaaaattccagcccatctgagaggaaagacatcacttgatacttccaatgatctagggcctttacctccaggatgggaagagagaactcacacagatggaagaatcttctacataaatcacaatataaaaagaacacaatgggaagatcctcggttggagaatgtagcaataactggaccagcagtgccctactccagggattacaaaagaaagtatgagttcttccgaagaaagttgaagaagcagaatgacattccaaacaaatttgaaatgaaacttcgccgagcaactgttcttgaagactcttaccggagaattatgggtgtcaagagagcagacttcctgaaggctcgactgtggattgagtttgatggtgaaaagggattggattatggaggagttgccagagaatggttcttcctgatctcaaaggaaatgtttaacccttattatgggttgtttgaatattctgctacggacaattataccctacagataaatccaaactctggattgtgtaacgaagatcacctctcttacttcaagtttattggtcgggtagctggaatggcagtttatcatggcaaactgttggatggttttttcatccgcccattttacaagatgatgcttcacaaaccaataacccttcatgatatggaatctgtggatagtgaatattacaattccctaagatggattcttgaaaatgacccaacagaattggacctcaggtttatcatagatgaagaactttttggacagacacatcaacatgagctgaaaaatggtggatcagaaatagttgtcaccaataagaacaaaaaggaatatatttatcttgtaatacaatggcgatttgtaaaccgaatccagaagcaaatggctgcttttaaagagggattctttgaactaataccacaggatctcatcaaaatttttgatgaaaatgaactagagcttcttatgtgtggactgggagatgttgatgtgaatgactggagggaacatacaaagtataaaaatggctacagtgcaaatcatcaggttatacagtggttttggaaggctgttttaatgatggattcagaaaaaagaataagattacttcagtttgtcactggcacatctcgggtgcctatgaatggatttgctgaactatacggttcaaatggaccacagtcatttacagttgaacagtggggtactcctgaaaagctgccaagagctcatacctgttttaatcgcctggacttgccaccttatgaatcatttgaagaattatgggataaacttcagatggcaattgaaaacacccagggctttgatggagttgattagattacaaataacaatctgtagtgtttttactgccatagttttataaccaaaatcttgacttaaaattttccggggaactactaaaatgtggccactgagtcttcccagatcttgaagaaaatcatataaaaagcatttgaagaaatagtacgacaacttatttttaatcacttttaaataatgtgttgcatttacacagttgtttcattctgtctttagagttaggtgcctgcctaaagccaggcaccaccacacctggctttagagttcacacaataggatataagtcctgtatgacttaaatagtgaattttgtccttaacatttacctcttgtatagtatctgccaggcagttttttcttaaactactgagatgataactgtgaaatatttgtgatacgtgtcatgtgtgaaaagtttgatgcattttgagatggaaaactgaaatttggaaaaagaaatactttactattgagtaaactacaatatatttagtgctactcgcagctatttattattttgtagacctgccttatgcaccttactgcctagatttttgggaaaaaactttggaaagtgtgttacctatatttctagccaactaactcacagaaaaactgtttacttcttcactttcgaagtatttggcttttgttaatatgcagttttactaaacagatggttcataagacatgtgaagcaaattcatatttgcaatgggtaaaaagtattaaagcctttctcttgcctgcatatcctattgaccattggtatagtcatcactttttcatattttagtgtagttagaagaattccttcttcaaacattaaagatccacaaagcagtatttctaaatatgccttgaagaactaaatgaagtgtatagcacttgcctttactagatattctttacacttgtacaattatgtagtaaatgtatgtttacagggtttatcatgtttacagattaagctaatttctgtagtcgcatttttatatttttagtatcactctagtaaaaaaaccaaataatttgtttaaaataaccaaagagttgttataatgcataatttgtattaaatttattactatttcttatgccttttaaaatactgtttactatgaagacaatgtttttaattacaaatccagaattctgtaggcaaaatgctacagttcatatcttcctttaaccaaactgaagtacataaagaccatgtacatgtattcatcaaacgtttattgaatgctgcgtgcctagcgctgtgctatgctctggggtaagagttgtcagcttcagagaagctgagtcctgatcctcaaggaacttgcaaatgtgtctatgaatttgtaaaacaatcaaaagtaggcgtaagcagaataaggcaaaagggaaagtgttctaggttccagcacacctgcaaagataaagtgtgccaagactgtatttatatttcatacttatattgtttcatccttatattggaatgattatatagaaaatgctcttaaaaagattaaacctatttctcagtatggtatcttggtgatttaggaataattgtaaatatatgttacgaatcttcttaaatatatatatatacacaccctgtgagaactgtaaaaagtacctctggttcttggtttaagtttgtggggtataacatgatgagtactcattagcacctgatagaaatctgaaatgtgacagtagcaaaaccactttctactttccaaacaccacagcatcagcatggtttaggggaagcaattcacagattaatgtaccctgcgttttgtcttcaccattgtcaaccagcagtcaaggatgagcaccaggtatagtcctggtttgatatctcaccagccatgtgaactgaagcagcttacttaacctctctggattcatatttcttcatctgtcaaatgagagtaatcatgcccaccctcattgtcatgccagattgtcagaagttccagacagatgagaaagcaaaaagtactttgtaaagtgttatacaatcagaaggtgctttgtgctgaccgtcagattgtgtcaagtcaggtgtgcaaattgaccacactcccaaagaatcatttaaaagtaaagtgacttctaagagacaaggaagtaggaacatttctgatattaaatatataaataatatggatacacatgtgtatatctgtatatggatcttaccatcataattcattttcttcatatcagcaaagtaatagtaatgtgggccaatgcattttggaaatgtcctcattatgtagaatggaatgtgaaaattatttttgttaaaacaggattttgccacaattatttaaatattatgtttgtgaactatctaagcatgagaaaatacaaagctttctttgtatctggctgatactcatttggatgattctgtgactcatagaacatgatgttaaatgagaccagactcaactgccaccagtccccagctgcagaccttcatccccttcatctcccactaggggctcgtggtctggaagaaacatgtatcaagcaacacagccccttatcccagatagaaaagtgtctcaaatgcattctactgcgggacagtcagtaggatcattttcataaagcaaggacatcatatgtttctagaaattacaagcatataactttagcctacaatctcttattaaaaatttttaacaaaattgtattacaaatgcatttcatcagaactcaaatttaaatggtgtttgttttgggtttttatttataatgctgaagttattccatataagtatcaagttaaacacaattcattttgattataaactatttgactttttaaaatcttctgacacagtaaatatatatatcaagattgatgtatcaaaatttattgcacactttaaagtgtaaaatcattttttaaaatcttgaatccacaaataaagttctattctgattttaaaaaacaaaaaaaaa

SEQ ID NO: 298887 - DNA, 5667 bp, Homo sapiens
ctcccgcttctcctcctcctcctccacagttgcctgccctgggcgggggcgagcgcgtccggtttgctggaagcgttcggaaatggcaacttgcgcggtggaggtgttcgggctcctggaggacgaggaaaattcacgaattgtgagagtaagagttatagccggaataggccttgccaagaaggatatattgggagctagtgatccttacgtgagagtgacgttatatgacccaatgaatggagttcttacaagtgtgcaaacaaaaaccattaaaaagagtttgaatccaaagtggaatgaagaaatattattcagagttcatcctcagcagcaccggcttctttttgaagtgtttgacgaaaaccgattgacaagagatgatttcctaggtcaagtggatgttccactttatccattaccgacagaaaatccaagattggagagaccatatacatttaaggattttgttcttcatccaagaagtcacaaatcaagagttaaaggttatctgagactaaaaatgacttatttacctaaaaccagtggctcagaagatgataatgcagaacaggctgaggaattagagcctggctgggttgttttggaccaaccagatgctgcttgccatttgcagcaacaacaagaaccttctcctctacctccagggtgggaagagaggcaggatatccttggaaggacctattatgtaaaccatgaatctagaagaacacagtggaaaagaccaacccctcaggacaacctaacagatgctgagaatggcaacattcaactgcaagcacaacgtgcatttaccaccaggcggcagatatccgaggaaacagaaagtgttgacaaccaagagtcttccgagaactgggaaattataagagaagatgaagccaccatgtatagcagccaggccttcccatcacctccaccgtcaagtaacttggatgttccaactcatcttgcagaagaattgaatgccagactcaccatttttggaaattcagccgtgagccagccagcatcgagctcaaatcattccagcagaagaggcagcttacaagcctatacttttgaggaacaacctacacttcctgtgcttttgcctacttcatctggattaccaccaggttgggaagaaaaacaagatgaaagaggaagatcatattatgtagatcacaattccagaacgactacttggacaaagcccactgtacaggccacagtggagaccagtcagctgacctcaagccagagttctgcaggccctcaatcacaagcctccaccagtgattcaggccagcaggtgacccagccatctgaaattgagcaaggattccttcctaaaggctgggaagtccggcatgcaccaaatgggaggcctttctttattgaccacaacactaaaaccaccacctgggaagatccaagattgaaaattccagcccatctgagaggaaagacatcacttgatacttccaatgatctagggcctttacctccaggatgggaagagagaactcacacagatggaagaatcttctacataaatcacaatataaaaagaacacaatgggaagatcctcggttggagaatgtagcaataactggaccagcagtgccctactccagggattacaaaagaaagtatgagttcttccgaagaaagttgaagaagcagaatgacattccaaacaaatttgaaatgaaacttcgccgagcaactgttcttgaagactcttaccggagaattatgggtgtcaagagagcagacttcctgaaggctcgactgtggattgagtttgatggtgaaaagggattggattatggaggagttgccagagaatggttcttcctgatctcaaaggaaatgtttaacccttattatgggttgtttgaatattctgctacggacaattataccctacagataaatccaaactctggattgtgtaacgaagatcacctctcttacttcaagtttattggtcgggtagctggaatggcagtttatcatggcaaactgttggatggttttttcatccgcccattttacaagatgatgcttcacaaaccaataacccttcatgatatggaatctgtggatagtgaatattacaattccctaagatggattcttgaaaatgacccaacagaattggacctcaggtttatcatagatgaagaactttttggacagacacatcaacatgagctgaaaaatggtggatcagaaatagttgtcaccaataagaacaaaaaggaatatatttatcttgtaatacaatggcgatttgtaaaccgaatccagaagcaaatggctgcttttaaagagggattctttgaactaataccacaggatctcatcaaaatttttgatgaaaatgaactagagcttcttatgtgtggactgggagatgttgatgtgaatgactggagggaacatacaaagtataaaaatggctacagtgcaaatcatcaggttatacagtggttttggaaggttcaaatggaccacagtcatttacagttgaacagtggggtactcctgaaaagctgccaagagctcatacctgttttaatcgcctggacttgccaccttatgaatcatttgaagaattatgggataaacttcagatggcaattgaaaacacccagggctttgatggagttgattagattacaaataacaatctgtagtgtttttactgccatagttttataaccaaaatcttgacttaaaattttccggggaactactaaaatgtggccactgagtcttcccagatcttgaagaaaatcatataaaaagcatttgaagaaatagtacgacaacttatttttaatcacttttaaataatgtgttgcatttacacagttgtttcattctgtctttagagttaggtgcctgcctaaagccaggcaccaccacacctggctttagagttcacacaataggatataagtcctgtatgacttaaatagtgaattttgtccttaacatttacctcttgtatagtatctgccaggcagttttttcttaaactactgagatgataactgtgaaatatttgtgatacgtgtcatgtgtgaaaagtttgatgcattttgagatggaaaactgaaatttggaaaaagaaatactttactattgagtaaactacaatatatttagtgctactcgcagctatttattattttgtagacctgccttatgcaccttactgcctagatttttgggaaaaaactttggaaagtgtgttacctatatttctagccaactaactcacagaaaaactgtttacttcttcactttcgaagtatttggcttttgttaatatgcagttttactaaacagatggttcataagacatgtgaagcaaattcatatttgcaatgggtaaaaagtattaaagcctttctcttgcctgcatatcctattgaccattggtatagtcatcactttttcatattttagtgtagttagaagaattccttcttcaaacattaaagatccacaaagcagtatttctaaatatgccttgaagaactaaatgaagtgtatagcacttgcctttactagatattctttacacttgtacaattatgtagtaaatgtatgtttacagggtttatcatgtttacagattaagctaatttctgtagtcgcatttttatatttttagtatcactctagtaaaaaaaccaaataatttgtttaaaataaccaaagagttgttataatgcataatttgtattaaatttattactatttcttatgccttttaaaatactgtttactatgaagacaatgtttttaattacaaatccagaattctgtaggcaaaatgctacagttcatatcttcctttaaccaaactgaagtacataaagaccatgtacatgtattcatcaaacgtttattgaatgctgcgtgcctagcgctgtgctatgctctggggtaagagttgtcagcttcagagaagctgagtcctgatcctcaaggaacttgcaaatgtgtctatgaatttgtaaaacaatcaaaagtaggcgtaagcagaataaggcaaaagggaaagtgttctaggttccagcacacctgcaaagataaagtgtgccaagactgtatttatatttcatacttatattgtttcatccttatattggaatgattatatagaaaatgctcttaaaaagattaaacctatttctcagtatggtatcttggtgatttaggaataattgtaaatatatgttacgaatcttcttaaatatatatatatacacaccctgtgagaactgtaaaaagtacctctggttcttggtttaagtttgtggggtataacatgatgagtactcattagcacctgatagaaatctgaaatgtgacagtagcaaaaccactttctactttccaaacaccacagcatcagcatggtttaggggaagcaattcacagattaatgtaccctgcgttttgtcttcaccattgtcaaccagcagtcaaggatgagcaccaggtatagtcctggtttgatatctcaccagccatgtgaactgaagcagcttacttaacctctctggattcatatttcttcatctgtcaaatgagagtaatcatgcccaccctcattgtcatgccagattgtcagaagttccagacagatgagaaagcaaaaagtactttgtaaagtgttatacaatcagaaggtgctttgtgctgaccgtcagattgtgtcaagtcaggtgtgcaaattgaccacactcccaaagaatcatttaaaagtaaagtgacttctaagagacaaggaagtaggaacatttctgatattaaatatataaataatatggatacacatgtgtatatctgtatatggatcttaccatcataattcattttcttcatatcagcaaagtaatagtaatgtgggccaatgcattttggaaatgtcctcattatgtagaatggaatgtgaaaattatttttgttaaaacaggattttgccacaattatttaaatattatgtttgtgaactatctaagcatgagaaaatacaaagctttctttgtatctggctgatactcatttggatgattctgtgactcatagaacatgatgttaaatgagaccagactcaactgccaccagtccccagctgcagaccttcatccccttcatctcccactaggggctcgtggtctggaagaaacatgtatcaagcaacacagccccttatcccagatagaaaagtgtctcaaatgcattctactgcgggacagtcagtaggatcattttcataaagcaaggacatcatatgtttctagaaattacaagcatataactttagcctacaatctcttattaaaaatttttaacaaaattgtattacaaatgcatttcatcagaactcaaatttaaatggtgtttgttttgggtttttatttataatgctgaagttattccatataagtatcaagttaaacacaattcattttgattataaactatttgactttttaaaatcttctgacacagtaaatatatatatcaagattgatgtatcaaaatttattgcacactttaaagtgtaaaatcattttttaaaatcttgaatccacaaataaagttctattctgattttaaaaaacaaaaaaaaa

SEQ ID NO: 298888 - DNA, 3497 bp, Homo sapiens
tttgatgagatcctgtggtattagttcaaagaatccctctttaaaagcagccatttgcttctggattcggtttacaaatcgccattgtattacaagataaatatattcctttttgttcttattggtgacaactatttctgatccaccatttttcagctcatgttgatgtgaatgactggagggaacatacaaagtataaaaatggctacagtgcaaatcatcaggttatacagtggttttggaaggctgttttaatgatggattcagaaaaaagaataagattacttcagtttgtcactggcacatctcgggtgcctatgaatggatttgctgaactatacggttcaaatggaccacagtcatttacagttgaacagtggggtactcctgaaaagctgccaagagctcatacctgttttaatcgcctggacttgccaccttatgaatcatttgaagaattatgggataaacttcagatggcaattgaaaacacccagggctttgatggagttgattagattacaaataacaatctgtagtgtttttactgccatagttttataaccaaaatcttgacttaaaattttccggggaactactaaaatgtggccactgagtcttcccagatcttgaagaaaatcatataaaaagcatttgaagaaatagtacgacaacttatttttaatcacttttaaataatgtgttgcatttacacagttgtttcattctgtctttagagttaggtgcctgcctaaagccaggcaccaccacacctggctttagagttcacacaataggatataagtcctgtatgacttaaatagtgaattttgtccttaacatttacctcttgtatagtatctgccaggcagttttttcttaaactactgagatgataactgtgaaatatttgtgatacgtgtcatgtgtgaaaagtttgatgcattttgagatggaaaactgaaatttggaaaaagaaatactttactattgagtaaactacaatatatttagtgctactcgcagctatttattattttgtagacctgccttatgcaccttactgcctagatttttgggaaaaaactttggaaagtgtgttacctatatttctagccaactaactcacagaaaaactgtttacttcttcactttcgaagtatttggcttttgttaatatgcagttttactaaacagatggttcataagacatgtgaagcaaattcatatttgcaatgggtaaaaagtattaaagcctttctcttgcctgcatatcctattgaccattggtatagtcatcactttttcatattttagtgtagttagaagaattccttcttcaaacattaaagatccacaaagcagtatttctaaatatgccttgaagaactaaatgaagtgtatagcacttgcctttactagatattctttacacttgtacaattatgtagtaaatgtatgtttacagggtttatcatgtttacagattaagctaatttctgtagtcgcatttttatatttttagtatcactctagtaaaaaaaccaaataatttgtttaaaataaccaaagagttgttataatgcataatttgtattaaatttattactatttcttatgccttttaaaatactgtttactatgaagacaatgtttttaattacaaatccagaattctgtaggcaaaatgctacagttcatatcttcctttaaccaaactgaagtacataaagaccatgtacatgtattcatcaaacgtttattgaatgctgcgtgcctagcgctgtgctatgctctggggtaagagttgtcagcttcagagaagctgagtcctgatcctcaaggaacttgcaaatgtgtctatgaatttgtaaaacaatcaaaagtaggcgtaagcagaataaggcaaaagggaaagtgttctaggttccagcacacctgcaaagataaagtgtgccaagactgtatttatatttcatacttatattgtttcatccttatattggaatgattatatagaaaatgctcttaaaaagattaaacctatttctcagtatggtatcttggtgatttaggaataattgtaaatatatgttacgaatcttcttaaatatatatatatacacaccctgtgagaactgtaaaaagtacctctggttcttggtttaagtttgtggggtataacatgatgagtactcattagcacctgatagaaatctgaaatgtgacagtagcaaaaccactttctactttccaaacaccacagcatcagcatggtttaggggaagcaattcacagattaatgtaccctgcgttttgtcttcaccattgtcaaccagcagtcaaggatgagcaccaggtatagtcctggtttgatatctcaccagccatgtgaactgaagcagcttacttaacctctctggattcatatttcttcatctgtcaaatgagagtaatcatgcccaccctcattgtcatgccagattgtcagaagttccagacagatgagaaagcaaaaagtactttgtaaagtgttatacaatcagaaggtgctttgtgctgaccgtcagattgtgtcaagtcaggtgtgcaaattgaccacactcccaaagaatcatttaaaagtaaagtgacttctaagagacaaggaagtaggaacatttctgatattaaatatataaataatatggatacacatgtgtatatctgtatatggatcttaccatcataattcattttcttcatatcagcaaagtaatagtaatgtgggccaatgcattttggaaatgtcctcattatgtagaatggaatgtgaaaattatttttgttaaaacaggattttgccacaattatttaaatattatgtttgtgaactatctaagcatgagaaaatacaaagctttctttgtatctggctgatactcatttggatgattctgtgactcatagaacatgatgttaaatgagaccagactcaactgccaccagtccccagctgcagaccttcatccccttcatctcccactaggggctcgtggtctggaagaaacatgtatcaagcaacacagccccttatcccagatagaaaagtgtctcaaatgcattctactgcgggacagtcagtaggatcattttcataaagcaaggacatcatatgtttctagaaattacaagcatataactttagcctacaatctcttattaaaaatttttaacaaaattgtattacaaatgcatttcatcagaactcaaatttaaatggtgtttgttttgggtttttatttataatgctgaagttattccatataagtatcaagttaaacacaattcattttgattataaactatttgactttttaaaatcttctgacacagtaaatatatatatcaagattgatgtatcaaaatttattgcacactttaaagtgtaaaatcattttttaaaatcttgaatccacaaataaagttctattctgattttaaaaaacaaaaaaaaa

SEQ ID NO: 298889 - DNA, 5709 bp, Homo sapiens
ctcccgcttctcctcctcctcctccacagttgcctgccctgggcgggggcgagcgcgtccggtttgctggaagcgttcggaaatggcaacttgcgcggtggaggtgttcgggctcctggaggacgaggaaaattcacgaattgtgagagtaagagttatagccggaataggccttgccaagaaggatatattgggagctagtgatccttacgtgagagtgacgttatatgacccaatgaatggagttcttacaagtgtgcaaacaaaaaccattaaaaagagtttgaatccaaagtggaatgaagaaatattattcagagttcatcctcagcagcaccggcttctttttgaagtgtttgacgaaaaccgattgacaagagatgatttcctaggtcaagtggatgttccactttatccattaccgacagaaaatccaagattggagagaccatatacatttaaggattttgttcttcatccaagaagtcacaaatcaagagttaaaggttatctgagactaaaaatgacttatttacctaaaaccagtggctcagaagatgataatgcagaacaggctgaggaattagagcctggctgggttgttttggaccaaccagatgctgcttgccatttgcagcaacaacaagaaccttctcctctacctccagggtgggaagagaggcaggatatccttggaaggacctattatgtaaaccatgaatctagaagaacacagtggaaaagaccaacccctcaggacaacctaacagatgctgagaatggcaacattcaactgcaagcacaacgtgcatttaccaccaggcggcagatatccgaggaaacagaaagtgttgacaaccaagagtcttccgagaactgggaaattataagagaagatgaagccaccatgtatagcagccaggccttcccatcacctccaccgtcaagtaacttggatgttccaactcatcttgcagaagaattgaatgccagactcaccatttttggaaattcagccgtgagccagccagcatcgagctcaaatcattccagcagaagaggcagcttacaagcctatacttttgaggaacaacctacacttcctgtgcttttgcctacttcatctggattaccaccaggttgggaagaaaaacaagatgaaagaggaagatcatattatgtagatcacaattccagaacgactacttggacaaagcccactgtacaggccacagtggagaccagtcagctgacctcaagccagagttctgcaggccctcaatcacaagcctccaccagtgattcaggccagcaggtgacccagccatctgaaattgagcaaggattccttcctaaaggctgggaagtccggcatgcaccaaatgggaggcctttctttattgaccacaacactaaaaccaccacctgggaagatccaagattgaaaattccagcccatctgagaggaaagacatcacttgatacttccaatgatctagggcctttacctccaggatgggaagagagaactcacacagatggaagaatcttctacataaatcacaatataaaaagaacacaatgggaagatcctcggttggagaatgtagcaataactggaccagcagtgccctactccagggattacaaaagaaagtatgagttcttccgaagaaagttgaagaagcagaatgacattccaaacaaatttgaaatgaaacttcgccgagcaactgttcttgaagactcttaccggagaattatgggtgtcaagagagcagacttcctgaaggctcgactgtggattgagtttgatggtgaaaagggattggattatggaggagttgccagagaatggttcttcctgatctcaaaggaaatgtttaacccttattatgggttgtttgaatattctgctacggacaattataccctacagataaatccaaactctggattgtgtaacgaagatcacctctcttacttcaagtttattggtcgggtagctggaatggcagtttatcatggcaaactgttggatggttttttcatccgcccattttacaagatgatgcttcacaaaccaataacccttcatgatatggaatctgtggatagtgaatattacaattccctaagatggattcttgaaaatgacccaacagaattggacctcaggtttatcatagatgaagaactttttggacagacacatcaacatgagctgaaaaatggtggatcagaaatagttgtcaccaataagaacaaaaaggaatatatttatcttgtaatacaatggcgatttgtaaaccgaatccagaagcaaatggctgcttttaaagagggattctttgaactaataccacaggatctcatcaaaatttttgatgaaaatgaactagagcttcttatgtgtggactgggagatgttgatgtgaatgactggagggaacatacaaagtataaaaatggctacagtgcaaatcatcaggttatacagtggttttggaaggctgttttaatgatggattcagaaaaaagaataagattacttcagtttgtcactggcacatctcgggtgcctatgaatggatttgctgaactatacggttcaaatggaccacagtcatttacagttgaacagtggggtactcctgaaaagctgccaagagctcatacctgttttaatcgcctggacttgccaccttatgaatcatttgaagaattatgggataaacttcagatggcaattgaaaacacccagggctttgatggagttgattagattacaaataacaatctgtagtgtttttactgccatagttttataaccaaaatcttgacttaaaattttccggggaactactaaaatgtggccactgagtcttcccagatcttgaagaaaatcatataaaaagcatttgaagaaatagtacgacaacttatttttaatcacttttaaataatgtgttgcatttacacagttgtttcattctgtctttagagttaggtgcctgcctaaagccaggcaccaccacacctggctttagagttcacacaataggatataagtcctgtatgacttaaatagtgaattttgtccttaacatttacctcttgtatagtatctgccaggcagttttttcttaaactactgagatgataactgtgaaatatttgtgatacgtgtcatgtgtgaaaagtttgatgcattttgagatggaaaactgaaatttggaaaaagaaatactttactattgagtaaactacaatatatttagtgctactcgcagctatttattattttgtagacctgccttatgcaccttactgcctagatttttgggaaaaaactttggaaagtgtgttacctatatttctagccaactaactcacagaaaaactgtttacttcttcactttcgaagtatttggcttttgttaatatgcagttttactaaacagatggttcataagacatgtgaagcaaattcatatttgcaatgggtaaaaagtattaaagcctttctcttgcctgcatatcctattgaccattggtatagtcatcactttttcatattttagtgtagttagaagaattccttcttcaaacattaaagatccacaaagcagtatttctaaatatgccttgaagaactaaatgaagtgtatagcacttgcctttactagatattctttacacttgtacaattatgtagtaaatgtatgtttacagggtttatcatgtttacagattaagctaatttctgtagtcgcatttttatatttttagtatcactctagtaaaaaaaccaaataatttgtttaaaataaccaaagagttgttataatgcataatttgtattaaatttattactatttcttatgccttttaaaatactgtttactatgaagacaatgtttttaattacaaatccagaattctgtaggcaaaatgctacagttcatatcttcctttaaccaaactgaagtacataaagaccatgtacatgtattcatcaaacgtttattgaatgctgcgtgcctagcgctgtgctatgctctggggtaagagttgtcagcttcagagaagctgagtcctgatcctcaaggaacttgcaaatgtgtctatgaatttgtaaaacaatcaaaagtaggcgtaagcagaataaggcaaaagggaaagtgttctaggttccagcacacctgcaaagataaagtgtgccaagactgtatttatatttcatacttatattgtttcatccttatattggaatgattatatagaaaatgctcttaaaaagattaaacctatttctcagtatggtatcttggtgatttaggaataattgtaaatatatgttacgaatcttcttaaatatatatatatacacaccctgtgagaactgtaaaaagtacctctggttcttggtttaagtttgtggggtataacatgatgagtactcattagcacctgatagaaatctgaaatgtgacagtacaattcacagattaatgtaccctgcgttttgtcttcaccattgtcaaccagcagtcaaggatgagcaccaggtatagtcctggtttgatatctcaccagccatgtgaactgaagcagcttacttaacctctctggattcatatttcttcatctgtcaaatgagagtaatcatgcccaccctcattgtcatgccagattgtcagaagttccagacagatgagaaagcaaaaagtactttgtaaagtgttatacaatcagaaggtgctttgtgctgaccgtcagattgtgtcaagtcaggtgtgcaaattgaccacactcccaaagaatcatttaaaagtaaagtgacttctaagagacaaggaagtaggaacatttctgatattaaatatataaataatatggatacacatgtgtatatctgtatatggatcttaccatcataattcattttcttcatatcagcaaagtaatagtaatgtgggccaatgcattttggaaatgtcctcattatgtagaatggaatgtgaaaattatttttgttaaaacaggattttgccacaattatttaaatattatgtttgtgaactatctaagcatgagaaaatacaaagctttctttgtatctggctgatactcatttggatgattctgtgactcatagaacatgatgttaaatgagaccagactcaactgccaccagtccccagctgcagaccttcatccccttcatctcccactaggggctcgtggtctggaagaaacatgtatcaagcaacacagccccttatcccagatagaaaagtgtctcaaatgcattctactgcgggacagtcagtaggatcattttcataaagcaaggacatcatatgtttctagaaattacaagcatataactttagcctacaatctcttattaaaaatttttaacaaaattgtattacaaatgcatttcatcagaactcaaatttaaatggtgtttgttttgggtttttatttataatgctgaagttattccatataagtatcaagttaaacacaattcattttgattataaactatttgactttttaaaatcttctgacacagtaaatatatatatcaagattgatgtatcaaaatttattgcacactttaaagtgtaaaatcattttttaaaatcttgaatccacaaataaagttctattctgattttaaaaaacaaaaaaaaa

SEQ ID NO: 298890 - DNA, 724 bp, Homo sapiens
ctcccgcttctcctcctcctcctccacagttgcctgccctgggcgggggcgagcgcgtccggtttgctggaagcgttcggaaatggcaacttgcgcggtggaggtgttcgggctcctggaggacgaggaaaattcacgaattgtgagagtaagagttatagccggaataggccttgccaagaaggatatattgggagctagtgatccttacgtgagagtgacgttatatgacccaatgaatggagttcttacaagtgtgcaaacaaaaaccattaaaaagagtttgaatccaaagtggaatgaagaaatattattcagaaaaataattctggaaggacctaagaaactgtttactgtatttgctctgggggtgggacaaaggttcatcctcagcagcaccggcttctttttgaagtgtttgacgaaaaccgattggtaagttatattgtgcttatatgaaatatgaagtaagggtacatttcagtggagcagccaggggaagtgggtaagcagtctgggatttgagtgatggcttgggggtggttatggagactctgggcaaaatggtgagggagatagaatttgttttcttcctcctggtcctactcgctccctttccattctcctcccaagcacctcttctgattgccaacatattataaggtcttactcaagacctcttgtgacaggagaggacagaaaaccaacctctttgtcctgcctt

SEQ ID NO: 298891 - DNA, 500 bp, Homo sapiens
ctcccgcttctcctcctcctcctccacagttgcctgccctgggcgggggcgagcgcgtccggtttgctggaagcgttcggaaatggcaacttgcgcggtggaggtgttcgggctcctggaggacgaggaaaattcacgaattgtgagagtaagagttatagccggaataggccttgccaagaaggatatattgggagctaggtaagtatatctatttggattataattttaaaactttgcatttgttaattagttttttccaaactttggttaaattagaaatcaaatagtattagtaaattgttgtggaaagtataataataatattaccagttggtggtttactaaatctcttggtatctgaattactaaatttgtgaaattaggcagaagtacaaatgatagcaatagtcacaagatacattattgagctctgcttctggaaatttgcaaaattctaacagactaatcctttagcagataacaaccataaactctgg

SEQ ID NO: 298892 - DNA, 483 bp, Homo sapiens
ttaaacagggtgcaggaccataagctttcagtaatatatttaatccagtcttactttccaggctgttgacttttttgatctcctagaattatctctatgctctaaccaagccagcctgcagacatgtgcatagtccgtgttcttttgggatgttaacatactaaccactctatactgtttttctgcttattctcttctgccctccctttggctccacaacccacctgctcagctagttttcatttgagttgtgatgtcggctgcaattcctcttgggcaggaaagtgaaagcactgtcaagttagcatttgataaactaaagctacttttttttctcacttccaacttaaattatgccttaggtgatagttcatgagtattcttgaaaagtacatgcttttggtgttatagatatattttgaaaacccactattttattctagacagaaaatccaagattggagagaccatatacatttaagg

SEQ ID NO: 298893 - DNA, 3681 bp, Homo sapiens
atggcgtgggcagcctctctgggcaagccgatggcagcagcggcggggccacagggacaactgcaagtggcacgggcagggaagtgaccacgggtgcagacagcaatggtgagatgagtcccgcagagctgctgcacttccagcagcaacaggctctccaagtggcccggcagttcctgctgcagcaggcctcaggcctgagctccccagggaacaatgacagcaaacagtctgcctctgctgtgcaggtgcctgtgtcggtggccatgatgtcgccgcagatgcttaccccgcaacagatgcagcagatcctgtcgcccccgcagctgcaggccttgctccagcagcagcaagccctcatgctccagcagctacaggagtactacaagaagcagcaggagcagctccacctgcagctcctcacccagcagcaggctgggaaaccgcagcccaaagaggcactggggaacaagcagctggccttccagcagcagctcctgcaaatgcaacagttgcagcagcagcacctgctcaacctgcagaggcaggggctggtcagcctgcagcccaaccaagcctcggggcccctccagacccttccgcaagcagctgtttgcccaacagacctgccccagctgtggaagggcgagggtgcccccgggcagcctgccgaggacagcgtcaagcaggaggggctggacctcactggcacggccgccaccgctacctcgtttgccgctccccccaaggtctcaccccccctctcccaccataccctgcccaacggacagcctactgtgctcacatctcggagagacagctcttcccacgaggagacccccggctcccaccccctgtacggacacggagagtgcaagtggccaggctgtgagaccctgtgtgaagacctgggccagtttatcaaacacctcaacacagagcacgccctggatgaccggagtacagcccagtgccgggtacagatgcaggtggtgcagcagctggagatccagctcgccaaggagagcgagcggctgcaggccatgatggcccacctgcacatgcggccctcggagcccaagcccttcagccagccactgaacccggtccccggctcctcctcattctccaaggtgaccgtctctgcagcagactcattcccagatggtctcgtgcaccccccgacctcggccgcagcccctgtcacccctctacggccccctggcctgggctctgcctccctgcatggtgggggcccagcccgtcggagaagcagtgacaagttctgctcccccatctcctcagagctggcccagaatcatgagttctacaagaacgccgacgtccggccccccttcacctacgcctccctcatccgccaggccatcctggaaacccctgacaggcagctgaccctgaatgagatctataactggttcaccaggatgttcgcctatttccgcagaaacactgccacctggaagaacgccgtgcgccacaacctcagcctgcacaagtgcttcgtccgcgtggagaacgtcaagggtgccgtgtggactgtggacgagcgggagtatcagaagcggagaccgccaaagatgacagggagccccaccctggtgaagaacatgatctctggcctcagctatggagcacttaatgccagctaccaggccgccctggccgagagcagcttccccctcctcaacagccctggcatgctgaaccctggctccgccagcagcctgctgcccctcagccacgatgacgtgggtgcccccgtggagccgctgcccagcaacggcagcagcagccctcctcgcctctccccgccccagtacagccaccaggtgcaggtgaaggaggagccagcagaggcagaggaagacaggcagcccgggcctcccctgggcgcccctaaccccagcgcctcggggcctccggaagacagggacctggaggaggagctgccgggagaagaactgtcctaagggcctgtagtgaccggcagggctggggtgagacccctcccttccagaatccaggccccatctcccccaactccacagcccctcccgagcctcaaggcaagtccaggactcagaccggggaggcccgggccagcagctcccagtgtgacctgacaaaaacacgtaggggcagggacggtccccacccccagggacacaacccctggtcttggaccagtagaggacacggagggttcagacccctcctcagaccctccccacatctgaaactgcctccccccaaccaccagcagcagcagggccctcctcccccaccagctctccccacagggcccctcagcatcatggagacccgcaggcggggcttagccacccctcaaacccagggccccctggcacctggctctggccgtgttttctggccagaggcccccactttcctaactcgtgctcccttccgccttcttttccgtactgtgaagaaagaactctccaccccagctcccaccctgccctggcctgggtggaggaactgtgcctccatccccagaagaaacagccccctctgctgctggggtgggactgtctgtgtgccctgtgggggtccgtgtgagcaggcccacctggctccagacccgcccccaacctgagacagaaccaggctgagccaggcctccacccccacccccgtttgctgggggctcctccagccgcccccatgggaagaggcctggtaccgcctcacccacagaggtctgtgccaggtgcgcttctgcaggtggagccaagctctccctgaggccagaggcggggcctgggccgggagcccaggggaaggccaggctggaccccggctccacacccacatccagcctgcaggcctctctgcagtcctctcaccctccctcagctccccttcctctgcagtcaccctcagctccccttccttgcccgcctctccccccgccgccccaccagttaaacggatgaccaaagacctttcttatgccggaagcaaaaaccaaaactttttgttggctttttcctttgtcgcctccccagcacctgccctcccagtctcccaccccggccccaggctggaagccctccctccacttaagttattgttttaaaccaaagtttacagtgtctgttggtggccaagaccttctctctccacccctcctccatccaccctgaggaccctggggctcagtggaggcagggccctgcccccctcccttccgctcctgcccagcctgggggaaggagaaaggaggggagaaagcgggctctcaccccctcaggagtgggcacgggagcccttctccctgaccctgggctgcttcctgggggctctccagacccctctctaggaccaagtcacccgtcgtgctgggagtgtggattctagcaaaagagctggaaaaaagtcagactctccacagaccccctatgggggacccccaactcaaggccaaggactgggcgtatcggatgctcataacacccctggcctggcccctttactgagaagactccttggatatttcccaagaaccccccacatacacccctcacaagccacccctcctgagaggcagggggccctccgccccctccccatgtattccccacctgtgttccgtttgaccagcacagaaatattaaacgtcctctattcaccggg

SEQ ID NO: 298894 - DNA, 3579 bp, Homo sapiens
atggcgtgggcagcctctctgggcaagccgatggcagcagcggcggggccacagggacaactgcaagtggcacgggcagggaagtgaccacgggtgcagacagcaatggtgagatgagtcccgcagagctgctgcacttccagcagcaacaggctctccaagtggcccggcagttcctgctgcagcaggcctcaggcctgagctccccagggaacaatgacagcaaacagtctgcctctgctgtgcaggtgcctgtgtcggtggccatgatgtcgccgcagatgcttaccccgcaacagatgcagcagatcctgtcgcccccgcagctgcaggccttgctccagcagcagcaagccctcatgctccagcagctacaggagtactacaagaagcagcaggagcagctccacctgcagctcctcacccagcagcaggctgggaaaccgcagcccaaagaggcactggggaacaagcagctggccttccagcagcagctcctgcaaatgcaacagttgcagcagcagcacctgctcaacctgcagaggcaggggctggtcagcctgcagcccaaccaagcctcggggcccctccagacccttccgcaagcagctgtttgcccaacagacctgccccagctgtggaagggcgagggtgcccccgggcagcctgccgaggacagcgtcaagcaggaggggctggacctcactggcacggccgccaccgctacctcgtttgccgctccccccaaggtctcaccccccctctcccaccataccctgcccaacggacagcctactgtgctcacatctcggagagacagctcttcccacgaggagacccccggctcccaccccctgtacggacacggagagtgcaagtggccaggctgtgagaccctgtgtgaagacctgggccagtttatcaaacacctcaacacagagcacgccctggatgaccggagtacagcccagtgccgggtacagatgcaggtggtgcagcagctggagatccagctcgccaaggagagcgagcggctgcaggccatgatggcccacctgcacatgcggccctcggagcccaagcccttcagccagccactgaacccggtccccggctcctcctcattctccaaggtgaccgtctctgcagcagactcattcccagatggtctcgtgcaccccccgacctcggccgcagcccctgtcacccctctacggccccctggcctgggctctgcctccctgcatggtgggggcccagcccgtcggagaagcagtgacaagttctgctcccccatctcctcagagctggcccagaatcatgagttctacaagaacgccgacgtccggccccccttcacctacgcctccctcatccgccagaacgccgtgcgccacaacctcagcctgcacaagtgcttcgtccgcgtggagaacgtcaagggtgccgtgtggactgtggacgagcgggagtatcagaagcggagaccgccaaagatgacagggagccccaccctggtgaagaacatgatctctggcctcagctatggagcacttaatgccagctaccaggccgccctggccgagagcagcttccccctcctcaacagccctggcatgctgaaccctggctccgccagcagcctgctgcccctcagccacgatgacgtgggtgcccccgtggagccgctgcccagcaacggcagcagcagccctcctcgcctctccccgccccagtacagccaccaggtgcaggtgaaggaggagccagcagaggcagaggaagacaggcagcccgggcctcccctgggcgcccctaaccccagcgcctcggggcctccggaagacagggacctggaggaggagctgccgggagaagaactgtcctaagggcctgtagtgaccggcagggctggggtgagacccctcccttccagaatccaggccccatctcccccaactccacagcccctcccgagcctcaaggcaagtccaggactcagaccggggaggcccgggccagcagctcccagtgtgacctgacaaaaacacgtaggggcagggacggtccccacccccagggacacaacccctggtcttggaccagtagaggacacggagggttcagacccctcctcagaccctccccacatctgaaactgcctccccccaaccaccagcagcagcagggccctcctcccccaccagctctccccacagggcccctcagcatcatggagacccgcaggcggggcttagccacccctcaaacccagggccccctggcacctggctctggccgtgttttctggccagaggcccccactttcctaactcgtgctcccttccgccttcttttccgtactgtgaagaaagaactctccaccccagctcccaccctgccctggcctgggtggaggaactgtgcctccatccccagaagaaacagccccctctgctgctggggtgggactgtctgtgtgccctgtgggggtccgtgtgagcaggcccacctggctccagacccgcccccaacctgagacagaaccaggctgagccaggcctccacccccacccccgtttgctgggggctcctccagccgcccccatgggaagaggcctggtaccgcctcacccacagaggtctgtgccaggtgcgcttctgcaggtggagccaagctctccctgaggccagaggcggggcctgggccgggagcccaggggaaggccaggctggaccccggctccacacccacatccagcctgcaggcctctctgcagtcctctcaccctccctcagctccccttcctctgcagtcaccctcagctccccttccttgcccgcctctccccccgccgccccaccagttaaacggatgaccaaagacctttcttatgccggaagcaaaaaccaaaactttttgttggctttttcctttgtcgcctccccagcacctgccctcccagtctcccaccccggccccaggctggaagccctccctccacttaagttattgttttaaaccaaagtttacagtgtctgttggtggccaagaccttctctctccacccctcctccatccaccctgaggaccctggggctcagtggaggcagggccctgcccccctcccttccgctcctgcccagcctgggggaaggagaaaggaggggagaaagcgggctctcaccccctcaggagtgggcacgggagcccttctccctgaccctgggctgcttcctgggggctctccagacccctctctaggaccaagtcacccgtcgtgctgggagtgtggattctagcaaaagagctggaaaaaagtcagactctccacagaccccctatgggggacccccaactcaaggccaaggactgggcgtatcggatgctcataacacccctggcctggcccctttactgagaagactccttggatatttcccaagaaccccccacatacacccctcacaagccacccctcctgagaggcagggggccctccgccccctccccatgtattccccacctgtgttccgtttgaccagcacagaaatattaaacgtcctctattcaccggg

SEQ ID NO: 298895 - DNA, 2453 bp, Homo sapiens
cggaaggaccgggaaggaagagcggagccggagcgagccaagcagcccacaaagtgccatgccccggcggggttgaggcgcgcggcggtcggcccggcgcgctgggaggacgcccgggagctgcgcgacgcggggcggcgcggaagggcagccccggcgggcggcggcgggcccgggctgcgaccggagcgagccccatgccccgcgcgggctgacgggccggagcccgcacggagcggccgggcgggacaggtagaacgccgtgcgccacaacctcagcctgcacaagtgcttcgtccgcgtggagaacgtcaagggtgccgtgtggactgtggacgagcgggagtatcagaagcggagaccgccaaagatgacagggagccccaccctggtgaagaacatgatctctggcctcagctatggagcacttaatgccagctaccaggccgccctggccgagagcagcttccccctcctcaacagccctggcatgctgaaccctggctccgccagcagcctgctgcccctcagccacgatgacgtgggtgcccccgtggagccgctgcccagcaacggcagcagcagccctcctcgcctctccccgccccagtacagccaccaggtgcaggtgaaggaggagccagcagaggcagaggaagacaggcagcccgggcctcccctgggcgcccctaaccccagcgcctcggggcctccggaagacagggacctggaggaggagctgccgggagaagaactgtcctaagggcctgtagtgaccggcagggctggggtgagacccctcccttccagaatccaggccccatctcccccaactccacagcccctcccgagcctcaaggcaagtccaggactcagaccggggaggcccgggccagcagctcccagtgtgacctgacaaaaacacgtaggggcagggacggtccccacccccagggacacaacccctggtcttggaccagtagaggacacggagggttcagacccctcctcagaccctccccacatctgaaactgcctccccccaaccaccagcagcagcagggccctcctcccccaccagctctccccacagggcccctcagcatcatggagacccgcaggcggggcttagccacccctcaaacccagggccccctggcacctggctctggccgtgttttctggccagaggcccccactttcctaactcgtgctcccttccgccttcttttccgtactgtgaagaaagaactctccaccccagctcccaccctgccctggcctgggtggaggaactgtgcctccatccccagaagaaacagccccctctgctgctggggtgggactgtctgtgtgccctgtgggggtccgtgtgagcaggcccacctggctccagacccgcccccaacctgagacagaaccaggctgagccaggcctccacccccacccccgtttgctgggggctcctccagccgcccccatgggaagaggcctggtaccgcctcacccacagaggtctgtgccaggtgcgcttctgcaggtggagccaagctctccctgaggccagaggcggggcctgggccgggagcccaggggaaggccaggctggaccccggctccacacccacatccagcctgcaggcctctctgcagtcctctcaccctccctcagctccccttcctctgcagtcaccctcagctccccttccttgcccgcctctccccccgccgccccaccagttaaacggatgaccaaagacctttcttatgccggaagcaaaaaccaaaactttttgttggctttttcctttgtcgcctccccagcacctgccctcccagtctcccaccccggccccaggctggaagccctccctccacttaagttattgttttaaaccaaagtttacagtgtctgttggtggccaagaccttctctctccacccctcctccatccaccctgaggaccctggggctcagtggaggcagggccctgcccccctcccttccgctcctgcccagcctgggggaaggagaaaggaggggagaaagcgggctctcaccccctcaggagtgggcacgggagcccttctccctgaccctgggctgcttcctgggggctctccagacccctctctaggaccaagtcacccgtcgtgctgggagtgtggattctagcaaaagagctggaaaaaagtcagactctccacagaccccctatgggggacccccaactcaaggccaaggactgggcgtatcggatgctcataacacccctggcctggcccctttactgagaagactccttggatatttcccaagaaccccccacatacacccctcacaagccacccctcctgagaggcagggggccctccgccccctccccatgtattccccacctgtgttccgtttgaccagcacagaaatattaaacgtcctctattcaccggg

SEQ ID NO: 298896 - DNA, 4043 bp, Homo sapiens
  misc_feature (3695)..(3695): n is a, c, g, or t
atggcgtgggcagcctctctgggcaagccgatggcagcagcggcggggccacagggacaactgcaagtggcacgggcagggaagtgaccacgggtgcagacagcaatggtgagatgagtcccgcagagctgctgcacttccagcagcaacaggctctccaagtggcccggcagttcctgctgcagcaggcctcaggcctgagctccccagggaacaatgacagcaaacagtctgcctctgctgtgcaggtgcctgtgtcggtggccatgatgtcgccgcagatgcttaccccgcaacagatgcagcagatcctgtcgcccccgcagctgcaggccttgctccagcagcagcaagccctcatgctccagcagctacaggagtactacaagaagcagcaggagcagctccacctgcagctcctcacccagcagcaggctgggaaaccgcagcccaaagaggcactggggaacaagcagctggccttccagcagcagctcctgcaaatgcaacagttgcagcagcagcacctgctcaacctgcagaggcaggggctggtcagcctgcagcccaaccaagcctcggggcccctccagacccttccgcaagcagctgtttgcccaacagacctgccccagctgtggaagggcgagggtgcccccgggcagcctgccgaggacagcgtcaagcaggaggggctggacctcactggcacggccgccaccgctacctcgtttgccgctccccccaaggtctcaccccccctctcccaccataccctgcccaacggacagcctactgtgctcacatctcggagagacagctcttcccacgaggagacccccggctcccaccccctgtacggacacggagagtgcaagtggccaggctgtgagaccctgtgtgaagacctgggccagtttatcaaacacctcaacacagagcacgccctggatgaccggagtacagcccagtgccgggtacagatgcaggtggtgcagcagctggagatccagctcgccaaggagagcgagcggctgcaggccatgatggcccacctgcacatgcggccctcggagcccaagcccttcagccagccactgaacccggtccccggctcctcctcattctccaaggtgaccgtctctgcagcagactcattcccagatggtctcgtgcaccccccgacctcggccgcagcccctgtcacccctctacggccccctggcctgggctctgcctccctgcatggtgggggcccagcccgtcggagaagcagtgacaagttctgctcccccatctcctcagagctggcccagaatcatgagttctacaagaacgccgacgtccggccccccttcacctacgcctccctcatccgccaggccatcctggaaacccctgacaggcagctgaccctgaatgagatctataactggttcaccaggatgttcgcctatttccgcagaaacactgccacctggaagaacgccgtgcgccacaacctcagcctgcacaagtgcttcgtccgcgtggagaacgtcaagggtgccgtgtggactgtggacgagcgggagtatcagaagcggagaccgccaaagatgacagggagccccaccctggtgaagaacatgatctctggcctcagctatggagcacttaatgccagctaccaggccgccctggccgagagcagcttccccctcctcaacagccctggcatgctgaaccctggctccgccagcagcctgctgcccctcagccacgatgacgtgggtgcccccgtggagccgctgcccagcaacggcagcagcagccctcctcgcctctccccgccccagtacagccaccaggtgcaggtgaaggaggagccagcagaggcagaggaagacaggcagcccgggcctcccctgggcgcccctaaccccagcgcctcggggcctccggaagacagggacctggaggaggagctgccgggagaagaactgtcctaagggcctgtagtgaccggcagggctggggtgagacccctcccttccagaatccaggccccatctcccccaactccacagcccctcccgagcctcaaggcaagtccaggactcagaccggggaggcccgggccagcagctcccagtgtgacctgacaaaaacacgtaggggcagggacggtccccacccccagggacacaacccctggtcttggaccagtagaggacacggagggttcagacccctcctcagaccctccccacatctgaaactgcctccccccaaccaccagcagcagcagggccctcctcccccaccagctctccccacagggcccctcagcatcatggagacccgcaggcggggcttagccacccctcaaacccagggccccctggcacctggctctggccgtgttttctggccagaggcccccactttcctaactcgtgctcccttccgccttcttttccgtactgtgaagaaagaactctccaccccagctcccaccctgccctggcctgggtggaggaactgtgcctccatccccagaagaaacagccccctctgctgctggggtgggactgtctgtgtgccctgtgggggtccgtgtgagcaggcccacctggctccagacccgcccccaacctgagacagaaccaggctgagccaggcctccacccccacccccgtttgctgggggctcctccagccgcccccatgggaagaggcctggtaccgcctcacccacagaggtctgtgccaggtgcgcttctgcaggtggagccaagctctccctgaggccagaggcggggcctgggccgggagcccaggggaaggccaggctggaccccggctccacacccacatccagcctgcaggcctctctgcagtcctctcaccctccctcagctccccttcctctgcagtcaccctcagctccccttccttgcccgcctctccccccgccgccccaccagttaaacggatgaccaaagacctttcttatgccggaagcaaaaaccaaaactttttgttggctttttcctttgtcgcctccccagcacctgccctcccagtctcccaccccggccccaggctggaagccctccctccacttaagttattgttttaaaccaaagtttacagtgtctgttggtggccaagaccttctctctccacccctcctccatccaccctgaggaccctggggctcagtggaggcagggccctgcccccctcccttccgctcctgcccagcctgggggaaggagaaaggaggggagaaagcgggctctcaccccctcaggagtgggcacgggagcccttctccctgaccctgggctgcttcctgggggctctccagacccctctctaggaccaagtcacccgtcgtgctgggagtgtggattctagcaaaagagctggaaaaaagtcagactctccacagaccccctatgggggacccccaactcaaggccaaggactgggcgtatcggatgctcataacacccctggcctggcccctttactgagaagactccttggatatttcccaagaaccccccacatacacccctcacaagccacccctcctgagaggcagggggccctccgccccctccccatgtattccccacctgtgttccgtttgaccagcacagaaatattaaacgtcctctattcaccgggaaaaaaaaaaaaanaaaaaaaaaaaaaaaaaagggggggcacaacaaaaaaaatatccctgaagagggggccccaaggattaaggaggaaacacaagattattatgataaaacaaggggggcccaaatataaaagaagtggaaataataagaataggaaatgaccgagataataacaaggtgtagacaattggaaaaaatgtaagtgaggaaacatttggtgaggaaaccattaattcggggggtagacactattgggacattaccaaagaaattaaaagacaacgaaatataacactgtacgtttattagtgttaacacgacaatagtacgctagaagtggtaaaggtgattagaatgtag

SEQ ID NO: 298897 - DNA, 4030 bp, Homo sapiens
  misc_feature (3695)..(3695): n is a, c, g, or t
atggcgtgggcagcctctctgggcaagccgatggcagcagcggcggggccacagggacaactgcaagtggcacgggcagggaagtgaccacgggtgcagacagcaatggtgagatgagtcccgcagagctgctgcacttccagcagcaacaggctctccaagtggcccggcagttcctgctgcagcaggcctcaggcctgagctccccagggaacaatgacagcaaacagtctgcctctgctgtgcaggtgcctgtgtcggtggccatgatgtcgccgcagatgcttaccccgcaacagatgcagcagatcctgtcgcccccgcagctgcaggccttgctccagcagcagcaagccctcatgctccagcagctacaggagtactacaagaagcagcaggagcagctccacctgcagctcctcacccagcagcaggctgggaaaccgcagcccaaagaggcactggggaacaagcagctggccttccagcagcagctcctgcaaatgcaacagttgcagcagcagcacctgctcaacctgcagaggcaggggctggtcagcctgcagcccaaccaagcctcggggcccctccagacccttccgcaagcagctgtttgcccaacagacctgccccagctgtggaagggcgagggtgcccccgggcagcctgccgaggacagcgtcaagcaggaggggctggacctcactggcacggccgccaccgctacctcgtttgccgctccccccaaggtctcaccccccctctcccaccataccctgcccaacggacagcctactgtgctcacatctcggagagacagctcttcccacgaggagacccccggctcccaccccctgtacggacacggagagtgcaagtggccaggctgtgagaccctgtgtgaagacctgggccagtttatcaaacacctcaacacagagcacgccctggatgaccggagtacagcccagtgccgggtacagatgcaggtggtgcagcagctggagatccagctcgccaaggagagcgagcggctgcaggccatgatggcccacctgcacatgcggccctcggagcccaagcccttcagccagccactgaacccggtccccggctcctcctcattctccaaggtgaccgtctctgcagcagactcattcccagatggtctcgtgcaccccccgacctcggccgcagcccctgtcacccctctacggccccctggcctgggctctgcctccctgcatggtgggggcccagcccgtcggagaagcagtgacaagttctgctcccccatctcctcagagctggcccagaatcatgagttctacaagaacgccgacgtccggccccccttcacctacgcctccctcatccgccaggccatcctggaaacccctgacaggcagctgaccctgaatgagatctataactggttcaccaggatgttcgcctatttccgcagaaacactgccacctggaagaacgccgtgcgccacaacctcagcctgcacaagtgcttcgtccgcgtggagaacgtcaagggtgccgtgtggactgtggacgagcgggagtatcagaagcggagaccgccaaagatgacagggagccccaccctggtgaagaacatgatctctggcctcagctatggagcacttaatgccagctaccaggccgccctggccgagagcagcttccccctcctcaacagccctggcatgctgaaccctggctccgccagcagcctgctgcccctcagccacgatgacgtgggtgcccccgtggagccgctgcccagcaacggcagcagcagccctcctcgcctctccccgccccagtacagccaccaggtgcaggtgaaggaggagccagcagaggcagaggaagacaggcagcccgggcctcccctgggcgcccctaaccccagcgcctcggggcctccggaagacagggacctggaggaggagctgccgggagaagaactgtcctaagggcctgtagtgaccggcagggctggggtgagacccctcccttccagaatccaggccccatctcccccaactccacagcccctcccgagcctcaaggcaagtccaggactcagaccggggaggcccgggccagcagctcccagtgtgacctgacaaaaacacgtaggggcagggacggtccccacccccagggacacaacccctggtcttggaccagtagaggacacggagggttcagacccctcctcagaccctccccacatctgaaactgcctccccccaaccaccagcagcagcagggccctcctcccccaccagctctccccacagggcccctcagcatcatggagacccgcaggcggggcttagccacccctcaaacccagggccccctggcacctggctctggccgtgttttctggccagaggcccccactttcctaactcgtgctcccttccgccttcttttccgtactgtgaagaaagaactctccaccccagctcccaccctgccctggcctgggtggaggaactgtgcctccatccccagaagaaacagccccctctgctgctggggtgggactgtctgtgtgccctgtgggggtccgtgtgagcaggcccacctggctccagacccgcccccaacctgagacagaaccaggctgagccaggcctccacccccacccccgtttgctgggggctcctccagccgcccccatgggaagaggcctggtaccgcctcacccacagaggtctgtgccaggtgcgcttctgcaggtggagccaagctctccctgaggccagaggcggggcctgggccgggagcccaggggaaggccaggctggaccccggctccacacccacatccagcctgcaggcctctctgcagtcctctcaccctccctcagctccccttcctctgcagtcaccctcagctccccttccttgcccgcctctccccccgccgccccaccagttaaacggatgaccaaagacctttcttatgccggaagcaaaaaccaaaactttttgttggctttttcctttgtcgcctccccagcacctgccctcccagtctcccaccccggccccaggctggaagccctccctccacttaagttattgttttaaaccaaagtttacagtgtctgttggtggccaagaccttctctctccacccctcctccatccaccctgaggaccctggggctcagtggaggcagggccctgcccccctcccttccgctcctgcccagcctgggggaaggagaaaggaggggagaaagcgggctctcaccccctcaggagtgggcacgggagcccttctccctgaccctgggctgcttcctgggggctctccagacccctctctaggaccaagtcacccgtcgtgctgggagtgtggattctagcaaaagagctggaaaaaagtcagactctccacagaccccctatgggggacccccaactcaaggccaaggactgggcgtatcggatgctcataacacccctggcctggcccctttactgagaagactccttggatatttcccaagaaccccccacatacacccctcacaagccacccctcctgagaggcagggggccctccgccccctccccatgtattccccacctgtgttccgtttgaccagcacagaaatattaaacgtcctctattcaccgggaaaaaaaaaaaaanaaaaaaaaaaaaaaccgcgcgggggccatcaagggcgggggggggaaaaaggggaagggaaggggcccggggcaaaaaggggatccggggcccaagttttcgtggccacacagggggcaaataggggggaccaccaaaaatggggagccgaaataaatggaaaaggccaggttaccggggattagacggcggaacacgaggcacacaaacgaaaacacaagcagcacgagagagcgcacgagacgacagggggatctaaccaacacaggacccaagcagaacggggagcacggaagaagggataacaccaagcgaaagaaaccacaaaacaaggc

SEQ ID NO: 298898 - DNA, 2155 bp, Homo sapiens
cgagtagtagagacatctagatgagcccctaggctgtgctagacgggagcatagaagcggagaccgccaaagatgacagggagccccaccctggtgaagaacatgatctctggcctcagctatggagcacttaatgccagctaccaggccgccctggccgagagcagcttccccctcctcaacagccctggcatgctgaaccctggctccgccagcagcctgctgcccctcagccacgatgacgtgggtgcccccgtggagccgctgcccagcaacggcagcagcagccctcctcgcctctccccgccccagtacagccaccaggtgcaggtgaaggaggagccagcagaggcagaggaagacaggcagcccgggcctcccctgggcgcccctaaccccagcgcctcggggcctccggaagacagggacctggaggaggagctgccgggagaagaactgtcctaagggcctgtagtgaccggcagggctggggtgagacccctcccttccagaatccaggccccatctcccccaactccacagcccctcccgagcctcaaggcaagtccaggactcagaccggggaggcccgggccagcagctcccagtgtgacctgacaaaaacacgtaggggcagggacggtccccacccccagggacacaacccctggtcttggaccagtagaggacacggagggttcagacccctcctcagaccctccccacatctgaaactgcctccccccaaccaccagcagcagcagggccctcctcccccaccagctctccccacagggcccctcagcatcatggagacccgcaggcggggcttagccacccctcaaacccagggccccctggcacctggctctggccgtgttttctggccagaggcccccactttcctaactcgtgctcccttccgccttcttttccgtactgtgaagaaagaactctccaccccagctcccaccctgccctggcctgggtggaggaactgtgcctccatccccagaagaaacagccccctctgctgctggggtgggactgtctgtgtgccctgtgggggtccgtgtgagcaggcccacctggctccagacccgcccccaacctgagacagaaccaggctgagccaggcctccacccccacccccgtttgctgggggctcctccagccgcccccatgggaagaggcctggtaccgcctcacccacagaggtctgtgccaggtgcgcttctgcaggtggagccaagctctccctgaggccagaggcggggcctgggccgggagcccaggggaaggccaggctggaccccggctccacacccacatccagcctgcaggcctctctgcagtcctctcaccctccctcagctccccttcctctgcagtcaccctcagctccccttccttgcccgcctctccccccgccgccccaccagttaaacggatgaccaaagacctttcttatgccggaagcaaaaaccaaaactttttgttggctttttcctttgtcgcctccccagcacctgccctcccagtctcccaccccggccccaggctggaagccctccctccacttaagttattgttttaaaccaaagtttacagtgtctgttggtggccaagaccttctctctccacccctcctccatccaccctgaggaccctggggctcagtggaggcagggccctgcccccctcccttccgctcctgcccagcctgggggaaggagaaaggaggggagaaagcgggctctcaccccctcaggagtgggcacgggagcccttctccctgaccctgggctgcttcctgggggctctccagacccctctctaggaccaagtcacccgtcgtgctgggagtgtggattctagcaaaagagctggaaaaaagtcagactctccacagaccccctatgggggacccccaactcaaggccaaggactgggcgtatcggatgctcataacacccctggcctggcccctttactgagaagactccttggatatttcccaagaaccccccacatacacccctcacaagccacccctcctgagaggcagggggccctccgccccctccccatgtattccccacctgtgttccgtttgaccagcacagaaatattaaacgtcctctattcaccggg

SEQ ID NO: 298899 - DNA, 2999 bp, Homo sapiens
atggcgtgggcagcctctctgggcaagccgatggcagcagcggcggggccacagggacaactgcaagtggcacgggcagggaagtgaccacgggtgcagacagcaatggtgagatgagtcccgcagagctgctgcacttccagcagcaacaggctctccaagtggcccggcagttcctgctgcagcaggcctcaggcctgagctccccagggaacaatgacagcaaacagtctgcctctgctgtgcaggtgcctgtgtcggtggccatgatgtcgccgcagatgcttaccccgcaacagatgcagcagatcctgtcgcccccgcagctgcaggccttgctccagcagcagcaagccctcatgctccagcagctacaggagtactacaagaagcagcaggagcagctccacctgcagctcctcacccagcagcaggctgggaaaccgcagcccaaagaggcactggggaacaagcagctggccttccagcagcagctcctgcaaatgcaacagttgcagcagcagcacctgctcaacctgcagaggcaggggctggtcagcctgcagcccaaccaagcctcggggcccctccagacccttccgcaagcagctgtttgcccaacagacctgccccagctgtggaagggcgagggtgcccccgggcagcctgccgaggacagcgtcaagcaggaggggctggacctcactggcacggccgccaccgctacctcgtttgccgctccccccaaggtctcaccccccctctcccaccataccctgcccaacggacagcctactgtgctcacatctcggagagacagctcttcccacgaggagacccccggctcccaccccctgtacggacacggagagtgcaagtggccaggctgtgagaccctgtgtgaagacctgggccagtttatcaaacacctcaacacagagcacgccctggatgaccggagtacagcccagtgccgggtacagatgcaggtggtgcagcagctggagatccagctcgccaaggagagcgagcggctgcaggccatgatggcccacctgcacatgcggccctcggagcccaagcccttcagccagccactgaacccggtccccggctcctcctcattctccaaggtgaccgtctctgcagcagactcattcccagatggtctcgtgcaccccccgacctcggccgcagcccctgtcacccctctacggccccctggcctgggctctgcctccctgcatggtgggggcccagcccgtcggagaagcagtgacaagttctgctcccccatctcctcagagctggcccagaatcatgagttctacaagaacgccgacgtccggccccccttcacctacgcctccctcatccgccaggccatcctggaaacccctgacaggcagctgaccctgaatgagatctataactggttcaccaggatgttcgcctatttccgcagaaacactgccacctggaagaacgccgtgcgccacaacctcagcctgcacaagtgcttcgtccgcgtggagaacgtcaagggtgccgtgtggactgtggacgagcgggagtatcagaagcggagaccgccaaagatgacagggagccccaccctggtgaagaacatgatctctggcctcagctatggagcacttaatgccagctaccaggccgccctggccgagagcagcttccccctcctcaacagccctggcatgctgaaccctggctccgccagcagcctgctgcccctcagccacgatgacgtgggtgcccccgtggagccgctgcccagcaacggcagcagcagccctcctcgcctctccccgccccagtacagccaccaggtgcaggtgaaggaggagccagcagaggcagaggaagacaggcagcccgggcctcccctgggcgcccctaaccccagcgcctcggggcctccggaagacagggacctggaggaggagctgccgggagaagaactgtcctaagggcctgtagtgaccggcagggctggggtgagacccctcccttccagaatccaggccccatctcccccaactccacagcccctcccgagcctcaaggcaagtccaggactcagaccggggaggcccgggccagcagctcccagtgtgacctgacaaaaacacgtaggggcagggacggtccccacccccagggacacaacccctggtcttggaccagtagaggacacggagggttcagacccctcctcagaccctccccacatctgaaactgcctctccccccgccgccccaccagttaaacggatgaccaaagacctttcttatgccggaagcaaaaaccaaaactttttgttggctttttcctttgtcgcctccccagcacctgccctcccagtctcccaccccggccccaggctggaagccctccctccacttaagttattgttttaaaccaaagtttacagtgtctgttggtggccaagaccttctctctccacccctcctccatccaccctgaggaccctggggctcagtggaggcagggccctgcccccctcccttccgctcctgcccagcctgggggaaggagaaaggaggggagaaagcgggctctcaccccctcaggagtgggcacgggagcccttctccctgaccctgggctgcttcctgggggctctccagacccctctctaggaccaagtcacccgtcgtgctgggagtgtggattctagcaaaagagctggaaaaaagtcagactctccacagaccccctatgggggacccccaactcaaggccaaggactgggcgtatcggatgctcataacacccctggcctggcccctttactgagaagactccttggatatttcccaagaaccccccacatacacccctcacaagccacccctcctgagaggcagggggccctccgccccctccccatgtattccccacctgtgttccgtttgaccagcacagaaatattaaacgtcctctattcaccggg

SEQ ID NO: 298900 - DNA, 2939 bp, Homo sapiens
atggcgtgggcagcctctctgggcaagccgatggcagcagcggcggggccacagggacaactgcaagtggcacgggcagggaagtgaccacgggtgcagacagcaatggtgagatgagtcccgcagagctgctgcacttccagcagcaacaggctctccaagtggcccggcagttcctgctgcagcaggcctcaggcctgagctccccagggaacaatgacagcaaacagtctgcctctgctgtgcaggtgcctgtgtcggtggccatgatgtcgccgcagatgcttaccccgcaacagatgcagcagatcctgtcgcccccgcagctgcaggccttgctccagcagcagcaagccctcatgctccagcagctacaggagtactacaagaagcagcaggagcagctccacctgcagctcctcacccagcagcaggctgggaaaccgcagcccaaagaggcactggggaacaagcagctggccttccagcagcagctcctgcaaatgcaacagttgcagcagcagcacctgctcaacctgcagaggcaggggctggtcagcctgcagcccaaccaagcctcggggcccctccagacccttccgcaagcagctgtttgcccaacagacctgccccagctgtggaagggcgagggtgcccccgggcagcctgccgaggacagcgtcaagcaggaggggctggacctcactggcacggccgccaccgctacctcgtttgccgctccccccaaggtctcaccccccctctcccaccataccctgcccaacggacagcctactgtgctcacatctcggagagacagctcttcccacgaggagacccccggctcccaccccctgtacggacacggagagtgcaagtggccaggctgtgagaccctgtgtgaagacctgggccagtttatcaaacacctcaacacagagcacgccctggatgaccggagtacagcccagtgccgggtacagatgcaggtggtgcagcagctggagatccagctcgccaaggagagcgagcggctgcaggccatgatggcccacctgcacatgcggccctcggagcccaagcccttcagccagccactgaacccggtccccggctcctcctcattctccaaggtgaccgtctctgcagcagactcattcccagatggtctcgtgcaccccccgacctcggccgcagcccctgtcacccctctacggccccctggcctgggctctgcctccctgcatggtgggggcccagcccgtcggagaagcagtgacaagttctgctcccccatctcctcagagctggcccagaatcatgagttctacaagaacgccgacgtccggccccccttcacctacgcctccctcatccgccaggccatcctggaaacccctgacaggcagctgaccctgaatgagatctataactggttcaccaggatgttcgcctatttccgcagaaacactgccacctggaagaacgccgtgcgccacaacctcagcctgcacaagtgcttcgtccgcgtggagaacgtcaagggtgccgtgtggactgtggacgagcgggagtatcagaagcggagaccgccaaagatgacagggagccccaccctggtgaagaacatgatctctggcctcagctatggagcacttaatgccagctaccaggccgccctggccgagagcagcttccccctcctcaacagccctggcatgctgaaccctggctccgccagcagcctgctgcccctcagccacgatgacgtgggtgcccccgtggagccgctgcccagcaacggcagcagcagccctcctcgcctctccccgccccagtacagccaccaggtgcaggtgaaggaggagccagcagaggcagaggaagacaggcagcccgggcctcccctgggcgcccctaaccccagcgcctcggggcctccggaagacagggacctggaggaggagctgccgggagaagaactgtcctaagggcctgtagtgaccggcagggctggggtgagacccctcccttccagaatccaggccccatctcccccaactccacagcccctcccgagcctcaaggcaagtccaggactcagaccggggaggcccgggccagcagctcccagtgtgacctgacaaaaacacgtaggggcagggacggtccccacccccagggacacaacccctggtcttggaccagtagaggacacggagggttcagacccctcctcagaccctccccacatctgaaactgcctccccccaaccaccagcagcagcagggccctcctcccccaccagctctccccacagggcccctcagcatcatggagacccgcaggcggggcttagccacccctcaaacccagggccccctggcacctggctctggccgtgttttctggccagaggcccccactttcctaactcgtgctcccttccgccttcttttccgtactgtgaagaaagaactctccaccccagctcccaccctgccctggcctgggtggaggaactgtgcctccatccccagaagaaacagccccctctgctgctggggtgggactgtctgtgtgccctgtgggggtccgtgtgagcaggcccacctggctccagacccgcccccaacctgagacagaacctggtaccgcctcacccacagaggtctgtgccaggtgcgcttctgcaggtggagccaagctctccctgaggccagaggcggggcctgggccgggagcccaggggaaggccaggctggaccccggctccacacccacatccagcctgcaggcctctctgcagtcctctcaccctccctcagctccccttcctctgcagtcaccctcagctccccttccttgcccgctctcccgcgcccacagtaacggatgacaaatttatgcggagcaaacaaatgtggttcttgtgtcc

SEQ ID NO: 298901 - DNA, 1153 bp, Homo sapiens
cggaaggaccgggaaggaagagcggagccggagcgagccaagcagcccacaaagtgccatgccccggcggggttgaggcgcgcggcggtcggcccggcgcgctgggaggacgcccgggagctgcgcgacgcggggcggcgcggaagggcagccccggcgggcggcggcgggcccgggctgcgaccggagcgagccccatgccccgcgcgggctgacgggccggagcccgcacggagcggccgggcgggacaggtagccctgaggccagaggcggggcctgggccgggagcccaggggaaggccaggctggaccccggctccacacccacatccagcctgcaggcctctctgcagtcctctcaccctccctcagctccccttcctctgcagtcaccctcagctccccttccttgcccgcctctccccccgccgccccaccagttaaacggatgaccaaagacctttcttatgccggaagcaaaaaccaaaactttttgttggctttttcctttgtcgcctccccagcacctgccctcccagtctcccaccccggccccaggctggaagccctccctccacttaagttattgttttaaaccaaagtttacagtgtctgttggtggccaagaccttctctctccacccctcctccatccaccctgaggaccctggggctcagtggaggcagggccctgcccccctcccttccgctcctgcccagcctgggggaaggagaaaggaggggagaaagcgggctctcaccccctcaggagtgggcacgggagcccttctccctgaccctgggctgcttcctgggggctctccagacccctctctaggaccaagtcacccgtcgtgctgggagtgtggattctagcaaaagagctggaaaaaagtcagactctccacagaccccctatgggggacccccaactcaaggccaaggactgggcgtatcggatgctcataacacccctggcctggcccctttactgagaagactccttggatatttcccaagaaccccccacatacacccctcacaagccacccctcctgagaggcagggggccctccgccccctccccatgtattccccacctgtgttccgtttgaccagcacagaaatattaaacgtcctctattcaccggg

SEQ ID NO: 298902 - DNA, 789 bp, Homo sapiens
aagaagaaggcctttcatgtctccaaagaaacatggtctgtattcttcctggccttgtcagaattcaccccaagatcaaatccacaaaccctggcatctttattagagatgtagcaaaaaagctgtgtgaggtgtgggataccttaaatgtcagtgaaaagcagccttgcatcactaagccagtgaagctgagggagaaatacgagaaggatgttggagaggtgaagtcggctctgtgccatcctgaaaaatcaacttagaaagataggtggacttcatcagatttgtcagtccttccttgttttaaagagaaaaatgatctctgccttgcttcagataggatatggctattttttttccttctttttctaatgtagcagtgatggaaaacaccagtctttgaagaacaaatggaggttcccagtgacatgaatccattatatttgattttggattgtattttttaacccctttttatggcatagaattctggtgccttgctccctgggtttgtctctgtgctacgagtaggctttcttcacattctggcttacaggggaacacaactattccacaagtggcctttagtgctctttataatatgatttcctgtaatttttaaactgtatgtgtaatttatattctggctctgtccaatatttgaacaactttaataggttgatttccatatatattatgcaaataattcttacctgattttttatgttctatcttaaataaatactgcaccacttattaataaatagacatttcagtgataaaaaaaag

SEQ ID NO: 298903 - DNA, 2090 bp, Homo sapiens
aaaagctacaaagaagcagacaggactcaacttaggacatcttatggttatgtaactaagagattattttaggaagtaaacaggcctctgttggctcaaatgaacatcttcattgttagtttccacttacattgttctcgggataaatcggccagaatttggcagggctccccagcagtccttgtgaatccctgtggtaggatgtttcagttctcctgagtcaggctgaagtgaaagctcctaagagatattcagaaagaaggatggtcaagttctagaacaacaatagttggcccagtaattttaaagattgtcattctacctaagccttcatcctccagatagcactgttatgggcttaaaataagcttcaagggaaataatgaatttctttgacaccgccaaaaatcggctgtatataagaataacttgagaatggcttacaatgaggtagtcaaaagcccagctcagtgctcaggaatgtatttgtaattcctcttagacttgtcgaatggactgcaatttgatacctaagagtaataaaaaatgagaccatattttatgttaatgttcccttctcttcctctgcccacaaaagtgaggtcagggaaggggagagaaacttatcctaagcactccttatgagttgcttgtgacatgatagctctctctaaagttcatgcaatcctcatcgcaaccccatgagggagatgttattgtctccatcttatagatgaggaaactgaagacaagaccttgtcaaaggtcacacattgtaagaagtagagctgcatattcaaccaaagcccgtgtacctggaaagctcattctctctcccccttcttcctctcaaatcaggccctagctcctccacaatgcttcgggcttctacgttcactcagctttacagtaaaatgatcacagacccatgagttccctggagagtagagtgatgcctgggtcagctgttcctcttgtctgttcagcaggtcctttgagtggcttcacaatccagctgtcagtggcagaaaataatgcctcataaattattcacctggttcacattggaatccattagctctcggggcttggtgtggctgcagatcatccacaagtgccccttgttctctgcccccaaggagctcctgtcattgtttttaaccaaacaagttcaaatatctccacgtctctgctgactctggtcttttgtctctagactgtacctttatttctgagctctgaaattctgcagaaacaggtgagtctataaaaacattctgtgggaggccaaaagctcagaacagttgtgtctctctttctcagtattaaaagatcaaggtttcccatggaagccaacctgatctggtaattgggcccttctatacccctctgaatacttttccaaggagggggcagttcccacccccatagttcccctgagggttaagagtccaggtggtggccaagttgcaagatttggggcagccattttgccaaggatcagagatttgctgttggagaggtgaagtcggctctgtgccatcctgaaaaatcaacttagaaagataggtggacttcatcagatttgtcagtccttccttgttttaaagagaaaaatgatctctgccttgcttcagataggatatggctattttttttccttctttttctaatgtagcagtgatggaaaacaccagtctttgaagaacaaatggaggttcccagtgacatgaatccattatatttgattttggattgtattttttaacccctttttatggcatagaattctggtgccttgctccctgggtttgtctctgtgctacgagtaggctttcttcacattctggcttacaggggaacacaactattccacaagtggcctttagtgctctttataatatgatttcctgtaatttttaaactgtatgtgtaatttatattctggctctgtccaatatttgaacaactttaataggttgatttccatatatattatgcaaataattcttacctgattttttatgttctatcttaaataaatactgcaccacttattaataaatagacatttcagtgataaaaaaaag

SEQ ID NO: 298904 - DNA, 1193 bp, Homo sapiens
tcgagctccgtacccccccgactagcccgacagtccccgactagcccgaccgtccccgactagcccgacagccccgactagcccgacagcaggtcctttgagtggcttcacaatccagctgtcagtggcagaaaataatgcctcataaattattcacctggttcacattggaatccattagctctcggggcttggtgtggctgcagatcatccacaagtgccccttgttctctgcccccaaggagctcctgtcattgtttttaaccaaacaagttcaaatatctccacgtctctgctgactctggtcttttgtctctagactgtacctttatttctgagctctgaaattctgcagaaacaggtgagtctataaaaacattctgtgggaggccaaaagctcagaacagttgtgtctctctttctcagtattaaaagatcaaggtttcccatggaagccaacctgatctggtaattgggcccttctatacccctctgaatacttttccaaggagggggcagttcccacccccatagttcccctgagggttaagagtccaggtggtggccaagttgcaagatttggggcagccattttgccaaggatcagagatttgctgttggagaggtgaagtcggctctgtgccatcctgaaaaatcaacttagaaagataggtggacttcatcagatttgtcagtccttccttgttttaaagagaaaaatgatctctgccttgcttcagataggatatggctattttttttccttctttttctaatgtagcagtgatggaaaacaccagtctttgaagaacaaatggaggttcccagtgacatgaatccattatatttgattttggattgtattttttaacccctttttatggcatagaattctggtgccttgctccctgggtttgtctctgtgctacgagtaggctttcttcacattctggcttacaggggaacacaactattccacaagtggcctttagtgctctttataatatgatttcctgtaatttttaaactgtatgtgtaatttatattctggctctgtccaatatttgaacaactttaataggttgatttccatatatattatgcaaataattcttacctgattttttatgttctatcttaaataaatactgcaccacttattaataaatagacatttcagtgataaaaaaaag

SEQ ID NO: 298905 - DNA, 1536 bp, Homo sapiens
acgtcagtagccgaacgctgattggctgcggccaggccgtttccggtggagctgtcgcctagccgctatcgcagagtggagcggggctgggagcaaagcgctgagggagctcggtacgccgccgcctcgcacccgcagcctcgcgcccgccgccgcccgtccccagagaaccatggagtctggcagtaccgccgccagtgaggaggcacgcagccttcgagaatgtgagctctacgtccagaagcataacattcaagcgctgctcaaagattctattgtgcagttgtgcactgctcgacctgagagacccatggcattcctcagggaatactttgagaggttggagaaggaggaggcaaaacagattcagaatctgcagaaagcaggcactcgtacagactcaagggaggatgagatttctcctcctccacccaacccagtggttaaaggtaggaggcgacgaggtgctatcagcgctgaggtctacacggaggaagatgcggcatcctatgttagaaaggttataccaaaagattacaagacaatggccgctttagccaaagccattgaaaagaatgtgctgttttcacatcttgatgataatgagagaagtgatatttttgatgccatgttttcggtctcctttatcgcaggagagactgtgattcagcaaggtgatgaaggggataacttctatgtgattgatcaaggagagacggatgtctatgttaacaatgaatgggcaaccagtgttggggaaggagggagctttggagaacttgctttgatttatggaacaccgagagcagccactgtcaaagcaaagacaaatgtgaaattgtggggcatcgaccgagacagctatagaagaatcctcatgggaagcacactgagaaagcggaagatgtatgaggaattccttagtaaagtctctattttagagtctctggacaagtgggaacgtcttacggtagctgatgcattggaaccagtgcagtttgaagatgggcagaagattgtggtgcagggagaaccaggggatgagttcttcattattttagaggggtcagctgctgtgctacaacgtcggtcagaaaatgaagagtttgttgaagtgggaagattggggccttctgattattttggtgaaattgcactactgatgaatcgtcctcgtgctgccacagttgttgctcgtggccccttgaagtgcgttaagctggaccgacctagatttgaacgtgttcttggcccatgctcagacatcctcaaacgaaacatccagcagtacaacagttttgtgtcactgtctgtctgaaatctgcctcctgtgcctcccttttctcctctccccaatccatgcttcactcatgcaaactgctttattttccctacttgcagcgccaagtggccactggcatcgcagcttcctgtctgtttatatattgaaagttgcttttattgcaccattttcaatttggagcattaactaaatgctcatacacagttaaataaatagaaagagttctatggaga

SEQ ID NO: 298906 - DNA, 949 bp, Homo sapiens
  misc_feature (905)..(905): n is a, c, g, or t
  misc_feature (917)..(917): n is a, c, g, or t
ccagggagggggtggaaaggagggagaaaaggcagaggcgtcaagggaggccggagggagagtggggtggacagaggagcggagggacgagagggaagcgcacgatagctgcgcggagagagagcgaagagcaggaggaggaacaaaggcgacccaagacacccagagagggacagagaaccatggagtctggcagtaccgccgccagtgaggaggcacgcagccttcgagaatgtgagctctacgtccagaagcataacattcaagcgctgctcaaagattctattgtgcagttgtgcactgctcgacctgagagacccatggcattcctcagggaatactttgagaggttggagaaggaggaggcaaaacagattcagaatctgcagaaagcaggcactcgtacagactcaagggaggatgagatttctcctcctccacccaacccagtggttaaaggtaggaggcgacgaggtgctatcagcgctgaggtctacacggaggaagatgcggcatcctatgttagaaaggttataccaaaagattacaagacaatggccgctttagccaaagccattgaaaagaatgtgctgttttcacatcttgatgataatgagagaagtgatatttttgatgccatgttttcggtctcctttatcgcaggagagactgtgattcagcaaggtgatgaaggggataacttctatgtgattgatcaaggagagacggatgtctatgttaacaatgaatgggcaaccagtgttggggaaggagggagctttggagaacttgctttgatttatggaacaccgagagcagccactgtcaaagcaaagacaaatgtgaaattgtggggcatcgaccgagacagctatagaagaatcctcatgtatggaagcccctgnaaagcgagattntaggattcttataagcttattaagctctgcag

SEQ ID NO: 298907 - DNA, 841 bp, Homo sapiens
acgtcagtagccgaacgctgattggctgcggccaggccgtttccggtggagctgtcgcctagccgctatcgcagagtggagcggggctgggagcaaagcgctgagggagctcggtacgccgccgcctcgcacccgcagcctcgcgcccgccgccgcccgtccccagagaaccatggagtctggcagtaccgccgccagtgaggaggcacgcagccttcgagaatgtgagctctacgtccagaagcataacattcaagcgctgctcaaagattctattgtgcagttgtgcactgctcgacctgagagacccatggcattcctcagggaatactttgagaggttggagaaggaggaggcaaaacagattcagaatctgcagaaagcaggcactcgtacagactcaagggaggatgagatttctcctcctccacccaacccagtggttaaaggtaggaggcgacgaggtgctatcagcgctgaggtctacacggaggaagatgcggcatcctatgttagaaaggttataccaaaagattacaagacaatggccgctttagccaaagccattgaaaagaatgtgctgttttcacatcttgatgataatgagagaagtgatatttttgatgccatgttttcggtctcctttatcgcaggagagactgtgattcagcaaggtgatgaaggggataacttctatgtgattgatcaaggagagacggattatgttcctgaggtctcagcttggatcaggagattatgaagtaagatcctgaacttaggaaatgctgagcttttggattcggagtctgtcaacttcaggtatcagctaaagtgggatgaa

SEQ ID NO: 298908 - DNA, 1141 bp, Homo sapiens
attgaagtttgttttcctctttgatcctaccactttttttttctgttatactattggatttttctatttcttttaaattaagattttctgagatggacagaacactttgtattgggaactaatatttttgatatagttttgtttataatttaaaggaaatgcctacattgtcttaccttgaatgtcatatagaattgcagaatcatatatatctctcatgttctttatattgttaatcacttttaaagtaagaaataaatgaaacacctacattcttcattgtatagccctgtctattaaaaaggttctagggcttctatagattcttactttgcctatatagactaacatggatctaactttttgactatcttcctctttttattttcttatttattcttgacattttatgagtgggtatatattttcattttgtggcagcctgataatttgttattaactatttgagttgtttctaatgtccttgttataaatgccatagcagttaataactacacatatgtagcttttaaaaatttttttcagaggtattcttcaccatgagatgactaaaaaaattttgattaattctatgacttttaaaatatgttgcttgattttctttcccctgaaagattgtgttagtttgtaacacactctcacagtaccactgtaaaataagtttattgttttgtaataattttgataatttctttctttaatttggaatatgcttctaacttttttaccctcttttaggtgatgaaggggataacttctatgtgattgatcaaggagagacggatgtaagatttaccaatatcaaaaatatgttgatcttaaaagccaatgtattgatcgcttccgagcaataagaatagtgattttgaagggtcattacatcccttgtatgtcagattttattaataccttttgccaagtatttttatgacacagagaaactctttaaaggtaattttctgttcagaactttgctggagtggtggtgaagaagtgtgtgtagctgggtgcagtggccgatgcctataatcccagcactttgggagatggaggcaagagggttgcttgagcccaggagttcaagaccagcctgggcaacaaagtgaaacctcatctctta

SEQ ID NO: 298909 - DNA, 979 bp, Homo sapiens
ttatcgactctcactgttgcctacagagcacagatcctgaactaaatgaaacatttacttggaataatgctaattctgtacatattttattccctagtccccacttccctgtttaaaaacaaaatctacttagaaaaaaatccctgtgaatcagttgtctaatgaatttagcaagttaaatgccagattgacattttgctttatagtttatacaagcatgtgtgtgtttttttctcgcagagaaccatggagtctggcagtaccgccgccagtgaggaggcacgcagccttcgagaatgtgagctctacgtccagaagcataacattcaagcgctgctcaaagattctattgtgcagttgtgcactgctcgacctgagagacccatggcattcctcagggaatactttgagaggttggagaaggtaaaaataaatgtggggagatgatgaggtgattgtgacagttgttacatttaataactggaatgttactaatttgtattttttggaagaaaaggaatctgactaaataaaaagtctaaaacaatttcaaataagaaatacagttaaggcatttgtagtaatttaaaaattcttaattagtagaatttatcagaaaaatgaacctgtatgctaactgtacttggctaataaagggtttccaaacaattctttgtaactttttaaattagtgcgtagaactataacagataaaactgatcagaactagtatagcagttctatgaataagaaattctatagttcttaaaggcagttaatgctcctcccgtttggaacaaagcaagtaagcgtagtaaatcttatcccacttttaaaactagtgtaatgaaacatgaatctagcttgtgactgatatatcagaaattttcaattagattcggtctattttagtatagagtatatctgataaattactgtagagatattgatattgatgttcctcaaaaattttactcca

SEQ ID NO: 298910 - DNA, 1031 bp, Homo sapiens
acgtcagtagccgaacgctgattggctgcggccaggccgtttccggtggagctgtcgcctagccgctatcgcagagtggagcggggctgggagcaaagcgctgagggagctcggtacgccgccgcctcgcacccgcagcctcgcgcccgccgccgcccgtccccagttgacttttgtgccctggtaattctgtatcctgtttaccgtttacctacttcccacgtcatcatgatttcttttgagggagaactgaatgaaattcccttaagggcctgacttcagcacccgtctctgcagagagaaccatggagtctggcagtaccgccgccagtgaggaggcacgcagccttcgagaatgtgagctctacgtccagaagcataacattcaagcgctgctcaaagattctattgtgcagttgtgcactgctcgacctgagagacccatggcattcctcagggaatactttgagaggttggagaaggaggaggcaaaacagattcagaatctgcagaaagcaggcactcgtacagactcaagggaggatgagatttctcctcctccacccaacccagtggttaaaggtaggaggcgacgaggtgctatcagcgctgaggtctacacggaggaagatgcggcatcctatgttagaaaggttataccaaaagattacaagacaatggccgctttagccaaagccattgaaaagaatgtgctgttttcacatcttgatgataatgagagaagtgatattttgatgcatgtatcggtctcctttattgacgggagatgtggttccgcagtgattaagggatacttttgtgatgagtcaggcaagacggatgttatggtcacatgatgggcaccggtcgggacgaggggctggacaaaggttagatggcacggggacgacgttagaaaaatggattgggttacgacatataagttctggacggagagagaactacaaccatacgcgcgaataagcacacataaggaaggcaagaaaaagcaaaaggtagaagaaatagta

SEQ ID NO: 298911 - DNA, 626 bp, Homo sapiens
acgtcagtagccgaacgctgattggctgcggccaggccgtttccggtggagctgtcgcctagccgctatcgcagagtggagcggggctgggagcaaagcgctgagggagctcggtacgccgccgcctcgcacccgcagcctcgcgcccgccgccgcccgtccccagttgacttttgtgccctggtaattctgtatcctgtttaccgtttacctacttcccacgtcatcatgatttcttttgagggagaactgaatgaaattcccttaagggcctgacttcagcacccgtctctgcagagagaaccatggagtctggcagtaccgccgccagtgaggaggcacgcagccttcgagaatgtgagctctacgtccagaagcataacattcaagcgctgctcaaagattctattgtgcagttgtgcactgctcgacctgagagacccatggcattcctcagggaatactttgagaggttggagaagatgagatttctcctcctccacccaacccagtggttaaaggtaggaggcgacgaggtgctatcagcgctgaggtctacacggaggaagatgcggcatcctatgttagaaaggttataccacaagattacacgactggccgctgtg

SEQ ID NO: 298912 - DNA, 325 bp, Homo sapiens
  misc_feature (304)..(304): n is a, c, g, or t
  misc_feature (307)..(307): n is a, c, g, or t
tccttgtaatccaagcagtcgaggaacagtttctcaaagtgtttttatttatttcccagaatgtaatcctttcgaaacaattttgtcacaactgaattttcaaaagaatgaatctgagtgttttgttttacatagagacaatgcagcgaaagttttaaagcagttaaataattgtgtgtggggagggaaggctaggttgttgggctttacaaataagtacacatagagaatccgggtaactcgattaaaaatattaagactgtgaagtctggttattcagggatttacatggtgactgcttgantanaaggagggatcctctaga

SEQ ID NO: 298913 - DNA, 307 bp, Homo sapiens
  misc_feature (50)..(50): n is a, c, g, or t
ttcacacgtatttcaagcaagattaatgaaggggggggcctgtgggtaanctctaaaggatttacattcccctgggctaaggcactggggccgaactctaggagaccctaacctgtgggctgcagatcctttgggggccagaaacccaaactcacaccaagctctgtctaaggactcaatacatattatttcactcatctctatgtttcacaaaattttcaaggcatgtagttgctgttgttatgaataaaatataaattaatgtaaacatgataaaaaaaagaaaaatggcctcatttggcctcaa

SEQ ID NO: 298914 - DNA, 138 bp, Homo sapiens
gcggccgcctactactactactactgctcgaattcaagcttctaacgatgtacggggacatgtgtgctaatatactttttttgttatagattgtcttaatggtaggtcaagtaataaaaagagatgaaataatttaaa

SEQ ID NO: 298915 - DNA, 3631 bp, Homo sapiens
acgtcagtagccgaacgctgattggctgcggccaggccgtttccggtggagctgtcgcctagccgctatcgcagagtggagcggggctgggagcaaagcgctgagggagctcggtacgccgccgcctcgcacccgcagcctcgcgcccgccgccgcccgtccccagagaaccatggagtctggcagtaccgccgccagtgaggaggcacgcagccttcgagaatgtgagctctacgtccagaagcataacattcaagcgctgctcaaagattctattgtgcagttgtgcactgctcgacctgagagacccatggcattcctcagggaatactttgagaggttggagaaggaggaggcaaaacagattcagaatctgcagaaagcaggcactcgtacagactcaagggaggatgagatttctcctcctccacccaacccagtggttaaaggtaggaggcgacgaggtgctatcagcgctgaggtctacacggaggaagatgcggcatcctatgttagaaaggttataccaaaagattacaagacaatggccgctttagccaaagccattgaaaagaatgtgctgttttcacatcttgatgataatgagagaagtgatatttttgatgccatgttttcggtctcctttatcgcaggagagactgtgattcagcaaggtgatgaaggggataacttctatgtgattgatcaaggagagacggatgtctatgttaacaatgaatgggcaaccagtgttggggaaggagggagctttggagaacttgctttgatttatggaacaccgagagcagccactgtcaaagcaaagacaaatgtgaaattgtggggcatcgaccgagacagctatagaagaatcctcatgggaagcacactgagaaagcggaagatgtatgaggaattccttagtaaagtctctattttagagtctctggacaagtgggaacgtcttacggtagctgatgcattggaaccagtgcagtttgaagatgggcagaagattgtggtgcagggagaaccaggggatgagttcttcattattttagaggggtcagctgctgtgctacaacgtcggtcagaaaatgaagagtttgttgaagtgggaagattggggccttctgattattttggtgaaattgcactactgatgaatcgtcctcgtgctgccacagttgttgctcgtggccccttgaagtgcgttaagctggaccgacctagatttgaacgtgttcttggcccatgctcagacatcctcaaacgaaacatccagcagtacaacagttttgtgtcactgtctgtctgaaatctgcctcctgtgcctcccttttctcctctccccaatccatgcttcactcatgcaaactgctttattttccctacttgcagcgccaagtggccactggcatcgcagcttcctgtctgtttatatattgaaagttgcttttattgcaccattttcaatttggagcattaactaaatgctcatacacagttaaataaatagaaagagttctatggagactttgctgttactgcttctctttgtgcagtgttagtattcaccctgggcagtgagtgccatgctttttggtgagggcagatcccagcacctattgaattaccatagagtaatgatgtaacagtgcaagattttttttttaagtgacataattgtccagttataagcgtatttagactgtggccatatatgctgtatttctttgtagaataaatggtttctcattaaactctaaagattagggaaaatggatatagaaaatcttagtatagtagaaagacatctgcctgtaattaaactagtttaagggtggaaaaatgcccatttttgctaattatcaatgggatatgattggttcagtttttttttttccagagttgttgtttgccaagctaatctgcctggttttatttatatcttgttattaatgtttcttctccaattctgaaatacttttgagtatggctatctatacctgccttttaagtttgaaactaactcatagattgcaaatattggttagtatttaactacatctgcctcggctcacaaattccgattagacctttatccagctagtgccaaataattgatcagatgctgaattgagaataagaatttgaggtctacattcttggttgttaatttagagcgtttggttaaagtatgtccttcagctgactccagtataatctcctctgctcattaaactgattccaggagattggatttgctgtgactagatacagatggagcaaatgtcctaacagagaaatagaggtgatgctgctaaagggagaaatgccaggcggacaaagttcagtgtcgggaattttccccgtgacattcactggggcatgagattttggaagaagttttttactttggtttagtctttttttccttcctttttattcagctagaatttctggtgggttgatggtagggtataatgtgtctgtgttgcttcaaattggtctgaaaggctatcctgctgaaagtcctgctttcctatctagcatttatttctctggcaaacttttctttcttttcttttttaaagtaaacttgtgtattgagtcttaactgtatttcagtattttccagccttatgtgttacattattccaatgatacccaacagtttatttttattatttttttaaacaaaatttcacagttctgtaatgtaggcacttttattttcattgtgatttatatataaggtaatgtagggttatatttgggagtgactgcaagcatttttccatctgtgtgcaactaactgactctgttattgatcccttctcctgccctttcccaggtaatttaaattggtcatggtagatttttttcatagatttgaaaaacttttaggttgttaccaagtatgaagtataaatctggggaagaggttttatttacattttagggtgggtaagaaagccaccttgttacaaattttttaatttccaaaataatctatattaaatgagggtttctgatctgtactttgtgtttagctacctttttatatttaaaaaattaaaaatgaaaattacgttcttacaagcttaaagcttgatttgatctttgtttaaatgccaaaatgtacttaaatgagttacttagaatgccataaaattgcagtttcatgtatgtatataatcatgctcatgtatatttagttacgtataatgctttctgagtgagttttactcttaaatcatttggttaaatcatttggcttgctgtttactcccttctgtagtttttaattaaaaactttaaagataagtctacattaaacaatgatcacatctaaagctttatctttgtgtaatctaagtatatgtgagaaatcagaattggcataatttgtcttagttgatattcaaggctttaaaagtcattattcctgggcttggtaagtgaatttatgagatttactgctctagaaagtatagatggcgaaaggaccgttttgtattgcttcctgattaccagtctgattataccatgtgtgctaatatactttttttgttatagattgtcttaatggtaggtcaagtaataaaaagagatgaaataatttaaa

SEQ ID NO: 298916 - DNA, 3797 bp, Homo sapiens
acgtcagtagccgaacgctgattggctgcggccaggccgtttccggtggagctgtcgcctagccgctatcgcagagtggagcggggctgggagcaaagcgctgagggagctcggtacgccgccgcctcgcacccgcagcctcgcgcccgccgccgcccgtccccagagaaccatggagtctggcagtaccgccgccagtgaggaggcacgcagccttcgagaatgtgagctctacgtccagaagcataacattcaagcgctgctcaaagattctattgtgcagttgtgcactgctcgacctgagagacccatggcattcctcagggaatactttgagaggttggagaaggaggaggcaaaacagattcagaatctgcagaaagcaggcactcgtacagactcaagggaggatgagatttctcctcctccacccaacccagtggttaaaggtaggaggcgacgaggtgctatcagcgctgaggtctacacggaggaagatgcggcatcctatgttagaaaggttataccaaaagattacaagacaatggccgctttagccaaagccattgaaaagaatgtgctgttttcacatcttgatgataatgagagaagtgatatttttgatgccatgttttcggtctcctttatcgcaggagagactgtgattcagcaaggtgatgaaggggataacttctatgtgattgatcaaggagagacggatgtctatgttaacaatgaatgggcaaccagtgttggggaaggagggagctttggagaacttgctttgatttatggaacaccgagagcagccactgtcaaagcaaagacaaatgtgaaattgtggggcatcgaccgagacagctatagaagaatcctcatgggaagcacactgagaaagcggaagatgtatgaggaattccttagtaaagtctctattttagagtctctggacaagtgggaacgtcttacggtagctgatgcattggaaccagtgcagtttgaagatgggcagaagattgtggtgcagggagaaccaggggatgagttcttcattattttagaggggtcagctgctgtgctacaacgtcggtcagaaaatgaagagtttgttgaagtgggaagattggggccttctgattattttggtgaaattgcactactgatgaatcgtcctcgtgctgccacagttgttgctcgtggccccttgaagtgcgttaagctggaccgacctagatttgaacgtgttcttggcccatgctcagacatcctcaaacgaaacatccagcagtacaacagttttgtgtcactgtctgtctgaaatctgcctcctgtgcctcccttttctcctctccccaatccatgcttcactcatgcaaactgctttattttccctacttgcagcgccaagtggccactggcatcgcagcttcctgtctgtttatatattgaaagttgcttttattgcaccattttcaatttggagcattaactaaatgctcatacacagttaaataaatagaaagagttctatggagactttgctgttactgcttctctttgtgcagtgttagtattcaccctgggcagtgagtgccatgctttttggtgagggcagatcccagcacctattgaattaccatagagtaatgatgtaacagtgcaagattttttttttaagtgacataattgtccagttataagcgtatttagactgtggccatatatgctgtatttctttgtagaataaatggtttctcattaaactctaaagattagggaaaatggatatagaaaatcttagtatagtagaaagacatctgcctgtaattaaactagtttaagggtggaaaaatgcccatttttgctaattatcaatgggatatgattggttcagtttttttttttccagagttgttgtttgccaagctaatctgcctggttttatttatatcttgttattaatgtttcttctccaattctgaaatacttttgagtatggctatctatacctgccttttaagtttgaaactaactcatagattgcaaatattggttagtatttaactacatctgcctcggctcacaaattccgattagacctttatccagctagtgccaaataattgatcagatgctgaattgagaataagaatttgaggtctacattcttggttgttaatttagagcgtttggttaaagtatgtccttcagctgactccagtataatctcctctgctcattaaactgattccaggagattggatttgctgtgactagatacagatggagcaaatgtcctaacagagaaatagaggtgatgctgctaaagggagaaatgccaggcggacaaagttcagtgtcgggaattttccccgtgacattcactggggcatgagattttggaagaagttttttactttggtttagtctttttttccttcctttttattcagctagaatttctggtgggttgatggtagggtataatgtgtctgtgttgcttcaaattggtctgaaaggctatcctgctgaaagtcctgctttcctatctagcatttatttctctggcaaacttttctttcttttcttttttaaagtaaacttgtgtattgagtcttaactgtatttcagtattttccagccttatgtgttacattattccaatgatacccaacagtttatttttattatttttttaaacaaaatttcacagttctgtaatgtaggcacttttattttcattgtgatttatatataaggtaatgtagggttatatttgggagtgactgcaagcatttttccatctgtgtgcaactaactgactctgttattgatcccttctcctgccctttcccaggtaatttaaattggtcatggtagatttttttcatagatttgaaaaacttttaggttgttaccaagtatgaagtataaatctggggaagaggttttatttacattttagggtgggtaagaaagccaccttgttacaaattttttaatttccaaaataatctatattaaatgagggtttctgatctgtactttgtgtttagctacctttttatatttaaaaaattaaaaatgaaaattacgttcttacaagcttaaagcttgatttgatctttgtttaaatgccaaaatgtacttaaatgagttacttagaatgccataaaattgcagtttcatgtatgtatataatcatgctcatgtatatttagttacgtataatgctttctgagtgagttttactcttaaatcatttggttaaatcatttggcttgctgtttactcccttctgtagtttttaattaaaaactttaaagataagtctacattaaacaatgatcacatctaaagctttatctttgtgtaatctaagtatatgtgagaaatcagaattggcataatttgtcttagttgatattcaaggctttaaaagtcattattcctgggcttggtaagtgaatttatgagatttactgctctagaaagtatagatggcgaaaggaccgttttgtattgcttcctgattaccagtctgattataccatgtgtgctaatatactttttttgttatagattgtcttaatggtaggtcaagtaataaaaagagatgaaataatttaaaaaaaaaaaaaaaaaaaactcgagactagtttttttttttttttacgtggtcacaggtttattctgagttttaatttattatacaaaagtaaaggttttaatttaatattaatagtagaaaaacactttcttacgtgtgccatatggaaagataaaggatctattct

SEQ ID NO: 298917 - DNA, 3641 bp, Homo sapiens
ccagggagggggtggaaaggagggagaaaaggcagaggcgtcaagggaggccggagggagagtggggtggacagaggagcggagggacgagagggaagcgcacgatagctgcgcggagagagagcgaagagcaggaggaggaacaaaggcgacccaagacacccagagagggacagagaaccatggagtctggcagtaccgccgccagtgaggaggcacgcagccttcgagaatgtgagctctacgtccagaagcataacattcaagcgctgctcaaagattctattgtgcagttgtgcactgctcgacctgagagacccatggcattcctcagggaatactttgagaggttggagaaggaggaggcaaaacagattcagaatctgcagaaagcaggcactcgtacagactcaagggaggatgagatttctcctcctccacccaacccagtggttaaaggtaggaggcgacgaggtgctatcagcgctgaggtctacacggaggaagatgcggcatcctatgttagaaaggttataccaaaagattacaagacaatggccgctttagccaaagccattgaaaagaatgtgctgttttcacatcttgatgataatgagagaagtgatatttttgatgccatgttttcggtctcctttatcgcaggagagactgtgattcagcaaggtgatgaaggggataacttctatgtgattgatcaaggagagacggatgtctatgttaacaatgaatgggcaaccagtgttggggaaggagggagctttggagaacttgctttgatttatggaacaccgagagcagccactgtcaaagcaaagacaaatgtgaaattgtggggcatcgaccgagacagctatagaagaatcctcatgggaagcacactgagaaagcggaagatgtatgaggaattccttagtaaagtctctattttagagtctctggacaagtgggaacgtcttacggtagctgatgcattggaaccagtgcagtttgaagatgggcagaagattgtggtgcagggagaaccaggggatgagttcttcattattttagaggggtcagctgctgtgctacaacgtcggtcagaaaatgaagagtttgttgaagtgggaagattggggccttctgattattttggtgaaattgcactactgatgaatcgtcctcgtgctgccacagttgttgctcgtggccccttgaagtgcgttaagctggaccgacctagatttgaacgtgttcttggcccatgctcagacatcctcaaacgaaacatccagcagtacaacagttttgtgtcactgtctgtctgaaatctgcctcctgtgcctcccttttctcctctccccaatccatgcttcactcatgcaaactgctttattttccctacttgcagcgccaagtggccactggcatcgcagcttcctgtctgtttatatattgaaagttgcttttattgcaccattttcaatttggagcattaactaaatgctcatacacagttaaataaatagaaagagttctatggagactttgctgttactgcttctctttgtgcagtgttagtattcaccctgggcagtgagtgccatgctttttggtgagggcagatcccagcacctattgaattaccatagagtaatgatgtaacagtgcaagattttttttttaagtgacataattgtccagttataagcgtatttagactgtggccatatatgctgtatttctttgtagaataaatggtttctcattaaactctaaagattagggaaaatggatatagaaaatcttagtatagtagaaagacatctgcctgtaattaaactagtttaagggtggaaaaatgcccatttttgctaattatcaatgggatatgattggttcagtttttttttttccagagttgttgtttgccaagctaatctgcctggttttatttatatcttgttattaatgtttcttctccaattctgaaatacttttgagtatggctatctatacctgccttttaagtttgaaactaactcatagattgcaaatattggttagtatttaactacatctgcctcggctcacaaattccgattagacctttatccagctagtgccaaataattgatcagatgctgaattgagaataagaatttgaggtctacattcttggttgttaatttagagcgtttggttaaagtatgtccttcagctgactccagtataatctcctctgctcattaaactgattccaggagattggatttgctgtgactagatacagatggagcaaatgtcctaacagagaaatagaggtgatgctgctaaagggagaaatgccaggcggacaaagttcagtgtcgggaattttccccgtgacattcactggggcatgagattttggaagaagttttttactttggtttagtctttttttccttcctttttattcagctagaatttctggtgggttgatggtagggtataatgtgtctgtgttgcttcaaattggtctgaaaggctatcctgctgaaagtcctgctttcctatctagcatttatttctctggcaaacttttctttcttttcttttttaaagtaaacttgtgtattgagtcttaactgtatttcagtattttccagccttatgtgttacattattccaatgatacccaacagtttatttttattatttttttaaacaaaatttcacagttctgtaatgtaggcacttttattttcattgtgatttatatataaggtaatgtagggttatatttgggagtgactgcaagcatttttccatctgtgtgcaactaactgactctgttattgatcccttctcctgccctttcccaggtaatttaaattggtcatggtagatttttttcatagatttgaaaaacttttaggttgttaccaagtatgaagtataaatctggggaagaggttttatttacattttagggtgggtaagaaagccaccttgttacaaattttttaatttccaaaataatctatattaaatgagggtttctgatctgtactttgtgtttagctacctttttatatttaaaaaattaaaaatgaaaattacgttcttacaagcttaaagcttgatttgatctttgtttaaatgccaaaatgtacttaaatgagttacttagaatgccataaaattgcagtttcatgtatgtatataatcatgctcatgtatatttagttacgtataatgctttctgagtgagttttactcttaaatcatttggttaaatcatttggcttgctgtttactcccttctgtagtttttaattaaaaactttaaagataagtctacattaaacaatgatcacatctaaagctttatctttgtgtaatctaagtatatgtgagaaatcagaattggcataatttgtcttagttgatattcaaggctttaaaagtcattattcctgggcttggtaagtgaatttatgagatttactgctctagaaagtatagatggcgaaaggaccgttttgtattgcttcctgattaccagtctgattataccatgtgtgctaatatactttttttgttatagattgtcttaatggtaggtcaagtaataaaaagagatgaaataatttaaa

SEQ ID NO: 298918 - DNA, 3662 bp, Homo sapiens
acgtcagtagccgaacgctgattggctgcggccaggccgtttccggtggagctgtcgcctagccgctatcgcagagtggagcggggctgggagcaaagcgctgagggagctcggtacgccgccgcctcgcacccgcagcctcgcgcccgccgccgcccgtccccaggtgagtggggtcggccgggggctcaggcgagagaaccatggagtctggcagtaccgccgccagtgaggaggcacgcagccttcgagaatgtgagctctacgtccagaagcataacattcaagcgctgctcaaagattctattgtgcagttgtgcactgctcgacctgagagacccatggcattcctcagggaatactttgagaggttggagaaggaggaggcaaaacagattcagaatctgcagaaagcaggcactcgtacagactcaagggaggatgagatttctcctcctccacccaacccagtggttaaaggtaggaggcgacgaggtgctatcagcgctgaggtctacacggaggaagatgcggcatcctatgttagaaaggttataccaaaagattacaagacaatggccgctttagccaaagccattgaaaagaatgtgctgttttcacatcttgatgataatgagagaagtgatatttttgatgccatgttttcggtctcctttatcgcaggagagactgtgattcagcaaggtgatgaaggggataacttctatgtgattgatcaaggagagacggatgtctatgttaacaatgaatgggcaaccagtgttggggaaggagggagctttggagaacttgctttgatttatggaacaccgagagcagccactgtcaaagcaaagacaaatgtgaaattgtggggcatcgaccgagacagctatagaagaatcctcatgggaagcacactgagaaagcggaagatgtatgaggaattccttagtaaagtctctattttagagtctctggacaagtgggaacgtcttacggtagctgatgcattggaaccagtgcagtttgaagatgggcagaagattgtggtgcagggagaaccaggggatgagttcttcattattttagaggggtcagctgctgtgctacaacgtcggtcagaaaatgaagagtttgttgaagtgggaagattggggccttctgattattttggtgaaattgcactactgatgaatcgtcctcgtgctgccacagttgttgctcgtggccccttgaagtgcgttaagctggaccgacctagatttgaacgtgttcttggcccatgctcagacatcctcaaacgaaacatccagcagtacaacagttttgtgtcactgtctgtctgaaatctgcctcctgtgcctcccttttctcctctccccaatccatgcttcactcatgcaaactgctttattttccctacttgcagcgccaagtggccactggcatcgcagcttcctgtctgtttatatattgaaagttgcttttattgcaccattttcaatttggagcattaactaaatgctcatacacagttaaataaatagaaagagttctatggagactttgctgttactgcttctctttgtgcagtgttagtattcaccctgggcagtgagtgccatgctttttggtgagggcagatcccagcacctattgaattaccatagagtaatgatgtaacagtgcaagattttttttttaagtgacataattgtccagttataagcgtatttagactgtggccatatatgctgtatttctttgtagaataaatggtttctcattaaactctaaagattagggaaaatggatatagaaaatcttagtatagtagaaagacatctgcctgtaattaaactagtttaagggtggaaaaatgcccatttttgctaattatcaatgggatatgattggttcagtttttttttttccagagttgttgtttgccaagctaatctgcctggttttatttatatcttgttattaatgtttcttctccaattctgaaatacttttgagtatggctatctatacctgccttttaagtttgaaactaactcatagattgcaaatattggttagtatttaactacatctgcctcggctcacaaattccgattagacctttatccagctagtgccaaataattgatcagatgctgaattgagaataagaatttgaggtctacattcttggttgttaatttagagcgtttggttaaagtatgtccttcagctgactccagtataatctcctctgctcattaaactgattccaggagattggatttgctgtgactagatacagatggagcaaatgtcctaacagagaaatagaggtgatgctgctaaagggagaaatgccaggcggacaaagttcagtgtcgggaattttccccgtgacattcactggggcatgagattttggaagaagttttttactttggtttagtctttttttccttcctttttattcagctagaatttctggtgggttgatggtagggtataatgtgtctgtgttgcttcaaattggtctgaaaggctatcctgctgaaagtcctgctttcctatctagcatttatttctctggcaaacttttctttcttttcttttttaaagtaaacttgtgtattgagtcttaactgtatttcagtattttccagccttatgtgttacattattccaatgatacccaacagtttatttttattatttttttaaacaaaatttcacagttctgtaatgtaggcacttttattttcattgtgatttatatataaggtaatgtagggttatatttgggagtgactgcaagcatttttccatctgtgtgcaactaactgactctgttattgatcccttctcctgccctttcccaggtaatttaaattggtcatggtagatttttttcatagatttgaaaaacttttaggttgttaccaagtatgaagtataaatctggggaagaggttttatttacattttagggtgggtaagaaagccaccttgttacaaattttttaatttccaaaataatctatattaaatgagggtttctgatctgtactttgtgtttagctacctttttatatttaaaaaattaaaaatgaaaattacgttcttacaagcttaaagcttgatttgatctttgtttaaatgccaaaatgtacttaaatgagttacttagaatgccataaaattgcagtttcatgtatgtatataatcatgctcatgtatatttagttacgtataatgctttctgagtgagttttactcttaaatcatttggttaaatcatttggcttgctgtttactcccttctgtagtttttaattaaaaactttaaagataagtctacattaaacaatgatcacatctaaagctttatctttgtgtaatctaagtatatgtgagaaatcagaattggcataatttgtcttagttgatattcaaggctttaaaagtcattattcctgggcttggtaagtgaatttatgagatttactgctctagaaagtatagatggcgaaaggaccgttttgtattgcttcctgattaccagtctgattataccatgtgtgctaatatactttttttgttatagattgtcttaatggtaggtcaagtaataaaaagagatgaaataatttaaa

SEQ ID NO: 298919 - DNA, 3696 bp, Homo sapiens
acgtcagtagccgaacgctgattggctgcggccaggccgtttccggtggagctgtcgcctagccgctatcgcagagtggagcggggctgggagcaaagcgctgagggagctcggtacgccgccgcctcgcacccgcagcctcgcgcccgccgccgcccgtccccaggacaacggctctattttactggggtccgccatcgtctcgtccgccggtcctggctcttcttgtaaagaaccatggagtctggcagtaccgccgccagtgaggaggcacgcagccttcgagaatgtgagctctacgtccagaagcataacattcaagcgctgctcaaagattctattgtgcagttgtgcactgctcgacctgagagacccatggcattcctcagggaatactttgagaggttggagaaggaggaggcaaaacagattcagaatctgcagaaagcaggcactcgtacagactcaagggaggatgagatttctcctcctccacccaacccagtggttaaaggtaggaggcgacgaggtgctatcagcgctgaggtctacacggaggaagatgcggcatcctatgttagaaaggttataccaaaagattacaagacaatggccgctttagccaaagccattgaaaagaatgtgctgttttcacatcttgatgataatgagagaagtgatatttttgatgccatgttttcggtctcctttatcgcaggagagactgtgattcagcaaggtgatgaaggggataacttctatgtgattgatcaaggagagacggatgtctatgttaacaatgaatgggcaaccagtgttggggaaggagggagctttggagaacttgctttgatttatggaacaccgagagcagccactgtcaaagcaaagacaaatgtgaaattgtggggcatcgaccgagacagctatagaagaatcctcatgggaagcacactgagaaagcggaagatgtatgaggaattccttagtaaagtctctattttagagtctctggacaagtgggaacgtcttacggtagctgatgcattggaaccagtgcagtttgaagatgggcagaagattgtggtgcagggagaaccaggggatgagttcttcattattttagaggggtcagctgctgtgctacaacgtcggtcagaaaatgaagagtttgttgaagtgggaagattggggccttctgattattttggtgaaattgcactactgatgaatcgtcctcgtgctgccacagttgttgctcgtggccccttgaagtgcgttaagctggaccgacctagatttgaacgtgttcttggcccatgctcagacatcctcaaacgaaacatccagcagtacaacagttttgtgtcactgtctgtctgaaatctgcctcctgtgcctcccttttctcctctccccaatccatgcttcactcatgcaaactgctttattttccctacttgcagcgccaagtggccactggcatcgcagcttcctgtctgtttatatattgaaagttgcttttattgcaccattttcaatttggagcattaactaaatgctcatacacagttaaataaatagaaagagttctatggagactttgctgttactgcttctctttgtgcagtgttagtattcaccctgggcagtgagtgccatgctttttggtgagggcagatcccagcacctattgaattaccatagagtaatgatgtaacagtgcaagattttttttttaagtgacataattgtccagttataagcgtatttagactgtggccatatatgctgtatttctttgtagaataaatggtttctcattaaactctaaagattagggaaaatggatatagaaaatcttagtatagtagaaagacatctgcctgtaattaaactagtttaagggtggaaaaatgcccatttttgctaattatcaatgggatatgattggttcagtttttttttttccagagttgttgtttgccaagctaatctgcctggttttatttatatcttgttattaatgtttcttctccaattctgaaatacttttgagtatggctatctatacctgccttttaagtttgaaactaactcatagattgcaaatattggttagtatttaactacatctgcctcggctcacaaattccgattagacctttatccagctagtgccaaataattgatcagatgctgaattgagaataagaatttgaggtctacattcttggttgttaatttagagcgtttggttaaagtatgtccttcagctgactccagtataatctcctctgctcattaaactgattccaggagattggatttgctgtgactagatacagatggagcaaatgtcctaacagagaaatagaggtgatgctgctaaagggagaaatgccaggcggacaaagttcagtgtcgggaattttccccgtgacattcactggggcatgagattttggaagaagttttttactttggtttagtctttttttccttcctttttattcagctagaatttctggtgggttgatggtagggtataatgtgtctgtgttgcttcaaattggtctgaaaggctatcctgctgaaagtcctgctttcctatctagcatttatttctctggcaaacttttctttcttttcttttttaaagtaaacttgtgtattgagtcttaactgtatttcagtattttccagccttatgtgttacattattccaatgatacccaacagtttatttttattatttttttaaacaaaatttcacagttctgtaatgtaggcacttttattttcattgtgatttatatataaggtaatgtagggttatatttgggagtgactgcaagcatttttccatctgtgtgcaactaactgactctgttattgatcccttctcctgccctttcccaggtaatttaaattggtcatggtagatttttttcatagatttgaaaaacttttaggttgttaccaagtatgaagtataaatctggggaagaggttttatttacattttagggtgggtaagaaagccaccttgttacaaattttttaatttccaaaataatctatattaaatgagggtttctgatctgtactttgtgtttagctacctttttatatttaaaaaattaaaaatgaaaattacgttcttacaagcttaaagcttgatttgatctttgtttaaatgccaaaatgtacttaaatgagttacttagaatgccataaaattgcagtttcatgtatgtatataatcatgctcatgtatatttagttacgtataatgctttctgagtgagttttactcttaaatcatttggttaaatcatttggcttgctgtttactcccttctgtagtttttaattaaaaactttaaagataagtctacattaaacaatgatcacatctaaagctttatctttgtgtaatctaagtatatgtgagaaatcagaattggcataatttgtcttagttgatattcaaggctttaaaagtcattattcctgggcttggtaagtgaatttatgagatttactgctctagaaagtatagatggcgaaaggaccgttttgtattgcttcctgattaccagtctgattataccatgtgtgctaatatactttttttgttatagattgtcttaatggtaggtcaagtaataaaaagagatgaaataatttaaa

SEQ ID NO: 298920 - DNA, 3829 bp, Homo sapiens
acgtcagtagccgaacgctgattggctgcggccaggccgtttccggtggagctgtcgcctagccgctatcgcagagtggagcggggctgggagcaaagcgctgagggagctcggtacgccgccgcctcgcacccgcagcctcgcgcccgccgccgcccgtccccaggacaacggctctattttactggggtccgccatcgtctcgtccgccggtcctggctcttcttgtaattgacttttgtgccctggtaattctgtatcctgtttaccgtttacctacttcccacgtcatcatgatttcttttgagggagaactgaatgaaattcccttaagggcctgacttcagcacccgtctctgcagagagaaccatggagtctggcagtaccgccgccagtgaggaggcacgcagccttcgagaatgtgagctctacgtccagaagcataacattcaagcgctgctcaaagattctattgtgcagttgtgcactgctcgacctgagagacccatggcattcctcagggaatactttgagaggttggagaaggaggaggcaaaacagattcagaatctgcagaaagcaggcactcgtacagactcaagggaggatgagatttctcctcctccacccaacccagtggttaaaggtaggaggcgacgaggtgctatcagcgctgaggtctacacggaggaagatgcggcatcctatgttagaaaggttataccaaaagattacaagacaatggccgctttagccaaagccattgaaaagaatgtgctgttttcacatcttgatgataatgagagaagtgatatttttgatgccatgttttcggtctcctttatcgcaggagagactgtgattcagcaaggtgatgaaggggataacttctatgtgattgatcaaggagagacggatgtctatgttaacaatgaatgggcaaccagtgttggggaaggagggagctttggagaacttgctttgatttatggaacaccgagagcagccactgtcaaagcaaagacaaatgtgaaattgtggggcatcgaccgagacagctatagaagaatcctcatgggaagcacactgagaaagcggaagatgtatgaggaattccttagtaaagtctctattttagagtctctggacaagtgggaacgtcttacggtagctgatgcattggaaccagtgcagtttgaagatgggcagaagattgtggtgcagggagaaccaggggatgagttcttcattattttagaggggtcagctgctgtgctacaacgtcggtcagaaaatgaagagtttgttgaagtgggaagattggggccttctgattattttggtgaaattgcactactgatgaatcgtcctcgtgctgccacagttgttgctcgtggccccttgaagtgcgttaagctggaccgacctagatttgaacgtgttcttggcccatgctcagacatcctcaaacgaaacatccagcagtacaacagttttgtgtcactgtctgtctgaaatctgcctcctgtgcctcccttttctcctctccccaatccatgcttcactcatgcaaactgctttattttccctacttgcagcgccaagtggccactggcatcgcagcttcctgtctgtttatatattgaaagttgcttttattgcaccattttcaatttggagcattaactaaatgctcatacacagttaaataaatagaaagagttctatggagactttgctgttactgcttctctttgtgcagtgttagtattcaccctgggcagtgagtgccatgctttttggtgagggcagatcccagcacctattgaattaccatagagtaatgatgtaacagtgcaagattttttttttaagtgacataattgtccagttataagcgtatttagactgtggccatatatgctgtatttctttgtagaataaatggtttctcattaaactctaaagattagggaaaatggatatagaaaatcttagtatagtagaaagacatctgcctgtaattaaactagtttaagggtggaaaaatgcccatttttgctaattatcaatgggatatgattggttcagtttttttttttccagagttgttgtttgccaagctaatctgcctggttttatttatatcttgttattaatgtttcttctccaattctgaaatacttttgagtatggctatctatacctgccttttaagtttgaaactaactcatagattgcaaatattggttagtatttaactacatctgcctcggctcacaaattccgattagacctttatccagctagtgccaaataattgatcagatgctgaattgagaataagaatttgaggtctacattcttggttgttaatttagagcgtttggttaaagtatgtccttcagctgactccagtataatctcctctgctcattaaactgattccaggagattggatttgctgtgactagatacagatggagcaaatgtcctaacagagaaatagaggtgatgctgctaaagggagaaatgccaggcggacaaagttcagtgtcgggaattttccccgtgacattcactggggcatgagattttggaagaagttttttactttggtttagtctttttttccttcctttttattcagctagaatttctggtgggttgatggtagggtataatgtgtctgtgttgcttcaaattggtctgaaaggctatcctgctgaaagtcctgctttcctatctagcatttatttctctggcaaacttttctttcttttcttttttaaagtaaacttgtgtattgagtcttaactgtatttcagtattttccagccttatgtgttacattattccaatgatacccaacagtttatttttattatttttttaaacaaaatttcacagttctgtaatgtaggcacttttattttcattgtgatttatatataaggtaatgtagggttatatttgggagtgactgcaagcatttttccatctgtgtgcaactaactgactctgttattgatcccttctcctgccctttcccaggtaatttaaattggtcatggtagatttttttcatagatttgaaaaacttttaggttgttaccaagtatgaagtataaatctggggaagaggttttatttacattttagggtgggtaagaaagccaccttgttacaaattttttaatttccaaaataatctatattaaatgagggtttctgatctgtactttgtgtttagctacctttttatatttaaaaaattaaaaatgaaaattacgttcttacaagcttaaagcttgatttgatctttgtttaaatgccaaaatgtacttaaatgagttacttagaatgccataaaattgcagtttcatgtatgtatataatcatgctcatgtatatttagttacgtataatgctttctgagtgagttttactcttaaatcatttggttaaatcatttggcttgctgtttactcccttctgtagtttttaattaaaaactttaaagataagtctacattaaacaatgatcacatctaaagctttatctttgtgtaatctaagtatatgtgagaaatcagaattggcataatttgtcttagttgatattcaaggctttaaaagtcattattcctgggcttggtaagtgaatttatgagatttactgctctagaaagtatagatggcgaaaggaccgttttgtattgcttcctgattaccagtctgattataccatgtgtgctaatatactttttttgttatagattgtcttaatggtaggtcaagtaataaaaagagatgaaataatttaaa

SEQ ID NO: 298921 - DNA, 3774 bp, Homo sapiens
ccagggagggggtggaaaggagggagaaaaggcagaggcgtcaagggaggccggagggagagtggggtggacagaggagcggagggacgagagggaagcgcacgatagctgcgcggagagagagcgaagagcaggaggaggaacaaaggcgacccaagacacccagagagggacagttgacttttgtgccctggtaattctgtatcctgtttaccgtttacctacttcccacgtcatcatgatttcttttgagggagaactgaatgaaattcccttaagggcctgacttcagcacccgtctctgcagagagaaccatggagtctggcagtaccgccgccagtgaggaggcacgcagccttcgagaatgtgagctctacgtccagaagcataacattcaagcgctgctcaaagattctattgtgcagttgtgcactgctcgacctgagagacccatggcattcctcagggaatactttgagaggttggagaaggaggaggcaaaacagattcagaatctgcagaaagcaggcactcgtacagactcaagggaggatgagatttctcctcctccacccaacccagtggttaaaggtaggaggcgacgaggtgctatcagcgctgaggtctacacggaggaagatgcggcatcctatgttagaaaggttataccaaaagattacaagacaatggccgctttagccaaagccattgaaaagaatgtgctgttttcacatcttgatgataatgagagaagtgatatttttgatgccatgttttcggtctcctttatcgcaggagagactgtgattcagcaaggtgatgaaggggataacttctatgtgattgatcaaggagagacggatgtctatgttaacaatgaatgggcaaccagtgttggggaaggagggagctttggagaacttgctttgatttatggaacaccgagagcagccactgtcaaagcaaagacaaatgtgaaattgtggggcatcgaccgagacagctatagaagaatcctcatgggaagcacactgagaaagcggaagatgtatgaggaattccttagtaaagtctctattttagagtctctggacaagtgggaacgtcttacggtagctgatgcattggaaccagtgcagtttgaagatgggcagaagattgtggtgcagggagaaccaggggatgagttcttcattattttagaggggtcagctgctgtgctacaacgtcggtcagaaaatgaagagtttgttgaagtgggaagattggggccttctgattattttggtgaaattgcactactgatgaatcgtcctcgtgctgccacagttgttgctcgtggccccttgaagtgcgttaagctggaccgacctagatttgaacgtgttcttggcccatgctcagacatcctcaaacgaaacatccagcagtacaacagttttgtgtcactgtctgtctgaaatctgcctcctgtgcctcccttttctcctctccccaatccatgcttcactcatgcaaactgctttattttccctacttgcagcgccaagtggccactggcatcgcagcttcctgtctgtttatatattgaaagttgcttttattgcaccattttcaatttggagcattaactaaatgctcatacacagttaaataaatagaaagagttctatggagactttgctgttactgcttctctttgtgcagtgttagtattcaccctgggcagtgagtgccatgctttttggtgagggcagatcccagcacctattgaattaccatagagtaatgatgtaacagtgcaagattttttttttaagtgacataattgtccagttataagcgtatttagactgtggccatatatgctgtatttctttgtagaataaatggtttctcattaaactctaaagattagggaaaatggatatagaaaatcttagtatagtagaaagacatctgcctgtaattaaactagtttaagggtggaaaaatgcccatttttgctaattatcaatgggatatgattggttcagtttttttttttccagagttgttgtttgccaagctaatctgcctggttttatttatatcttgttattaatgtttcttctccaattctgaaatacttttgagtatggctatctatacctgccttttaagtttgaaactaactcatagattgcaaatattggttagtatttaactacatctgcctcggctcacaaattccgattagacctttatccagctagtgccaaataattgatcagatgctgaattgagaataagaatttgaggtctacattcttggttgttaatttagagcgtttggttaaagtatgtccttcagctgactccagtataatctcctctgctcattaaactgattccaggagattggatttgctgtgactagatacagatggagcaaatgtcctaacagagaaatagaggtgatgctgctaaagggagaaatgccaggcggacaaagttcagtgtcgggaattttccccgtgacattcactggggcatgagattttggaagaagttttttactttggtttagtctttttttccttcctttttattcagctagaatttctggtgggttgatggtagggtataatgtgtctgtgttgcttcaaattggtctgaaaggctatcctgctgaaagtcctgctttcctatctagcatttatttctctggcaaacttttctttcttttcttttttaaagtaaacttgtgtattgagtcttaactgtatttcagtattttccagccttatgtgttacattattccaatgatacccaacagtttatttttattatttttttaaacaaaatttcacagttctgtaatgtaggcacttttattttcattgtgatttatatataaggtaatgtagggttatatttgggagtgactgcaagcatttttccatctgtgtgcaactaactgactctgttattgatcccttctcctgccctttcccaggtaatttaaattggtcatggtagatttttttcatagatttgaaaaacttttaggttgttaccaagtatgaagtataaatctggggaagaggttttatttacattttagggtgggtaagaaagccaccttgttacaaattttttaatttccaaaataatctatattaaatgagggtttctgatctgtactttgtgtttagctacctttttatatttaaaaaattaaaaatgaaaattacgttcttacaagcttaaagcttgatttgatctttgtttaaatgccaaaatgtacttaaatgagttacttagaatgccataaaattgcagtttcatgtatgtatataatcatgctcatgtatatttagttacgtataatgctttctgagtgagttttactcttaaatcatttggttaaatcatttggcttgctgtttactcccttctgtagtttttaattaaaaactttaaagataagtctacattaaacaatgatcacatctaaagctttatctttgtgtaatctaagtatatgtgagaaatcagaattggcataatttgtcttagttgatattcaaggctttaaaagtcattattcctgggcttggtaagtgaatttatgagatttactgctctagaaagtatagatggcgaaaggaccgttttgtattgcttcctgattaccagtctgattataccatgtgtgctaatatactttttttgttatagattgtcttaatggtaggtcaagtaataaaaagagatgaaataatttaaa

SEQ ID NO: 298922 - DNA, 3906 bp, Homo sapiens
acgtcagtagccgaacgctgattggctgcggccaggccgtttccggtggagctgtcgcctagccgctatcgcagagtggagcggggctgggagcaaagcgctgagggagctcggtacgccgccgcctcgcacccgcagcctcgcgcccgccgccgcccgtccccagagaaccatggagtctggcagtaccgccgccagtgaggaggcacgcagccttcgagaatgtgagctctacgtccagaagcataacattcaagcgctgctcaaagattctattgtgcagttgtgcactgctcgacctgagagacccatggcattcctcagggaatactttgagaggttggagaaggaggaggcaaaacagattcagaatctgcagaaagcaggcactcgtacagactcaagggaggatgagatttctcctcctccacccaacccagtggttaaaggtaggaggcgacgaggtgctatcagcgctgaggtctacacggaggaagatgcggcatcctatgttagaaaggttataccaaaagattacaagacaatggccgctttagccaaagccattgaaaagaatgtgctgttttcacatcttgatgataatgagagaagtgatatttttgatgccatgttttcggtctcctttatcgcaggagagactgtgattcagcaaggtgatgaaggggataacttctatgtgattgatcaaggagagacggatgtctatgttaacaatgaatgggcaaccagtgttggggaaggagggagctttggagaacttgctttgatttatggaacaccgagagcagccactgtcaaagcaaagacaaatgtgaaattgtggggcatcgaccgagacagctatagaagaatcctcatgggaagcacactgagaaagcggaagatgtatgaggaattccttagtaaagtctctattttagagtctctggacaagtgggaacgtcttacggtagctgatgcattggaaccagtgcagtttgaagatgggcagaagattgtggtgcagggagaaccaggggatgagttcttcattattttagaggggtcagctgctgtgctacaacgtcggtcagaaaatgaagagtttgttgaagtgggaagattggggccttctgattattttggtatgtatgaattccctcacaataaatacatggtttctttaagtcacctctcagtgagatattgtagtcttccataattttgtcttctcctgaattttattttctaactgcagtcttttttggctctgagagggaaggtgtgagattttgatctttactcatttaatgaaattactgattgtctcatatctattgtcttctttctcagaagtgcactgctttaaggaaatgtttttcatagaagttagcctgttacccatctttgctttctccaggtgaaattgcactactgatgaatcgtcctcgtgctgccacagttgttgctcgtggccccttgaagtgcgttaagctggaccgacctagatttgaacgtgttcttggcccatgctcagacatcctcaaacgaaacatccagcagtacaacagttttgtgtcactgtctgtctgaaatctgcctcctgtgcctcccttttctcctctccccaatccatgcttcactcatgcaaactgctttattttccctacttgcagcgccaagtggccactggcatcgcagcttcctgtctgtttatatattgaaagttgcttttattgcaccattttcaatttggagcattaactaaatgctcatacacagttaaataaatagaaagagttctatggagactttgctgttactgcttctctttgtgcagtgttagtattcaccctgggcagtgagtgccatgctttttggtgagggcagatcccagcacctattgaattaccatagagtaatgatgtaacagtgcaagattttttttttaagtgacataattgtccagttataagcgtatttagactgtggccatatatgctgtatttctttgtagaataaatggtttctcattaaactctaaagattagggaaaatggatatagaaaatcttagtatagtagaaagacatctgcctgtaattaaactagtttaagggtggaaaaatgcccatttttgctaattatcaatgggatatgattggttcagtttttttttttccagagttgttgtttgccaagctaatctgcctggttttatttatatcttgttattaatgtttcttctccaattctgaaatacttttgagtatggctatctatacctgccttttaagtttgaaactaactcatagattgcaaatattggttagtatttaactacatctgcctcggctcacaaattccgattagacctttatccagctagtgccaaataattgatcagatgctgaattgagaataagaatttgaggtctacattcttggttgttaatttagagcgtttggttaaagtatgtccttcagctgactccagtataatctcctctgctcattaaactgattccaggagattggatttgctgtgactagatacagatggagcaaatgtcctaacagagaaatagaggtgatgctgctaaagggagaaatgccaggcggacaaagttcagtgtcgggaattttccccgtgacattcactggggcatgagattttggaagaagttttttactttggtttagtctttttttccttcctttttattcagctagaatttctggtgggttgatggtagggtataatgtgtctgtgttgcttcaaattggtctgaaaggctatcctgctgaaagtcctgctttcctatctagcatttatttctctggcaaacttttctttcttttcttttttaaagtaaacttgtgtattgagtcttaactgtatttcagtattttccagccttatgtgttacattattccaatgatacccaacagtttatttttattatttttttaaacaaaatttcacagttctgtaatgtaggcacttttattttcattgtgatttatatataaggtaatgtagggttatatttgggagtgactgcaagcatttttccatctgtgtgcaactaactgactctgttattgatcccttctcctgccctttcccaggtaatttaaattggtcatggtagatttttttcatagatttgaaaaacttttaggttgttaccaagtatgaagtataaatctggggaagaggttttatttacattttagggtgggtaagaaagccaccttgttacaaattttttaatttccaaaataatctatattaaatgagggtttctgatctgtactttgtgtttagctacctttttatatttaaaaaattaaaaatgaaaattacgttcttacaagcttaaagcttgatttgatctttgtttaaatgccaaaatgtacttaaatgagttacttagaatgccataaaattgcagtttcatgtatgtatataatcatgctcatgtatatttagttacgtataatgctttctgagtgagttttactcttaaatcatttggttaaatcatttggcttgctgtttactcccttctgtagtttttaattaaaaactttaaagataagtctacattaaacaatgatcacatctaaagctttatctttgtgtaatctaagtatatgtgagaaatcagaattggcataatttgtcttagttgatattcaaggctttaaaagtcattattcctgggcttggtaagtgaatttatgagatttactgctctagaaagtatagatggcgaaaggaccgttttgtattgcttcctgattaccagtctgattataccatgtgtgctaatatactttttttgttatagattgtcttaatggtaggtcaagtaataaaaagagatgaaataatttaaa

SEQ ID NO: 298923 - DNA, 3585 bp, Homo sapiens
acgtcagtagccgaacgctgattggctgcggccaggccgtttccggtggagctgtcgcctagccgctatcgcagagtggagcggggctgggagcaaagcgctgagggagctcggtacgccgccgcctcgcacccgcagcctcgcgcccgccgccgcccgtccccagagaaccatggagtctggcagtaccgccgccagtgaggaggcacgcagccttcgagaatgtgagctctacgtccagaagcataacattcaagcgctgctcaaagattctattgtgcagttgtgcactgctcgacctgagagacccatggcattcctcagggaatactttgagaggttggagaaggaggaggcaaaacagattcagaatctgcagaaagcaggcactcgtacagactcaagggaggatgagatttctcctcctccacccaacccagtggttaaaggtaggaggcgacgaggtgctatcagcgctgaggtctacacggaggaagatgcggcatcctatgttagaaaggttataccaaaagattacaagacaatggccgctttagccaaagccatgatatttttgatgccatgttttcggtctcctttatcgcaggagagactgtgattcagcaaggtgatgaaggggataacttctatgtgattgatcaaggagagacggatgtctatgttaacaatgaatgggcaaccagtgttggggaaggagggagctttggagaacttgctttgatttatggaacaccgagagcagccactgtcaaagcaaagacaaatgtgaaattgtggggcatcgaccgagacagctatagaagaatcctcatgggaagcacactgagaaagcggaagatgtatgaggaattccttagtaaagtctctattttagagtctctggacaagtgggaacgtcttacggtagctgatgcattggaaccagtgcagtttgaagatgggcagaagattgtggtgcagggagaaccaggggatgagttcttcattattttagaggggtcagctgctgtgctacaacgtcggtcagaaaatgaagagtttgttgaagtgggaagattggggccttctgattattttggtgaaattgcactactgatgaatcgtcctcgtgctgccacagttgttgctcgtggccccttgaagtgcgttaagctggaccgacctagatttgaacgtgttcttggcccatgctcagacatcctcaaacgaaacatccagcagtacaacagttttgtgtcactgtctgtctgaaatctgcctcctgtgcctcccttttctcctctccccaatccatgcttcactcatgcaaactgctttattttccctacttgcagcgccaagtggccactggcatcgcagcttcctgtctgtttatatattgaaagttgcttttattgcaccattttcaatttggagcattaactaaatgctcatacacagttaaataaatagaaagagttctatggagactttgctgttactgcttctctttgtgcagtgttagtattcaccctgggcagtgagtgccatgctttttggtgagggcagatcccagcacctattgaattaccatagagtaatgatgtaacagtgcaagattttttttttaagtgacataattgtccagttataagcgtatttagactgtggccatatatgctgtatttctttgtagaataaatggtttctcattaaactctaaagattagggaaaatggatatagaaaatcttagtatagtagaaagacatctgcctgtaattaaactagtttaagggtggaaaaatgcccatttttgctaattatcaatgggatatgattggttcagtttttttttttccagagttgttgtttgccaagctaatctgcctggttttatttatatcttgttattaatgtttcttctccaattctgaaatacttttgagtatggctatctatacctgccttttaagtttgaaactaactcatagattgcaaatattggttagtatttaactacatctgcctcggctcacaaattccgattagacctttatccagctagtgccaaataattgatcagatgctgaattgagaataagaatttgaggtctacattcttggttgttaatttagagcgtttggttaaagtatgtccttcagctgactccagtataatctcctctgctcattaaactgattccaggagattggatttgctgtgactagatacagatggagcaaatgtcctaacagagaaatagaggtgatgctgctaaagggagaaatgccaggcggacaaagttcagtgtcgggaattttccccgtgacattcactggggcatgagattttggaagaagttttttactttggtttagtctttttttccttcctttttattcagctagaatttctggtgggttgatggtagggtataatgtgtctgtgttgcttcaaattggtctgaaaggctatcctgctgaaagtcctgctttcctatctagcatttatttctctggcaaacttttctttcttttcttttttaaagtaaacttgtgtattgagtcttaactgtatttcagtattttccagccttatgtgttacattattccaatgatacccaacagtttatttttattatttttttaaacaaaatttcacagttctgtaatgtaggcacttttattttcattgtgatttatatataaggtaatgtagggttatatttgggagtgactgcaagcatttttccatctgtgtgcaactaactgactctgttattgatcccttctcctgccctttcccaggtaatttaaattggtcatggtagatttttttcatagatttgaaaaacttttaggttgttaccaagtatgaagtataaatctggggaagaggttttatttacattttagggtgggtaagaaagccaccttgttacaaattttttaatttccaaaataatctatattaaatgagggtttctgatctgtactttgtgtttagctacctttttatatttaaaaaattaaaaatgaaaattacgttcttacaagcttaaagcttgatttgatctttgtttaaatgccaaaatgtacttaaatgagttacttagaatgccataaaattgcagtttcatgtatgtatataatcatgctcatgtatatttagttacgtataatgctttctgagtgagttttactcttaaatcatttggttaaatcatttggcttgctgtttactcccttctgtagtttttaattaaaaactttaaagataagtctacattaaacaatgatcacatctaaagctttatctttgtgtaatctaagtatatgtgagaaatcagaattggcataatttgtcttagttgatattcaaggctttaaaagtcattattcctgggcttggtaagtgaatttatgagatttactgctctagaaagtatagatggcgaaaggaccgttttgtattgcttcctgattaccagtctgattataccatgtgtgctaatatactttttttgttatagattgtcttaatggtaggtcaagtaataaaaagagatgaaataatttaaa

SEQ ID NO: 298924 - DNA, 3325 bp, Homo sapiens
ccagcactttgggaggccaaggtgggtggatcatttcagcccaggagtttgagatcaccctgcgcaatgtggcaaaaccctgtctctacaaaaactacaaaagttagctgggcgtgggggtgcgtgcctgtggtcccagccacgtaggaggcgacgaggtgctatcagcgctgaggtctacacggaggaagatgcggcatcctatgttagaaaggttataccaaaagattacaagacaatggccgctttagccaaagccattgaaaagaatgtgctgttttcacatcttgatgataatgagagaagtgatatttttgatgccatgttttcggtctcctttatcgcaggagagactgtgattcagcaaggtgatgaaggggataacttctatgtgattgatcaaggagagacggatgtctatgttaacaatgaatgggcaaccagtgttggggaaggagggagctttggagaacttgctttgatttatggaacaccgagagcagccactgtcaaagcaaagacaaatgtgaaattgtggggcatcgaccgagacagctatagaagaatcctcatgggaagcacactgagaaagcggaagatgtatgaggaattccttagtaaagtctctattttagagtctctggacaagtgggaacgtcttacggtagctgatgcattggaaccagtgcagtttgaagatgggcagaagattgtggtgcagggagaaccaggggatgagttcttcattattttagaggggtcagctgctgtgctacaacgtcggtcagaaaatgaagagtttgttgaagtgggaagattggggccttctgattattttggtgaaattgcactactgatgaatcgtcctcgtgctgccacagttgttgctcgtggccccttgaagtgcgttaagctggaccgacctagatttgaacgtgttcttggcccatgctcagacatcctcaaacgaaacatccagcagtacaacagttttgtgtcactgtctgtctgaaatctgcctcctgtgcctcccttttctcctctccccaatccatgcttcactcatgcaaactgctttattttccctacttgcagcgccaagtggccactggcatcgcagcttcctgtctgtttatatattgaaagttgcttttattgcaccattttcaatttggagcattaactaaatgctcatacacagttaaataaatagaaagagttctatggagactttgctgttactgcttctctttgtgcagtgttagtattcaccctgggcagtgagtgccatgctttttggtgagggcagatcccagcacctattgaattaccatagagtaatgatgtaacagtgcaagattttttttttaagtgacataattgtccagttataagcgtatttagactgtggccatatatgctgtatttctttgtagaataaatggtttctcattaaactctaaagattagggaaaatggatatagaaaatcttagtatagtagaaagacatctgcctgtaattaaactagtttaagggtggaaaaatgcccatttttgctaattatcaatgggatatgattggttcagtttttttttttccagagttgttgtttgccaagctaatctgcctggttttatttatatcttgttattaatgtttcttctccaattctgaaatacttttgagtatggctatctatacctgccttttaagtttgaaactaactcatagattgcaaatattggttagtatttaactacatctgcctcggctcacaaattccgattagacctttatccagctagtgccaaataattgatcagatgctgaattgagaataagaatttgaggtctacattcttggttgttaatttagagcgtttggttaaagtatgtccttcagctgactccagtataatctcctctgctcattaaactgattccaggagattggatttgctgtgactagatacagatggagcaaatgtcctaacagagaaatagaggtgatgctgctaaagggagaaatgccaggcggacaaagttcagtgtcgggaattttccccgtgacattcactggggcatgagattttggaagaagttttttactttggtttagtctttttttccttcctttttattcagctagaatttctggtgggttgatggtagggtataatgtgtctgtgttgcttcaaattggtctgaaaggctatcctgctgaaagtcctgctttcctatctagcatttatttctctggcaaacttttctttcttttcttttttaaagtaaacttgtgtattgagtcttaactgtatttcagtattttccagccttatgtgttacattattccaatgatacccaacagtttatttttattatttttttaaacaaaatttcacagttctgtaatgtaggcacttttattttcattgtgatttatatataaggtaatgtagggttatatttgggagtgactgcaagcatttttccatctgtgtgcaactaactgactctgttattgatcccttctcctgccctttcccaggtaatttaaattggtcatggtagatttttttcatagatttgaaaaacttttaggttgttaccaagtatgaagtataaatctggggaagaggttttatttacattttagggtgggtaagaaagccaccttgttacaaattttttaatttccaaaataatctatattaaatgagggtttctgatctgtactttgtgtttagctacctttttatatttaaaaaattaaaaatgaaaattacgttcttacaagcttaaagcttgatttgatctttgtttaaatgccaaaatgtacttaaatgagttacttagaatgccataaaattgcagtttcatgtatgtatataatcatgctcatgtatatttagttacgtataatgctttctgagtgagttttactcttaaatcatttggttaaatcatttggcttgctgtttactcccttctgtagtttttaattaaaaactttaaagataagtctacattaaacaatgatcacatctaaagctttatctttgtgtaatctaagtatatgtgagaaatcagaattggcataatttgtcttagttgatattcaaggctttaaaagtcattattcctgggcttggtaagtgaatttatgagatttactgctctagaaagtatagatggcgaaaggaccgttttgtattgcttcctgattaccagtctgattataccatgtgtgctaatatactttttttgttatagattgtcttaatggtaggtcaagtaataaaaagagatgaaataatttaaa

SEQ ID NO: 298925 - DNA, 3720 bp, Homo sapiens
acgtcagtagccgaacgctgattggctgcggccaggccgtttccggtggagctgtcgcctagccgctatcgcagagtggagcggggctgggagcaaagcgctgagggagctcggtacgccgccgcctcgcacccgcagcctcgcgcccgccgccgcccgtccccagagaaccatggagtctggcagtaccgccgccagtgaggaggcacgcagccttcgagaatgtgagctctacgtccagaagcataacattcaagcgctgctcaaagattctattgtgcagttgtgcactgctcgacctgagagacccatggcattcctcagggaatactttgagaggttggagaaggaggaggcaaaacagattcagaatctgcagaaagcaggcactcgtacagactcaagggaggatgagatttctcctcctccacccaacccagtggttaaaggtaggaggcgacgaggtgctatcagcgctgaggtctacacggaggaagatgcggcatcctatgttagaaaggttataccaaaagattacaagacaatggccgctttagccaaagccattgaaaagaatgtgctgttttcacatcttgatgataatgagagaagtgatatttttgatgccatgttttcggtctcctttatcgcaggagagactgtgattcagcaaggtgatgaaggggataacttctatgtgattgatcaaggagagacggatgtctatgttaacaatgaatgggcaaccagtgttggggaaggagggagctttggagaacttgctttgatttatggaacaccgagagcagccactgtcaaagcaaagacaaatgtgaaattgtggggcatcgaccgagacagctatagaagaatcctcatgggaagcacactgagaaagcggaagatgtatgaggaattccttagtaaagtctctattttagttggtataaattaacctagccactgggctaccgaagtaaggatctaagggctatctgcaggcagtatgagaatcctgctcagactagagagtctctggacaagtgggaacgtcttacggtagctgatgcattggaaccagtgcagtttgaagatgggcagaagattgtggtgcagggagaaccaggggatgagttcttcattattttagaggggtcagctgctgtgctacaacgtcggtcagaaaatgaagagtttgttgaagtgggaagattggggccttctgattattttggtgaaattgcactactgatgaatcgtcctcgtgctgccacagttgttgctcgtggccccttgaagtgcgttaagctggaccgacctagatttgaacgtgttcttggcccatgctcagacatcctcaaacgaaacatccagcagtacaacagttttgtgtcactgtctgtctgaaatctgcctcctgtgcctcccttttctcctctccccaatccatgcttcactcatgcaaactgctttattttccctacttgcagcgccaagtggccactggcatcgcagcttcctgtctgtttatatattgaaagttgcttttattgcaccattttcaatttggagcattaactaaatgctcatacacagttaaataaatagaaagagttctatggagactttgctgttactgcttctctttgtgcagtgttagtattcaccctgggcagtgagtgccatgctttttggtgagggcagatcccagcacctattgaattaccatagagtaatgatgtaacagtgcaagattttttttttaagtgacataattgtccagttataagcgtatttagactgtggccatatatgctgtatttctttgtagaataaatggtttctcattaaactctaaagattagggaaaatggatatagaaaatcttagtatagtagaaagacatctgcctgtaattaaactagtttaagggtggaaaaatgcccatttttgctaattatcaatgggatatgattggttcagtttttttttttccagagttgttgtttgccaagctaatctgcctggttttatttatatcttgttattaatgtttcttctccaattctgaaatacttttgagtatggctatctatacctgccttttaagtttgaaactaactcatagattgcaaatattggttagtatttaactacatctgcctcggctcacaaattccgattagacctttatccagctagtgccaaataattgatcagatgctgaattgagaataagaatttgaggtctacattcttggttgttaatttagagcgtttggttaaagtatgtccttcagctgactccagtataatctcctctgctcattaaactgattccaggagattggatttgctgtgactagatacagatggagcaaatgtcctaacagagaaatagaggtgatgctgctaaagggagaaatgccaggcggacaaagttcagtgtcgggaattttccccgtgacattcactggggcatgagattttggaagaagttttttactttggtttagtctttttttccttcctttttattcagctagaatttctggtgggttgatggtagggtataatgtgtctgtgttgcttcaaattggtctgaaaggctatcctgctgaaagtcctgctttcctatctagcatttatttctctggcaaacttttctttcttttcttttttaaagtaaacttgtgtattgagtcttaactgtatttcagtattttccagccttatgtgttacattattccaatgatacccaacagtttatttttattatttttttaaacaaaatttcacagttctgtaatgtaggcacttttattttcattgtgatttatatataaggtaatgtagggttatatttgggagtgactgcaagcatttttccatctgtgtgcaactaactgactctgttattgatcccttctcctgccctttcccaggtaatttaaattggtcatggtagatttttttcatagatttgaaaaacttttaggttgttaccaagtatgaagtataaatctggggaagaggttttatttacattttagggtgggtaagaaagccaccttgttacaaattttttaatttccaaaataatctatattaaatgagggtttctgatctgtactttgtgtttagctacctttttatatttaaaaaattaaaaatgaaaattacgttcttacaagcttaaagcttgatttgatctttgtttaaatgccaaaatgtacttaaatgagttacttagaatgccataaaattgcagtttcatgtatgtatataatcatgctcatgtatatttagttacgtataatgctttctgagtgagttttactcttaaatcatttggttaaatcatttggcttgctgtttactcccttctgtagtttttaattaaaaactttaaagataagtctacattaaacaatgatcacatctaaagctttatctttgtgtaatctaagtatatgtgagaaatcagaattggcataatttgtcttagttgatattcaaggctttaaaagtcattattcctgggcttggtaagtgaatttatgagatttactgctctagaaagtatagatggcgaaaggaccgttttgtattgcttcctgattaccagtctgattataccatgtgtgctaatatactttttttgttatagattgtcttaatggtaggtcaagtaataaaaagagatgaaataatttaaa

SEQ ID NO: 298926 - DNA, 3077 bp, Homo sapiens
tgttctagaggatcacatggaagaatgtgcgtttcacatctgatgataatgagagaagtgatatttttgatgccatgttttcggtctcctttatcgcaggagagactgtgattcagcaaggtgatgaaggggataacttctatgtgattgatcaaggagagacggatgtctatgttaacaatgaatgggcaaccagtgttggggaaggagggagctttggagaacttgctttgatttatggaacaccgagagcagccactgtcaaagcaaagacaaatgtgaaattgtggggcatcgaccgagacagctatagaagaatcctcatgggaagcacactgagaaagcggaagatgtatgaggaattccttagtaaagtctctattttagagtctctggacaagtgggaacgtcttacggtagctgatgcattggaaccagtgcagtttgaagatgggcagaagattgtggtgcagggagaaccaggggatgagttcttcattattttagaggggtcagctgctgtgctacaacgtcggtcagaaaatgaagagtttgttgaagtgggaagattggggccttctgattattttggtgaaattgcactactgatgaatcgtcctcgtgctgccacagttgttgctcgtggccccttgaagtgcgttaagctggaccgacctagatttgaacgtgttcttggcccatgctcagacatcctcaaacgaaacatccagcagtacaacagttttgtgtcactgtctgtctgaaatctgcctcctgtgcctcccttttctcctctccccaatccatgcttcactcatgcaaactgctttattttccctacttgcagcgccaagtggccactggcatcgcagcttcctgtctgtttatatattgaaagttgcttttattgcaccattttcaatttggagcattaactaaatgctcatacacagttaaataaatagaaagagttctatggagactttgctgttactgcttctctttgtgcagtgttagtattcaccctgggcagtgagtgccatgctttttggtgagggcagatcccagcacctattgaattaccatagagtaatgatgtaacagtgcaagattttttttttaagtgacataattgtccagttataagcgtatttagactgtggccatatatgctgtatttctttgtagaataaatggtttctcattaaactctaaagattagggaaaatggatatagaaaatcttagtatagtagaaagacatctgcctgtaattaaactagtttaagggtggaaaaatgcccatttttgctaattatcaatgggatatgattggttcagtttttttttttccagagttgttgtttgccaagctaatctgcctggttttatttatatcttgttattaatgtttcttctccaattctgaaatacttttgagtatggctatctatacctgccttttaagtttgaaactaactcatagattgcaaatattggttagtatttaactacatctgcctcggctcacaaattccgattagacctttatccagctagtgccaaataattgatcagatgctgaattgagaataagaatttgaggtctacattcttggttgttaatttagagcgtttggttaaagtatgtccttcagctgactccagtataatctcctctgctcattaaactgattccaggagattggatttgctgtgactagatacagatggagcaaatgtcctaacagagaaatagaggtgatgctgctaaagggagaaatgccaggcggacaaagttcagtgtcgggaattttccccgtgacattcactggggcatgagattttggaagaagttttttactttggtttagtctttttttccttcctttttattcagctagaatttctggtgggttgatggtagggtataatgtgtctgtgttgcttcaaattggtctgaaaggctatcctgctgaaagtcctgctttcctatctagcatttatttctctggcaaacttttctttcttttcttttttaaagtaaacttgtgtattgagtcttaactgtatttcagtattttccagccttatgtgttacattattccaatgatacccaacagtttatttttattatttttttaaacaaaatttcacagttctgtaatgtaggcacttttattttcattgtgatttatatataaggtaatgtagggttatatttgggagtgactgcaagcatttttccatctgtgtgcaactaactgactctgttattgatcccttctcctgccctttcccaggtaatttaaattggtcatggtagatttttttcatagatttgaaaaacttttaggttgttaccaagtatgaagtataaatctggggaagaggttttatttacattttagggtgggtaagaaagccaccttgttacaaattttttaatttccaaaataatctatattaaatgagggtttctgatctgtactttgtgtttagctacctttttatatttaaaaaattaaaaatgaaaattacgttcttacaagcttaaagcttgatttgatctttgtttaaatgccaaaatgtacttaaatgagttacttagaatgccataaaattgcagtttcatgtatgtatataatcatgctcatgtatatttagttacgtataatgctttctgagtgagttttactcttaaatcatttggttaaatcatttggcttgctgtttactcccttctgtagtttttaattaaaaactttaaagataagtctacattaaacaatgatcacatctaaagctttatctttgtgtaatctaagtatatgtgagaaatcagaattggcataatttgtcttagttgatattcaaggctttaaaagtcattattcctgggcttggtaagtgaatttatgagatttactgctctagaaagtatagatggcgaaaggaccgttttgtattgcttcctgattaccagtctgattataccatgtgtgctaatatactttttttgttatagattgtcttaatggtaggtcaagtaataaaaagagatgaaataatttaaa

SEQ ID NO: 298927 - DNA, 3468 bp, Homo sapiens
acgtcagtagccgaacgctgattggctgcggccaggccgtttccggtggagctgtcgcctagccgctatcgcagagtggagcggggctgggagcaaagcgctgagggagctcggtacgccgccgcctcgcacccgcagcctcgcgcccgccgccgcccgtccccagagaaccatggagtctggcagtaccgccgccagtgaggaggcacgcagccttcgagaatgtgagctctacgtccagaagcataacattcaagcgctgctcaaagattctattgtgcagttgtgcactgctcgacctgagagacccatggcattcctcagggaatactttgagaggttggagaaggaggaggcaaaacagattcagaatctgcagaaagcaggcactcgtacagactcaagggaggatgagatttctcctcctccacccaacccagtggttaaaggtaggaggcgacgaggtgctatcagcgctgaggtctacacggaggaagatgcggcatcctatgttagaaaggttataccaaaagattacaagacaatggccgctttagccaaagccattgaaaagaatgtgctgttttcacatcttgatgataatgagagaagtgatatttttgatgccatgttttcggtctcctttatcgcaggagagactgtgattcagcaaggtgatgaaggggataacttctatgtgattgatcaaggagagacggatgtctatgttaacaatgaatgggcaaccagtgttggggaaggagggagctttggagaacttgctttgatttatggaacaccgagagcagccactgtcaaagcaaagacaaatgtgaaattgtggggcatcgaccgagacagctatagaagaatcctcatgggaagcacactgagaaagcggaagatgtatgaggaattccttagtaaagtctctattttagagtctctggacaagtgggaacgtcttacggtagctgatgcattggaaccagtgcagtttgaagatgggcagaagattgtggtgcagggagaaccaggggatgagttcttcattattttagaggggtcagctgctgtgctacaacgtcggtcagaaaatgaagagtttgttgaagtgggaagattggggccttctgattattttggtgaaattgcactactgatgaatcgtcctcgtgctgccacagttgttgctcgtggccccttgaagtgcgttaagctggaccgacctagatttgaacgtgttcttggcccatgctcagacatcctcaaacgaaacatccagcagtacaacagttttgtgtcactgtctgtctgaaatctgcctcctgtgcctcccttttctcctctccccaatccatgcttcactcatgcaaactgctttattttccctacttgcagcgccaagtggccactggcatcgcagcttcctgtctgtttatatattgaaagttgcttttattgcaccattttcaatttggagcattaactaaatgctcatacacagttaaataaatagaaagagttctatggagactttgctgttactgcttctctttgtgcagtgttagtattcaccctgggcagtgagtgccatgctttttggtgagggcagatcccagcacctattgaattaccatagagtaatgatgtaacagtgcaagattttttttttaagtgacataattgtccagttataagcgtatttagactgtggccatatatgctgtatttctttgtagaataaatggtttctcattaaactctaaagattagggaaaatggatatagaaaatcttagtatagtagaaagacatctgcctgtaattaaactagtttaagggtggaaaaatgcccatttttgctaattatcaatgggatatgattggttcagtttttttttttccagagttgttgtttgccaagctaatctgcctggttttatttatatcttgttattaatgtttcttctccaattctgaaatacttttgagtatggctatctatacctgccttttaagtttgaaactaactcatagattgcaaatattggttagtatttaactacatctgcctcggctcacaaattccgattagacctttatccagctagtgccaaataattgatcagatgctgaattgagaataagaatttgaggtctacattcttggttgttaatttagagcgtttggttaaagtatgtccttcagctgactccagtataatctcctctgctcattaaactgattccaggagattggatttgctgtgactagatacagatggagcaaatgtcctaacagagaaatagaggtgatgctgctaaagggagaaatgccaggcggacaaagttcagtgtcgggaattttccccgtgacattcactggggcatgagattttggaagaagttttttactttggtttagtctttttttccttcctttttattcagctagaatttctggtgggttgatggtagggtataatgtgtctgtgttgcttcaaattggtctgaaaggctatcctgctgaaagtcctgctttcctatctagcatttatttctctggcaaacttttctttcttttcttttttaaagtaaacttgtgtattgagtcttaactgtatttcagtattttccatctgtgtgcaactaactgactctgttattgatcccttctcctgccctttcccaggtaatttaaattggtcatggtagatttttttcatagatttgaaaaacttttaggttgttaccaagtatgaagtataaatctggggaagaggttttatttacattttagggtgggtaagaaagccaccttgttacaaattttttaatttccaaaataatctatattaaatgagggtttctgatctgtactttgtgtttagctacctttttatatttaaaaaattaaaaatgaaaattacgttcttacaagcttaaagcttgatttgatctttgtttaaatgccaaaatgtacttaaatgagttacttagaatgccataaaattgcagtttcatgtatgtatataatcatgctcatgtatatttagttacgtataatgctttctgagtgagttttactcttaaatcatttggttaaatcatttggcttgctgtttactcccttctgtagtttttaattaaaaactttaaagataagtctacattaaacaatgatcacatctaaagctttatctttgtgtaatctaagtatatgtgagaaatcagaattggcataatttgtcttagttgatattcaaggctttaaaagtcattattcctgggcttggtaagtgaatttatgagatttactgctctagaaagtatagatggcgaaaggaccgttttgtattgcttcctgattaccagtctgattataccatgtgtgctaatatactttttttgttatagattgtcttaatggtaggtcaagtaataaaaagagatgaaataatttaaa

SEQ ID NO: 298928 - DNA, 3716 bp, Homo sapiens
attgaagtttgttttcctctttgatcctaccactttttttttctgttatactattggatttttctatttcttttaaattaagattttctgagatggacagaacactttgtattgggaactaatatttttgatatagttttgtttataatttaaaggaaatgcctacattgtcttaccttgaatgtcatatagaattgcagaatcatatatatctctcatgttctttatattgttaatcacttttaaagtaagaaataaatgaaacacctacattcttcattgtatagccctgtctattaaaaaggttctagggcttctatagattcttactttgcctatatagactaacatggatctaactttttgactatcttcctctttttattttcttatttattcttgacattttatgagtgggtatatattttcattttgtggcagcctgataatttgttattaactatttgagttgtttctaatgtccttgttataaatgccatagcagttaataactacacatatgtagcttttaaaaatttttttcagaggtattcttcaccatgagatgactaaaaaaattttgattaattctatgacttttaaaatatgttgcttgattttctttcccctgaaagattgtgttagtttgtaacacactctcacagtaccactgtaaaataagtttattgttttgtaataattttgataatttctttctttaatttggaatatgcttctaacttttttaccctcttttaggtgatgaaggggataacttctatgtgattgatcaaggagagacggatgtctatgttaacaatgaatgggcaaccagtgttggggaaggagggagctttggagaacttgctttgatttatggaacaccgagagcagccactgtcaaagcaaagacaaatgtgaaattgtggggcatcgaccgagacagctatagaagaatcctcatgggaagcacactgagaaagcggaagatgtatgaggaattccttagtaaagtctctattttagagtctctggacaagtgggaacgtcttacggtagctgatgcattggaaccagtgcagtttgaagatgggcagaagattgtggtgcagggagaaccaggggatgagttcttcattattttagaggggtcagctgctgtgctacaacgtcggtcagaaaatgaagagtttgttgaagtgggaagattggggccttctgattattttggtgaaattgcactactgatgaatcgtcctcgtgctgccacagttgttgctcgtggccccttgaagtgcgttaagctggaccgacctagatttgaacgtgttcttggcccatgctcagacatcctcaaacgaaacatccagcagtacaacagttttgtgtcactgtctgtctgaaatctgcctcctgtgcctcccttttctcctctccccaatccatgcttcactcatgcaaactgctttattttccctacttgcagcgccaagtggccactggcatcgcagcttcctgtctgtttatatattgaaagttgcttttattgcaccattttcaatttggagcattaactaaatgctcatacacagttaaataaatagaaagagttctatggagactttgctgttactgcttctctttgtgcagtgttagtattcaccctgggcagtgagtgccatgctttttggtgagggcagatcccagcacctattgaattaccatagagtaatgatgtaacagtgcaagattttttttttaagtgacataattgtccagttataagcgtatttagactgtggccatatatgctgtatttctttgtagaataaatggtttctcattaaactctaaagattagggaaaatggatatagaaaatcttagtatagtagaaagacatctgcctgtaattaaactagtttaagggtggaaaaatgcccatttttgctaattatcaatgggatatgattggttcagtttttttttttccagagttgttgtttgccaagctaatctgcctggttttatttatatcttgttattaatgtttcttctccaattctgaaatacttttgagtatggctatctatacctgccttttaagtttgaaactaactcatagattgcaaatattggttagtatttaactacatctgcctcggctcacaaattccgattagacctttatccagctagtgccaaataattgatcagatgctgaattgagaataagaatttgaggtctacattcttggttgttaatttagagcgtttggttaaagtatgtccttcagctgactccagtataatctcctctgctcattaaactgattccaggagattggatttgctgtgactagatacagatggagcaaatgtcctaacagagaaatagaggtgatgctgctaaagggagaaatgccaggcggacaaagttcagtgtcgggaattttccccgtgacattcactggggcatgagattttggaagaagttttttactttggtttagtctttttttccttcctttttattcagctagaatttctggtgggttgatggtagggtataatgtgtctgtgttgcttcaaattggtctgaaaggctatcctgctgaaagtcctgctttcctatctagcatttatttctctggcaaacttttctttcttttcttttttaaagtaaacttgtgtattgagtcttaactgtatttcagtattttccagccttatgtgttacattattccaatgatacccaacagtttatttttattatttttttaaacaaaatttcacagttctgtaatgtaggcacttttattttcattgtgatttatatataaggtaatgtagggttatatttgggagtgactgcaagcatttttccatctgtgtgcaactaactgactctgttattgatcccttctcctgccctttcccaggtaatttaaattggtcatggtagatttttttcatagatttgaaaaacttttaggttgttaccaagtatgaagtataaatctggggaagaggttttatttacattttagggtgggtaagaaagccaccttgttacaaattttttaatttccaaaataatctatattaaatgagggtttctgatctgtactttgtgtttagctacctttttatatttaaaaaattaaaaatgaaaattacgttcttacaagcttaaagcttgatttgatctttgtttaaatgccaaaatgtacttaaatgagttacttagaatgccataaaattgcagtttcatgtatgtatataatcatgctcatgtatatttagttacgtataatgctttctgagtgagttttactcttaaatcatttggttaaatcatttggcttgctgtttactcccttctgtagtttttaattaaaaactttaaagataagtctacattaaacaatgatcacatctaaagctttatctttgtgtaatctaagtatatgtgagaaatcagaattggcataatttgtcttagttgatattcaaggctttaaaagtcattattcctgggcttggtaagtgaatttatgagatttactgctctagaaagtatagatggcgaaaggaccgttttgtattgcttcctgattaccagtctgattataccatgtgtgctaatatactttttttgttatagattgtcttaatggtaggtcaagtaataaaaagagatgaaataatttaaa

SEQ ID NO: 298929 - DNA, 3077 bp, Homo sapiens
ctcgtcagaaatcacctattcttctctgttgtgtactgcaaacataatatattctgttttttaaaacaaagttcaggattgtgaccttttaaaaaggtttgagggtttttaacatttaagtgtttgtatctagaaaataaacttttttgatgtcacttgcactttaggtctatgttaacaatgaatgggcaaccagtgttggggaaggagggagctttggagaacttgctttgatttatggaacaccgagagcagccactgtcaaagcaaagacaaatgtgaaattgtggggcatcgaccgagacagctatagaagaatcctcatgggaagcacactgagaaagcggaagatgtatgaggaattccttagtaaagtctctattttagagtctctggacaagtgggaacgtcttacggtagctgatgcattggaaccagtgcagtttgaagatgggcagaagattgtggtgcagggagaaccaggggatgagttcttcattattttagaggggtcagctgctgtgctacaacgtcggtcagaaaatgaagagtttgttgaagtgggaagattggggccttctgattattttggtgaaattgcactactgatgaatcgtcctcgtgctgccacagttgttgctcgtggccccttgaagtgcgttaagctggaccgacctagatttgaacgtgttcttggcccatgctcagacatcctcaaacgaaacatccagcagtacaacagttttgtgtcactgtctgtctgaaatctgcctcctgtgcctcccttttctcctctccccaatccatgcttcactcatgcaaactgctttattttccctacttgcagcgccaagtggccactggcatcgcagcttcctgtctgtttatatattgaaagttgcttttattgcaccattttcaatttggagcattaactaaatgctcatacacagttaaataaatagaaagagttctatggagactttgctgttactgcttctctttgtgcagtgttagtattcaccctgggcagtgagtgccatgctttttggtgagggcagatcccagcacctattgaattaccatagagtaatgatgtaacagtgcaagattttttttttaagtgacataattgtccagttataagcgtatttagactgtggccatatatgctgtatttctttgtagaataaatggtttctcattaaactctaaagattagggaaaatggatatagaaaatcttagtatagtagaaagacatctgcctgtaattaaactagtttaagggtggaaaaatgcccatttttgctaattatcaatgggatatgattggttcagtttttttttttccagagttgttgtttgccaagctaatctgcctggttttatttatatcttgttattaatgtttcttctccaattctgaaatacttttgagtatggctatctatacctgccttttaagtttgaaactaactcatagattgcaaatattggttagtatttaactacatctgcctcggctcacaaattccgattagacctttatccagctagtgccaaataattgatcagatgctgaattgagaataagaatttgaggtctacattcttggttgttaatttagagcgtttggttaaagtatgtccttcagctgactccagtataatctcctctgctcattaaactgattccaggagattggatttgctgtgactagatacagatggagcaaatgtcctaacagagaaatagaggtgatgctgctaaagggagaaatgccaggcggacaaagttcagtgtcgggaattttccccgtgacattcactggggcatgagattttggaagaagttttttactttggtttagtctttttttccttcctttttattcagctagaatttctggtgggttgatggtagggtataatgtgtctgtgttgcttcaaattggtctgaaaggctatcctgctgaaagtcctgctttcctatctagcatttatttctctggcaaacttttctttcttttcttttttaaagtaaacttgtgtattgagtcttaactgtatttcagtattttccagccttatgtgttacattattccaatgatacccaacagtttatttttattatttttttaaacaaaatttcacagttctgtaatgtaggcacttttattttcattgtgatttatatataaggtaatgtagggttatatttgggagtgactgcaagcatttttccatctgtgtgcaactaactgactctgttattgatcccttctcctgccctttcccaggtaatttaaattggtcatggtagatttttttcatagatttgaaaaacttttaggttgttaccaagtatgaagtataaatctggggaagaggttttatttacattttagggtgggtaagaaagccaccttgttacaaattttttaatttccaaaataatctatattaaatgagggtttctgatctgtactttgtgtttagctacctttttatatttaaaaaattaaaaatgaaaattacgttcttacaagcttaaagcttgatttgatctttgtttaaatgccaaaatgtacttaaatgagttacttagaatgccataaaattgcagtttcatgtatgtatataatcatgctcatgtatatttagttacgtataatgctttctgagtgagttttactcttaaatcatttggttaaatcatttggcttgctgtttactcccttctgtagtttttaattaaaaactttaaagataagtctacattaaacaatgatcacatctaaagctttatctttgtgtaatctaagtatatgtgagaaatcagaattggcataatttgtcttagttgatattcaaggctttaaaagtcattattcctgggcttggtaagtgaatttatgagatttactgctctagaaagtatagatggcgaaaggaccgttttgtattgcttcctgattaccagtctgattataccatgtgtgctaatatactttttttgttatagattgtcttaatggtaggtcaagtaataaaaagagatgaaataatttaaa

SEQ ID NO: 298930 - DNA, 2827 bp, Homo sapiens
accgaacactatgacatgttcgattcgagctcgtaccctacggatctagcgagagacacctatagagaatcctcatggaagcacactgagaaagcggaagatgtatgaggaattccttagtaaagtctctattttagagtctctggacaagtgggaacgtcttacggtagctgatgcattggaaccagtgcagtttgaagatgggcagaagattgtggtgcagggagaaccaggggatgagttcttcattattttagaggggtcagctgctgtgctacaacgtcggtcagaaaatgaagagtttgttgaagtgggaagattggggccttctgattattttggtgaaattgcactactgatgaatcgtcctcgtgctgccacagttgttgctcgtggccccttgaagtgcgttaagctggaccgacctagatttgaacgtgttcttggcccatgctcagacatcctcaaacgaaacatccagcagtacaacagttttgtgtcactgtctgtctgaaatctgcctcctgtgcctcccttttctcctctccccaatccatgcttcactcatgcaaactgctttattttccctacttgcagcgccaagtggccactggcatcgcagcttcctgtctgtttatatattgaaagttgcttttattgcaccattttcaatttggagcattaactaaatgctcatacacagttaaataaatagaaagagttctatggagactttgctgttactgcttctctttgtgcagtgttagtattcaccctgggcagtgagtgccatgctttttggtgagggcagatcccagcacctattgaattaccatagagtaatgatgtaacagtgcaagattttttttttaagtgacataattgtccagttataagcgtatttagactgtggccatatatgctgtatttctttgtagaataaatggtttctcattaaactctaaagattagggaaaatggatatagaaaatcttagtatagtagaaagacatctgcctgtaattaaactagtttaagggtggaaaaatgcccatttttgctaattatcaatgggatatgattggttcagtttttttttttccagagttgttgtttgccaagctaatctgcctggttttatttatatcttgttattaatgtttcttctccaattctgaaatacttttgagtatggctatctatacctgccttttaagtttgaaactaactcatagattgcaaatattggttagtatttaactacatctgcctcggctcacaaattccgattagacctttatccagctagtgccaaataattgatcagatgctgaattgagaataagaatttgaggtctacattcttggttgttaatttagagcgtttggttaaagtatgtccttcagctgactccagtataatctcctctgctcattaaactgattccaggagattggatttgctgtgactagatacagatggagcaaatgtcctaacagagaaatagaggtgatgctgctaaagggagaaatgccaggcggacaaagttcagtgtcgggaattttccccgtgacattcactggggcatgagattttggaagaagttttttactttggtttagtctttttttccttcctttttattcagctagaatttctggtgggttgatggtagggtataatgtgtctgtgttgcttcaaattggtctgaaaggctatcctgctgaaagtcctgctttcctatctagcatttatttctctggcaaacttttctttcttttcttttttaaagtaaacttgtgtattgagtcttaactgtatttcagtattttccagccttatgtgttacattattccaatgatacccaacagtttatttttattatttttttaaacaaaatttcacagttctgtaatgtaggcacttttattttcattgtgatttatatataaggtaatgtagggttatatttgggagtgactgcaagcatttttccatctgtgtgcaactaactgactctgttattgatcccttctcctgccctttcccaggtaatttaaattggtcatggtagatttttttcatagatttgaaaaacttttaggttgttaccaagtatgaagtataaatctggggaagaggttttatttacattttagggtgggtaagaaagccaccttgttacaaattttttaatttccaaaataatctatattaaatgagggtttctgatctgtactttgtgtttagctacctttttatatttaaaaaattaaaaatgaaaattacgttcttacaagcttaaagcttgatttgatctttgtttaaatgccaaaatgtacttaaatgagttacttagaatgccataaaattgcagtttcatgtatgtatataatcatgctcatgtatatttagttacgtataatgctttctgagtgagttttactcttaaatcatttggttaaatcatttggcttgctgtttactcccttctgtagtttttaattaaaaactttaaagataagtctacattaaacaatgatcacatctaaagctttatctttgtgtaatctaagtatatgtgagaaatcagaattggcataatttgtcttagttgatattcaaggctttaaaagtcattattcctgggcttggtaagtgaatttatgagatttactgctctagaaagtatagatggcgaaaggaccgttttgtattgcttcctgattaccagtctgattataccatgtgtgctaatatactttttttgttatagattgtcttaatggtaggtcaagtaataaaaagagatgaaataatttaaa

SEQ ID NO: 298931 - DNA, 2822 bp, Homo sapiens
  misc_feature (2719)..(2719): n is a, c, g, or t
  misc_feature (2727)..(2727): n is a, c, g, or t
  misc_feature (2769)..(2769): n is a, c, g, or t
  misc_feature (2795)..(2795): n is a, c, g, or t
  misc_feature (2812)..(2812): n is a, c, g, or t
  misc_feature (2820)..(2820): n is a, c, g, or t
acgtcagtagccgaacgctgattggctgcggccaggccgtttccggtggagctgtcgcctagccgctatcgcagagtggagcggggctgggagcaaagcgctgagggagctcggtacgccgccgcctcgcacccgcagcctcgcgcccgccgccgcccgtccccagagaaccatggagtctggcagtaccgccgccagtgaggaggcacgcagccttcgagaatgtgagctctacgtccagaagcataacattcaagcgctgctcaaagattctattgtgcagttgtgcactgctcgacctgagagacccatggcattcctcagggaatactttgagaggttggagaaggaggaggcaaaacagattcagaatctgcagaaagcaggcactcgtacagactcaagggaggatgagatttctcctcctccacccaacccagtggttaaaggtaggaggcgacgaggtgctatcagcgctgaggtctacacggaggaagatgcggcatcctatgttagaaaggttataccaaaagattacaagacaatggccgctttagccaaagccattgaaaagaatgtgctgttttcacatcttgatgataatgagagaagtgatatttttgatgccatgttttcggtctcctttatcgcaggagagactgtgattcagcaaggtgatgaaggggataacttctatgtgattgatcaaggagagacggatgtctatgttaacaatgaatgggcaaccagtgttggggaaggagggagctttggagaacttgctttgatttatggaacaccgagagcagccactgtcaaagcaaagacaaatgtgaaattgtggggcatcgaccgagacagctatagaagaatcctcatgggaagcacactgagaaagcggaagatgtatgaggaattccttagtaaagtctctattttagagtctctggacaagtgggaacgtcttacggtagctgatgcattggaaccagtgcagtttgaagatgggcagaagattgtggtgcagggagaaccaggggatgagttcttcattattttagaggggtcagctgctgtgctacaacgtcggtcagaaaatgaagagtttgttgaagtgggaagattggggccttctgattattttggtgaaattgcactactgatgaatcgtcctcgtgctgccacagttgttgctcgtggccccttgaagtgcgttaagctggaccgacctagatttgaacgtgttcttggcccatgctcagacatcctcaaacgaaacatccagcagtacaacagttttgtgtcactgtctgtctgaaatctgcctcctgtgcctcccttttctcctctccccaatccatgcttcactcatgcaaactgctttattttccctacttgcagcgccaagtggccactggcatcgcagcttcctgtctgtttatatattgaaagttgcttttattgcaccattttcaatttggagcattaactaaatgctcatacacagttaaataaatagaaagagttctatggagactttgctgttactgcttctctttgtgcagtgttagtattcaccctgggcagtgagtgccatgctttttggtgagggcagatcccagcacctattgaattaccatagagtaatgatgtaacagtgcaagattttttttttaagtgacataattgtccagttataagcgtatttagactgtggccatatatgctgtatttctttgtagaataaatggtttctcattaaactctaaagattagggaaaatggatatagaaaatcttagtatagtagaaagacatctgcctgtaattaaactagtttaagggtggaaaaatgcccatttttgctaattatcaatgggatatgattggttcagtttttttttttccagagttgttgtttgccaagctaatctgcctggttttatttatatcttgttattaatgtttcttctccaattctgaaatacttttgagtatggctatctatacctgccttttaagtttgaaactaactcatagattgcaaatattggttagtatttaactacatctgcctcggctcacaaattccgattagacctttatccagctagtgccaaataattgatcagatgctgaattgagaataagaatttgaggtctacattcttggttgttaatttagagcgtttggttaaagtatgtccttcagctgactccagtataatctcctctgctcattaaactgattccaggagattggatttgctgtgactagatacagatggagcaaatgtcctaacagagaaatagaggtgatgctgctaaagggagaaatgccaggcggacaaagttcagtgtcgggaattttccccgtgacattcactggggcatgagattttggaagaagttttttactttggtttagtctttttttccttcctttttattcagctagaatttctggtgggttgatggtagggtataatgtgtctgtgttgcttcaaattggtctgaaaggctatcctgctgaaagtcctgctttcctatctagcatttatttctctggcaaacttttctttcttttcttttttaaagtaaacttgtgtattgagtcttaactgtatttcagtattttccagccttatgtgttacattattccaatgatacccaacagtttatttttattatttttttaaacaaaatttagtttcttgtnaatggtanggcccctttttatttttccattggggaattttaatatttttnaaggggaaatggtaggggggtttttnttttttggggaagtggnacttggcnaa

SEQ ID NO: 298932 - DNA, 2792 bp, Homo sapiens
acgtcagtagccgaacgctgattggctgcggccaggccgtttccggtggagctgtcgcctagccgctatcgcagagtggagcggggctgggagcaaagcgctgagggagctcggtacgccgccgcctcgcacccgcagcctcgcgcccgccgccgcccgtccccagagaaccatggagtctggcagtaccgccgccagtgaggaggcacgcagccttcgagaatgtgagctctacgtccagaagcataacattcaagcgctgctcaaagattctattgtgcagttgtgcactgctcgacctgagagacccatggcattcctcagggaatactttgagaggttggagaaggaggaggcaaaacagattcagaatctgcagaaagcaggcactcgtacagactcaagggaggatgagatttctcctcctccacccaacccagtggttaaaggtaggaggcgacgaggtgctatcagcgctgaggtctacacggaggaagatgcggcatcctatgttagaaaggttataccaaaagattacaagacaatggccgctttagccaaagccattgaaaagaatgtgctgttttcacatcttgatgataatgagagaagtgatatttttgatgccatgttttcggtctcctttatcgcaggagagactgtgattcagcaaggtgatgaaggggataacttctatgtgattgatcaaggagagacggatgtctatgttaacaatgaatgggcaaccagtgttggggaaggagggagctttggagaacttgctttgatttatggaacaccgagagcagccactgtcaaagcaaagacaaatgtgaaattgtggggcatcgaccgagacagctatagaagaatcctcatgggaagcacactgagaaagcggaagatgtatgaggaattccttagtaaagtctctattttagagtctctggacaagtgggaacgtcttacggtagctgatgcattggaaccagtgcagtttgaagatgggcagaagattgtggtgcagggagaaccaggggatgagttcttcattattttagaggggtcagctgctgtgctacaacgtcggtcagaaaatgaagagtttgttgaagtgggaagattggggccttctgattattttggtgaaattgcactactgatgaatcgtcctcgtgctgccacagttgttgctcgtggccccttgaagtgcgttaagctggaccgacctagatttgaacgtgttcttggcccatgctcagacatcctcaaacgaaacatccagcagtacaacagttttgtgtcactgtctgtctgaaatctgcctcctgtgcctcccttttctcctctccccaatccatgcttcactcatgcaaactgctttattttccctacttgcagcgccaagtggccactggcatcgcagcttcctgtctgtttatatattgaaagttgcttttattgcaccattttcaatttggagcattaactaaatgctcatacacagttaaataaatagaaagagttctatggagactttgctgttactgcttctctttgtgcagtgttagtattcaccctgggcagtgagtgccatgctttttggtgagggcagatcccagcacctattgaattaccatagagtaatgatgtaacagtgcaagattttttttttaagtgacataattgtccagttataagcgtatttagactgtggccatatatgctgtatttctttgtagaataaatggtttctcattaaactctaaagattagggaaaatggatatagaaaatcttagtatagtagaaagacatctgcctgtaattaaactagtttaagggtggaaaaatgcccatttttgctaattatcaatgggatatgattggttcagtttttttttttccagagttgttgtttgccaagctaatctgcctggttttatttatatcttgttattaatgtttcttctccaattctgaaatacttttgagtatggctatctatacctgccttttaagtttgaaactaactcatagattgcaaatattggttagtatttaactacatctgcctcggctcacaaattccgattagacctttatccagctagtgccaaataattgatcagatgctgaattgagaataagaatttgaggtctacattcttggttgttaatttagagcgtttggttaaagtatgtccttcagctgactccagtataatctcctctgctcattaaactgattccaggagattggatttgctgtgactagatacagatggagcaaatgtcctaacagagaaatagaggtgatgctgctaaagggagaaatgccaggcggacaaagttcagtgtcgggaattttccccgtgacattcactggggcatgagattttggaagaagttttttactttggtttagtctttttttccttcctttttattcagctagaatttctggtgggttgatggtagggtataatgtgtctgtgttgcttcaaattggtctgaaaggctatcctgctgaaagtcctgctttcctatctagcatttatttctctggcaaacttttctttcttttcttttttaaagtaaacttgtgtattgagtcttaactgtatttcagtattttccagccttatgtgttacattattccaatgatacccaacagtttatttttattatttttttaaacaaaatttgtgcctacattacagaactgtgaaattttgtttaaaaaaataataaaaataaactgttgggtatcattggaataatggtcgacg

SEQ ID NO: 298933 - DNA, 2807 bp, Homo sapiens
ggcactagcaggacaggtcagaagaatttccaaattccgttcaaaaggttatataaccatggggtgagcgtaaggtaggcgaaagagacgctactcacccagagaggcctgttaatgtaatccatgctgtttatatgaggatctggtatattttgacatcctgcttatctcctcgaggagatgggcagaagattgtggtgcagggagaaccaggggatgagttcttcattattttagaggggtcagctgctgtgctacaacgtcggtcagaaaatgaagagtttgttgaagtgggaagattggggccttctgattattttggtgaaattgcactactgatgaatcgtcctcgtgctgccacagttgttgctcgtggccccttgaagtgcgttaagctggaccgacctagatttgaacgtgttcttggcccatgctcagacatcctcaaacgaaacatccagcagtacaacagttttgtgtcactgtctgtctgaaatctgcctcctgtgcctcccttttctcctctccccaatccatgcttcactcatgcaaactgctttattttccctacttgcagcgccaagtggccactggcatcgcagcttcctgtctgtttatatattgaaagttgcttttattgcaccattttcaatttggagcattaactaaatgctcatacacagttaaataaatagaaagagttctatggagactttgctgttactgcttctctttgtgcagtgttagtattcaccctgggcagtgagtgccatgctttttggtgagggcagatcccagcacctattgaattaccatagagtaatgatgtaacagtgcaagattttttttttaagtgacataattgtccagttataagcgtatttagactgtggccatatatgctgtatttctttgtagaataaatggtttctcattaaactctaaagattagggaaaatggatatagaaaatcttagtatagtagaaagacatctgcctgtaattaaactagtttaagggtggaaaaatgcccatttttgctaattatcaatgggatatgattggttcagtttttttttttccagagttgttgtttgccaagctaatctgcctggttttatttatatcttgttattaatgtttcttctccaattctgaaatacttttgagtatggctatctatacctgccttttaagtttgaaactaactcatagattgcaaatattggttagtatttaactacatctgcctcggctcacaaattccgattagacctttatccagctagtgccaaataattgatcagatgctgaattgagaataagaatttgaggtctacattcttggttgttaatttagagcgtttggttaaagtatgtccttcagctgactccagtataatctcctctgctcattaaactgattccaggagattggatttgctgtgactagatacagatggagcaaatgtcctaacagagaaatagaggtgatgctgctaaagggagaaatgccaggcggacaaagttcagtgtcgggaattttccccgtgacattcactggggcatgagattttggaagaagttttttactttggtttagtctttttttccttcctttttattcagctagaatttctggtgggttgatggtagggtataatgtgtctgtgttgcttcaaattggtctgaaaggctatcctgctgaaagtcctgctttcctatctagcatttatttctctggcaaacttttctttcttttcttttttaaagtaaacttgtgtattgagtcttaactgtatttcagtattttccagccttatgtgttacattattccaatgatacccaacagtttatttttattatttttttaaacaaaatttcacagttctgtaatgtaggcacttttattttcattgtgatttatatataaggtaatgtagggttatatttgggagtgactgcaagcatttttccatctgtgtgcaactaactgactctgttattgatcccttctcctgccctttcccaggtaatttaaattggtcatggtagatttttttcatagatttgaaaaacttttaggttgttaccaagtatgaagtataaatctggggaagaggttttatttacattttagggtgggtaagaaagccaccttgttacaaattttttaatttccaaaataatctatattaaatgagggtttctgatctgtactttgtgtttagctacctttttatatttaaaaaattaaaaatgaaaattacgttcttacaagcttaaagcttgatttgatctttgtttaaatgccaaaatgtacttaaatgagttacttagaatgccataaaattgcagtttcatgtatgtatataatcatgctcatgtatatttagttacgtataatgctttctgagtgagttttactcttaaatcatttggttaaatcatttggcttgctgtttactcccttctgtagtttttaattaaaaactttaaagataagtctacattaaacaatgatcacatctaaagctttatctttgtgtaatctaagtatatgtgagaaatcagaattggcataatttgtcttagttgatattcaaggctttaaaagtcattattcctgggcttggtaagtgaatttatgagatttactgctctagaaagtatagatggcgaaaggaccgttttgtattgcttcctgattaccagtctgattataccatgtgtgctaatatactttttttgttatagattgtcttaatggtaggtcaagtaataaaaagagatgaaataatttaaa

SEQ ID NO: 298934 - DNA, 2673 bp, Homo sapiens
acgtcagtagccgaacgctgattggctgcggccaggccgtttccggtggagctgtcgcctagccgctatcgcagagtggagcggggctgggagcaaagcgctgagggagctcggtacgccgccgcctcgcacccgcagcctcgcgcccgccgccgcccgtccccagagaaccatggagtctggcagtaccgccgccagtgaggaggcacgcagccttcgagaatgtgagctctacgtccagaagcataacattcaagcgctgctcaaagattctattgtgcagttgtgcactgctcgacctgagagacccatggcattcctcagggaatactttgagaggttggagaaggaggaggcaaaacagattcagaatctgcagaaagcaggcactcgtacagactcaagggaggatgagatttctcctcctccacccaacccagtggttaaaggtaggaggcgacgaggtgctatcagcgctgaggtctacacggaggaagatgcggcatcctatgttagaaaggttataccaaaagattacaagacaatggccgctttagccaaagccattgaaaagaatgtgctgttttcacatcttgatgataatgagagaagtgatatttttgatgccatgttttcggtctcctttatcgcaggagagactgtgattcagcaaggtgatgaaggggataacttctatgtgattgatcaaggagagacggatgtctatgttaacaatgaatgggcaaccagtgttggggaaggagggagctttggagaacttgctttgatttatggaacaccgagagcagccactgtcaaagcaaagacaaatgtgaaattgtggggcatcgaccgagacagctatagaagaatcctcatgggaagcacactgagaaagcggaagatgtatgaggaattccttagtaaagtctctattttagagtctctggacaagtgggaacgtcttacggtagctgatgcattggaaccagtgcagtttgaagatgggcagaagattgtggtgcagggagaaccaggggatgagttcttcattattttagaggggtcagctgctgtgctacaacgtcggtcagaaaatgaagagtttgttgaagtgggaagattggggccttctgattattttggtgaaattgcactactgatgaatcgtcctcgtgctgccacagttgttgctcgtggccccttgaagtgcgttaagctggaccgacctagatttgaacgtgttcttggcccatgctcagacatcctcaaacgaaacatccagcagtacaacagttttgtgtcactgtctgtctgaaatctgcctcctgtgcctcccttttctcctctccccaatccatgcttcactcatgcaaactgctttattttccctacttgcagcgccaagtggccactggcatcgcagcttcctgtctgtttatatattgaaagttgcttttattgcaccattttcaatttggagcattaactaaatgctcatacacagttaaataaatagaaagagttctatggagactttgctgttactgcttctctttgtgcagtgttagtattcaccctgggcagtgagtgccatgctttttggtgagggcagatcccagcacctattgaattaccatagagtaatgatgtaacagtgcaagattttttttttaagtgacataattgtccagttataagcgtatttagactgtggccatatatgctgtatttctttgtagaataaatggtttctcattaaactctaaagattagggaaaatggatatagaaaatcttagtatagtagaaagacatctgcctgtaattaaactagtttaagggtggaaaaatgcccatttttgctaattatcaatgggatatgattggttcagtttttttttttccagagttgttgtttgccaagctaatctgcctggttttatttatatcttgttattaatgtttcttctccaattctgaaatacttttgagtatggctatctatacctgccttttaagtttgaaactaactcatagattgcaaatattggttagtatttaactacatctgcctcggctcacaaattccgattagacctttatccagctagtgccaaataattgatcagatgctgaattgagaataagaatttgaggtctacattcttggttgttaatttagagcgtttggttaaagtatgtccttcagctgactccagtataatctcctctgctcattaaactgattccaggagattggatttgctgtgactagatacagatggagcaaatgtcctaacagagaaatagaggtgatgctgctaaagggagaaatgccaggcggacaaagttcagtgtcgggaattttccccgtgacattcactggggcatgagattttggaagaagttttttactttggtttagtctttttttccttcctttttattcagctagaatttctggtgggttgatggtagggtataatgtgtctgtgttgcttcaaattggtctgaaaggctatcctgctgaaagtcctgctttcctatctagcatttatttctctggcaaacttttctttcttttcttttttaaagtaaacttgtgtattgagtcttaactgtatttcagtattttccaacccagagtgtcgggatacccgacggctcgaat

SEQ ID NO: 298935 - DNA, 2966 bp, Homo sapiens
atcccccgggctgcagaattcggcacgaggtctcctttattgaggagagactgtgattcagcaaggtgatgaaggggataacttctatgtgattgatcaaggagagacggatgtctatgttaacaatgaatgggcaaccagtgttggggaaggagggagctttggagaacttgctttgatttatggaacaccgagagcagccactgtcaaagcaaagacaaatgtgaaattgtggggcatcgaccgagacagctatagaagaatcctcatgggaagcacactgagaaagcggaagatgtatgaggaattccttagtaaagtctctattttagagtctctggacaagtgggaacgtcttacggtagctgatgcattggaaccagtgcagtttgaagatgggcagaagattgtggtgcagggagaaccaggggatgagttcttcattattttagaggggtcagctgctgtgctacaacgtcggtgaaattgcactactgatgaatcgtcctcgtgctgccacagttgttgctcgtggccccttgaagtgcgttaagctggaccgacctagatttgaacgtgttcttggcccatgctcagacatcctcaaacgaaacatccagcagtacaacagttttgtgtcactgtctgtctgaaatctgcctcctgtgcctcccttttctcctctccccaatccatgcttcactcatgcaaactgctttattttccctacttgcagcgccaagtggccactggcatcgcagcttcctgtctgtttatatattgaaagttgcttttattgcaccattttcaatttggagcattaactaaatgctcatacacagttaaataaatagaaagagttctatggagactttgctgttactgcttctctttgtgcagtgttagtattcaccctgggcagtgagtgccatgctttttggtgagggcagatcccagcacctattgaattaccatagagtaatgatgtaacagtgcaagattttttttttaagtgacataattgtccagttataagcgtatttagactgtggccatatatgctgtatttctttgtagaataaatggtttctcattaaactctaaagattagggaaaatggatatagaaaatcttagtatagtagaaagacatctgcctgtaattaaactagtttaagggtggaaaaatgcccatttttgctaattatcaatgggatatgattggttcagtttttttttttccagagttgttgtttgccaagctaatctgcctggttttatttatatcttgttattaatgtttcttctccaattctgaaatacttttgagtatggctatctatacctgccttttaagtttgaaactaactcatagattgcaaatattggttagtatttaactacatctgcctcggctcacaaattccgattagacctttatccagctagtgccaaataattgatcagatgctgaattgagaataagaatttgaggtctacattcttggttgttaatttagagcgtttggttaaagtatgtccttcagctgactccagtataatctcctctgctcattaaactgattccaggagattggatttgctgtgactagatacagatggagcaaatgtcctaacagagaaatagaggtgatgctgctaaagggagaaatgccaggcggacaaagttcagtgtcgggaattttccccgtgacattcactggggcatgagattttggaagaagttttttactttggtttagtctttttttccttcctttttattcagctagaatttctggtgggttgatggtagggtataatgtgtctgtgttgcttcaaattggtctgaaaggctatcctgctgaaagtcctgctttcctatctagcatttatttctctggcaaacttttctttcttttcttttttaaagtaaacttgtgtattgagtcttaactgtatttcagtattttccagccttatgtgttacattattccaatgatacccaacagtttatttttattatttttttaaacaaaatttcacagttctgtaatgtaggcacttttattttcattgtgatttatatataaggtaatgtagggttatatttgggagtgactgcaagcatttttccatctgtgtgcaactaactgactctgttattgatcccttctcctgccctttcccaggtaatttaaattggtcatggtagatttttttcatagatttgaaaaacttttaggttgttaccaagtatgaagtataaatctggggaagaggttttatttacattttagggtgggtaagaaagccaccttgttacaaattttttaatttccaaaataatctatattaaatgagggtttctgatctgtactttgtgtttagctacctttttatatttaaaaaattaaaaatgaaaattacgttcttacaagcttaaagcttgatttgatctttgtttaaatgccaaaatgtacttaaatgagttacttagaatgccataaaattgcagtttcatgtatgtatataatcatgctcatgtatatttagttacgtataatgctttctgagtgagttttactcttaaatcatttggttaaatcatttggcttgctgtttactcccttctgtagtttttaattaaaaactttaaagataagtctacattaaacaatgatcacatctaaagctttatctttgtgtaatctaagtatatgtgagaaatcagaattggcataatttgtcttagttgatattcaaggctttaaaagtcattattcctgggcttggtaagtgaatttatgagatttactgctctagaaagtatagatggcgaaaggaccgttttgtattgcttcctgattaccagtctgattataccatgtgtgctaatatactttttttgttatagattgtcttaatggtaggtcaagtaataaaaagagatgaaataatttaaa

SEQ ID NO: 298936 - DNA, 2554 bp, Homo sapiens
taacgtcggggcattccggataggctgagaaagtgttgtgggaagattggggccttctgattattttggtgaaattgcactactgatgaatcgtcctcgtgctgccacagttgttgctcgtggccccttgaagtgcgttaagctggaccgacctagatttgaacgtgttcttggcccatgctcagacatcctcaaacgaaacatccagcagtacaacagttttgtgtcactgtctgtctgaaatctgcctcctgtgcctcccttttctcctctccccaatccatgcttcactcatgcaaactgctttattttccctacttgcagcgccaagtggccactggcatcgcagcttcctgtctgtttatatattgaaagttgcttttattgcaccattttcaatttggagcattaactaaatgctcatacacagttaaataaatagaaagagttctatggagactttgctgttactgcttctctttgtgcagtgttagtattcaccctgggcagtgagtgccatgctttttggtgagggcagatcccagcacctattgaattaccatagagtaatgatgtaacagtgcaagattttttttttaagtgacataattgtccagttataagcgtatttagactgtggccatatatgctgtatttctttgtagaataaatggtttctcattaaactctaaagattagggaaaatggatatagaaaatcttagtatagtagaaagacatctgcctgtaattaaactagtttaagggtggaaaaatgcccatttttgctaattatcaatgggatatgattggttcagtttttttttttccagagttgttgtttgccaagctaatctgcctggttttatttatatcttgttattaatgtttcttctccaattctgaaatacttttgagtatggctatctatacctgccttttaagtttgaaactaactcatagattgcaaatattggttagtatttaactacatctgcctcggctcacaaattccgattagacctttatccagctagtgccaaataattgatcagatgctgaattgagaataagaatttgaggtctacattcttggttgttaatttagagcgtttggttaaagtatgtccttcagctgactccagtataatctcctctgctcattaaactgattccaggagattggatttgctgtgactagatacagatggagcaaatgtcctaacagagaaatagaggtgatgctgctaaagggagaaatgccaggcggacaaagttcagtgtcgggaattttccccgtgacattcactggggcatgagattttggaagaagttttttactttggtttagtctttttttccttcctttttattcagctagaatttctggtgggttgatggtagggtataatgtgtctgtgttgcttcaaattggtctgaaaggctatcctgctgaaagtcctgctttcctatctagcatttatttctctggcaaacttttctttcttttcttttttaaagtaaacttgtgtattgagtcttaactgtatttcagtattttccagccttatgtgttacattattccaatgatacccaacagtttatttttattatttttttaaacaaaatttcacagttctgtaatgtaggcacttttattttcattgtgatttatatataaggtaatgtagggttatatttgggagtgactgcaagcatttttccatctgtgtgcaactaactgactctgttattgatcccttctcctgccctttcccaggtaatttaaattggtcatggtagatttttttcatagatttgaaaaacttttaggttgttaccaagtatgaagtataaatctggggaagaggttttatttacattttagggtgggtaagaaagccaccttgttacaaattttttaatttccaaaataatctatattaaatgagggtttctgatctgtactttgtgtttagctacctttttatatttaaaaaattaaaaatgaaaattacgttcttacaagcttaaagcttgatttgatctttgtttaaatgccaaaatgtacttaaatgagttacttagaatgccataaaattgcagtttcatgtatgtatataatcatgctcatgtatatttagttacgtataatgctttctgagtgagttttactcttaaatcatttggttaaatcatttggcttgctgtttactcccttctgtagtttttaattaaaaactttaaagataagtctacattaaacaatgatcacatctaaagctttatctttgtgtaatctaagtatatgtgagaaatcagaattggcataatttgtcttagttgatattcaaggctttaaaagtcattattcctgggcttggtaagtgaatttatgagatttactgctctagaaagtatagatggcgaaaggaccgttttgtattgcttcctgattaccagtctgattataccatgtgtgctaatatactttttttgttatagattgtcttaatggtaggtcaagtaataaaaagagatgaaataatttaaa

SEQ ID NO: 298937 - DNA, 1539 bp, Homo sapiens
tgagcggacctctcctacgtatctatcaacaacgtataagagtctcttttttctgcctgctcactagcattgttattgcctgtatttttgataaaagccattttaactgggatgaaatatttcattatactttcgattagtatttatctgattagtgatgttgaccatttttttcatatacctgttgaccatttacccaaatgtcctaacagagaaatagaggtgatgctgctaaagggagaaatgccaggcggacaaagttcagtgtcgggaattttccccgtgacattcactggggcatgagattttggaagaagttttttactttggtttagtctttttttccttcctttttattcagctagaatttctggtgggttgatggtagggtataatgtgtctgtgttgcttcaaattggtctgaaaggctatcctgctgaaagtcctgctttcctatctagcatttatttctctggcaaacttttctttcttttcttttttaaagtaaacttgtgtattgagtcttaactgtatttcagtattttccagccttatgtgttacattattccaatgatacccaacagtttatttttattatttttttaaacaaaatttcacagttctgtaatgtaggcacttttattttcattgtgatttatatataaggtaatgtagggttatatttgggagtgactgcaagcatttttccatctgtgtgcaactaactgactctgttattgatcccttctcctgccctttcccaggtaatttaaattggtcatggtagatttttttcatagatttgaaaaacttttaggttgttaccaagtatgaagtataaatctggggaagaggttttatttacattttagggtgggtaagaaagccaccttgttacaaattttttaatttccaaaataatctatattaaatgagggtttctgatctgtactttgtgtttagctacctttttatatttaaaaaattaaaaatgaaaattacgttcttacaagcttaaagcttgatttgatctttgtttaaatgccaaaatgtacttaaatgagttacttagaatgccataaaattgcagtttcatgtatgtatataatcatgctcatgtatatttagttacgtataatgctttctgagtgagttttactcttaaatcatttggttaaatcatttggcttgctgtttactcccttctgtagtttttaattaaaaactttaaagataagtctacattaaacaatgatcacatctaaagctttatctttgtgtaatctaagtatatgtgagaaatcagaattggcataatttgtcttagttgatattcaaggctttaaaagtcattattcctgggcttggtaagtgaatttatgagatttactgctctagaaagtatagatggcgaaaggaccgttttgtattgcttcctgattaccagtctgattataccatgtgtgctaatatactttttttgttatagattgtcttaatggtaggtcaagtaataaaaagagatgaaataatttaaa

SEQ ID NO: 298938 - DNA, 1280 bp, Homo sapiens
acgtcagtagccgaacgctgattggctgcggccaggccgtttccggtggagctgtcgcctagccgctatcgcagagtggagcggggctgggagcaaagcgctgagggagctcggtacgccgccgcctcgcacccgcagcctcgcgcccgccgccgcccgtccccagagaaccatggagtctggcagtaccgccgccagtgaggaggcacgcagccttcgagaatgtgagctctacgtccagaagcataacattcaagcgctgctcaaagattctattgtgcagttgtgcactgctcgacctgagagacccatggcattcctcagggaatactttgagaggttggagaaggaggaggcaaaacagattcagaatctgcagaaagcaggcactcgtacagactcaagggaggatgagatttctcctcctccacccaacccagtggttaaaggtaggaggcgacgaggtgctatcagcgctgaggtctacacggaggaagatgcggcatcctatgttagaaaggttataccaaaagattacaagacaatggccgctttagccaaagccattgaaaagaatgtgctgttttcacatcttgatgataatgagagaagtgatatttttgatgccatgttttcggtctcctttatcgcaggagagactgtgattcagcaaggtgatgaaggggataacttctatgtgattgatcaaggagagacggatgtctatgttaacaatgaatgggcaaccagtgttggggaaggagggagctttggagaacttgctttgatttatggaacaccgagagcagccactgtcaaagcaaagacaaatgtgaaattgtggggcatcgaccgagacagctatagaagaatcctcatgggaagcacactgagaaagcggaagatgtatgaggaattccttagtaaagtctctattttagagtctctggacaagtgggaacgtcttacggtagctgatgcattggaaccagtgcagtttgaagatgggcagaagattgtggtgcagggagaaccaggggatgagttcttcattattttagaggggtcagctgctgtgctacaacgtcggtcagaaaatgaagagtttgttgaagtgggaagattggggccttctgattattttggtgaaattgcactactgatgaatcgtcctcgtgctgccacagttgttgctcgtggccccttgaagtgcgttaagctggaccgacctagatttgaacgtgttcttggacttgccatatgcaaagggtaccgagctc

SEQ ID NO: 298939 - DNA, 1811 bp, Homo sapiens
acgtcagtagccgaacgctgattggctgcggccaggccgtttccggtggagctgtcgcctagccgctatcgcagagtggagcggggctgggagcaaagcgctgagggagctcggtacgccgccgcctcgcacccgcagcctcgcgcccgccgccgcccgtccccagagaaccatggagtctggcagtaccgccgccagtgaggaggcacgcagccttcgagaatgtgagctctacgtccagaagcataacattcaagcgctgctcaaagattctattgtgcagttgtgcactgctcgacctgagagacccatggcattcctcagggaatactttgagaggttggagaaggaggaggcaaaacagattcagaatctgcagaaagcaggcactcgtacagactcaagggaggatgagatttctcctcctccacccaacccagtggttaaaggtaggaggcgacgaggtgctatcagcgctgaggtctacacggaggaagatgcggcatcctatgttagaaaggttataccaaaagattacaagacaatggccgctttagccaaagccattgaaaagaatgtgctgttttcacatcttgatgataatgagagaagtgatatttttgatgccatgttttcggtctcctttatcgcaggagagactgtgattcagcaaggtgatgaaggggataacttctatgtgattgatcaaggagagacggatgtctatgttaacaatgaatgggcaaccagtgttggggaaggagggagctttggagaacttgctttgatttatggaacaccgagagcagccactgtcaaagcaaagacaaatgtgaaattgtggggcatcgaccgagacagctatagaagaatcctcatgggaagcacactgagaaagcggaagatgtatgaggaattccttagtaaagtctctattttagagtctctggacaagtgggaacgtcttacggtagctgatgcattggaaccagtgcagtttgaagatgggcagaagattgtggtgcagggagaaccaggggatgagttcttcattattttagaggggtcagctgctgtgctacaacgtcggtcagaaaatgaagagtttgttgaagtgggaagattggggccttctgattattttggtatgtatgaattccctcacaataaatacatggtttctttaagtcacctctcagtgagatattgtagtcttccataattttgtcttctcctgaattttattttctaactgcagtcttttttggctctgagagggaaggtgtgagattttgatctttactcatttaatgaaattactgattgtctcatatctattgtcttctttctcagaagtgcactgctttaaggaaatgtttttcatagaagttagcctgttacccatctttgctttctccaggtgaaattgcactactgatgaatcgtcctcgtgctgccacagttgttgctcgtggccccttgaagtgcgttaagctggaccgacctagatttgaacgtgttcttggcccatgctcagacatcctcaaacgaaacatccagcagtacaacagttttgtgtcactgtctgtctgaaatctgcctcctgtgcctcccttttctcctctccccaatccatgcttcactcatgcaaactgctttattttccctacttgcagcgccaagtggccactggcatcgcagcttcctgtctgtttatatattgaaagttgcttttattgcaccattttcaatttggagcattaactaaatgctcatacacagttaaataaatagaaagagttctatggaga

SEQ ID NO: 298940 - DNA, 1378 bp, Homo sapiens
acgtcagtagccgaacgctgattggctgcggccaggccgtttccggtggagctgtcgcctagccgctatcgcagagtggagcggggctgggagcaaagcgctgagggagctcggtacgccgccgcctcgcacccgcagcctcgcgcccgccgccgcccgtccccagagaaccatggagtctggcagtaccgccgccagtgaggaggcacgcagccttcgagaatgtgagctctacgtccagaagcataacattcaagcgctgctcaaagattctattgtgcagttgtgcactgctcgacctgagagacccatggcattcctcagggaatactttgagaggttggagaaggaggaggcaaaacagattcagaatctgcagaaagcaggcactcgtacagactcaagggaggatgagatttctcctcctccacccaacccagtggttaaaggtaggaggcgacgaggtgctatcagcgctgaggtctacacggaggaagatgcggcatcctatgttagaaaggttataccaaaagattacaagacaatggccgctttagccaaagccattgaaaagaatgtgctgttttcacatcttgatgataatgagagaagtgatatttttgatgccatgttttcggtctcctttatcgcaggagagactgtgattcagcaaggtgatgaaggggataacttctatgtgattgatcaaggagagacggatgtctatgttaacaatgaatgggcaaccagtgttggggaaggagggagctttggagaacttgctttgatttatggaacaccgagagcagccactgtcaaagcaaagacaaatgtgaaattgtggggcatcgaccgagacagctatagaagaatcctcatgggaagcacactgagaaagcggaagatgtatgaggaattccttagtaaagtctctattttagagtctctggacaagtgggaacgtcttacggtagctgatgcattggaaccagtgcagtttgaagatgggcagaagattgtggtgcagggagaaccaggggatgagttcttcattattttagaggggtcagctgctgtgctacaacgtcggtcagaaaatgaagagtttgttgaagtgggaagattggggccttctgattattttggtcacctcatcatctcaaggaggagcattcccctgggctaaggcactggggccgaactctaggagaccctaacctgtgggctgcagatcctttgggggccagaaacccaaactcacaccaagctctgtctaaggactcaatacatattatttcactcatctctatgtttcacaaaattttcaaggcatgtagttgctgttgttatgaataaaatataaattaatgtaaacatg

SEQ ID NO: 298941 - DNA, 1440 bp, Homo sapiens
acgtcagtagccgaacgctgattggctgcggccaggccgtttccggtggagctgtcgcctagccgctatcgcagagtggagcggggctgggagcaaagcgctgagggagctcggtacgccgccgcctcgcacccgcagcctcgcgcccgccgccgcccgtccccagagaaccatggagtctggcagtaccgccgccagtgaggaggcacgcagccttcgagaatgtgagctctacgtccagaagcataacattcaagcgctgctcaaagattctattgtgcagttgtgcactgctcgacctgagagacccatggcattcctcagggaatactttgagaggttggagaaggaggaggcaaaacagattcagaatctgcagaaagcaggcactcgtacagactcaagggaggatgagatttctcctcctccacccaacccagtggttaaaggtaggaggcgacgaggtgctatcagcgctgaggtctacacggaggaagatgcggcatcctatgttagaaaggttataccaaaagattacaagacaatggccgctttagccaaagccattgaaaagaatgtgctgttttcacatcttgatgataatgagagaagtgatatttttgatgccatgttttcggtctcctttatcgcaggagagactgtgattcagcaaggtgatgaaggggataacttctatgtgattgatcaaggagagacggatgtctatgttaacaatgaatgggcaaccagtgttggggaaggagggagctttggagaacttgctttgatttatggaacaccgagagcagccactgtcaaagcaaagacaaatgtgaaattgtggggcatcgaccgagacagctatagaagaatcctcatgggaagcacactgagaaagcggaagatgtatgaggaattccttagtaaagtctctattttagagtctctggacaagtgggaacgtcttacggtagctgatgcattggaaccagtgcagtttgaagatgggcagaagattgtggtgcagggagaaccaggggatgagttcttcattattttagaggggtcagctgctgtgctacaacgtcggtcagaaaatgaagagtttgttgaatgcgttaagctggaccgacctagatttgaacgtgttcttggcccatgctcagacatcctcaaacgaaacatccagcagtacaacagttttgtgtcactgtctgtctgaaatctgcctcctgtgcctcccttttctcctctccccaatccatgcttcactcatgcaaactgctttattttccctacttgcagcgccaagtggccactggcatcgcagcttcctgtctgtttatatattgaaagttgcttttattgcaccattttcaatttggagcattaactaaatgctcatacacagttaaataaatagaaagagttctatggaga

SEQ ID NO: 298942 - DNA, 1052 bp, Homo sapiens
gcagctaagcgataatttcaaagaagcaacagctaaatttacactggtctttcaaaagtaagagcctataaatgactgggtctcttcaaatagctgtatctaggctgggcacgctggctcacacctgtaatcctggcattttagaaggtctaaatgcaatcatgattgcatttagacaaggtaatgtagggttatatttgggagtgactgcaagcatttttccatctgtgtgcaactaactgactctgttattgatcccttctcctgccctttcccaggtaatttaaattggtcatggtagatttttttcatagatttgaaaaacttttaggttgttaccaagtatgaagtataaatctggggaagaggttttatttacattttagggtgggtaagaaagccaccttgttacaaattttttaatttccaaaataatctatattaaatgagggtttctgatctgtactttgtgtttagctacctttttatatttaaaaaattaaaaatgaaaattacgttcttacaagcttaaagcttgatttgatctttgtttaaatgccaaaatgtacttaaatgagttacttagaatgccataaaattgcagtttcatgtatgtatataatcatgctcatgtatatttagttacgtataatgctttctgagtgagttttactcttaaatcatttggttaaatcatttggcttgctgtttactcccttctgtagtttttaattaaaaactttaaagataagtctacattaaacaatgatcacatctaaagctttatctttgtgtaatctaagtatatgtgagaaatcagaattggcataatttgtcttagttgatattcaaggctttaaaagtcattattcctgggcttggtaagtgaatttatgagatttactgctctagaaagtatagatggcgaaaggaccgttttgtattgcttcctgattaccagtctgattataccatgtgtgctaatatactttttttgttatagattgtcttaatggtaggtcaagtaataaaaagagatgaaataatttaaa

SEQ ID NO: 298943 - DNA, 916 bp, Homo sapiens
gacggtttatcgtggtcattcgcacaccttctattaggtacagcacggggtgctataggggccgtgagcagcgcatcctcgtttccagtctgtgtgcaactaactgactctgttattgatcccttctcctgccctttcccaggtaatttaaattggtcatggtagatttttttcatagatttgaaaaacttttaggttgttaccaagtatgaagtataaatctggggaagaggttttatttacattttagggtgggtaagaaagccaccttgttacaaattttttaatttccaaaataatctatattaaatgagggtttctgatctgtactttgtgtttagctacctttttatatttaaaaaattaaaaatgaaaattacgttcttacaagcttaaagcttgatttgatctttgtttaaatgccaaaatgtacttaaatgagttacttagaatgccataaaattgcagtttcatgtatgtatataatcatgctcatgtatatttagttacgtataatgctttctgagtgagttttactcttaaatcatttggttaaatcatttggcttgctgtttactcccttctgtagtttttaattaaaaactttaaagataagtctacattaaacaatgatcacatctaaagctttatctttgtgtaatctaagtatatgtgagaaatcagaattggcataatttgtcttagttgatattcaaggctttaaaagtcattattcctgggcttggtaagtgaatttatgagatttactgctctagaaagtatagatggcgaaaggaccgttttgtattgcttcctgattaccagtctgattataccatgtgtgctaatatactttttttgttatagattgtcttaatggtaggtcaagtaataaaaagagatgaaataatttaaa

SEQ ID NO: 298944 - DNA, 999 bp, Homo sapiens
acgtcagtagccgaacgctgattggctgcggccaggccgtttccggtggagctgtcgcctagccgctatcgcagagtggagcggggctgggagcaaagcgctgagggagctcggtacgccgccgcctcgcacccgcagcctcgcgcccgccgccgcccgtccccagagaaccatggagtctggcagtaccgccgccagtgaggaggcacgcagccttcgagaatgtgagctctacgtccagaagcataacattcaagcgctgctcaaagattctattgtgcagttgtgcactgctcgacctgagagacccatggcattcctcagggaatactttgagaggttggagaaggaggaggcaaaacagattcagaatctgcagaaagcaggcactcgtacagactcaagggaggatgagatttctcctcctccacccaacccagtggttaaaggtaggaggcgacgaggtgctatcagcgctgaggtctacacggaggaagatgcggcatcctatgttagaaaggttataccaaaagattacaagacaatggccgctttagccaaagccattgaaaagaatgtgctgttttcacatcttgatgataatgagagaagtgatatttttgatgccatgttttcggtctcctttatcgcaggagagactgtgattcagcaaggtgatgaaggggataacttctatgtgattgatcaaggagagacggatgtctatgttaacaatgaatgggcaaccagtgttggggaaggagggagctttggagaacttgctttgatttatggaacaccgagagcagccactatagaaaaaattagctgggcatggtggcacacgcctataatcccagcactttgggaggctgaggtgggcggatcacctgaggtcgagagttcgagaccagcctggccaacacggtgaaaccccgtctctactaaaaatgcaaaaattagctgggcatggtggcacaaatgggacacgaatgttca

SEQ ID NO: 298945 - DNA, 1056 bp, Homo sapiens
acgtcagtagccgaacgctgattggctgcggccaggccgtttccggtggagctgtcgcctagccgctatcgcagagtggagcggggctgggagcaaagcgctgagggagctcggtacgccgccgcctcgcacccgcagcctcgcgcccgccgccgcccgtccccagagaaccatggagtctggcagtaccgccgccagtgaggaggcacgcagccttcgagaatgtgagctctacgtccagaagcataacattcaagcgctgctcaaagattctattgtgcagttgtgcactgctcgacctgagagacccatggcattcctcagggaatactttgagaggttggagaaggaggaggcaaaacagattcagaatctgcagaaagcaggcactcgtacagactcaagggaggatgagatttctcctcctccacccaacccagtggttaaaggtaggaggcgacgaggtgctatcagcgctgaggtctacacggaggaagatgcggcatcctatgttagaaaggttataccaaaagattacaagacaatggccgctttagccaaagccattgaaaagaatgtgctgttttcacatcttgatgataatgagagaagtgatatttttgatgccatgttttcggtctcctttatcgcaggagagactgtgattcagcaaggtgatgaaggggataacttctatgtgattgatcaaggagagacggatgtaagatttaccaatatcaaaaatatgttgatcttaaaagccaatgtattgatcgcttccgagcaataagaatagtgattttgaagggtcattacatcccttgtatgtcagattttattaataccttttgccaagtatttttatgacacagagaaactctttaaaggtaattttctgttcagaactttgctggagtggtggtgaagaagtgtgtgtagctgggtgcagtggccgatgcctataatcccagcactttgggagatggaggcaagagggttgcttgagcccaggagttcaagaccagcctgggcaacaaagtgaaacctcatctctta

SEQ ID NO: 298946 - DNA, 655 bp, Homo sapiens
acgtcagtagccgaacgctgattggctgcggccaggccgtttccggtggagctgtcgcctagccgctatcgcagagtggagcggggctgggagcaaagcgctgagggagctcggtacgccgccgcctcgcacccgcagcctcgcgcccgccgccgcccgtccccagagaaccatggagtctggcagtaccgccgccagtgaggaggcacgcagccttcgagaatgtgagctctacgtccagaagcataacattcaagcgctgctcaaagattctattgtgcagttgtgcactgctcgacctgagagacccatggcattcctcagggaatactttgagaggttggagaaggaggaggcaaaacagattcagaatctgcagaaagcaggcactcgtacagactcaagggaggatgagatttctcctcctccacccaacccagtggttaaaggtaggaggcgacgaggtgctatcagcgctgaggtctacacggaggaagatgcggcatcctatgttagaaaggttataccaaaagattacaagacaatggccgctttagccaaagccattgaaaagaatgtgctgttttcacatcttgatgataatgagagaagtgatatttttgatgccattgggccgcgggggttcgcctcgact

SEQ ID NO: 298947 - DNA, 594 bp, Homo sapiens
acgtcagtagccgaacgctgattggctgcggccaggccgtttccggtggagctgtcgcctagccgctatcgcagagtggagcggggctgggagcaaagcgctgagggagctcggtacgccgccgcctcgcacccgcagcctcgcgcccgccgccgcccgtccccagagaaccatggagtctggcagtaccgccgccagtgaggaggcacgcagccttcgagaatgtgagctctacgtccagaagcataacattcaagcgctgctcaaagattctattgtgcagttgtgcactgctcgacctgagagacccatggcattcctcagggaatactttgagaggttggagaaggaggaggcaaaacagattcagaatctgcagaaagcaggcactcgtacagactcaagggaggatgagatttctcctcctccacccaacccagtggttaaaggtaggaggcgacgaggtgctatcagcgctgaggtctacacggaggaagatgcggcatcctatgttagaaaggttatacccaaagattacagacatgccgcttagccaaccaccgtgactagtggggtcctctagagtcaccgcgc

SEQ ID NO: 298948 - DNA, 759 bp, Homo sapiens
acgtcagtagccgaacgctgattggctgcggccaggccgtttccggtggagctgtcgcctagccgctatcgcagagtggagcggggctgggagcaaagcgctgagggagctcggtacgccgccgcctcgcacccgcagcctcgcgcccgccgccgcccgtccccagagaaccatggagtctggcagtaccgccgccagtgaggaggcacgcagccttcgagaatgtgagctctacgtccagaagcataacattcaagcgctgctcaaagattctattgtgcagttgtgcactgctcgacctgagagacccatggcattcctcagggaatactttgagaggttggagaaggaggaggcaaaacagattcagaatctgcagaaagcaggcactcgtacagactcaagggaggatgagatttctcctcctccacccaacccagtggttaaaggtaggaggcgacgaggtgctatcagcgctgaggtctacacggaggaagatgcggcatcctatgttagaaaggttataccaaaacaccaggagactatcactcatgaagttgtaacacagatcggccagatctaagcttgtaagattgtagtgagaatgtagaggatgactacccgtggattccaacagtctttggatggcacatattcacatgaggagatgaaattgtaaggcatttagcggatgttaagagccatcacgggtaactcgtccgttgattgtacaggacagacaacgtggttttagtgaca

SEQ ID NO: 298949 - DNA, 905 bp, Homo sapiens
acgtcagtagccgaacgctgattggctgcggccaggccgtttccggtggagctgtcgcctagccgctatcgcagagtggagcggggctgggagcaaagcgctgagggagctcggtacgccgccgcctcgcacccgcagcctcgcgcccgccgccgcccgtccccagagaaccatggagtctggcagtaccgccgccagtgaggaggcacgcagccttcgagaatgtgagctctacgtccagaagcataacattcaagcgctgctcaaagattctattgtgcagttgtgcactgctcgacctgagagacccatggcattcctcagggaatactttgagaggttggagaaggtaaaaataaatgtggggagatgatgaggtgattgtgacagttgttacatttaataactggaatgttactaatttgtattttttggaagaaaaggaatctgactaaataaaaagtctaaaacaatttcaaataagaaatacagttaaggcatttgtagtaatttaaaaattcttaattagtagaatttatcagaaaaatgaacctgtatgctaactgtacttggctaataaagggtttccaaacaattctttgtaactttttaaattagtgcgtagaactataacagataaaactgatcagaactagtatagcagttctatgaataagaaattctatagttcttaaaggcagttaatgctcctcccgtttggaacaaagcaagtaagcgtagtaaatcttatcccacttttaaaactagtgtaatgaaacatgaatctagcttgtgactgatatatcagaaattttcaattagattcggtctattttagtatagagtatatctgataaattactgtagagatattgatattgatgttcctcaaaaattttactcca

SEQ ID NO: 298950 - DNA, 625 bp, Homo sapiens
acgtcagtagccgaacgctgattggctgcggccaggccgtttccggtggagctgtcgcctagccgctatcgcagagtggagcggggctgggagcaaagcgctgagggagctcggtacgccgccgcctcgcacccgcagcctcgcgcccgccgccgcccgtccccagagaaccatggagtctggcagtaccgccgccagtgaggaggcacgcagccttcgagaatgtgagctctacgtccagaagcataacattcaagcgctgctcaaagattctattgtgcagttgtgcactgctcgacctgagagacccatggcattcctcagggaatactttgagaggttggagaaggaggaggcaaaacagattcagaatctgcagaaagcaggcactcgtacagactcaagggaggatgagatttctcctcctccacccaacccagtggttaaagtgcttcactcatgcaaactgctttattttccctacttgcagcgccaagtggccactggcatcgcagcttcctgtctgtttatatattgaaagttgcttttattgcaccattttcaatttggagcattaactaaatgctcatacacagttaaataaatagaaagagttctatggaga

SEQ ID NO: 298951 - DNA, 853 bp, Homo sapiens
acgtcagtagccgaacgctgattggctgcggccaggccgtttccggtggagctgtcgcctagccgctatcgcagagtggagcggggctgggagcaaagcgctgagggagctcggtacgccgccgcctcgcacccgcagcctcgcgcccgccgccgcccgtccccaggacaacggctctattttactggggtccgccatcgtctcgtccgccggtcctggctcttcttgtaattgacttttgtgccctggtaattctgtatcctgtttaccgtttacctacttcccacgtcatcatgatttcttttgagggagaactgaatgaaattcccttaagggcctgacttcagcacccgtctctgcagagagaaccatggagtctggcagtaccgccgccagtgaggaggcacgcagccttcgagaatgtgagctctacgtccagaagcataacattcaagcgctgctcaaagattctattgtgcagttgtgcactgctcgacctgagagacccatggcattcctcagggaatactttgagaggttggagaaggaggaggcaaaacagattcagaatctgcagaaagcaggcactcgtacagactcaagggaggatgagatttctcctcctccacccaacccagtggttaaaggtaggaggcgacgaggtgctatcagcgctgaggtctacacggaggaagatgcggcatcctatgttagaaaggttataccaaaagattacaagacaatggccgctttagccaaagccattgaaaagaatgtgctgttttcacatcttgatgataatgagagaagtgatatttttgatgccattgggccgcgggggttcgcctcgact

SEQ ID NO: 298952 - DNA, 1152 bp, Homo sapiens
ccgccttcgcccccgcgcgccgcggcctcttcgctcaccctcccccatttcctgaaggacaacggctctattttactggggtccgccatcgtctcgtccgccggtcctggctcttcttgtaagccggtagttttcctctccacttttgacgactcgtcattgctagcagtagcctttcctcttcatagcggagtgatctttcccccaacacgacggtcttagtcgggctcctgaatttcctcttgtcccctttcacctctctccctttcccaattttgcccccctgaggcctcctcgccaccactgtggccttccgactggcgtagcttgaagtctcggcttcccttcattttgtggtcatgaccgtggcctacgtgaagtgaagggcattttcctgcccttcttctagcctactccttgagagattcccaagagatccgtctttttagcagagcgaggaaagcaaacacttactcaagatgaccctaggggagccgtaacttggctggtctaagggggtgcggtctgaatcaggaacagtttctcaaagtgtttttatttatttcccagaatgtaatcctttcgaaacaattttgtcacaactgaattttcaaaagaatgaatctgagtgttttgttttacatagagacaatgcagcgaaagttttaaagcagttaaataattgtgtgtggggagggaaggctaggttgttgggctttacaaataagtacacatagagaatccgggtaactcgattaaaaatattaagactgtgaagtctggttattcagggatttacatggtgactgcattaattttggtacatttctgttcgtatactgtcttattaccggtggctatctttttggttttcgtaatacattagttgtttcaaacaaaaacacagtttcactccttaggcccagttctctcatctctaccagccaaagacctgatcttagaatgattgatcatttgaatgttcttaaaatatgacaatgctttgaagcatgaaagatctgatttatgattgttcttggtggcctttaagtattatttgaaatgcagacaattctactgaagtggatcttcagttcatatgattgcctgacctggagaagtggcttgtataaatctatcctaaagtaaatg

SEQ ID NO: 298953 - DNA, 455 bp, Homo sapiens
gcgtagcttgaagtctcggcttcccttcattttgtggtcatgaccgtggcctacgtgaagtgaagggcattttcctgcccttcttctagaaaatacacggtacctattaacctcttcagctcagagcctgtggtgacgaccgtcctactccttgagagattcccaagagatccgtctttttagcagagcgaggaaagcaaacacttactcaagatgaccctaggggagccgtaacttggctggtctaagggggtgcggtctgaatcaggaacagtttctcaaagtgtttttatttatttcccagaatgtaatcctttcgaaacaattttgtcacaactgaattttcaaaagaatgaatctgagtgttttgttttacatagagacaatgcagcgaaagttttaaagcagttaaataattgtgtgtggggagggaaggctaggttgttgggctttac

SEQ ID NO: 298954 - DNA, 330 bp, Homo sapiens
caaaacagattcagaatctgcagaaagcaggcactcgtacagactcaagggaggatgagatttctcctcctccacccaacccagtggttaaaggtaggaggcgacgaggtgctatcagcgctgaggtctacacggaggaagatgcggcatcctatgttagaaaggtagttttgatatttgaatatcggggggatgcttttgggacccacttggtggtcatctagtctcctttgatgaatgaatcataaaatacaaaacagggtggaacttcatccatcctgtacaattcttgggtactggaaaacaggtttctgtaatagcatgctgtca

SEQ ID NO: 298955 - DNA, 309 bp, Homo sapiens
ctggaagaagcacattctggaggaaagcatgacttgggtaacgtggcccctcttggggcgattttcttttctgcaggtcacctcatcatctcaaggaggagcattcccctgggctaaggcactggggccgaactctaggagaccctaacctgtgggctgcagatcctttgggggccagaaacccaaactcacaccaagctctgtctaaggactcaatacatattatttcactcatctctatgtttcacaaaattttcaaggcatgtagttgctgttgttatgaataaaatataaattaatgtaaacatg

SEQ ID NO: 298956 - DNA, 3001 bp, Homo sapiens
gcacccttcatccctcttgctgcttttgtctggcacaaccttctcaggccctccgcgaggccggccctttttttctttcactttccccacccggagagccaggtgccgagaactaggacctcgtccccttctctatcccttcccctgatccatctcgtctctgttctccttcccttttccgttcccgaagccggaaggagccgaggtacccacggaaaaagtcgaagctgtccccggagagtgaggccttcacgaagcggtggcggaaggagccgaagttctctgatcggaggcgtgagcaagtggcatctccggaaagagccgaaacacggactcgagcttaatcccaggaggggcccgagggcgagatccggaaatctccggaaagagccgaaggccgggacggttaggattgtcggaagtggccgattgcttggacagggccggcggagaagatcggagcaagtccgtggaagaagccaaagactgggacggattgaattgttggaagaacccgaactcgcagaggggactgggcgcagtggcacacgaggacacacggaaacctccgaacgttgaggagataatctcggaaaagttacggaaacctgggaagtcggcgaaaccctacgttcgggtgttttcggaagcagccgaagcggccgctgcttcgccttcgtccagtatccggagatagccgaggcgcttcggagccaggctcggggggaggggcaagctcgcgggcgggcgggcgggtgagggggcggagcccgggcggggcggggagggctgccggaggcttgattaggtaggaggtggcgaagcgccggcggcggccggaagtagccgaagccagcggcggaagtagccgaagcggctggagcgggcggcaaggcgaggcgaaagctgcacagggccctacgcggccgcctcagcatgtcggacttcgacgagttcgagcggcagctcaacgagaataaacaagagcgggacaaggagaaccggcatcggaagcgcagccacagccgctctcggagccgggaccgcaaacgccggagccggagccgcgaccggcgcaaccgggaccagcggagcgcctcccgggacaggcgacgacgcagcaaacctttgaccagaggcgctaaagaggagcacggtggactgattcgttccccccgccacgagaagaagaagaaggtccgtaaatactgggacgtgccacccccaggctttgagcacatcaccccaatgcagtacaaggccatgcaagctgcgggtcagattccagccactgctcttctccccaccatgacccctgacggtctggctgtgaccccaacgccggtgcccgtggtcgggagccagatgaccagacaagcccggcgcctctacgtgggcaacatcccctttggcatcactgaggaggccatgatggatttcttcaacgcccagatgcgcctgggggggctgacccaggcccctggcaacccagtgttggctgtgcagattaaccaggacaagaattttgcctttttggagttccgctcagtggacgagactacccaggctatggcctttgatggcatcatcttccagggccagtcactaaagatccgcaggcctcacgactaccagccgcttcctggcatgtcagagaacccctccgtctatgtgcctggggttgtgtccactgtggtccccgactctgcccacaagctgttcatcgggggcttacccaactacctgaacgatgaccaggtcaaagagctgctgacatcctttgggcccctcaaggccttcaacctggtcaaggacagtgccacggggctctccaagggctacgccttctgtgagtacgtggacatcaacgtcacggatcaggccattgcggggctgaacggcatgcagctgggggataagaagctgctggtccagagggcgagtgtgggagccaagaatgccacgcttgagcaccatcaatcagacgcctgtgaccctgcaagtgccgggcttgatgagctcccaggtgcagatgggcggccacccgactgaggtcctgtgcctcatgaacatggtgctgcctgaggagctgctggacgacgaggagtatgaggagatcgtggaggatgtgcgggacgagtgcagcaagtacgggcttgtcaagtccatcgagatcccccggcctgtggacggcgtcgaggtgcccggctgcggaaagatctttgtggagttcacctctgtgtttgactgccagaaagccatgcagggcctgacgggccgcaagttcgccaacagagtggttgtcacaaaatactgtgaccccgactcttatcaccgccgggacttctggtagaggcggctgggggagggtgggggcagggctggctgggggcttctccccactcccgccccccccttatccccctctgaagacgatgggcagaggagtgacagccgcagacacacgacagccggcagcaactggaatggcagcaattaagggtggggggcgggggttggggggttggggggttagggcagggaggggactggggaagtgcgcacacagcccacacagacaacacgcacccacacagacacagagggaaggggttgggatggggacagggtgcacagcagggcggggtaggaccccagcccctcccaaaacagcctctcctactcccatagacccctttcttctccccttccccacggtaggaacatagcgtgtttatattttatggccaaactattttgaattttgttgtccggccctcagtgccctgccctctcccttaccaggaccacagctctgttccttcggcctctggtcctctctggtcccctcctgggtttcttacgtagttgatttttcctctttagtctcccccgacctgcgcccagccccgtggcccctgcccctctcctactctctgtggcagtttcatatttgctaagacgaatttgctcattaaacattttgttgtattttacttta

SEQ ID NO: 298957 - DNA, 2699 bp, Homo sapiens
gcacccttcatccctcttgctgcttttgtctggcacaaccttctcaggccctccgcgaggccggccctttttttctttcactttccccacccggagagccaggtgccgagaactaggacctcgtccccttctctatcccttcccctgatccatctcgtctctgttctccttcccttttccgttcccgaagccggaaggagccgaggtacccacggaaaaagtcgaagctgtccccggagagtgaggccttcacgaagcggtggcggaaggagccgaagttctctgatcggaggcgtgagcaagtggcatctccggaaagagccgaaacacggactcgagcttaatcccaggaggggcccgagggcgagatccggaaatctccggaaagagccgaaggccgggacggttaggattgtcggaagtggccgattgcttggacagggccggcggagaagatcggagcaagtccgtggaagaagccaaagactgggacggattgaattgttggaagaacccgaactcgcagaggggactgggcgcatagccgaagccagcggcggaagtagccgaagcggctggagcgggcggcaaggcgaggcgaaagctgcacagggccctacgcggccgcctcagcatgtcggacttcgacgagttcgagcggcagctcaacgagaataaacaagagcgggacaaggagaaccggcatcggaagcgcagccacagccgctctcggagccgggaccgcaaacgccggagccggagccgcgaccggcgcaaccgggaccagcggagcgcctcccgggacaggcgacgacgcagcaaacctttgaccagaggcgctaaagaggagcacggtggactgattcgttccccccgccacgagaagaagaagaaggtccgtaaatactgggacgtgccacccccaggctttgagcacatcaccccaatgcagtacaaggccatgcaagctgcgggtcagattccagccactgctcttctccccaccatgacccctgacggtctggctgtgaccccaacgccggtgcccgtggtcgggagccagatgaccagacaagcccggcgcctctacgtgggcaacatcccctttggcatcactgaggaggccatgatggatttcttcaacgcccagatgcgcctgggggggctgacccaggcccctggcaacccagtgttggctgtgcagattaaccaggacaagaattttgcctttttggagttccgctcagtggacgagactacccaggctatggcctttgatggcatcatcttccagggccagtcactaaagatccgcaggcctcacgactaccagccgcttcctggcatgtcagagaacccctccgtctatgtgcctggggttgtgtccactgtggtccccgactctgcccacaagctgttcatcgggggcttacccaactacctgaacgatgaccaggtcaaagagctgctgacatcctttgggcccctcaaggccttcaacctggtcaaggacagtgccacggggctctccaagggctacgccttctgtgagtacgtggacatcaacgtcacggatcaggccattgcggggctgaacggcatgcagctgggggataagaagctgctggtccagagggcgagtgtgggagccaagaatgccacgcttgagcaccatcaatcagacgcctgtgaccctgcaagtgccgggcttgatgagctcccaggtgcagatgggcggccacccgactgaggtcctgtgcctcatgaacatggtgctgcctgaggagctgctggacgacgaggagtatgaggagatcgtggaggatgtgcgggacgagtgcagcaagtacgggcttgtcaagtccatcgagatcccccggcctgtggacggcgtcgaggtgcccggctgcggaaagatctttgtggagttcacctctgtgtttgactgccagaaagccatgcagggcctgacgggccgcaagttcgccaacagagtggttgtcacaaaatactgtgaccccgactcttatcaccgccgggacttctggtagaggcggctgggggagggtgggggcagggctggctgggggcttctccccactcccgccccccccttatccccctctgaagacgatgggcagaggagtgacagccgcagacacacgacagccggcagcaactggaatggcagcaattaagggtggggggcgggggttggggggttggggggttagggcagggaggggactggggaagtgcgcacacagcccacacagacaacacgcacccacacagacacagagggaaggggttgggatggggacagggtgcacagcagggcggggtaggaccccagcccctcccaaaacagcctctcctactcccatagacccctttcttctccccttccccacggtaggaacatagcgtgtttatattttatggccaaactattttgaattttgttgtccggccctcagtgccctgccctctcccttaccaggaccacagctctgttccttcggcctctggtcctctctggtcccctcctgggtttcttacgtagttgatttttcctctttagtctcccccgacctgcgcccagccccgtggcccctgcccctctcctactctctgtggcagtttcatatttgctaagacgaatttgctcattaaacattttgttgtattttacttta

SEQ ID NO: 298958 - DNA, 3093 bp, Homo sapiens
  misc_feature (3013)..(3013): n is a, c, g, or t
  misc_feature (3071)..(3073): n is a, c, g, or t
  misc_feature (3078)..(3078): n is a, c, g, or t
  misc_feature (3081)..(3081): n is a, c, g, or t
gcacccttcatccctcttgctgcttttgtctggcacaaccttctcaggccctccgcgaggccggccctttttttctttcactttccccacccggagagccaggtgccgagaactaggacctcgtccccttctctatcccttcccctgatccatctcgtctctgttctccttcccttttccgttcccgaagccggaaggagccgaggtacccacggaaaaagtcgaagctgtccccggagagtgaggccttcacgaagcggtggcggaaggagccgaagttctctgatcggaggcgtgagcaagtggcatctccggaaagagccgaaacacggactcgagcttaatcccaggaggggcccgagggcgagatccggaaatctccggaaagagccgaaggccgggacggttaggattgtcggaagtggccgattgcttggacagggccggcggagaagatcggagcaagtccgtggaagaagccaaagactgggacggattgaattgttggaagaacccgaactcgcagaggggactgggcgcagtggcacacgaggacacacggaaacctccgaacgttgaggagataatctcggaaaagttacggaaacctgggaagtcggcgaaaccctacgttcgggtgttttcggaagcagccgaagcggccgctgcttcgccttcgtccagtatccggagatagccgaggcgcttcggagccaggctcggggggaggggcaagctcgcgggcgggcgggcgggtgagggggcggagcccgggcggggcggggagggctgccggaggcttgattaggtaggaggtggcgaagcgccggcggcggccggaagtagccgaagccagcggcggaagtagccgaagcggctggagcgggcggcaaggcgaggcgaaagctgcacagggccctacgcggccgcctcagcatgtcggacttcgacgagttcgagcggcagctcaacgagaataaacaagagcgggacaaggagaaccggcatcggaagcgcagccacagccgctctcggagccgggaccgcaaacgccggagccggagccgcgaccggcgcaaccgggaccagcggagcgcctcccgggacaggcgacgacgcagcaaacctttgaccagaggcgctaaagaggagcacggtggactgattcgttccccccgccacgagaagaagaagaaggtccgtaaatactgggacgtgccacccccaggctttgagcacatcaccccaatgcagtacaaggccatgcaagctgcgggtcagattccagccactgctcttctccccaccatgacccctgacggtctggctgtgaccccaacgccggtgcccgtggtcgggagccagatgaccagacaagcccggcgcctctacgtgggcaacatcccctttggcatcactgaggaggccatgatggatttcttcaacgcccagatgcgcctgggggggctgacccaggcccctggcaacccagtgttggctgtgcagattaaccaggacaagaattttgcctttttggagttccgctcagtggacgagactacccaggctatggcctttgatggcatcatcttccagggccagtcactaaagatccgcaggcctcacgactaccagccgcttcctggcatgtcagagaacccctccgtctatgtgcctggggttgtgtccactgtggtccccgactctgcccacaagctgttcatcgggggcttacccaactacctgaacgatgaccaggtcaaagagctgctgacatcctttgggcccctcaaggccttcaacctggtcaaggacagtgccacggggctctccaagggctacgccttctgtgagtacgtggacatcaacgtcacggatcaggccattgcggggctgaacggcatgcagctgggggataagaagctgctggtccagagggcgagtgtgggagccaagaatgccacgcttgagcaccatcaatcagacgcctgtgaccctgcaagtgccgggcttgatgagctcccaggtgcagatgggcggccacccgactgaggtcctgtgcctcatgaacatggtgctgcctgaggagctgctggacgacgaggagtatgaggagatcgtggaggatgtgcgggacgagtgcagcaagtacgggcttgtcaagtccatcgagatcccccggcctgtggacggcgtcgaggtgcccggctgcggaaagatctttgtggagttcacctctgtgtttgactgccagaaagccatgcagggcctgacgggccgcaagttcgccaacagagtggttgtcacaaaatactgtgaccccgactcttatcaccgccgggacttctggtagaggcggctgggggagggtgggggcagggctggctgggggcttctccccactcccgccccccccttatccccctctgaagacgatgggcagaggagtgacagccgcagacacacgacagccggcagcaactggaatggcagcaattaagggtggggggcgggggttggggggttggggggttagggcagggaggggactggggaagtgcgcacacagcccacacagacaacacgcacccacacagacacagagggaaggggttgggatggggacagggtgcacagcagggcggggtaggaccccagcccctcccaaaacagcctctcctactcccatagacccctttcttctccccttccccacggtaggaacatagcgtgtttatattttatggccaaactattttgaattttgttgtccggccctcagtgccctgccctctcccttaccaggaccacagctctgttccttcggcctctggtcctctctggtcccctcctgggtttcttacgtagttgatttttcctctttagtctcccccgacctgcgcccagccccgtggcccctgcccctctcctactctctgtggcagtttcatatttgctaagacgaatttgctcattaaacattttgttgtattttactttaaaaaaaaaaaanaaaaaaaaaaaaaaaaaaaaaaaaaaaaaaaaaaaaaaaaaaaaaaaggggggggggnnnaaaanttnccccgggggggc

SEQ ID NO: 298959 - DNA, 2867 bp, Homo sapiens
gcacccttcatccctcttgctgcttttgtctggcacaaccttctcaggccctccgcgaggccggccctttttttctttcactttccccacccggagagccaggtgccgagaactaggacctcgtccccttctctatcccttcccctgatccatctcgtctctgttctccttcccttttccgttcccgaagccggaaggagccgaggtacccacggaaaaagtcgaagctgtccccggagagtgaggccttcacgaagcggtggcggaaggagccgaagttctctgatcggaggcgtgagcaagtggcatctccggaaagagccgaaacacggactcgagcttaatcccaggaggggcccgagggcgagatccggaaatctccggaaagagccgaaggccgggacggttaggattgtcggaagtggccgattgcttggacagggccggcggagaagatcggagcaagtccgtggaagaagccaaagactgggacggattgaattgttggaagaacccgaactcgcagaggggactgggcgcagtggcacacgaggacacacggaaacctccgaacgttgaggagataatctcggaaaagttacggaaacctgggaagtcggcgaaaccctacgttcgggtgttttcggaagcagccgaagcggccgctgcttcgccttcgtccagtatccggagatagccgaggcgcttcggagccaggctcggggggaggggcaagctcgcgggcgggcgggcgggtgagggggcggagcccgggcggggcggggagggctgccggaggcttgattaggtaggaggtggcgaagcgccggcggcggccggaagtagccgaagccagcggcggaagtagccgaagcggctggagcgggcggcaaggcgaggcgaaagctgcacagggccctacgcggccgcctcagcatgtcggacttcgacgagttcgagcggcagctcaacgagaataaacaagagcgggacaaggagaaccggcatcggaagcgcagccacagccgctctcggagccgggaccgcaaacgccggagccggagccgcgaccggcgcaaccgggaccagcggagcgcctcccgggacaggcgacgacgcagcaaacctttgaccagaggcgctaaagaggagcacggtggactgattcgttccccccgccacgagaagaagaagaaggtccgtaaatactgggacgtgccacccccaggctttgagcacatcaccccaatgcagtacaaggccatgcaagctgcgggtcagattccagccactgctcttctccccaccatgacccctgacggtctggctgtgaccccaacgccggtgcccgtggtcgggagccagatgaccagacaagcccggcgcctctacgtgggcaacatcccctttggcatcactgaggaggccatgatggatttcttcaacgcccagatgcgcctgggggggctgacccaggcccctggcaacccagtgttggctgtgcagattaaccaggacaagaattttgcctttttggagttccgctcagtggacgagactacccaggctatggcctttgatggcatcatcttccagggccagtcactaaagatccgcaggcctcacgactaccagccgcttcctggcatgtcagagaacccctccgtctatgtgcctggggttgtgtccactgtggtccccgactctgcccacaagctgttcatcgggggcttacccaactacctgaacgatgaccaggtcaaagagctgctgacatcctttgggcccctcaaggccttcaacctggtcaaggacagtgccacggggctctccaagggctacgccttctgtgagtacgtggacatcaacgtcacggatcaggccattgcggggctgaacggcatgcagctgggggataagaagctgctggtccagagggcgagtgtgggagccaagaatgccacgcttgagcaccatcaatcagacgcctgtgaccctgcaagtgccgggcttgatgagctcccaggtgcagatgggcggccacccgactgaggtcctgtgcctcatgaacatggtgctgcctgaggagctgctggacgacgaggagtatgaggagatcgtggaggatgtgcgggacgagtgcagcaagtacgggcttgtcaagtccatcgagatcccccggcctgtggacggcgtcgaggtgcccggctgcggaaagatctttgtggagttcacctctgtgtttgactgccagaaagccatgcagggcctgacgggccgcaagttcgccaacagagtggttgtcacaaaatactgtgaccccgactcttatcaccgccgggacttctggtagaggcggctgggggagggtgggggcagggctggctgggggcttctccccactcccgccccccccttatccccctctgaagacgatgggcagaggagtgacagccgcagacacacgacagccggcagcaactggaatggcagcaattaagggtggggggcgggggttggggggttggggggttagggcagggaggggactggggaagtgcgcacacagcccacacagacaacacgcacccacacagacacagagggaaggggttgggatggggacagggtgcacagcagggcggggtaggaccccagcccctcccaaaacagcctctcctactcccatagacccctttcttctccccttccccacggtaggaacatagcgtgtttatattttatggccaaactattttgaattttgttgtccggccctcagtgctgcccctctcctactctctgtggcagtttcatatttgctaagacgaatttgctcattaaacattttgttgtattttacttta

SEQ ID NO: 298960 - DNA, 2935 bp, Homo sapiens
  misc_feature (2913)..(2915): n is a, c, g, or t
  misc_feature (2920)..(2920): n is a, c, g, or t
  misc_feature (2923)..(2923): n is a, c, g, or t
gcacccttcatccctcttgctgcttttgtctggcacaaccttctcaggccctccgcgaggccggccctttttttctttcactttccccacccggagagccaggtgccgagaactaggacctcgtccccttctctatcccttcccctgatccatctcgtctctgttctccttcccttttccgttcccgaagccggaaggagccgaggtacccacggaaaaagtcgaagctgtccccggagagtgaggccttcacgaagcggtggcggaaggagccgaagttctctgatcggaggcgtgagcaagtggcatctccggaaagagccgaaacacggactcgagcttaatcccaggaggggcccgagggcgagatccggaaatctccggaaagagccgaaggccgggacggttaggattgtcggaagtggccgattgcttggacagggccggcggagaagatcggagcaagtccgtggaagaagccaaagactgggacggattgaattgttggaagaacccgaactcgcagaggggactgggcgcagtggcacacgaggacacacggaaacctccgaacgttgaggagataatctcggaaaagttacggaaacctgggaagtcggcgaaaccctacgttcgggtgttttcggaagcagccgaagcggccgctgcttcgccttcgtccagtatccggagatagccgaggcgcttcggagccaggctcggggggaggggcaagctcgcgggcgggcgggcgggtgagggggcggagcccgggcggggcggggagggctgccggaggcttgattaggtaggaggtggcgaagcgccggcggcggccggaagtagccgaagccagcggcggaagtagccgaagcggctggagcgggcggcaaggcgaggcgaaagctgcacagggccctacgcggccgcctcagcatgtcggacttcgacgagttcgagcggcagctcaacgagaataaacaagagcgggacaaggagaaccggcatcggaagcgcagccacagccgctctcggagccgggaccgcaaacgccggagccggagccgcgaccggcgcaaccgggaccagcggagcgcctcccgggacaggcgacgacgcagcaaacctttgaccagaggcgctaaagaggagcacggtggactgattcgttccccccgccacgagaagaagaagaaggtccgtaaatactgggacgtgccacccccaggctttgagcacatcaccccaatgcagtacaaggccatgcaagctgcgggtcagattccagccactgctcttctccccaccatgacccctgacggtctggctgtgaccccaacgccggtgcccgtggtcgggagccagatgaccagacaagcccggcgcctctacgtgggcaacatcccctttggcatcactgaggaggccatgatggatttcttcaacgcccagatgcgcctgggggggctgacccaggcccctggcaacccagtgttggctgtgcagattaaccaggacaagaattttgcctttttggagttccgctcagtggacgagactacccaggctatggcctttgatggcatcatcttccagggccagtcactaaagatccgcaggcctcacgactaccagccgcttcctggcatgtcagagaacccctccgtctatgtgcctggggttgtgtccactgtggtccccgactctgcccacaagctgttcatcgggggcttacccaactacctgaacgatgaccaggtcaaagagctgctgacatcctttgggcccctcaaggccttcaacctggtcaaggacagtgccacggggctctccaagggctacgccttctgtgagtacgtggacatcaacgtcacggatcaggccattgcggggctgaacggcatgcagctgggggataagaagctgctggtccagagggcgagtgtgggagccaagaatgccacgcttgagcaccatcaatcagacgcctgtgaccctgcaagtgccgggcttgatgagctcccaggtgcagatgggcggccacccgactgaggtcctgtgcctcatgaacatggtgctgcctgaggagctgctggacgacgaggagtatgaggagatcgtggaggatgtgcgggacgagtgcagcaagtacgggcttgtcaagtccatcgagatcccccggcctgtggacggcgtcgaggtgcccggctgcggaaagatctttgtggagttcacctctgtgtttgactgccagaaagccatgcagggcctgacgggccgcaagttcgccaacagagtggttgtcacaaaatactgtgaccccgactcttatcaccgccgggacttctggtagaggcggctgggggagggtgggggcagggctggctgggggcttctccccactcccgccccccccttatccccctctgaagacgatgggcagaggagtgacagccgcagacacacgacagccggcagcaactggaatggcagcaattaagggtggggggcgggggttggggggttggggggttagggcagggaggggactggggaagtgcgcacacagcccacacagacaacacgcacccacacagacacagagggaaggggttgggatggggacagggtgcacagcagggcggggtaggaccccagcccctcccaaaacagcctctcctactcccatagacccctttcttctccccttccccacggtaggaacatagcgtgtttatattttatggccaaactattttgaattttgttgtccggccctcagtgctgcccctctcctactctctgtggcagtttcatatttgctaagacgaatttgctcattaaacattttgttgtattttactttaaaaaaaaaaaaaaaaaaaaaaaaaaaaaaaaaaaaggggggggggnnnaaaanttnccccgggggggc

SEQ ID NO: 298961 - DNA, 2464 bp, Homo sapiens
gcacccttcatccctcttgctgcttttgtctggcacaaccttctcaggccctccgcgaggccggccctttttttctttcactttccccacccggagagccaggtgccgagaactaggacctcgtccccttctctatcccttcccctgatccatctcgtctctgttctccttcccttttccgttcccgaagccggaaggagccgaggtacccacggaaaaagtcgaagctgtccccggagagtgaggccttcacgaagcggtggcggaaggagccgaagttctctgatcggaggcgtgagcaagtggcatctccggaaagagccgaaacacggactcgagcttaatcccaggaggggcccgagggcgagatccggaaatctccggaaagagccgaaggccgggacggttaggattgtcggaagtggccgattgcttggacagggccggcggagaagatcggagcaagtccgtggaagaagccaaagactgggacggattgaattgttggaagaacccgaactcgcagaggggactgggcgcagtggcacacgaggacacacggaaacctccgaacgttgaggagataatctcggaaaagttacggaaacctgggaagtcggcgaaaccctacgttcgggtgttttcggaagcagccgaagcggccgctgcttcgccttcgtccagtatccggagatagccgaggcgcttcggagccaggctcggggggaggggcaagctcgcgggcgggcgggcgggtgagggggcggagcccgggcggggcggggagggctgccggaggcttgattaggtaggaggtggcgaagcgccggcggcggccggaagtagccgaagccagcggcggaagtagccgaagcggctggagcgggcggcaaggcgaggcgaaagctgcacagggccctacgcggccgcctcagcatgtcggacttcgacgagttcgagcggcagctcaacgagaataaacaagagcgggacaaggagaaccggcatcggaagcgcagccacagccgctctcggagccgggaccgcaaacgccggagccggagccgcgaccggcgcaaccgggaccagcggagcgcctcccgggacaggcgacgacgcagcaaacctttgaccagaggcgctaaagaggagcacggtggactgattcgttccccccgccacgagaagaagaagaaggtccgtaaatactgggacgtgccacccccaggctttgagcacatcaccccaatgcagtacaaggccatgcaagctgcgggtcagattccagccactgctcttctccccaccatgacccctgacggtctggctgtgaccccaacgccggtgcccgtggtcgggagccagatgaccagacaagcccggcgcctctacgtgggcaacatcccctttggcatcactgaggaggccatgatggatttcttcaacgcccagatgcgcctgggggggctgacccaggcccctggcaacccagtgttggctgtgcagattaaccaggacaagaattttgcctttttggagttccgctcagtggacgagactacccaggctatggcctttgatggcatcatcttccagggccagtcactaaagatccgcaggcctcacgactaccagccgcttcctggcatgtcagagaacccctccgtctatgtgcctggggttgtgtccactgtggtccccgactctgcccacaagctgttcatcgggggcttacccaactacctgaacgatgaccaggtcaaagagctgctgacatcctttgggcccctcaaggccttcaacctggtcaaggacagtgccacggggctctccaagggctacgccttctgtgagtacgtggacatcaacgtcacggatcaggccattgcggggctgaacggcatgcagctgggggataagaagctgctggtccagagggcgagtgtgggagccaagaatgccacgcttgagcaccatcaatcagacgcctgtgaccctgcaagtgccgggcttgatgagctcccaggtgcagatgggcggccacccgactgaggtcctgtgcctcatgaacatggtgctgcctgaggagctgctggacgacgaggagtatgaggagatcgtggaggatgtgcgggacgagtgcagcaagtacgggcttgtcaagtccatcgagatcccccggcctgtggacggcgtcgaggtgcccggctgcggaaagatctttgtggagttcacctctgtgtttgaccctgccctctcccttaccaggaccacagctctgttccttcggcctctggtcctctctggtcccctcctgggtttcttacgtagttgatttttcctctttagtctcccccgacctgcgcccagccccgtggcccctgcccctctcctactctctgtggcagtttcatatttgctaagacgaatttgctcattaaacattttgttgtattttacttta

SEQ ID NO: 298962 - DNA, 2330 bp, Homo sapiens
gcacccttcatccctcttgctgcttttgtctggcacaaccttctcaggccctccgcgaggccggccctttttttctttcactttccccacccggagagccaggtgccgagaactaggacctcgtccccttctctatcccttcccctgatccatctcgtctctgttctccttcccttttccgttcccgaagccggaaggagccgaggtacccacggaaaaagtcgaagctgtccccggagagtgaggccttcacgaagcggtggcggaaggagccgaagttctctgatcggaggcgtgagcaagtggcatctccggaaagagccgaaacacggactcgagcttaatcccaggaggggcccgagggcgagatccggaaatctccggaaagagccgaaggccgggacggttaggattgtcggaagtggccgattgcttggacagggccggcggagaagatcggagcaagtccgtggaagaagccaaagactgggacggattgaattgttggaagaacccgaactcgcagaggggactgggcgcagtggcacacgaggacacacggaaacctccgaacgttgaggagataatctcggaaaagttacggaaacctgggaagtcggcgaaaccctacgttcgggtgttttcggaagcagccgaagcggccgctgcttcgccttcgtccagtatccggagatagccgaggcgcttcggagccaggctcggggggaggggcaagctcgcgggcgggcgggcgggtgagggggcggagcccgggcggggcggggagggctgccggaggcttgattaggtaggaggtggcgaagcgccggcggcggccggaagtagccgaagccagcggcggaagtagccgaagcggctggagcgggcggcaaggcgaggcgaaagctgcacagggccctacgcggccgcctcagcatgtcggacttcgacgagttcgagcggcagctcaacgagaataaacaagagcgggacaaggagaaccggcatcggaagcgcagccacagccgctctcggagccgggaccgcaaacgccggagccggagccgcgaccggcgcaaccgggaccagcggagcgcctcccgggacaggcgacgacgcagcaaacctttgaccagaggcgctaaagaggagcacggtggactgattcgttccccccgccacgagaagaagaagaaggtccgtaaatactgggacgtgccacccccaggctttgagcacatcaccccaatgcagtacaaggccatgcaagctgcgggtcagattccagccactgctcttctccccaccatgacccctgacggtctggctgtgaccccaacgccggtgcccgtggtcgggagccagatgaccagacaagcccggcgcctctacgtgggcaacatcccctttggcatcactgaggaggccatgatggatttcttcaacgcccagatgcgcctgggggggctgacccaggcccctggcaacccagtgttggctgtgcagattaaccaggacaagaattttgcctttttggagttccgctcagtggacgagactacccaggctatggcctttgatggcatcatcttccagggccagtcactaaagatccgcaggcctcacgactaccagccgcttcctggcatgtcagagaacccctccgtctatgtgcctggggttgtgtccactgtggtccccgactctgcccacaagctgttcatcgggggcttacccaactacctgaacgatgaccaggtcaaagagctgctgacatcctttgggcccctcaaggccttcaacctggtcaaggacagtgccacggggctctccaagggctacgccttctgtgagtacgtggacatcaacgtcacggatcaggccattgcggggctgaacggcatgcagctgggggataagaagctgctggtccagagggcgagtgtgggagccaagaatgccacgcttgagcaccatcaatcagacgcctgtgaccctgcaagtgccgggcttgatgagctcccaggtgcagatgggcggccacccgactgaggtcctgtgcctcatgaacatggtgctgcctgaggagctgctggacgacgaggagtatgaggagatcgtggaggatgtgcgggacgagtgcagcaagtacgggcttgtcaagtccatcgagatcccccggcctgtggacggcgtcgaggtgcccggctgcggaaagatctttgtggagttcacctctgtgtttgactgcccctctcctactctctgtggcagtttcatatttgctaagacgaatttgctcattaaacattttgttgtattttacttta

SEQ ID NO: 298963 - DNA, 2219 bp, Homo sapiens
gcacccttcatccctcttgctgcttttgtctggcacaaccttctcaggccctccgcgaggccggccctttttttctttcactttccccacccggagagccaggtgccgagaactaggacctcgtccccttctctatcccttcccctgatccatctcgtctctgttctccttcccttttccgttcccgaagccggaaggagccgaggtacccacggaaaaagtcgaagctgtccccggagagtgaggccttcacgaagcggtggcggaaggagccgaagttctctgatcggaggcgtgagcaagtggcatctccggaaagagccgaaacacggactcgagcttaatcccaggaggggcccgagggcgagatccggaaatctccggaaagagccgaaggccgggacggttaggattgtcggaagtggccgattgcttggacagggccggcggagaagatcggagcaagtccgtggaagaagccaaagactgggacggattgaattgttggaagaacccgaactcgcagaggggactgggcgcagtggcacacgaggacacacggaaacctccgaacgttgaggagataatctcggaaaagttacggaaacctgggaagtcggcgaaaccctacgttcgggtgttttcggaagcagccgaagcggccgctgcttcgccttcgtccagtatccggagatagccgaggcgcttcggagccaggctcggggggaggggcaagctcgcgggcgggcgggcgggtgagggggcggagcccgggcggggcggggagggctgccggaggcttgattaggtaggaggtggcgaagcgccggcggcggccggaagtagccgaagccagcggcggaagtagccgaagcggctggagcgggcggcaaggcgaggcgaaagctgcacagggccctacgcggccgcctcagcatgtcggacttcgacgagttcgagcggcagctcaacgagaataaacaagagcgggacaaggagaaccggcatcggaagcgcagccacagccgctctcggagccgggaccgcaaacgccggagccggagccgcgaccggcgcaaccgggaccagcggagcgcctcccgggacaggcgacgacgcagcaaacctttgaccagaggcgctaaagaggagcacggtggactgattcgttccccccgccacgagaagaagaagaaggtccgtaaatactgggacgtgccacccccaggctttgagcacatcaccccaatgcagtacaaggccatgcaagctgcgggtcagattccagccactgctcttctccccaccatgacccctgacggtctggctgtgaccccaacgccggtgcccgtggtcgggagccagatgaccagacaagcccggcgcctctacgtgggcaacatcccctttggcatcactgaggaggccatgatggatttcttcaacgcccagatgcgcctgggggggctgacccaggcccctggcaacccagtgttggctgtgcagattaaccaggacaagaattttgcctttttggagttccgctcagtggacgagactacccaggctatggcctttgatggcatcatcttccagggccagtcactaaagatccgcaggcctcacgactaccagccgcttcctggcatgtcagagaacccctccgtctatgtgcctggggttgtgtccactgtggtccccgactctgcccacaagctgttcatcgggggcttacccaactacctgaacgatgaccaggtcaaagagctgctgacatcctttgggcccctcaaggccttcaacctggtcaaggacagtgccacggggctctccaagggctacgccttctgtgagtacgtggacatcaacgtcacggatcaggccattgcggggctgaacggcatgcagctgggggataagaagctgctggtccagagggcgagtgtgggagccaagaatgccacgcttgagcaccatcaatcagacgcctgtgacccaacaagcgcctggccaggcgcttgttgggaagatgtctgctttctcctgcacttgaaggcaggcaatctctcagagttagggaaaacaggcaagaagtcagagagaaacggaggcacctggggaaagcggatggaagatggcctgggagcagtgagagccaagagcaggcagggccttcctcagggaagactgagggcccttcacacactcaccgcagcttc

SEQ ID NO: 298964 - DNA, 1919 bp, Homo sapiens
  misc_feature (1685)..(1685): n is a, c, g, or t
  misc_feature (1687)..(1687): n is a, c, g, or t
  misc_feature (1691)..(1691): n is a, c, g, or t
  misc_feature (1705)..(1706): n is a, c, g, or t
  misc_feature (1711)..(1711): n is a, c, g, or t
  misc_feature (1714)..(1714): n is a, c, g, or t
  misc_feature (1722)..(1722): n is a, c, g, or t
  misc_feature (1729)..(1729): n is a, c, g, or t
  misc_feature (1737)..(1738): n is a, c, g, or t
gcacccttcatccctcttgctgcttttgtctggcacaaccttctcaggccctccgcgaggccggccctttttttctttcactttccccacccggagagccaggtgccgagaactaggacctcgtccccttctctatcccttcccctgatccatctcgtctctgttctccttcccttttccgttcccgaagccggaaggagccgaggtacccacggaaaaagtcgaagctgtccccggagagtgaggccttcacgaagcggtggcggaaggagccgaagttctctgatcggaggcgtgagcaagtggcatctccggaaagagccgaaacacggactcgagcttaatcccaggaggggcccgagggcgagatccggaaatctccggaaagagccgaaggccgggacggttaggattgtcggaagtggccgattgcttggacagggccggcggagaagatcggagcaagtccgtggaagaagccaaagactgggacggattgaattgttggaagaacccgaactcgcagaggggactgggcgcagtggcacacgaggacacacggaaacctccgaacgttgaggagataatctcggaaaagttacggaaacctgggaagtcggcgaaaccctacgttcgggtgttttcggaagcagccgaagcggccgctgcttcgccttcgtccagtatccggagatagccgaggcgcttcggagccaggctcggggggaggggcaagctcgcgggcgggcgggcgggtgagggggcggagcccgggcggggcggggagggctgccggaggcttgattaggtaggaggtggcgaagcgccggcggcggccggaagtagccgaagccagcggcggaagtagccgaagcggctggagcgggcggcaaggcgaggcgaaagctgcacagggccctacgcggccgcctcagcatgtcggacttcgacgagttcgagcggcagctcaacgagaataaacaagagcgggacaaggagaaccggcatcggaagcgcagccacagccgctctcggagccgggaccgcaaacgccggagccggagccgcgaccggcgcaaccgggaccagcggagcgcctcccgggacaggcgacgacgcagcaaacctttgaccagaggcgctaaagaggagcacggtggactgattcgttccccccgccacgagaagaagaagaaggtccgtaaatactgggacgtgccacccccaggctttgagcacatcaccccaatgcagtacaaggccatgcaagctgcgggtcagattccagccactgctcttctccccaccatgacccctgacggtctggctgtgaccccaacgccggtgcccgtggtcgggagccagatgaccagacaagcccggcgcctctacgtgggcaacatcccctttggcatcactgaggaggccatgatggatttcttcaacgcccagatgcgcctgggggggctgacccaggcccctggcaacccagtgttggctgtgcagattaaccaggacaagaattttgcctttttggagttccgctcagtggacgagactacccaggctatggcctttgatggcatcatcttccagggccagtcactaaagatccgcaggcctcacgactaccagccgcttcctggcatgtcagagaacccctccgtctatgtgcctgggttggncnctgnggtcccgatctgcnncaagngtnctcggggngttccanactggacnngacccggtcaaaggggtggcatcctgggaccagaggtcaacgggcagaaggcacggggaccaagggggcgcatggggagagggacatacagggacagccaggggtagagaaatggcacaacgggcagaggagaggcaaacgagacaacaacacgacggggaaccacagacacgacaaggag

SEQ ID NO: 298965 - DNA, 3062 bp, Homo sapiens
gcacccttcatccctcttgctgcttttgtctggcacaaccttctcaggccctccgcgaggccggccctttttttctttcactttccccacccggagagccaggtgccgagaactaggacctcgtccccttctctatcccttcccctgatccatctcgtctctgttctccttcccttttccgttcccgaagccggaaggagccgaggtacccacggaaaaagtcgaagctgtccccggagagtgaggccttcacgaagcggtggcggaaggagccgaagttctctgatcggaggcgtgagcaagtggcatctccggaaagagccgaaacacggactcgagcttaatcccaggaggggcccgagggcgagatccggaaatctccggaaagagccgaaggccgggacggttaggattgtcggaagtggccgattgcttggacagggccggcggagaagatcggagcaagtccgtggaagaagccaaagactgggacggattgaattgttggaagaacccgaactcgcagaggggactgggcgcagtggcacacgaggacacacggaaacctccgaacgttgaggagataatctcggaaaagttacggaaacctgggaagtcggcgaaaccctacgttcgggtgttttcggaagcagccgaagcggccgctgcttcgccttcgtccagtatccggagatagccgaggcgcttcggagccaggctcggggggaggggcaagctcgcgggcgggcgggcgggtgagggggcggagcccgggcggggcggggagggctgccggaggcttgattaggtaggaggtggcgaagcgccggcggcggccggaagtagccgaagccagcggcggaagtagccgaagcggctggagcgggcggcaaggcgaggcgaaagctgcacagggccctacgcggccgcctcagcatgtcggacttcgacgagttcgagcggcagctcaacgagaataaacaagagcgggacaaggagaaccggcatcggaagcgcagccacagccgctctcggagccgggaccgcaaacgccggagccggagccgcgaccggcgcaaccgggaccagcggagcgcctcccgggacaggcgacgacgcagcaaacctttgaccagaggcgctaaagaggagcacggtggactgattcgttccccccgccacgagaagaagaagaaggtccgtaaatactgggacgtgccacccccaggctttgagcacatcaccccaatgcagtacaaggccatgcaagctgcgggtcagattccagccactgctcttctccccaccatgacccctgacggtctggctgtgaccccaacgccggtgcccgtggtcgggagccagatgaccagacaagcccggcgcctctacgtgggcaacatcccctttggcatcactgaggtgaaatattgtggggctgagatccctcgtagcaacaaaaagtttgctaccatcgtcgaaggaggccatgatggatttcttcaacgcccagatgcgcctgggggggctgacccaggcccctggcaacccagtgttggctgtgcagattaaccaggacaagaattttgcctttttggagttccgctcagtggacgagactacccaggctatggcctttgatggcatcatcttccagggccagtcactaaagatccgcaggcctcacgactaccagccgcttcctggcatgtcagagaacccctccgtctatgtgcctggggttgtgtccactgtggtccccgactctgcccacaagctgttcatcgggggcttacccaactacctgaacgatgaccaggtcaaagagctgctgacatcctttgggcccctcaaggccttcaacctggtcaaggacagtgccacggggctctccaagggctacgccttctgtgagtacgtggacatcaacgtcacggatcaggccattgcggggctgaacggcatgcagctgggggataagaagctgctggtccagagggcgagtgtgggagccaagaatgccacgcttgagcaccatcaatcagacgcctgtgaccctgcaagtgccgggcttgatgagctcccaggtgcagatgggcggccacccgactgaggtcctgtgcctcatgaacatggtgctgcctgaggagctgctggacgacgaggagtatgaggagatcgtggaggatgtgcgggacgagtgcagcaagtacgggcttgtcaagtccatcgagatcccccggcctgtggacggcgtcgaggtgcccggctgcggaaagatctttgtggagttcacctctgtgtttgactgccagaaagccatgcagggcctgacgggccgcaagttcgccaacagagtggttgtcacaaaatactgtgaccccgactcttatcaccgccgggacttctggtagaggcggctgggggagggtgggggcagggctggctgggggcttctccccactcccgccccccccttatccccctctgaagacgatgggcagaggagtgacagccgcagacacacgacagccggcagcaactggaatggcagcaattaagggtggggggcgggggttggggggttggggggttagggcagggaggggactggggaagtgcgcacacagcccacacagacaacacgcacccacacagacacagagggaaggggttgggatggggacagggtgcacagcagggcggggtaggaccccagcccctcccaaaacagcctctcctactcccatagacccctttcttctccccttccccacggtaggaacatagcgtgtttatattttatggccaaactattttgaattttgttgtccggccctcagtgccctgccctctcccttaccaggaccacagctctgttccttcggcctctggtcctctctggtcccctcctgggtttcttacgtagttgatttttcctctttagtctcccccgacctgcgcccagccccgtggcccctgcccctctcctactctctgtggcagtttcatatttgctaagacgaatttgctcattaaacattttgttgtattttacttta

SEQ ID NO: 298966 - DNA, 3121 bp, Homo sapiens
gcacccttcatccctcttgctgcttttgtctggcacaaccttctcaggccctccgcgaggccggccctttttttctttcactttccccacccggagagccaggtgccgagaactaggacctcgtccccttctctatcccttcccctgatccatctcgtctctgttctccttcccttttccgttcccgaagccggaaggagccgaggtacccacggaaaaagtcgaagctgtccccggagagtgaggccttcacgaagcggtggcggaaggagccgaagttctctgatcggaggcgtgagcaagtggcatctccggaaagagccgaaacacggactcgagcttaatcccaggaggggcccgagggcgagatccggaaatctccggaaagagccgaaggccgggacggttaggattgtcggaagtggccgattgcttggacagggccggcggagaagatcggagcaagtccgtggaagaagccaaagactgggacggattgaattgttggaagaacccgaactcgcagaggggactgggcgcagtggcacacgaggacacacggaaacctccgaacgttgaggagataatctcggaaaagttacggaaacctgggaagtcggcgaaaccctacgttcgggtgttttcggaagcagccgaagcggccgctgcttcgccttcgtccagtatccggagatagccgaggcgcttcggagccaggctcggggggaggggcaagctcgcgggcgggcgggcgggtgagggggcggagcccgggcggggcggggagggctgccggaggcttgattaggtaggaggtggcgaagcgccggcggcggccggaagtagccgaagccagcggcggaagtagccgaagcggctggagcgggcggcaaggcgaggcgaaagctgcacagggccctacgcggccgcctcagcatgtcggacttcgacgagttcgagcggcagctcaacgagaataaacaagcctctagccctgcccctctcagggacgaccctggggtcaggcccctcagccctcgagggggaccaggagccagcctcctctgtcttctctggctccccagctcctcctgagcatcctcagagcgggacaaggagaaccggcatcggaagcgcagccacagccgctctcggagccgggaccgcaaacgccggagccggagccgcgaccggcgcaaccgggaccagcggagcgcctcccgggacaggcgacgacgcagcaaacctttgaccagaggcgctaaagaggagcacggtggactgattcgttccccccgccacgagaagaagaagaaggtccgtaaatactgggacgtgccacccccaggctttgagcacatcaccccaatgcagtacaaggccatgcaagctgcgggtcagattccagccactgctcttctccccaccatgacccctgacggtctggctgtgaccccaacgccggtgcccgtggtcgggagccagatgaccagacaagcccggcgcctctacgtgggcaacatcccctttggcatcactgaggaggccatgatggatttcttcaacgcccagatgcgcctgggggggctgacccaggcccctggcaacccagtgttggctgtgcagattaaccaggacaagaattttgcctttttggagttccgctcagtggacgagactacccaggctatggcctttgatggcatcatcttccagggccagtcactaaagatccgcaggcctcacgactaccagccgcttcctggcatgtcagagaacccctccgtctatgtgcctggggttgtgtccactgtggtccccgactctgcccacaagctgttcatcgggggcttacccaactacctgaacgatgaccaggtcaaagagctgctgacatcctttgggcccctcaaggccttcaacctggtcaaggacagtgccacggggctctccaagggctacgccttctgtgagtacgtggacatcaacgtcacggatcaggccattgcggggctgaacggcatgcagctgggggataagaagctgctggtccagagggcgagtgtgggagccaagaatgccacgcttgagcaccatcaatcagacgcctgtgaccctgcaagtgccgggcttgatgagctcccaggtgcagatgggcggccacccgactgaggtcctgtgcctcatgaacatggtgctgcctgaggagctgctggacgacgaggagtatgaggagatcgtggaggatgtgcgggacgagtgcagcaagtacgggcttgtcaagtccatcgagatcccccggcctgtggacggcgtcgaggtgcccggctgcggaaagatctttgtggagttcacctctgtgtttgactgccagaaagccatgcagggcctgacgggccgcaagttcgccaacagagtggttgtcacaaaatactgtgaccccgactcttatcaccgccgggacttctggtagaggcggctgggggagggtgggggcagggctggctgggggcttctccccactcccgccccccccttatccccctctgaagacgatgggcagaggagtgacagccgcagacacacgacagccggcagcaactggaatggcagcaattaagggtggggggcgggggttggggggttggggggttagggcagggaggggactggggaagtgcgcacacagcccacacagacaacacgcacccacacagacacagagggaaggggttgggatggggacagggtgcacagcagggcggggtaggaccccagcccctcccaaaacagcctctcctactcccatagacccctttcttctccccttccccacggtaggaacatagcgtgtttatattttatggccaaactattttgaattttgttgtccggccctcagtgccctgccctctcccttaccaggaccacagctctgttccttcggcctctggtcctctctggtcccctcctgggtttcttacgtagttgatttttcctctttagtctcccccgacctgcgcccagccccgtggcccctgcccctctcctactctctgtggcagtttcatatttgctaagacgaatttgctcattaaacattttgttgtattttacttta

SEQ ID NO: 298967 - DNA, 3182 bp, Homo sapiens
gcacccttcatccctcttgctgcttttgtctggcacaaccttctcaggccctccgcgaggccggccctttttttctttcactttccccacccggagagccaggtgccgagaactaggacctcgtccccttctctatcccttcccctgatccatctcgtctctgttctccttcccttttccgttcccgaagccggaaggagccgaggtacccacggaaaaagtcgaagctgtccccggagagtgaggccttcacgaagcggtggcggaaggagccgaagttctctgatcggaggcgtgagcaagtggcatctccggaaagagccgaaacacggactcgagcttaatcccaggaggggcccgagggcgagatccggaaatctccggaaagagccgaaggccgggacggttaggattgtcggaagtggccgattgcttggacagggccggcggagaagatcggagcaagtccgtggaagaagccaaagactgggacggattgaattgttggaagaacccgaactcgcagaggggactgggcgcagtggcacacgaggacacacggaaacctccgaacgttgaggagataatctcggaaaagttacggaaacctgggaagtcggcgaaaccctacgttcgggtgttttcggaagcagccgaagcggccgctgcttcgccttcgtccagtatccggagatagccgaggcgcttcggagccaggctcggggggaggggcaagctcgcgggcgggcgggcgggtgagggggcggagcccgggcggggcggggagggctgccggaggcttgattaggtaggaggtggcgaagcgccggcggcggccggaagtagccgaagccagcggcggaagtagccgaagcggctggagcgggcggcaaggcgaggcgaaagctgcacagggccctacgcggccgcctcagcatgtcggacttcgacgagttcgagcggcagctcaacgagaataaacaagcctctagccctgcccctctcagggacgaccctggggtcaggcccctcagccctcgagggggaccaggagccagcctcctctgtcttctctggctccccagctcctcctgagcatcctcagagcgggacaaggagaaccggcatcggaagcgcagccacagccgctctcggagccgggaccgcaaacgccggagccggagccgcgaccggcgcaaccgggaccagcggagcgcctcccgggacaggcgacgacgcagcaaacctttgaccagaggcgctaaagaggagcacggtggactgattcgttccccccgccacgagaagaagaagaaggtccgtaaatactgggacgtgccacccccaggctttgagcacatcaccccaatgcagtacaaggccatgcaagctgcgggtcagattccagccactgctcttctccccaccatgacccctgacggtctggctgtgaccccaacgccggtgcccgtggtcgggagccagatgaccagacaagcccggcgcctctacgtgggcaacatcccctttggcatcactgaggtgaaatattgtggggctgagatccctcgtagcaacaaaaagtttgctaccatcgtcgaaggaggccatgatggatttcttcaacgcccagatgcgcctgggggggctgacccaggcccctggcaacccagtgttggctgtgcagattaaccaggacaagaattttgcctttttggagttccgctcagtggacgagactacccaggctatggcctttgatggcatcatcttccagggccagtcactaaagatccgcaggcctcacgactaccagccgcttcctggcatgtcagagaacccctccgtctatgtgcctggggttgtgtccactgtggtccccgactctgcccacaagctgttcatcgggggcttacccaactacctgaacgatgaccaggtcaaagagctgctgacatcctttgggcccctcaaggccttcaacctggtcaaggacagtgccacggggctctccaagggctacgccttctgtgagtacgtggacatcaacgtcacggatcaggccattgcggggctgaacggcatgcagctgggggataagaagctgctggtccagagggcgagtgtgggagccaagaatgccacgcttgagcaccatcaatcagacgcctgtgaccctgcaagtgccgggcttgatgagctcccaggtgcagatgggcggccacccgactgaggtcctgtgcctcatgaacatggtgctgcctgaggagctgctggacgacgaggagtatgaggagatcgtggaggatgtgcgggacgagtgcagcaagtacgggcttgtcaagtccatcgagatcccccggcctgtggacggcgtcgaggtgcccggctgcggaaagatctttgtggagttcacctctgtgtttgactgccagaaagccatgcagggcctgacgggccgcaagttcgccaacagagtggttgtcacaaaatactgtgaccccgactcttatcaccgccgggacttctggtagaggcggctgggggagggtgggggcagggctggctgggggcttctccccactcccgccccccccttatccccctctgaagacgatgggcagaggagtgacagccgcagacacacgacagccggcagcaactggaatggcagcaattaagggtggggggcgggggttggggggttggggggttagggcagggaggggactggggaagtgcgcacacagcccacacagacaacacgcacccacacagacacagagggaaggggttgggatggggacagggtgcacagcagggcggggtaggaccccagcccctcccaaaacagcctctcctactcccatagacccctttcttctccccttccccacggtaggaacatagcgtgtttatattttatggccaaactattttgaattttgttgtccggccctcagtgccctgccctctcccttaccaggaccacagctctgttccttcggcctctggtcctctctggtcccctcctgggtttcttacgtagttgatttttcctctttagtctcccccgacctgcgcccagccccgtggcccctgcccctctcctactctctgtggcagtttcatatttgctaagacgaatttgctcattaaacattttgttgtattttacttta

SEQ ID NO: 298968 - DNA, 1768 bp, Homo sapiens
gcacccttcatccctcttgctgcttttgtctggcacaaccttctcaggccctccgcgaggccggccctttttttctttcactttccccacccggagagccaggtgccgagaactaggacctcgtccccttctctatcccttcccctgatccatctcgtctctgttctccttcccttttccgttcccgaagccggaaggagccgaggtacccacggaaaaagtcgaagctgtccccggagagtgaggccttcacgaagcggtggcggaaggagccgaagttctctgatcggaggcgtgagcaagtggcatctccggaaagagccgaaacacggactcgagcttaatcccaggaggggcccgagggcgagatccggaaatctccggaaagagccgaaggccgggacggttaggattgtcggaagtggccgattgcttggacagggccggcggagaagatcggagcaagtccgtggaagaagccaaagactgggacggattgaattgttggaagaacccgaactcgcagaggggactgggcgcagtggcacacgaggacacacggaaacctccgaacgttgaggagataatctcggaaaagttacggaaacctgggaagtcggcgaaaccctacgttcgggtgttttcggaagcagccgaagcggccgctgcttcgccttcgtccagtatccggagatagccgaggcgcttcggagccaggctcggggggaggggcaagctcgcgggcgggcgggcgggtgagggggcggagcccgggcggggcggggagggctgccggaggcttgattaggtaggaggtggcgaagcgccggcggcggccggaagtagccgaagccagcggcggaagtagccgaagcggctggagcgggcggcaaggcgaggcgaaagctgcacagggccctacgcggccgcctcagcatgtcggacttcgacgagttcgagcggcagctcaacgagaataaacaagagcgggacaaggagaaccggcatcggaagcgcagccacagccgctctcggagccgggaccgcaaacgccggagccggagccgcgaccggcgcaaccgggaccagcggagcgcctcccgggacaggcgacgacgcagcaaacctttgaccagaggcgctaaagaggagcacggtggactgattcgttccccccgccacgagaagaagaagaaggtccgtaaatactgggacgtgccacccccaggctttgagcacatcaccccaatgcagtacaaggccatgcaagctgcgggtcagattccagccactgctcttctccccaccatgacccctgacggtctggctgtgaccccaacgccggtgcccgtggtcgggagccagatgaccagacaagcccggcgcctctacgtgggcaacatcccctttggcatcactgaggaggccatgatggatttcttcaacgcccagatgcgcctgggggggctgacccaggcccctggcaacccagtgttggctgtgcagattaaccagcctctcctactcccatagacccctttcttctccccttccccacggtaggaacatagcgtgtttatattttatggccaaactattttgaattttgttgtccggccctcagtgccctgccctctcccttaccaggaccacagctctgttccttcggcctctggtcctctctgctgcccctctcctactctctgtggcagtttcatatttgctaagacgaatttgctcattaaacattttgttgtattttacttta

SEQ ID NO: 298969 - DNA, 2116 bp, Homo sapiens
gcacccttcatccctcttgctgcttttgtctggcacaaccttctcaggccctccgcgaggccggccctttttttctttcactttccccacccggagagccaggtgccgagaactaggacctcgtccccttctctatcccttcccctgatccatctcgtctctgttctccttcccttttccgttcccgaagccggaaggagccgaggtacccacggaaaaagtcgaagctgtccccggagagtgaggccttcacgaagcggtggcggaaggagccgaagttctctgatcggaggcgtgagcaagtggcatctccggaaagagccgaaacacggactcgagcttaatcccaggaggggcccgagggcgagatccggaaatctccggaaagagccgaaggccgggacggttaggattgtcggaagtggccgattgcttggacagggccggcggagaagatcggagcaagtccgtggaagaagccaaagactgggacggattgaattgttggaagaacccgaactcgcagaggggactgggcgcagtggcacacgaggacacacggaaacctccgaacgttgaggagataatctcggaaaagttacggaaacctgggaagtcggcgaaaccctacgttcgggtgttttcggaagcagccgaagcggccgctgcttcgccttcgtccagtatccggagatagccgaggcgcttcggagccaggctcggggggaggggcaagctcgcgggcgggcgggcgggtgagggggcggagcccgggcggggcggggagggctgccggaggcttgattaggtaggaggtggcgaagcgccggcggcggccggaagtagccgaagccagcggcggaagtagccgaagcggctggagcgggcggcaaggcgaggcgaaagctgcacagggccctacgcggccgcctcagcatgtcggacttcgacgagttcgagcggcagctcaacgagaataaacaagagcgggacaaggagaaccggcatcggaagcgcagccacagccgctctcggagccgggaccgcaaacgccggagccggagccgcgaccggcgcaaccgggaccagcggagcgcctcccgggacaggcgacgacgcagcaaacctttgaccagaggcgctaaagaggagcacggtggactgattcgttccccccgccacgagaagaagaagaaggtccgtaaatactgggacgtgccacccccaggctttgagcacatcaccccaatgcagtacaaggccatgcaagctgcgggtcagattccagccactgctcttctccccaccatgacccctgacggtctggctgtgaccccaacgccggtgcccgtggtcgggagccagatgaccagacaagcccggcgcctctacgtgggcaacatcccctttggcatcactgaggtgaaatattgtggggctgagatccctcgtagcaacaaaaagtttgctaccatcgtcgaaggaggccatgatggatttcttcaacgcccagatgcgcctgggggggctgacccaggcccctggcaacccagtgttggctgtgcagattaaccaggacaagaattttgcctttttggagttccgctcagtggacgagactacccaggctatggcctttgatggcatcatcttccagggccagtcactaaagatccgcaggcctcacgactaccagccgcttcctggcatgtcagagaacccctccgtctatgtgcctggggttgtgtccactgtggtccccgactctgcccacaagctgttcatcgggggcttacccaactacctgaacgatgaccaggtcaaagagctgctgacatcctttgggcccctcaaggccttcaacctggtcaaggacagtgccacggggctctccaagggctacgccttctgtgagtacgtggacatcaacgtcacggatcaggtgagtccccggtcgctggccgctgccgcgtctgtccttccctgccctgcgctgttgccaagccatggtctcccctcctcaggggacggggcgggaggcggccaacctgaggcagtgccctgcgtgtgggctcgtccctgtcccatggtgttggctttttccaggctcttaatc

SEQ ID NO: 298970 - DNA, 1599 bp, Homo sapiens
gcacccttcatccctcttgctgcttttgtctggcacaaccttctcaggccctccgcgaggccggccctttttttctttcactttccccacccggagagccaggtgccgagaactaggacctcgtccccttctctatcccttcccctgatccatctcgtctctgttctccttcccttttccgttcccgaagccggaaggagccgaggtacccacggaaaaagtcgaagctgtccccggagagtgaggccttcacgaagcggtggcggaaggagccgaagttctctgatcggaggcgtgagcaagtggcatctccggaaagagccgaaacacggactcgagcttaatcccaggaggggcccgagggcgagatccggaaatctccggaaagagccgaaggccgggacggttaggattgtcggaagtggccgattgcttggacagggccggcggagaagatcggagcaagtccgtggaagaagccaaagactgggacggattgaattgttggaagaacccgaactcgcagaggggactgggcgcagtggcacacgaggacacacggaaacctccgaacgttgaggagataatctcggaaaagttacggaaacctgggaagtcggcgaaaccctacgttcgggtgttttcggaagcagccgaagcggccgctgcttcgccttcgtccagtatccggagatagccgaggcgcttcggagccaggctcggggggaggggcaagctcgcgggcgggcgggcgggtgagggggcggagcccgggcggggcggggagggctgccggaggcttgattaggtaggaggtggcgaagcgccggcggcggccggaagtagccgaagccagcggcggaagtagccgaagcggctggagcgggcggcaaggcgaggcgaaagctgcacagggccctacgcggccgcctcagcatgtcggacttcgacgagttcgagcggcagctcaacgagaataaacaagagcgggacaaggagaaccggcatcggaagcgcagccacagccgctctcggagccgggaccgcaaacgccggagccggagccgcgaccggcgcaaccgggaccagcggagcgcctcccgggacaggcgacgacgcagcaaacctttgaccagaggcgctaaagaggagcacggtggactgattcgttccccccgccacgagaagaagaagaaggtccgtaaatactgggacgtgccacccccaggctttgagcacatcaccccaatgcagtacaaggccatgcaagctgcgggtcagattccagccactgctcttctccccaccatgacccctgacggtctggctgtgaccccaacgccggtgcccgtggtcgggagccagatgaccagacaagcccggcgcctctacgtgggcaacatcccctttggcatcactgaggtgaaatattgtggggctgagatccctcgtagcaacaaaaagtttgctaccatcgtcgaaggcaagtaaggtccattctgactttctcaacctgcactttgctacatttgataaaccagcccccggactccagggccagattcctccacatcactcttttctcctcccctcccgtcc

SEQ ID NO: 298971 - DNA, 1519 bp, Homo sapiens
gtgcctagagatcccccgcctcaccacccaaacaggacagatatttgcctttttggattccgctcagtggacgagactacccaggctatggcctttgatggcatcatcttccagggccagtcactaaagatccgcaggcctcacgactaccagccgcttcctggcatgtcagagaacccctccgtctatgtgcctggggttgtgtccactgtggtccccgactctgcccacaagctgttcatcgggggcttacccaactacctgaacgatgaccaggtcaaagagctgctgacatcctttgggcccctcaaggccttcaacctggtcaaggacagtgccacggggctctccaagggctacgccttctgtgagtacgtggacatcaacgtcacggatcaggccattgcggggctgaacggcatgcagctgggggataagaagctgctggtccagagggcgagtgtgggagccaagaatgccacgcttgagcaccatcaatcagacgcctgtgaccctgcaagtgccgggcttgatgagctcccaggtgcagatgggcggccacccgactgaggtcctgtgcctcatgaacatggtgctgcctgaggagctgctggacgacgaggagtatgaggagatcgtggaggatgtgcgggacgagtgcagcaagtacgggcttgtcaagtccatcgagatcccccggcctgtggacggcgtcgaggtgcccggctgcggaaagatctttgtggagttcacctctgtgtttgactgccagaaagccatgcagggcctgacgggccgcaagttcgccaacagagtggttgtcacaaaatactgtgaccccgactcttatcaccgccgggacttctggtagaggcggctgggggagggtgggggcagggctggctgggggcttctccccactcccgccccccccttatccccctctgaagacgatgggcagaggagtgacagccgcagacacacgacagccggcagcaactggaatggcagcaattaagggtggggggcgggggttggggggttggggggttagggcagggaggggactggggaagtgcgcacacagcccacacagacaacacgcacccacacagacacagagggaaggggttgggatggggacagggtgcacagcagggcggggtaggaccccagcccctcccaaaacagcctctcctactcccatagacccctttcttctccccttccccacggtaggaacatagcgtgtttatattttatggccaaactattttgaattttgttgtccggccctcagtgccctgccctctcccttaccaggaccacagctctgttccttcggcctctggtcctctctggtcccctcctgggtttcttacgtagttgatttttcctctttagtctcccccgacctgcgcccagccccgtggcccctgcccctctcctactctctgtggcagtttcatatttgctaagacgaatttgctcattaaacattttgttgtattttacttta

SEQ ID NO: 298972 - DNA, 1103 bp, Homo sapiens
gcacccttcatccctcttgctgcttttgtctggcacaaccttctcaggccctccgcgaggccggccctttttttctttcactttccccacccggagagccaggtgccgagaactaggacctcgtccccttctctatcccttcccctgatccatctcgtctctgttctccttcccttttccgttcccgaagccggaaggagccgaggtacccacggaaaaagtcgaagctgtccccggagagtgaggccttcacgaagcggtggcggaaggagccgaagttctctgatcggaggcgtgagcaagtggcatctccggaaagagccgaaacacggactcgagcttaatcccaggaggggcccgagggcgagatccggaaatctccggaaagagccgaaggccgggacggttaggattgtcggaagtggccgattgcttggacagggccggcggagaagatcggagcaagtccgtggaagaagccaaagactgggacggattgaattgttggaagaacccgaactcgcagaggggactgggcgcagtggcacacgaggacacacggaaacctccgaacgttgaggagataatctcggaaaagttacggaaacctgggaagtcggcgaaaccctacgttcgggtgttttcggaagcagccgaagcggccgctgcttcgccttcgtccagtatccggagatagccgaggcgcttcggagccaggctcggggggaggggcaagctcgcgggcgggcgggcgggtgagggggcggagcccgggcggggcggggagggctgccggaggcttgattaggtaggaggtggcgaagcgccggcggcggccggaagtagccgaagccagcggcggaagtagccgaagcggctggagcggccctgccctctcccttaccaggaccacagctctgttccttcggcctctggtcctctctggtcccctcctgggtttcttacgtagttgatttttcctctttagtctcccccgacctgcgcccagccccgtggcccctgcccctctcctactctctgtggcagtttcatatttgctaagacgaatttgctcattaaacattttgttgtattttacttta

SEQ ID NO: 298973 - DNA, 1362 bp, Homo sapiens
gcacccttcatccctcttgctgcttttgtctggcacaaccttctcaggccctccgcgaggccggccctttttttctttcactttccccacccggagagccaggtgccgagaactaggacctcgtccccttctctatcccttcccctgatccatctcgtctctgttctccttcccttttccgttcccgaagccggaaggagccgaggtacccacggaaaaagtcgaagctgtccccggagagtgaggccttcacgaagcggtggcggaaggagccgaagttctctgatcggaggcgtgagcaagtggcatctccggaaagagccgaaacacggactcgagcttaatcccaggaggggcccgagggcgagatccggaaatctccggaaagagccgaaggccgggacggttaggattgtcggaagtggccgattgcttggacagggccggcggagaagatcggagcaagtccgtggaagaagccaaagactgggacggattgaattgttggaagaacccgaactcgcagaggggactgggcgcagtggcacacgaggacacacggaaacctccgaacgttgaggagataatctcggaaaagttacggaaacctgggaagtcggcgaaaccctacgttcgggtgttttcggaagcagccgaagcggccgctgcttcgccttcgtccagtatccggagatagccgaggcgcttcggagccaggctcggggggaggggcaagctcgcgggcgggcgggcgggtgagggggcggagcccgggcggggcggggagggctgccggaggcttgattaggtaggaggtggcgaagcgccggcggcggccggaagtagccgaagccagcggcggaagtagccgaagcggctggagcgggcggcaaggcgaggcgaaagctgcacagggccctacgcggccgcctcagcatgtcggacttcgacgagttcgagcggcagctcaacgagaataaacaaggtgagggcaccggggtcgcggggcggaggtgtgggcggctcctcgcgtcgctctttgcccccccgccattttctccctcgcttccccccacttcacggccgcgcggcgccccccaaccctggttccgtggcgcgcgcctcgttcacgtgacgtccccagcgttccgccgcgcgctaggcgaggggaagggggcggcggggcgcgggcccgtgacgcatgcgcacggcggctgtccctgcgccccacgtggtcctggcggaggtggcgcgggggacgcggcacgagcgcgccagatgcctcgacgtgaacttttgttttttaaaatctttttggtttctctgaaaaggagattatgttagtccccgtaatctcttttc

SEQ ID NO: 298974 - DNA, 304 bp, Homo sapiens
gagtgtgagctcctggcagcagggacatgcgtgtctgttgtactcccagtgcccagcctggggcctggcatgttgtatttgttcacatgagtgaaaggaaagaggaaatcccaatcctggaacactaggggctgtactagtccctgacccccatccctcaccactcctttctctttcattcagttccgctcagtggacgagactacccaggctatggcctttgatggcatcatcttccagggccagtcactaaagatccgcaggcctcacgactaccagccgcttcctggcatgtcagagaacc

SEQ ID NO: 298975 - DNA, 2536 bp, Homo sapiens
cctagcgctcctctccggcttccaccagcccatcgctccacgctctcttggctgctgcagtctcggtctctctctctctctctctctctctctctctctctctctctctctctctctctctctctctctctctctcccaagtttcctatctcgtcaagatcagggcaaaagaagaaaacaccgaattctgcttgccgtttcagagcggcggtgatgaagacaaaattgaacatctacaacatgcgagttcctgctttttgttttcttggtgtgggaccctgccaggttggtgctggctaacatccaagaagatgaggctaaaaataacattaccatctttacgagaattcttgacagacttctggatggttacgataatcggcttagaccaggactgggagacagtattactgaagtcttcactaacatctacgtgaccagttttggccctgtctcagatacagatatggaatatacaattgatgttttctttcgacaaaaatggaaagatgaacgtttaaaatttaaaggtcctatgaatatccttcgactaaacaatttaatggctagcaaaatctggactccagataccttttttcacaatgggaagaaatcagtagctcataatatgacaatgccaaataagttgcttcgaattcaggatgatgggactctgctgtataccatgaggcttacagttcaagctgaatgcccaatgcacttggaggatttcccaatggatgctcattcatgtcctctgaaatttggcagctatgcatatacaacttcagaggtcacttatatttggacttacaatgcatctgattcagtacaggttgctcctgatggctctaggttaaatcaatatgacctgctgggccaatcaatcggaaaggagacaattaaatccagtacaggtgaatatactgtaatgacagctcatttccacctgaaaagaaaaattgggtattttgtgattcaaacctatctgccttgcatcatgactgtcattctctcccaagtttcattctggcttaacagagaatctgtgcctgcaagaactgtgtttggagtaacaactgtcctaacaatgacaactctaagcatcagtgctcggaattctctccccaaagtggcttatgcaactgccatggactggtttattgctgtttgttatgcatttgtgttctctgccctaattgaatttgcaactgttaattacttcaccaaaagaggatgggcttgggatgggaagagtgtagtaaatgacaagaaaaaagaaaaggcttccgttatgatacagaacaacgcttatgcagtggctgttgccaattatgccccgaatctttcaaaagatccagttctctccaccatctccaagagtgcaaccacgccagaacccaacaagaagccagaaaacaagccagctgaagcaaagaaaactttcaacagtgttagcaaaattgacagaatgtccagaatagtttttccagttttgtttggtacctttaatttagtttactgggctacatatttaaacagagaacctgtattaggggtcagtccttgaattgagacccatgttatctttgggatgtatagcaacattaaatttggtttgttttgctatgtacagtctgactaataactgctaatttgtgatccaacatgtacagtatgtatatagtgacatagcttaccagtagacctttaatggagacatgcatttgctaactcatggaactgcagacagaaagcactccatgcgaaaacagccattgccttttttaaagatttaccctaggacctgatttaaagtgaatttcaagtgacctgattaatttcctattcttccaaatgagatgaaaatggggatcctgtacaaccctttgtggacccttttggtttagctcttaagtaggggtattttctactgttgcttaattatgatggaagataacattgtcattcctagatgaatcctttgaagtaacaaacattgtatctgacatcagctctgttcatgagtgctcagagtccctgctaatgtaattggaagcttggtacacataagaaaaactagagatttgaaatcagctatgaattactctatatagtatctatagccatgtacatattacagcatgacaagctcaaataattatgagtcagcccgaaaggatgttaattatgcctacgatgtaataactattggaatgtcatggtcattacatttttagcttcagagtttatttgaaagtaataattgaaatcctacaatttattttaatcattggaaactaccttaattaaaaaaaaagaaaagaaatgtgtcttaacatttccaggtatgtgttgtattgaaattgatcagctaaattttacgggtgctggagactggaaaaagcatccagtttggttgctgtggagcaacatgcatattggattagaaaattgtgccaaaaactcccactgatgagaattcataggtgccccacactgtgacaaacacttatatgattctcctctttcctgt

SEQ ID NO: 298976 - DNA, 1197 bp, Homo sapiens
aatcgtactcaagatcctatgcgtttcctgagttacaacagtggatacagtgcagagaatctatagaagacgtcagcataggcgccagctgaagcaaagaaaactttcaacagtgttagcaaaattgacagaatgtccagaatagtttttccagttttgtttggtacctttaatttagtttactgggctacatatttaaacagagaacctgtattaggggtcagtccttgaattgagacccatgttatctttgggatgtatagcaacattaaatttggtttgttttgctatgtacagtctgactaataactgctaatttgtgatccaacatgtacagtatgtatatagtgacatagcttaccagtagacctttaatggagacatgcatttgctaactcatggaactgcagacagaaagcactccatgcgaaaacagccattgccttttttaaagatttaccctaggacctgatttaaagtgaatttcaagtgacctgattaatttcctattcttccaaatgagatgaaaatggggatcctgtacaaccctttgtggacccttttggtttagctcttaagtaggggtattttctactgttgcttaattatgatggaagataacattgtcattcctagatgaatcctttgaagtaacaaacattgtatctgacatcagctctgttcatgagtgctcagagtccctgctaatgtaattggaagcttggtacacataagaaaaactagagatttgaaatcagctatgaattactctatatagtatctatagccatgtacatattacagcatgacaagctcaaataattatgagtcagcccgaaaggatgttaattatgcctacgatgtaataactattggaatgtcatggtcattacatttttagcttcagagtttatttgaaagtaataattgaaatcctacaatttattttaatcattggaaactaccttaattaaaaaaaaagaaaagaaatgtgtcttaacatttccaggtatgtgttgtattgaaattgatcagctaaattttacgggtgctggagactggaaaaagcatccagtttggttgctgtggagcaacatgcatattggattagaaaattgtgccaaaaactcccactgatgagaattcataggtgccccacactgtgacaaacacttatatgattctcctctttcctgt

SEQ ID NO: 298977 - DNA, 2479 bp, Homo sapiens
agcaagcggcctcggggagcagcccgaggctgcgcgtgggctccgctcctccggcgaggtgtgggcgaggggagcggcgctccgagcgcacccaggcgcccgacgccgcccgggtctgcgccgctgctagtgccaggcgggcgacgagcggcggtgatgaagacaaaattgaacatctacaacatgcgagttcctgctttttgttttcttggtgtgggaccctgccaggttggtgctggctaacatccaagaagatgaggctaaaaataacattaccatctttacgagaattcttgacagacttctggatggttacgataatcggcttagaccaggactgggagacagtattactgaagtcttcactaacatctacgtgaccagttttggccctgtctcagatacagatatggaatatacaattgatgttttctttcgacaaaaatggaaagatgaacgtttaaaatttaaaggtcctatgaatatccttcgactaaacaatttaatggctagcaaaatctggactccagataccttttttcacaatgggaagaaatcagtagctcataatatgacaatgccaaataagttgcttcgaattcaggatgatgggactctgctgtataccatgaggcttacagttcaagctgaatgcccaatgcacttggaggatttcccaatggatgctcattcatgtcctctgaaatttggcagctatgcatatacaacttcagaggtcacttatatttggacttacaatgcatctgattcagtacaggttgctcctgatggctctaggttaaatcaatatgacctgctgggccaatcaatcggaaaggagacaattaaatccagtacaggtgaatatactgtaatgacagctcatttccacctgaaaagaaaaattgggtattttgtgattcaaacctatctgccttgcatcatgactgtcattctctcccaagtttcattctggcttaacagagaatctgtgcctgcaagaactgtgtttggagtaacaactgtcctaacaatgacaactctaagcatcagtgctcggaattctctccccaaagtggcttatgcaactgccatggactggtttattgctgtttgttatgcatttgtgttctctgccctaattgaatttgcaactgttaattacttcaccaaaagaggatgggcttgggatgggaagagtgtagtaaatgacaagaaaaaagaaaaggcttccgttatgatacagaacaacgcttatgcagtggctgttgccaattatgccccgaatctttcaaaagatccagttctctccaccatctccaagagtgcaaccacgccagaacccaacaagaagccagaaaacaagccagctgaagcaaagaaaactttcaacagtgttagcaaaattgacagaatgtccagaatagtttttccagttttgtttggtacctttaatttagtttactgggctacatatttaaacagagaacctgtattaggggtcagtccttgaattgagacccatgttatctttgggatgtatagcaacattaaatttggtttgttttgctatgtacagtctgactaataactgctaatttgtgatccaacatgtacagtatgtatatagtgacatagcttaccagtagacctttaatggagacatgcatttgctaactcatggaactgcagacagaaagcactccatgcgaaaacagccattgccttttttaaagatttaccctaggacctgatttaaagtgaatttcaagtgacctgattaatttcctattcttccaaatgagatgaaaatggggatcctgtacaaccctttgtggacccttttggtttagctcttaagtaggggtattttctactgttgcttaattatgatggaagataacattgtcattcctagatgaatcctttgaagtaacaaacattgtatctgacatcagctctgttcatgagtgctcagagtccctgctaatgtaattggaagcttggtacacataagaaaaactagagatttgaaatcagctatgaattactctatatagtatctatagccatgtacatattacagcatgacaagctcaaataattatgagtcagcccgaaaggatgttaattatgcctacgatgtaataactattggaatgtcatggtcattacatttttagcttcagagtttatttgaaagtaataattgaaatcctacaatttattttaatcattggaaactaccttaattaaaaaaaaagaaaagaaatgtgtcttaacatttccaggtatgtgttgtattgaaattgatcagctaaattttacgggtgctggagactggaaaaagcatccagtttggttgctgtggagcaacatgcatattggattagaaaattgtgccaaaaactcccactgatgagaattcataggtgccccacactgtgacaaacacttatatgattctcctctttcctgt

SEQ ID NO: 298978 - DNA, 228 bp, Homo sapiens
tgtgttctctgccctaattgaatttgcaactgttaattacttcaccaaaagaggatgggcttgggatgggaagagtgtagtaaatgacaaggtaagtgagagcttccgtgttatcattattaagaaaataccctaatgaattccgcttgtaacagatatgtttctaaaatcctgacattaaagacatccatatatatatgaatttgaatcatatcaatttcttttaaa

SEQ ID NO: 298979 - DNA, 694 bp, Homo sapiens
ttttaaaaggatttgcaacttgatgcaagtatagcgttattatttatcttatatgttctataataattactttttattctaatgaaatgcattgtattatgatagctaactcatttaactcttaactaggctacatttatgtccaaaaattaatataattttgaattttgatttttatcttatgagtgattgctatttataaataagctaaacagcttattttaccacagtgtcttcatatgctacctttggcctaaaggagatgttataatcatctaagggcccagtgattctaacagactctaacaagaaatttgctcttcacctttcaaagtggttgcaatgaatatactgtcatggtcatgatcatctcttttggtctacttcataactctcatattgaagtaaattcaaatgagacatttttgccctaaatgtgatgtttaactattaatattgaaagtatatagtgattgtatgaaatacacaaccgttcgtgtagcactagattgatggttcttactaaaatgcttaaaatattttttctgatttcctatagatgcatatacaacttcagaggtcacttatatttggacttacaatgcatctgattcagtacaggttgctcctgatggctctaggttaaatcaatatgacctgctgggccaatcaatcggaaaggagacaattaaat

SEQ ID NO: 298980 - DNA, 1969 bp, Homo sapiens
acccgaaggcgcgagggcgcgcctgagccgccatgtcggaggcgcgtggagagccagggtccgggcctgaggctggcgcccgattcttctgcactgcgggtcgcggcctggagccgttcgtaatgcgagaggtgcgggcgcggctggcggccacgcaggttgaatatatttcaggaaaggtttttttcaccacctgttctgatttgaatatgttgaagaaattaaaatctgcagaaagattatttttgctgattaaaaagcagtttccacttattatttcttctgtaagtaaaggaaaaatatttaatgaaatgcaaagacttataaatgaagatccaggaagttggttgaatgccatttcaatttggaaaaatcttcttgaacttgatgcaaaaaaggaaaaactttctcagagagatgataaccaactaaaaagaaaagtgggagaaaatgaaatcattgcaaagaaattaaaaatagaacaaatgcaaaagatagaagagaatagggactgccagctggaaaaacaaataaaagaagaaactctggagcaaagagattttaccactaaaagcgaaaagtttcaagaagaagaatttcagaatgacatagagaaagcaattgatactcataatcagaatgacttgactttcagagtatcttgtcgctgcagtggaactattggaaaggccttcactgcacaggaggtaggaaaagtaattggaattgctattatgaaacactttggatggaaagcagacttgaggaatccacaattagagatctttatacatctaaatgacatttactctgtggtggggattcctgtgttcagggtttccctagccagcagagcttacatcaagacagctggactgcgatctacaatagcgtgggcaatggcatctctggctgacattaaggctggtgcatttgttttagatccaatgtgtggacttggaacaatacttttggaagctgctaaagaatggccagatgtgtattatgtaggtgctgatgtcagcgactcacagttactaggtacttgggacaatctgaaagctgcaggccttgaggataaaattgaattacttaaaatctctgttatagaattgccattgccttcagaaagtgttgatattattatttctgacattccatttgggaaaaagtttaagttaggaaaagacatcaaaagcattctacaagaaatggaaagagtgcttcatgttggcggaaccattgtattgttgcttagtgaagatcaccacaggcgccttacagattgtaaagagagcaacatccctttcaattccaaggacagtcacacagatgaacctggaattaaaaagtgcttgaatcctgaagaaaaaactggtgcattcaagacagcgtcaacttcattcgaagccagtaaccacaaattcttagacagaatgtcaccatttggctccttggtaccagtggaatgctacaaagttagccttggaaagacagatgcgttcatatgtaaatataagaagtcgcactcttctggactgtagcaggcttgctgccatcagccgggttcaggcccttgtaagttagctgtacagcagaagtttgctgtctctaggattcatatagcacccacagagctccaagtaaccaaattcccccaaagacaggaggtgtggctgatgggtacacatgcttggtaagagtttctgctttatattctaaagtacttaatgtttttgagaaaaaagttaccgaatattttttagacttaagttttatcttctgtcagaatgtgaaaagttctgcccagtttctgagcaaaaacttcaatttcaaaataaaggttttcaggggttcacttaagtgtatcacaatcaacaccagacgggatattttaactatcagattttcggaaatgtaaaaacctttatgtgtaacttcttttgatattaaacttgatttttgagcc

SEQ ID NO: 298981 - DNA, 954 bp, Homo sapiens
acccgaaggcgcgagggcgcgcctgagccgccatgtcggaggcgcgtggagagccagggtccgggcctgaggctggcgcccgattcttctgcactgcgggtcgcggcctggagccgttcgtaatgcgagaggtgcgggcgcggctggcggccacgcaggttgaatatatttcaggaaaggtttttttcaccacctgttctgatttgaatatgttgaagaaattaaaatctgcagaaagattatttttgctgattaaaaagcagtttccacttattatttcttctgtaagtaaaggaaaaatatttaatgaaatgcaaagacttataaatgaagatccaggaagttggttgaatgccatttcaatttggaaaaatcttcttgaacttgatgcaaaaaaggaaaaactttctcagagagatgataaccaactaaaaagaaaagtgggagaaaatgaaatcattgcaaagaaattaaaaatagaacaaatgcaaaagatagaagagaatagggactgccagctggaaaaacaaataaaagaagaaactctggagcaaagagattttaccactaaaagcgaaaagtttcaagaagaagaatttcagaatgacatagagaaagcaattgatactcataatcagaatgacttgactttcagagtatcttgtcgctgcagtggaactattggaaaggccttcactgcacaggaggtaggaaaagtaattggaattgctattatgaaacactttggatggaaagcagacttgaggaatccacaattagagatcttattactctaaatgacatttacttcgtggtggggatccctggttcaggtttccctaaacagcagagttacttcagacggtggctgcgatctacatagcgtgggcaggctttcggtgacttaagcggggctgttgatctcggtggctggcaccatttggaggcaaaagc

SEQ ID NO: 298982 - DNA, 491 bp, Homo sapiens
gcgggagccaccatgcctggcctgggggtcccattttttaaagaattaattattctttagatttaaaatgagatgcaaacctctcacagaacaaataactagccgcagacaattagttcttatggaattaaatgtctttaaaactacattttccttttaatttttcctcagatgtttaagaggaatggtatgccattccaagtaatgactttcttatactttctgcctaaaaatttccttaaatctacagatgtcctttgtatttggaaatcctgataccatagtcctcagcttttggggtttctcttcagttcagctttgtgcttattcagtggctactctgcacaggtcctgtacatgggattgtcaccaggacctagactgcaaatgcacatgaggtctcagcaatgtagagaagagcgaacaccacaaactgttgccatcaccagacctcatcagttggcccttacaaagttcagtgatgttaaagg

SEQ ID NO: 298983 - DNA, 2090 bp, Homo sapiens
acccgaaggcgcgagggcgcgcctgagccgccatgtcggaggcgcgtggagagccagggtccgggcctgaggctggcgcccgattcttctgcactgcgggtcgcggcctggagccgttcgtaatgcgagaggtgcgggcgcggctggcggccacgcaggttgaatatatttcaggaaaggtttttttcaccacctgttctgatttgaatatgttgaagaaattaaaatctgcagaaagattatttttgctgattaaaaagcagtttccacttattatttcttctgtaagtaaaggaaaaatatttaatgaaatgcaaagacttataaatgaagatccaggaagttggttgaatgccatttcaatttggaaaaatcttcttgaacttgatgcaaaaaaggaaaaactttctcagagagatgataaccaactaaaaagaaaagtgggagaaaatgaaatcattgcaaagaaattaaaaatagaacaaatgcaaaagatagaagagaatagggactgccagctggaaaaacaaataaaagaagaaactctggagcaaagagattttaccactaaaagcgaaaagtttcaagaagaagaatttcagaatgacatagagaaagcaattgatactcataatcagaatgacttgactttcagagtatcttgtcgctgcagtggaactattggaaaggccttcactgcacaggaggtaggaaaagtaattggaattgctattatgaaacactttggatggaaagcagacttgaggaatccacaattagagatctttatacatctaaatgacatttactctgtggtggggattcctgtgttcagggtttccctagccagcagagcttacatcaagacagctggactgcgatctacaatagcgtgggcaatggcatctctggctgacattaaggtaccatatggctctgactgaaacctggctgtgcactgaggactctgcttcctctgtagacatatcaagtggtggatgtcttttctcccctatctcgagcacgactgggcctgacagtggggctggtgcatttgttttagatccaatgtgtggacttggaacaatacttttggaagctgctaaagaatggccagatgtgtattatgtaggtgctgatgtcagcgactcacagttactaggtacttgggacaatctgaaagctgcaggccttgaggataaaattgaattacttaaaatctctgttatagaattgccattgccttcagaaagtgttgatattattatttctgacattccatttgggaaaaagtttaagttaggaaaagacatcaaaagcattctacaagaaatggaaagagtgcttcatgttggcggaaccattgtattgttgcttagtgaagatcaccacaggcgccttacagattgtaaagagagcaacatccctttcaattccaaggacagtcacacagatgaacctggaattaaaaagtgcttgaatcctgaagaaaaaactggtgcattcaagacagcgtcaacttcattcgaagccagtaaccacaaattcttagacagaatgtcaccatttggctccttggtaccagtggaatgctacaaagttagccttggaaagacagatgcgttcatatgtaaatataagaagtcgcactcttctggactgtagcaggcttgctgccatcagccgggttcaggcccttgtaagttagctgtacagcagaagtttgctgtctctaggattcatatagcacccacagagctccaagtaaccaaattcccccaaagacaggaggtgtggctgatgggtacacatgcttggtaagagtttctgctttatattctaaagtacttaatgtttttgagaaaaaagttaccgaatattttttagacttaagttttatcttctgtcagaatgtgaaaagttctgcccagtttctgagcaaaaacttcaatttcaaaataaaggttttcaggggttcacttaagtgtatcacaatcaacaccagacgggatattttaactatcagattttcggaaatgtaaaaacctttatgtgtaacttcttttgatattaaacttgatttttgagcc

SEQ ID NO: 298984 - DNA, 1411 bp, Homo sapiens
ttaaaacatagatcatgtaagtttaaaatggaaatttcaaattgtcagtaatttggtaatgaagtttcttgttccattctaacttctgtgtttgttctttcagatctttatacatctaaatgacatttactctgtggtggggattcctgtgttcagggtttccctagccagcagagcttacatcaagacagctggactgcgatctacaatagcgtgggcaatggcatctctggctgacattaaggtaccatatggctctgactgaaacctggctgtgcactgaggactctgcttcctctgtagacatatcaagtggtggatgtcttttctcccctatctcgagcacgactgggcctgacagtggggctggtgcatttgttttagatccaatgtgtggacttggaacaatacttttggaagctgctaaagaatggccagatgtgtattatgtaggtgctgatgtcagcgactcacagttactaggtacttgggacaatctgaaagctgcaggccttgaggataaaattgaattacttaaaatctctgttatagaattgccattgccttcagaaagtgttgatattattatttctgacattccatttgggaaaaagtttaagttaggaaaagacatcaaaagcattctacaagaaatggaaagagtgcttcatgttggcggaaccattgtattgttgcttagtgaagatcaccacaggcgccttacagattgtaaagagagcaacatccctttcaattccaaggacagtcacacagatgaacctggaattaaaaagtgcttgaatcctgaagaaaaaactggtgcattcaagacagcgtcaacttcattcgaagccagtaaccacaaattcttagacagaatgtcaccatttggctccttggtaccagtggaatgctacaaagttagccttggaaagacagatgcgttcatatgtaaatataagaagtcgcactcttctggactgtagcaggcttgctgccatcagccgggttcaggcccttgtaagttagctgtacagcagaagtttgctgtctctaggattcatatagcacccacagagctccaagtaaccaaattcccccaaagacaggaggtgtggctgatgggtacacatgcttggtaagagtttctgctttatattctaaagtacttaatgtttttgagaaaaaagttaccgaatattttttagacttaagttttatcttctgtcagaatgtgaaaagttctgcccagtttctgagcaaaaacttcaatttcaaaataaaggttttcaggggttcacttaagtgtatcacaatcaacaccagacgggatattttaactatcagattttcggaaatgtaaaaacctttatgtgtaacttcttttgatattaaacttgatttttgagcc

SEQ ID NO: 298985 - DNA, 2341 bp, Homo sapiens
acccgaaggcgcgagggcgcgcctgagccgccatgtcggaggcgcgtggagagccagggtccgggcctgaggctggcgcccgattcttctgcactgcgggtcgcggcctggagccgttcgtaatgcgagaggtgcgggcgcggctggcggccacgcaggttgaatatatttcaggaaaggtttttttcaccacctgttctgatttgaatatgttgaagaaattaaaatctgcagaaagattatttttgctgattaaaaagcagtttccacttattatttcttctgtaagtaaaggaaaaatatttaatgaaatgcaaagacttataaatgaagatccaggaagttggttgaatgccatttcaatttggaaaaatcttcttgaacttgatgcaaaaaaggaaaaactttctcagagagatgataaccaactaaaaagaaaagtgggagaaaatgaaatcattgcaaagaaattaaaaatagaacaaatgcaaaagatagaagagaatagggactgccagctggaaaaacaaataaaagaagaaactctggagcaaagagattttaccactaaaagcgaaaagtttcaagaagaagaatttcagaatgacatagagaaagcaattgatactcataatcagaatgacttgactttcagagtatcttgtcgctgcagtggaactattggaaaggccttcactgcacaggaggtaggaaaagtaattggaattgctattatgaaacactttggatggaaagcagacttgaggaatccacaattagagatctttatacatctaaatgacatttactctgtggtggggattcctgtgttcagggtttccctagccagcagagcttacatcaagacagctggactgcgatctacaatagcgtgggcaatggcatctctggctgacattaaggtaccatatggctctgactgaaacctggctgtgcactgaggactctgcttcctctgtagacatatcaagtggtggatgtcttttctcccctatctcgagcacgactgggcctgacagtggggctggtgcatttgttttagatccaatgtgtggacttggaacaatacttttggaagctgctaaagaatggccagatgtgtattatgtaggtgctgatgtcagcgactcacagttactaggtacttgggacaatctgaaagctgcaggccttgaggataaaattgaattacttaaaatctctgttatagaattgccattgccttcagaaagtgttgatattattatttctgacattccatttgggaaaaagtttaagttaggaaaagacatcaaaagcattctacaagaaatggaaagagtgcttcatgttggcggaaccattgtattgttgcttagtgaagatcaccacaggcgccttacagattgtaaagagagcaacatccctttcaattccaaggacagtcacacagatgaacctggaattaaaaagtgcttgaatcctgaagaaaaaactggtgcattcaagacagcgtcaacttcattcgaagccagtaaccacaaattcttagacagaatgtcaccatttggctccttggtaccagtggaatgctacaaagttagccttggaaagacagatgcgttcatatgtaaatataagaagtcgcactcttctggactgtagcaggcttgctgccatcagccgggttcaggcccttgtaagttagctgtacagcagaagtttgctgtctctaggattcatatagcacccacagagctccaagtaaccaaattcccccaaagacaggaggtgtggctgatgggtacacatgcttggtaagagtttctgctttatattctaaagtacttaatgtttttgagaaaaaagttaccgaatattttttagacttaagttttatcttctgtcagaatgtgaaaagttctgcccagtttctgagcaaaaacttcaatttcaaaataaaggttttcaggggttcacttaagtgtatcacaatcaacaccagacgggatattttaactatcagattttcggaaatgtaaaaacctttatgtgtaacttcttttgatattaaacttgatttttgagccagcctgtaattttcttctccattggaatgaaaataatttgtatttgcaatacattttatatgtttattatgtaaaccaacagtgagaataataactgaattaagccagtatccttcaaaacatgatggaaaatgaaatttgctttttttctaaaagcattcatacactgtcacctcgcccttatttatatagaaagtcagtttgttgcttatgttcactacctgagaaaaagaaacagtaagtttgaggag

SEQ ID NO: 298986 - DNA, 2322 bp, Homo sapiens
acccgaaggcgcgagggcgcgcctgagccgccatgtcggaggcgcgtggagagccagggtccgggcctgaggctggcgcccgattcttctgcactgcgggtcgcggcctggagccgttcgtaatgcgagaggtgcgggcgcggctggcggccacgcaggttgaatatatttcaggaaaggtttttttcaccacctgttctgatttgaatatgttgaagaaattaaaatctgcagaaagattatttttgctgattaaaaagcagtttccacttattatttcttctgtaagtaaaggaaaaatatttaatgaaatgcaaagacttataaatgaagatccaggaagttggttgaatgccatttcaatttggaaaaatcttcttgaacttgatgcaaaaaaggaaaaactttctcagagagatgataaccaactaaaaagaaaagtgggagaaaatgaaatcattgcaaagaaattaaaaatagaacaaatgcaaaagatagaagagaatagggactgccagctggaaaaacaaataaaagaagaaactctggagcaaagagattttaccactaaaagcgaaaagtttcaagaagaagaatttcagaatgacatagagaaagcaattgatactcataatcagaatgacttgactttcagagtatcttgtcgctgcagtggaactattggaaaggccttcactgcacaggaggtaggaaaagtaattggaattgctattatgaaacactttggatggaaagcagacttgaggaatccacaattagagatctttatacatctaaatgacatttactctgtggtggggattcctgtgttcagggtttccctagccagcagagcttacatcaagacagctggactgcgatctacaatagcgtgggcaatggcatctctggctgacattaaggtaccatatggctctgactgaaacctggctgtgcactgaggactctgcttcctctgtagacatatcaagtggtggatgtcttttctcccctatctcgagcacgactgggcctgacagtggggctggtgcatttgttttagatccaatgtgtggacttggaacaatacttttggaagctgctaaagaatggccagatgtgtattatgtaggtgctgatgtcagcgactcacagttactaggtacttgggacaatctgaaagctgcaggccttgaggataaaattgaattacttaaaatctctgttatagaattgccattgccttcagaaagtgttgatattattatttctgacattccatttgggaaaaagtttaagttaggaaaagacatcaaaagcattctacaagaaatggaaagagtgcttcatgttggcggaaccattgtattgttgcttagtgaagatcaccacaggcgccttacagattgtaaagagagcaacatccctttcaattccaaggacagtcacacagatgaacctggaattaaaaagtgcttgaatcctgaagaaaaaactggtgcattcaagacagcgtcaacttcattcgaagccagtaaccacaaattcttagacagaatgtcaccatttggctccttggtaccagtggaatgctacaaagttagccttggaaagacagatgcgttcatatgtaaatataagaagtcgcactcttctggactgtagcaggcttgctgccatcagccgggttcaggcccttgtaatttgctgtctctaggattcatatagcacccacagagctccaagtaaccaaattcccccaaagacaggaggtgtggctgatgggtacacatgcttggtaagagtttctgctttatattctaaagtacttaatgtttttgagaaaaaagttaccgaatattttttagacttaagttttatcttctgtcagaatgtgaaaagttctgcccagtttctgagcaaaaacttcaatttcaaaataaaggttttcaggggttcacttaagtgtatcacaatcaacaccagacgggatattttaactatcagattttcggaaatgtaaaaacctttatgtgtaacttcttttgatattaaacttgatttttgagccagcctgtaattttcttctccattggaatgaaaataatttgtatttgcaatacattttatatgtttattatgtaaaccaacagtgagaataataactgaattaagccagtatccttcaaaacatgatggaaaatgaaatttgctttttttctaaaagcattcatacactgtcacctcgcccttatttatatagaaagtcagtttgttgcttatgttcactacctgagaaaaagaaacagtaagtttgaggag

SEQ ID NO: 298987 - DNA, 945 bp, Homo sapiens
acccgaaggcgcgagggcgcgcctgagccgccatgtcggaggcgcgtggagagccagggtccgggcctgaggctggcgcccgattcttctgcactgcgggtcgcggcctggagccgttcgtaatgcgagaggtgcgggcgcggctggcggccacgcaggttgaatatatttcaggaaaggtttttttcaccacctgttctgatttgaatatgttgaagaaattaaaatctgcagaaagattatttttgctgattaaaaagcagtttccacttattatttcttctgtaagtaaaggaaaaatatttaatgaaatgcaaagacttataaatgaagatccaggaagttggttgaatgccatttcaatttggaaaaatcttcttgaacttgatgcaaaaaaggaaaaactttctcagagagatgataaccaactaaaaagaaaagtgggagaaaatgaaatcattgcaaagaaattaaaaatagaacaaatgcaaaagatagaagagaatagggactgccagctggaaaaacaaataaaagaagaaactctggagcaaagagattttaccactaaaagcgaaaagtttcaagaagaagaatttcagaatgacatagagaaagcaattgatactcataatcagaatgacttgactttcagagtatcttgtcgctgcagtggaactattggaaaggccttcactgcacagatgtcctttgtatttggaaatcctgataccatagtcctcagcttttggggtttctcttcagttcagctttgtgcttattcagtggctactctgcacaggtcctgtacatgggattgtcaccaggacctagactgcaaatgcacatgaggtctcagcaatgtagagaagagcgaacaccacaaactgttgccatcaccagacctcatcagttggcccttacaaagttcagtgatgttaaagg

SEQ ID NO: 298988 - DNA, 766 bp, Homo sapiens
acccgaaggcgcgagggcgcgcctgagccgccatgtcggaggcgcgtggagagccagggtccgggcctgaggctggcgcccgattcttctgcactgcgggtcgcggcctggagccgttcgtaatgcgagaggtgcgggcgcggctggcggccacgcaggttgaatatatttcaggaaaggtttttttcaccacctgttctgatttgaatatgttgaagaaattaaaatctgcagaaagattatttttgctgattaaaaagcagtttccacttattatttcttctgtaagtaaaggaaaaatatttaatgaaatgcaaagacttataaatgaagatccaggaagttggttgaatgccatttcaatttggaaaaatcttcttgaacttgatgcaaaaaaggaaaaactttctcagagagatgataaccaactaaaaagaaaagtgggagaaaatgaaatcattgcaaagaaattaaaaatagaacaaatgcaaaagatagaagagaatagggactgccagctggaaaaacaaataaaagaagaaactctggagcaaagagattttaccactaaaagcgaaaagtttcaagaagaagaatttcagaatgacatagagaaagcaattgatactcataatcagaatgacttgactttcagagtatcttgtcgctgcagtggaactattggaaaggccttcactgcacaggtatgcttgcatcctaaagtggagtctgtcgcccaggctggaatgcagttgcacaatctggc

SEQ ID NO: 298989 - DNA, 346 bp, Homo sapiens
gcgatctacaatagcgtgggcaatggcatctctggctgacattaaggtaagaaaaatgttttccttcctgttaatagcaaggttcttttcataattaacttatacagtctcttattgatggatatttatgttacttgctttttcttttcttgacgctttttctttaacttcttttctttttgccattgtacttacaaactgctgcagtaatgcttttatatattattgaacttctgagagtattttggctctgaaaaagctgagtcaaaagttagctacatttcattatttctaatgttttgtgtcacagttagaaaatgtggcctgtaaaacctcctattcttaa

SEQ ID NO: 298990 - DNA, 430 bp, Homo sapiens
agtcgattttcttaactacatgaaatatgtaataattttatttatgcttaaaatatttatttccccataggatgtgtattatgtaggtgctgatgtcagcgactcacagttactaggtacttgggacaatctgaaagctgcaggccttgaggataaaattgaattacttaaaatctctgttataggtaagatactaaaaatgcaaaacaattgagaaaaggaacaatgtaaatatatttagaatcataatataaaacaagtctcactatgtaaaggttggttttaccctttaatatatctgtgggactaatactcagtttacttctaatagtctaacctttttattttcaaagtgttcataattgggaagcaacaattctatagttttcgtaagcatgtaaagcatgacttcttaaaatgtgtttgttaa

SEQ ID NO: 298991 - DNA, 293 bp, Homo sapiens
actgacactggactacattaaaagctgtttttctatttctaggttgaatatatttcaggaaaggtttttttcaccacctgttctgatttgaatatgttgaagaaattaaaatctgcagaaagattatttttgctgattaaaaagcagtttccacttattatttcttctgtaagtaaaggtatggcatattcatatgcatgttgcttttacccacatgatacattgtactccaacattttctgcttgataatatgtagccattttacactttaatattcattgacatgtgtggg

SEQ ID NO: 298992 - DNA, 1005 bp, Homo sapiens
  misc_feature (33)..(33): n is a, c, g, or t
ggctacacggtataggtctaggtacgaggctgngtggtggcagcacctcctcgccagcagccgtccggagccagccaacgagcggaaaatggcagacaatttttcgctccatgatgcgttatctgggtctggaaacccaaaccctcaaggatggcctggcgcatgggggaaccagcctgctggggcagggggctacccaggggcttcctatcctggggcctaccccgggcaggcacccccaggggcttatcctggacaggcacctccaggcgcctaccatggagcacctggagcttatcccggagcacctgcacctggagtctacccagggccacccagcggccctggggcctacccatcttctggacagccaagtgcccccggagcctaccctgccactggcccctatggcgcccctgctgggccactgattgtgccttataacctgcctttgcctgggggagtggtgcctcgcatgctgataacaattctgggcacggtgaagcccaatgcaaacagaattgctttagatttccaaagagggaatgatgttgccttccactttaacccacgcttcaatgagaacaacaggagagtcattgtttgcaatacaaagctggataataactggggaagggaagaaagacagtcggttttcccatttgaaagtgggaaaccattcaaaatacaagtactggttgaacctgaccacttcaaggttgcagtgaatgatgctcacttgttgcagtacaatcatcgggttaaaaaactcaatgaaatcagcaaactgggaatttctggtgacatagacctcaccagtgcttcatataccatgatataatctgaaaggggcagattaaaaaaaaaaaaagaatctaaaccttacatgtgtaaaggtttcatgttcactgtgagtgaaaatttttacattcatcaatatccctcttgtaagtcatctacttaataaatattacagtgaaaattacctgtctcaaaaaaaaaaaa

SEQ ID NO: 298993 - DNA, 980 bp, Homo sapiens
  misc_feature (33)..(33): n is a, c, g, or t
ggctacacggtataggtctaggtacgaggctgngtggtggcagcacctcctcgccagcagccgtccggagccagccaacgagcggaaaatggcagacaatttttcgctccatgatgcgttatctgggtctggaaacccaaaccctcaaggatggcctggcgcatgggggaaccagcctgctggggcagggggctacccaggggcttcctatcctggggcctaccccgggcaggcacccccaggggcttatcctggacaggcacctccaggcgcctaccatggagcacctggagcttatcccggagcacctgcacctggagtctacccagggccacccagcggccctggggcctacccatcttctggacagccaagtgcccccggagcctaccctgccactggcccctatggcgcccctgctgggccactgattgtgccttataacctgcctttgcctgggggagtggtgcctcgcatgctgataacaattctgggcacggtgaagcccaatgcaaacagaattgctttagatttccaaagagggaatgatgttgccttccactttaacccacgcttcaatgagaacaacaggagagtcattgtttgcaatacaaagctggataataactggggaagggaagaaagacagtcggttttcccatttgaaagtgggaaaccattcaaaatacaagtactggttgaacctgaccacttcaaggttgcagtgaatgatgctcacttgttgcagtacaatcatcgggttaaaaaactcaatgaaatcagcaaactgggaatttctggtgacatagacctcaccagtgcttcatataccatgatataatctgaaaggggcagattaaaaaaaaaaaaagaatctaaaccttacatgtgtaaaggtttcatgttcactgtgagtgaaaatttttacattcatcaatatccctcttgtaagtcatctacttaataaatattacagtgaa

SEQ ID NO: 298994 - DNA, 675 bp, Homo sapiens
gggcgcccgcagcacctcctcgccagcagccgtccggagccagccaacgagcggaaaatggcagacaatttttcgctccatgatgcgttatctgggtctggaaacccaaaccctcaaggatggcctggcgcatgggggaaccagcctgctggggcagggggctacccaggggcttcctatcctggggcctaccccgggcaggcacccccaggggcttatcctggacaggcacctccaggcgcctaccatggagcacctggagcttatcccggagcacctgcacctggagtctacccagggccacccagcggccctggggcctacccatcttctggacagccaagtgcccccggagcctaccctgccactggcccctatggcgcccctgctgggccactgattgtgccttataacctgcctttgcctgggggagtggtgcctcgcatgctgataacaattctgggcacggtgaagcccaatgcaaacagaattgctttagatttccaaagagggaatgatgttgccttccactttaacccacgcttcaatgagaacaacaggagagtcattgtttgcaatacatgtgtaaaggtttcatgttcactgtgagtgaaaatttttacattcatcaatatccctcttgtaagtcatctacttaataaatattacagtgaa

SEQ ID NO: 298995 - DNA, 918 bp, Homo sapiens
tcacttatgtatccttctaataaatttgctgctttaaaaaaaaaacctgaataacttggaatttttttgttgttgctttttgtttttttgagacggagtctcactctttcgcccaggctggagtgcagtggcactatctcggctaacttcaagctccgcctcctgggttcatgccattctcctgcctcagcctcccaagtagctgggactacaaggtgcccgccaccacaatcagctaattttttgtattttcagtagagatggggtttcactgtgttagccaggatggtctcgatctcctgaccttgtgatccacccgcctcagcctcccaaagtgctgggattacaggcgtgagccaccccgcccagcataacttggcatttttgctgtaaagttactttctctggatcttaactggtcccacaaatgataaggatgaaatgttggacatcctgggctcaggccagactggtttgaaattaatggacattttttccctttatttcagttgacaaaaaattgtttctatagtgcagatgaaatatgtatatattgtggaatgcctaaatccagctgacatatgcattacctcatgtaacagtttatgtatatgccatttcagatacaagtactggttgaacctgaccacttcaaggttgcagtgaatgatgctcacttgttgcagtacaatcatcgggttaaaaaactcaatgaaatcagcaaactgggaatttctggtgacatagacctcaccagtgcttcatataccatgatataatctgaaaggggcagattaaaaaaaaaaaaagaatctaaaccttacatgtgtaaaggtttcatgttcactgtgagtgaaaatttttacattcatcaatatccctcttgtaagtcatctacttaataaatattacagtgaa

SEQ ID NO: 298996 - DNA, 432 bp, Homo sapiens
  misc_feature (382)..(382): n is a, c, g, or t
  misc_feature (386)..(386): n is a, c, g, or t
  misc_feature (389)..(389): n is a, c, g, or t
  misc_feature (395)..(395): n is a, c, g, or t
  misc_feature (413)..(413): n is a, c, g, or t
tccttgtaatccaagcagtcgcagacaatttttcgctccatgatgcgttatctgggtctggaaacccaaaccctcaaggatggcctggcgcatgggggaaccagcctgctggggcagggggctacccaggggcttcctatcctggggcctaccccgggcaggcacccccaggggcttatcctggacaggcacctccaggcgcctaccatggagcacctggagcttatcccggagcacctgcacctggagtctacccagggccacccagcggccctggggcctacccatcttctggacagccaagtgcccccggagcctaccctgccactggcccctatggcgcccctgctgggccactgattgtgctttataacctgccttncctnggnggagtngtgcctcgactgcttgantaaaaggaggtaccgagct

SEQ ID NO: 298997 - DNA, 1634 bp, Homo sapiens
  misc_feature (33)..(33): n is a, c, g, or t
  misc_feature (1032)..(1032): n is a, c, g, or t
  misc_feature (1039)..(1039): n is a, c, g, or t
  misc_feature (1044)..(1044): n is a, c, g, or t
  misc_feature (1066)..(1066): n is a, c, g, or t
  misc_feature (1634)..(1634): n is a, c, g, or t
ggctacacggtataggtctaggtacgaggctgngtggtggcagcacctcctcgccagcagccgtccggagccagccaacgagcggaaaatggcagacaatttttcgctccatgatgcgttatctgggtctggaaacccaaaccctcaaggatggcctggcgcatgggggaaccagcctgctggggcagggggctacccaggggcttcctatcctggggcctaccccgggcaggcacccccaggggcttatcctggacaggcacctccaggcgcctaccatggagcacctggagcttatcccggagcacctgcacctggagtctacccagggccacccagcggccctggggcctacccatcttctggacagccaagtgcccccggagcctaccctgccactggcccctatggcgcccctgctgggccactgattgtgccttataacctgcctttgcctgggggagtggtgcctcgcatgctgataacaattctgggcacggtgaagcccaatgcaaacagaattgctttagatttccaaagagggaatgatgttgccttccactttaacccacgcttcaatgagaacaacaggagagtcattgtttgcaatacaaagctggataataactggggaagggaagaaagacagtcggttttcccatttgaaagtgggaaaccattcaaaatacaagtactggttgaacctgaccacttcaaggttgcagtgaatgatgctcacttgttgcagtacaatcatcgggttaaaaaactcaatgaaatcagcaaactgggaatttctggtgacatagacctcaccagtgcttcatataccatgatataatctgaaaggggcagattaaaaaaaaaaaaagaatctaaaccttacatgtgtaaaggtttcatgttcactgtgagtgaaaatttttacattcatcaatatccctcttgtaagtcatctacttaataaatattacagtgaaaaaaaaaaaaaaaaaaaaaaaaaaaaaaaaaaaaaaaaaaaaaaaaaaaaanaaaaaanaaaanaaaaaaaaaaaaaaaacaaaanaaaaaaaaaaaaaacaagcgggggccgcgcccactataagtcggcacagagagaggacgacacagatacagaagcgcaccaacgatgaagtactaagaaaggccgaccccaaacagcacatcatcaaacacacccgacgcacggcacagtccaaacaaacacgagagctgacagaacactgctgaaggagatgagcgaagaaaaaccacacatccgtggcggaaaacaagtacgagcgacagcaatccaaaaacaaacacaaacagaaaaacaaaaccaccacatagcgtaaactatgacagcaccaacacgcagacatcacgaaagagaaaacaatcgatccgcatgattgaacaaaaatataacgcggagcgcgtacaaccagagacgaagaaccggaaaaacggagcaaaagcacccagacgaagcagcgacacacaccgaagcagacacgctcgaccagcagcagcacaccaacgagggaacgcgagagaccaaaggaaccagaaacaacgaagacgaaaagaagggagcggacagcaaacggatgtcaagctacacaaaatcn

SEQ ID NO: 298998 - DNA, 1053 bp, Homo sapiens
  misc_feature (33)..(33): n is a, c, g, or t
ggctacacggtataggtctaggtacgaggctgngtggtggcagcacctcctcgccagcagccgtccggagccagccaacgagcggaaaatggcagacaatttttcgctccatgatgcgttatctgggtctggaaacccaaaccctcaaggatggcctggcgcatgggggaaccagcctgctggggcagggggctacccaggggcttcctatcctggggcctaccccgggcaggcacccccaggggcttatcctggacaggcacctccaggcgcctaccatggagcacctggagcttatcccggagcacctgcacctggagtctacccagggccacccagcggccctggggcctacccatcttctggacagccaagtgcccccggagcctaccctgccactggcccctatggcgcccctgctgggccactgattgtgccttataacctgcctttgcctgggggagtggtgcctcgcatgctgataacaattctgggcacggtgaagcccaatgcaaacagaattgctttagatttccaaagagggaatgatgttgccttccactttaacccacgcttcaatgagaacaacaggagagtcattgtttgcaatacaaagctggataataactggggaagggaagaaagacagtcggttttcccatttgaaagtgggaaaccattcaaaatacaagtactggttgaacctgaccacttcaaggttgcagtgaatgatgctcacttgttgcagtacaatcatcgggttaaaaaactcaatgaaatcagcaaactgggaatttctggtgacatagacctcaccagtgcttcatataccatgatataatctgaaaggggcagattaaaaaaaaaaaaagaatctaaaccttacatgtgtaaaggtttcatgttcactgtgagtgaaaatttttacattcatcaatatccctcttgtaagtcatctacttaataaatattacagtgaaaaaaaagagaaagccacacagacaacaaaacacacagcccgcggggacataacgggggaggaaaaagcgcgac

SEQ ID NO: 298999 - DNA, 1151 bp, Homo sapiens
  misc_feature (33)..(33): n is a, c, g, or t
  misc_feature (987)..(987): n is a, c, g, or t
ggctacacggtataggtctaggtacgaggctgngtggtggcagcacctcctcgccagcagccgtccggagccagccaacgagcggaaaatggcagacaatttttcgctccatgatgcgttatctgggtctggaaacccaaaccctcaaggatggcctggcgcatgggggaaccagcctgctggggcagggggctacccaggggcttcctatcctggggcctaccccgggcaggcacccccaggggcttatcctggacaggcacctccaggcgcctaccatggagcacctggagcttatcccggagcacctgcacctggagtctacccagggccacccagcggccctggggcctacccatcttctggacagccaagtgcccccggagcctaccctgccactggcccctatggcgcccctgctgggccactgattgtgccttataacctgcctttgcctgggggagtggtgcctcgcatgctgataacaattctgggcacggtgaagcccaatgcaaacagaattgctttagatttccaaagagggaatgatgttgccttccactttaacccacgcttcaatgagaacaacaggagagtcattgtttgcaatacaaagctggataataactggggaagggaagaaagacagtcggttttcccatttgaaagtgggaaaccattcaaaatacaagtactggttgaacctgaccacttcaaggttgcagtgaatgatgctcacttgttgcagtacaatcatcgggttaaaaaactcaatgaaatcagcaaactgggaatttctggtgacatagacctcaccagtgcttcatataccatgatataatctgaaaggggcagattaaaaaaaaaaaaagaatctaaaccttacatgtgtaaaggtttcatgttcactgtgagtgaaaatttttacattcatcaatatccctcttgtaagtcatctacttaataaatattacagtgaaaaaaaanaagacaccaaatacaacacaccctggaagacaccattcgcggagggcggaaaaagagcgcagcgatgggcactgtgccaacacgtgttccggaaccagttttctcgccaccggggaaacaccgggcccatataggaacccatatgtccaaataccgggtacggt

SEQ ID NO: 299000 - DNA, 1594 bp, Homo sapiens
  misc_feature (33)..(33): n is a, c, g, or t
  misc_feature (992)..(992): n is a, c, g, or t
  misc_feature (999)..(999): n is a, c, g, or t
  misc_feature (1004)..(1004): n is a, c, g, or t
  misc_feature (1026)..(1026): n is a, c, g, or t
  misc_feature (1594)..(1594): n is a, c, g, or t
ggctacacggtataggtctaggtacgaggctgngtggtggcagcacctcctcgccagcagccgtccggagccagccaacgagcggaaaatggcagacaatttttcgctccatgatgcgttatctgggtctggaaacccaaaccctcaaggatggcctggcgcatgggggaaccagcctgctggggcagggggctacccaggggcttcctatcctggggcctaccccgggcaggcacccccaggggcttatcctggacaggcacctccaggcgcctaccatggagcacctggagcttatcccggagcacctgcacctggagtctacccagggccacccagcggccctggggcctacccatcttctggacagccaagtgcccccggagcctaccctgccactggcccctatggcgcccctgctgggccactgattgtgccttataacctgcctttgcctgggggagtggtgcctcgcatgctgataacaattctgggcacggtgaagcccaatgcaaacagaattgctttagatttccaaagagggaatgatgttgccttccactttaacccacgcttcaatgagaacaacaggagagtcattgtttgcaatacaaagctggataataactggggaagggaagaaagacagtcggttttcccatttgaaagtgggaaaccattcaaaatacaagtactggttgaacctgaccacttcaaggttgcagtgaatgatgctcacttgttgcagtacaatcatcgggttaaaaaactcaatgaaatcagcaaactgggaatttctggtgacatagacctcaccagtgcttcatataccatgatataatctgaaaggggcagattaaaaaaaaaaaaagaatctaaaccttacatgtgtaaaggtttcatgttcactgtgagtgaaaatttttacattcatcaatatccctcttgtaagtcatctacttaataaatattacagtgaaaaaaaaaaaaanaaaaaanaaaanaaaaaaaaaaaaaaaacaaaanaaaaaaaaaaaaaacaagcgggggccgcgcccactataagtcggcacagagagaggacgacacagatacagaagcgcaccaacgatgaagtactaagaaaggccgaccccaaacagcacatcatcaaacacacccgacgcacggcacagtccaaacaaacacgagagctgacagaacactgctgaaggagatgagcgaagaaaaaccacacatccgtggcggaaaacaagtacgagcgacagcaatccaaaaacaaacacaaacagaaaaacaaaaccaccacatagcgtaaactatgacagcaccaacacgcagacatcacgaaagagaaaacaatcgatccgcatgattgaacaaaaatataacgcggagcgcgtacaaccagagacgaagaaccggaaaaacggagcaaaagcacccagacgaagcagcgacacacaccgaagcagacacgctcgaccagcagcagcacaccaacgagggaacgcgagagaccaaaggaaccagaaacaacgaagacgaaaagaagggagcggacagcaaacggatgtcaagctacacaaaatcn

SEQ ID NO: 299001 - DNA, 1328 bp, Homo sapiens
cctgggactcactcacagtaaccctttcaccaaaaggcccagggcggaagggagtggactctgccggcaggagctgagaaatcctctgagtagcgggaagtgcggtacagtctgggcattctgatgtttgtgattgtttttctcacggtgatgaaaaagtatgtgctataagtagaggagcgctaactcctgacttgagctaattatgaaaatgcagccctccctgatctgagacgttgggaggcaagaataaagtgaaaaagtatatgtaatcccaacatctaattttagtcttagaaactcaaactattaataagtggaaaaagtttaatgatatgcatgtaatgcctttgccatattcctctccttcttagatcacatattcctattttcctgaaaattctgcttttgagaatgctttctgtcccgtaattgtgtatgtctttctttccagctccatgatgcgttatctgggtctggaaacccaaaccctcaaggatggcctggcgcatgggggaaccagcctgctggggcagggggctacccaggggcttcctatcctggggcctaccccgggcaggcacccccaggggcttatcctggacaggcacctccaggcgcctaccatggagcacctggagcttatcccggagcacctgcacctggagtctacccagggccacccagcggccctggggcctacccatcttctggacagccaagtgcccccggagcctaccctgccactggcccctatggcgcccctgctgggccactgattgtgccttataacctgcctttgcctgggggagtggtgcctcgcatgctgataacaattctgggcacggtgaagcccaatgcaaacagaattgctttagatttccaaagagggaatgatgttgccttccactttaacccacgcttcaatgagaacaacaggagagtcattgtttgcaatacaaagctggataataactggggaagggaagaaagacagtcggttttcccatttgaaagtgggaaaccattcaaaatacaagtactggttgaacctgaccacttcaaggttgcagtgaatgatgctcacttgttgcagtacaatcatcgggttaaaaaactcaatgaaatcagcaaactgggaatttctggtgacatagacctcaccagtgcttcatataccatgatataatctgaaaggggcagattaaaaaaaaaaaaagaatctaaaccttacatgtgtaaaggtttcatgttcactgtgagtgaaaatttttacattcatcaatatccctcttgtaagtcatctacttaataaatattacagtgaa

SEQ ID NO: 299002 - DNA, 949 bp, Homo sapiens
gggcgcccgcagcacctcctcgccagcagccgtccggagccagccaacgagcggaaaatggcagacaatttttcgctccatgatgcgttatctgggtctggaaacccaaaccctcaaggatggcctggcgcatgggggaaccagcctgctggggcagggggctacccaggggcttcctatcctggggcctaccccgggcaggcacccccaggggcttatcctggacaggcacctccaggcgcctaccatggagcacctggagcttatcccggagcacctgcacctggagtctacccagggccacccagcggccctggggcctacccatcttctggacagccaagtgcccccggagcctaccctgccactggcccctatggcgcccctgctgggccactgattgtgccttataacctgcctttgcctgggggagtggtgcctcgcatgctgataacaattctgggcacggtgaagcccaatgcaaacagaattgctttagatttccaaagagggaatgatgttgccttccactttaacccacgcttcaatgagaacaacaggagagtcattgtttgcaatacaaagctggataataactggggaagggaagaaagacagtcggttttcccatttgaaagtgggaaaccattcaaaatacaagtactggttgaacctgaccacttcaaggttgcagtgaatgatgctcacttgttgcagtacaatcatcgggttaaaaaactcaatgaaatcagcaaactgggaatttctggtgacatagacctcaccagtgcttcatataccatgatataatctgaaaggggcagattaaaaaaaaaaaaagaatctaaaccttacatgtgtaaaggtttcatgttcactgtgagtgaaaatttttacattcatcaatatccctcttgtaagtcatctacttaataaatattacagtgaa

SEQ ID NO: 299003 - DNA, 990 bp, Homo sapiens
gggcgcccgcagcacctcctcgccagcagccgtccggagccagccaacgagcggggatgcattccaagaccccctgtggatgcttcaaaccatggaaaatggcagacaatttttcgctccatgatgcgttatctgggtctggaaacccaaaccctcaaggatggcctggcgcatgggggaaccagcctgctggggcagggggctacccaggggcttcctatcctggggcctaccccgggcaggcacccccaggggcttatcctggacaggcacctccaggcgcctaccatggagcacctggagcttatcccggagcacctgcacctggagtctacccagggccacccagcggccctggggcctacccatcttctggacagccaagtgcccccggagcctaccctgccactggcccctatggcgcccctgctgggccactgattgtgccttataacctgcctttgcctgggggagtggtgcctcgcatgctgataacaattctgggcacggtgaagcccaatgcaaacagaattgctttagatttccaaagagggaatgatgttgccttccactttaacccacgcttcaatgagaacaacaggagagtcattgtttgcaatacaaagctggataataactggggaagggaagaaagacagtcggttttcccatttgaaagtgggaaaccattcaaaatacaagtactggttgaacctgaccacttcaaggttgcagtgaatgatgctcacttgttgcagtacaatcatcgggttaaaaaactcaatgaaatcagcaaactgggaatttctggtgacatagacctcaccagtgcttcatataccatgatataatctgaaaggggcagattaaaaaaaaaaaaagaatctaaaccttacatgtgtaaaggtttcatgttcactgtgagtgaaaatttttacattcatcaatatccctcttgtaagtcatctacttaataaatattacagtgaa

SEQ ID NO: 299004 - DNA, 945 bp, Homo sapiens
aaaccaaatactcagctgcgttaggaattccttctgattcttgctgcaggaaaatggcagacaatttttcgctccatgatgcgttatctgggtctggaaacccaaaccctcaaggatggcctggcgcatgggggaaccagcctgctggggcagggggctacccaggggcttcctatcctggggcctaccccgggcaggcacccccaggggcttatcctggacaggcacctccaggcgcctaccatggagcacctggagcttatcccggagcacctgcacctggagtctacccagggccacccagcggccctggggcctacccatcttctggacagccaagtgcccccggagcctaccctgccactggcccctatggcgcccctgctgggccactgattgtgccttataacctgcctttgcctgggggagtggtgcctcgcatgctgataacaattctgggcacggtgaagcccaatgcaaacagaattgctttagatttccaaagagggaatgatgttgccttccactttaacccacgcttcaatgagaacaacaggagagtcattgtttgcaatacaaagctggataataactggggaagggaagaaagacagtcggttttcccatttgaaagtgggaaaccattcaaaatacaagtactggttgaacctgaccacttcaaggttgcagtgaatgatgctcacttgttgcagtacaatcatcgggttaaaaaactcaatgaaatcagcaaactgggaatttctggtgacatagacctcaccagtgcttcatataccatgatataatctgaaaggggcagattaaaaaaaaaaaaagaatctaaaccttacatgtgtaaaggtttcatgttcactgtgagtgaaaatttttacattcatcaatatccctcttgtaagtcatctacttaataaatattacagtgaa

SEQ ID NO: 299005 - DNA, 1013 bp, Homo sapiens
aaaccaaatactcagctgcgttaggaattccttctgattcttgctgcaggaaaatggcagacaatttttcggcccagggcggaagggagtggactctgccggcaggagctgagaaatcctctgagtagcgggaagtgcgctccatgatgcgttatctgggtctggaaacccaaaccctcaaggatggcctggcgcatgggggaaccagcctgctggggcagggggctacccaggggcttcctatcctggggcctaccccgggcaggcacccccaggggcttatcctggacaggcacctccaggcgcctaccatggagcacctggagcttatcccggagcacctgcacctggagtctacccagggccacccagcggccctggggcctacccatcttctggacagccaagtgcccccggagcctaccctgccactggcccctatggcgcccctgctgggccactgattgtgccttataacctgcctttgcctgggggagtggtgcctcgcatgctgataacaattctgggcacggtgaagcccaatgcaaacagaattgctttagatttccaaagagggaatgatgttgccttccactttaacccacgcttcaatgagaacaacaggagagtcattgtttgcaatacaaagctggataataactggggaagggaagaaagacagtcggttttcccatttgaaagtgggaaaccattcaaaatacaagtactggttgaacctgaccacttcaaggttgcagtgaatgatgctcacttgttgcagtacaatcatcgggttaaaaaactcaatgaaatcagcaaactgggaatttctggtgacatagacctcaccagtgcttcatataccatgatataatctgaaaggggcagattaaaaaaaaaaaaagaatctaaaccttacatgtgtaaaggtttcatgttcactgtgagtgaaaatttttacattcatcaatatccctcttgtaagtcatctacttaataaatattacagtgaa

SEQ ID NO: 299006 - DNA, 1034 bp, Homo sapiens
aaaccaaatactcagctgcgttaggaattccttctgattcttgctgcaggaaaatggcagacaatttttcggcccagggcggaagggagtggactctgccggcaggagctgagaaatcctctgagtagcgggaagtgcggtacagtctgggcattctgatctccatgatgcgttatctgggtctggaaacccaaaccctcaaggatggcctggcgcatgggggaaccagcctgctggggcagggggctacccaggggcttcctatcctggggcctaccccgggcaggcacccccaggggcttatcctggacaggcacctccaggcgcctaccatggagcacctggagcttatcccggagcacctgcacctggagtctacccagggccacccagcggccctggggcctacccatcttctggacagccaagtgcccccggagcctaccctgccactggcccctatggcgcccctgctgggccactgattgtgccttataacctgcctttgcctgggggagtggtgcctcgcatgctgataacaattctgggcacggtgaagcccaatgcaaacagaattgctttagatttccaaagagggaatgatgttgccttccactttaacccacgcttcaatgagaacaacaggagagtcattgtttgcaatacaaagctggataataactggggaagggaagaaagacagtcggttttcccatttgaaagtgggaaaccattcaaaatacaagtactggttgaacctgaccacttcaaggttgcagtgaatgatgctcacttgttgcagtacaatcatcgggttaaaaaactcaatgaaatcagcaaactgggaatttctggtgacatagacctcaccagtgcttcatataccatgatataatctgaaaggggcagattaaaaaaaaaaaaagaatctaaaccttacatgtgtaaaggtttcatgttcactgtgagtgaaaatttttacattcatcaatatccctcttgtaagtcatctacttaataaatattacagtgaa

SEQ ID NO: 299007 - DNA, 784 bp, Homo sapiens
gggcgcccgcagcacctcctcgccagcagccgtccggagccagccaacgagcggaaaatggcagacaatttttcgctccatgatgcgttatctgggtctggaaacccaaaccctcaaggatggcctggcgcatgggggaaccagcctgctggggcctacccatcttctggacagccaagtgcccccggagcctaccctgccactggcccctatggcgcccctgctgggccactgattgtgccttataacctgcctttgcctgggggagtggtgcctcgcatgctgataacaattctgggcacggtgaagcccaatgcaaacagaattgctttagatttccaaagagggaatgatgttgccttccactttaacccacgcttcaatgagaacaacaggagagtcattgtttgcaatacaaagctggataataactggggaagggaagaaagacagtcggttttcccatttgaaagtgggaaaccattcaaaatacaagtactggttgaacctgaccacttcaaggttgcagtgaatgatgctcacttgttgcagtacaatcatcgggttaaaaaactcaatgaaatcagcaaactgggaatttctggtgacatagacctcaccagtgcttcatataccatgatataatctgaaaggggcagattaaaaaaaaaaaaagaatctaaaccttacatgtgtaaaggtttcatgttcactgtgagtgaaaatttttacattcatcaatatccctcttgtaagtcatctacttaataaatattacagtgaa

SEQ ID NO: 299008 - DNA, 791 bp, Homo sapiens
gacggcagtgcatcgctgtatgcgtgcatgctgtctctagagtatccccccccctcgggcctaccccgggcaggcacccccaggggcttatcctggacaggcacctccaggcgcctaccatggagcacctggagcttatcccggagcacctgcacctggggcctacccatcttctggacagccaagtgcccccggagcctaccctgccactggcccctatggcgcccctgctgggccactgattgtgccttataacctgcctttgcctgggggagtggtgcctcgcatgctgataacaattctgggcacggtgaagcccaatgcaaacagaattgctttagatttccaaagagggaatgatgttgccttccactttaacccacgcttcaatgagaacaacaggagagtcattgtttgcaatacaaagctggataataactggggaagggaagaaagacagtcggttttcccatttgaaagtgggaaaccattcaaaatacaagtactggttgaacctgaccacttcaaggttgcagtgaatgatgctcacttgttgcagtacaatcatcgggttaaaaaactcaatgaaatcagcaaactgggaatttctggtgacatagacctcaccagtgcttcatataccatgatataatctgaaaggggcagattaaaaaaaaaaaaagaatctaaaccttacatgtgtaaaggtttcatgttcactgtgagtgaaaatttttacattcatcaatatccctcttgtaagtcatctacttaataaatattacagtgaa

SEQ ID NO: 299009 - DNA, 1147 bp, Homo sapiens
cctgggactcactcacagtaaccctttcaccaaaaggcccagggcggaagggagtggactctgccggcaggagctgagaaatcctctgagtagcgggaagtgcggtacagtctgggcattctgatgtttgtgattgtttttctcacggtgatgaaaaagtatgtgctataagtagaggagcgctaactcctgacttgagctaattatgaaaatgcagccctccctgatctgagacgttgggaggcaagaataaagtgaaaaagtatatgtaatcccaacatctaattttagtcttagaaactcaaactattaataagtggaaaaagtttaatgatatgcatgtaatgcctttgccatattcctctccttcttagatcacatattcctattttcctgaaaattctgcttttgagaatgctttctgtcccgtaattgtgtatgtctttctttccagctccatgatgcgttatctgggtctggaaacccaaaccctcaaggatggcctggcgcatgggggaaccagcctgctggggcagggggctacccaggggcttcctatcctgcactggcccctatggcgcccctgctgggccactgattgtgccttataacctgcctttgcctgggggagtggtgcctcgcatgctgataacaattctgggcacggtgaagcccaatgcaaacagaattgctttagatttccaaagagggaatgatgttgccttccactttaacccacgcttcaatgagaacaacaggagagtcattgtttgcaatacaaagctggataataactggggaagggaagaaagacagtcggttttcccatttgaaagtgggaaaccattcaaaatacaagtactggttgaacctgaccacttcaaggttgcagtgaatgatgctcacttgttgcagtacaatcatcgggttaaaaaactcaatgaaatcagcaaactgggaatttctggtgacatagacctcaccagtgcttcatataccatgatataatctgaaaggggcagattaaaaaaaaaaaaagaatctaaaccttacatgtgtaaaggtttcatgttcactgtgagtgaaaatttttacattcatcaatatccctcttgtaagtcatctacttaataaatattacagtgaa

SEQ ID NO: 299010 - DNA, 946 bp, Homo sapiens
  misc_feature (33)..(33): n is a, c, g, or t
ggctacacggtataggtctaggtacgaggctgngtggtggcagcacctcctcgccagcagccgtccggagccagccaacgagcggaaaatggcagacaatttttcgctccatgatgcgttatctgggtctggaaacccaaaccctcaaggatggcctggcgcatgggggaaccagcctgctggggcagggggctacccaggggcttcctatcctggggcctaccccgggcaggcacccccaggggcttatcctggacaggcacctccaggcgcctaccatggagcacctggagcttatcccggagcacctgcacctggagtctacccagggccacccagcggccctggggcctacccatcttctggacagccaagtgcccccggagcctaccctgcattgtgccttataacctgcctttgcctgggggagtggtgcctcgcatgctgataacaattctgggcacggtgaagcccaatgcaaacagaattgctttagatttccaaagagggaatgatgttgccttccactttaacccacgcttcaatgagaacaacaggagagtcattgtttgcaatacaaagctggataataactggggaagggaagaaagacagtcggttttcccatttgaaagtgggaaaccattcaaaatacaagtactggttgaacctgaccacttcaaggttgcagtgaatgatgctcacttgttgcagtacaatcatcgggttaaaaaactcaatgaaatcagcaaactgggaatttctggtgacatagacctcaccagtgcttcatataccatgatataatctgaaaggggcagattaaaaaaaaaaaaagaatctaaaccttacatgtgtaaaggtttcatgttcactgtgagtgaaaatttttacattcatcaatatccctcttgtaagtcatctacttaataaatattacagtgaa

SEQ ID NO: 299011 - DNA, 909 bp, Homo sapiens
  misc_feature (33)..(33): n is a, c, g, or t
ggctacacggtataggtctaggtacgaggctgngtggtggcagcacctcctcgccagcagccgtccggagccagccaacgagcggaaaatggcagacaatttttcgctccatgatgcgttatctgggtctggaaacccaaaccctcaaggatggcctggcgcatgggggaaccagcctgctggggcagggggctacccaggggcttcctatcctggggcctaccccgggcaggcacccccaggggcttatcctggacaggcacctccaggcgcctaccatggagcacctggagcttatcccggagcacctgcacctggagtctacccagggccacccagcggccctggggcctacccatcttctggacagccaagtgcccccggagcctaccctgctgcctcgcatgctgataacaattctgggcacggtgaagcccaatgcaaacagaattgctttagatttccaaagagggaatgatgttgccttccactttaacccacgcttcaatgagaacaacaggagagtcattgtttgcaatacaaagctggataataactggggaagggaagaaagacagtcggttttcccatttgaaagtgggaaaccattcaaaatacaagtactggttgaacctgaccacttcaaggttgcagtgaatgatgctcacttgttgcagtacaatcatcgggttaaaaaactcaatgaaatcagcaaactgggaatttctggtgacatagacctcaccagtgcttcatataccatgatataatctgaaaggggcagattaaaaaaaaaaaaagaatctaaaccttacatgtgtaaaggtttcatgttcactgtgagtgaaaatttttacattcatcaatatccctcttgtaagtcatctacttaataaatattacagtgaa

SEQ ID NO: 299012 - DNA, 618 bp, Homo sapiens
accctgcggttcatcgtggtgcactgtgtcgtcctgcacctatcgtggtgcactgtgtcgtggtgcactgtgtcgtggtgcactgtgtcgtgttgcactgtgtcgtgcctcgcatgctgataacaattctgggcacggtgaagcccaatgcaaacagaattgctttagatttccaaagagggaatgatgttgccttccactttaacccacgcttcaatgagaacaacaggagagtcattgtttgcaatacaaagctggataataactggggaagggaagaaagacagtcggttttcccatttgaaagtgggaaaccattcaaaatacaagtactggttgaacctgaccacttcaaggttgcagtgaatgatgctcacttgttgcagtacaatcatcgggttaaaaaactcaatgaaatcagcaaactgggaatttctggtgacatagacctcaccagtgcttcatataccatgatataatctgaaaggggcagattaaaaaaaaaaaaagaatctaaaccttacatgtgtaaaggtttcatgttcactgtgagtgaaaatttttacattcatcaatatccctcttgtaagtcatctacttaataaatattacagtgaa

SEQ ID NO: 299013 - DNA, 562 bp, Homo sapiens
aaaccaaatactcagctgcgttaggaattccttctgattcttgctgcaggaaaatggcagacaatttttcgctccatgatgcgttatctgggtctggaaacccaaaccctcaaggatggcctggcgcatgggggaaccagcctgctggggcagggggctacccaggggcttcctatcctggggcctaccccgggcaggcacccccaggggcttatcctggacaggcacctccaggcgcctaccatggagcacctggagcttatcccggagcacctgcacctggagtctacccagggccacccagcggccctggggcctacccatcttctggacagccaagtgcccccggagcctaccctgccactggcccctatggcgcccctgctgggccactgattgtgccttataacctgcctttgcctgggggagtggtgcctcgcatgctgataacaattctgggcacggtgaagcccaatgcaaacaggtaaggagagcaaaattaacaagtctactctatttgtagattggtttttgaataaagaatggcctactttttttcttc

SEQ ID NO: 299014 - DNA, 551 bp, Homo sapiens
tagtcaacatgaatgagtacaaattgggatggccgtagtaatgagatttactgatggctttcttttcaattatttgtacatctagggagccttatctctttggcccctgggcaaagtggcctgagagtctggacagatggcatatactagagttatgtgtttttcacacatattaatagtgatggaactttagcaacatcgttttttccccaaagaaacatgactccttattgacacatatgtacttgttaattcccagaattgtgccttataacctgcctttgcctgggggagtggtgcctcgcatgctgataacaattctgggcacggtgaagcccaatgcaaacaggtaaggagagcaaaattaacaagtctactctatttgtagattggtttttgaataaagaatggcctactttttttcttcttgccctgtcttacagtgctattttgaattttagtaaaattttaaaaactacatatttagaatcttggctataccatcatataggattatcccataaatccatacatattcccatataattttg

SEQ ID NO: 299015 - DNA, 482 bp, Homo sapiens
gagatgtttttgtggcgccacactactgacttaggcataatgcctagagatggattagaactgcacaatgaactagtggtgaggttcagtttaatggaaattggtgaaagcttttaggataaaatgataatctttgtttctttcaggaaaatggcagacaatttttcggtaagtgttttatgcctgtttcttccccttgatcagctccacatggttgagggttgggggttttgtttttaccatgactttcccttttcactctcccactgcgtggcttcccctggactcatttgtccaatgagggcttgcaagctggagccttgtttttccagcagcagatttgggaagaaagccaggcagagcgaggcctgggactcactcacagtaaccctttcaccaaaaggcccagggcggaagggagtggactctgccggcaggagctgagaaatcctctgagtagcgggaagtgcggtacagtctgg

SEQ ID NO: 299016 - DNA, 780 bp, Homo sapiens
ccacgtaattgccacggtaattgccacgtagattgccacttatatcattataaaacaggctggcacagtggcttatgcctgtaatcccaacactttgggaggccaaggcaggtggatcacatgaggtcaggagttcgagaccagcctggccaacatggcaaaactgtctctactaaaaatataaaaattaggtatggtggcacgtgcctgtacttacagctacttgggaggctgaggcatgagatgagaatctcttgaacccaggaggcggaggttgcagtgagctgagattgcaccactgcactccagcttgggtgatggagtgagactcaaataaaaaaggtactagttctgcatttcagagttggcttgttgaaccaggctatatgcttccaagatttaaatgtttttctgtattatactctcaattgtgttttaaaaaaatctcttacagaaatctctacctcaggcactaagtgttatgacatgggtagcatattgatattgaaaacttagctaggacttccagccttttaagataatttaaatgtaaaattaaatggttaaccagcaatctaatgtcatgtggtgtgcagtttggatattgcatgaacagctaaggaatcacctgttctagtgccaaagatcactcattgctaattttgttctgtacagcttatgtaatattttcatggtggagacggactctgtgtgctcagggccttgtctctaggaagattttgtcaattccaaatacagttttgaagattcaaaaaaaat

SEQ ID NO: 299017 - DNA, 3345 bp, Homo sapiens
atcaccatgagttggagcttcctgactcgcctgctagaggagattcacaaccattccacatttgtggggaagatctggctcactgttctgattgtcttccggatcgtccttacagctgtaggaggagaatccatctattacgatgagcaaagcaaatttgtgtgcaacacagaacagccgggctgtgagaatgtctgttatgatgcgtttgcacctctctcccatgtacgcttctgggtgttccagatcatcctggtggcaactccctctgtgatgtacctgggctatgctatccacaagattgccaaaatggagcacggtgaagcagacaagaaggcagctcggagcaagccctatgcaatgcgctggaaacaacaccgggctctggaagaaacggaggaggacaacgaagaggatcctatgatgtatccagagatggagttagaaagtgataaggaaaataaagagcagagccaacccaaacctaagcatgatggccgacgacggattcgggaagatgggctcatgaaaatctatgtgctgcagttgctggcaaggaccgtgtttgaggtgggttttctgatagggcagtattttctgtatggcttccaagtccacccgttttatgtgtgcagcagacttccttgtcctcataagatagactgctttatttctagacccactgaaaagaccatcttccttctgataatgtatggtgttacaggcctttgcctcttgcttaacatttgggagatgcttcatttagggtttgggaccattcgagactcactaaacagtaaaaggagggaacttgaggatccgggtgcttataattatcctttcacttggaatacaccatctgctccccctggctataacattgctgtcaaaccagatcaaatccagtacaccgaactgtccaatgctaagatcgcctacaagcaaaacaaggccaacacagcccaggaacagcagtatggcagccatgaggagaacctcccagctgacctggaggctctgcagcgggagatcaggatggctcaggaacgcttggatctggcagttcaggcctacagtcaccaaaacaaccctcatggtccccgggagaagaaggccaaagtggggtccaaagctgggtccaacaaaagcactgccagtagcaaatcaggggatgggaagacctccgtctggatttaatcctggcgggcttaaaacctgtgcttttcatagtttatggtaagcagcagctcactgaataatgacttccattgagtaaacatttggctctggttatcttcagggatgctgttggctcatgatccaagctcaggggactctggaggcggggctgggctgagggagagaaagggaaacacagtgttcccaggcacatgttcttagcaataatacagttgcagaactttacatttgtgtcttccagatctggagaagaacagacatatttaaatcattcttgttgaacagtttttgtatgtacagtattatggtacttttttttttttagtatgagaactttttttgtatttgtacattgaactgctgtagttatacttttatattaaaggggaaaaagtccttataaataatgcctattaggctagtgctattactttgttcagcaaattctaccctggctttagagtttttaatagatgctacacctaataaaagtgcctctcatattgcaggaacgatttcagatgtgtaaggagactgaagaggagataccagtttttagtcttggaaagcaagttcacagtagaaggaggttgagatctttcttttatgtgagaaatctttgaatctcattcatgcgatcagagttgtagccaatttttgaaaaccttattttcaaaggaaataaatgattcactgtaggattcctttaaatatcaagcatcaccagtatatgctttgatggtatatgtatataacttaaagttctttcaaaagcctgatacagaaacgtgtccccagtttggtagcaatgtggaaaacctggctagagatgatatggagctgtccctcagaaagcaaagccatgcctggaatccctaataggctgcttagttgtgaacctgtttgatttgccttaagcctctatccagaaacctgcccgcttccgtctggttaagaagccagtggtggatattttctttgttaacattagaaatgcaaacattcccttgtcaaccaagaatactcaaagctacttgtattggaaatggcagaaggcctaaatccaaatttcttattttttataatttaccatagaagttttgtgattaaattcttacttctgccagtggaggtttatgcctgaaaggtcatggggtcctgtctgtaaatagacctaaagagaagtgcagtatttattctttgtaggcataatgtgtttgtcactgacaagcattcatgttcatcccactagtcttttattgcagtcttttattgtcattttcagccttatgttggagagctttgctttctcatcatgttcacattgtcttaagttttgtgagcttctgagaaagagcttggtaaaggtttaaaggggactttgttccaccagggagcattttatttgggcgtctcacccttttctaatgaaagctgttgtaagccacctctgacttggaaattctgaaagtatgaatattttttatatcttaattgtaaaatgccagttctccattatttagatgaatagtagaacactgcaccctttgtgcagtgtttttgtttctctactgcattcctacccccaccaaaaaaaagaaacttaaggaaatttttttttgagacagggtctccctctttcacccaggctgagattgcaccactgcactccagcttgggtgatggagtgagactcaaataaaaaaggtactagttctgcatttcagagttggcttgttgaaccaggctatatgcttccaagatttaaatgtttttctgtattatactctcaattgtgttttaaaaaaatctcttacagaaatctctacctcaggcactaagtgttatgacatgggtagcatattgatattgaaaacttagctaggacttccagccttttaagataatttaaatgtaaaattaaatggttaaccagcaatctaatgtcatgtggtgtgcagtttggatattgcatgaacagctaaggaatcacctgttctagtgccaaagatcactcattgctaattttgttctgtacagcttatgtaatattttcatggtggagacggactctgtgtgctcagggccttgtctctaggaagattttgtcaattccaaatacagttttgaagattcaaaaaaaat

SEQ ID NO: 299018 - DNA, 4489 bp, Homo sapiens
atcaccatgagttggagcttcctgactcgcctgctagaggagattcacaaccattccacatttgtggggaagatctggctcactgttctgattgtcttccggatcgtccttacagctgtaggaggagaatccatctattacgatgagcaaagcaaatttgtgtgcaacacagaacagccgggctgtgagaatgtctgttatgatgcgtttgcacctctctcccatgtacgcttctgggtgttccagatcatcctggtggcaactccctctgtgatgtacctgggctatgctatccacaagattgccaaaatggagcacggtgaagcagacaagaaggcagctcggagcaagccctatgcaatgcgctggaaacaacaccgggctctggaagaaacggaggaggacaacgaagaggatcctatgatgtatccagagatggagttagaaagtgataaggaaaataaagagcagagccaacccaaacctaagcatgatggccgacgacggattcgggaagatgggctcatgaaaatctatgtgctgcagttgctggcaaggaccgtgtttgaggtgggttttctgatagggcagtattttctgtatggcttccaagtccacccgttttatgtgtgcagcagacttccttgtcctcataagatagactgctttatttctagacccactgaaaagaccatcttccttctgataatgtatggtgttacaggcctttgcctcttgcttaacatttgggagatgcttcatttagggtttgggaccattcgagactcactaaacagtaaaaggagggaacttgaggatccgggtgcttataattatcctttcacttggaatacaccatctgctccccctggctataacattgctgtcaaaccagatcaaatccagtacaccgaactgtccaatgctaagatcgcctacaagcaaaacaaggccaacacagcccaggaacagcagtatggcagccatgaggagaacctcccagctgacctggaggctctgcagcgggagatcaggatggctcaggaacgcttggatctggcagttcaggcctacagtcaccaaaacaaccctcatggtccccgggagaagaaggccaaagtggggtccaaagctgggtccaacaaaagcactgccagtagcaaatcaggggatgggaagacctccgtctggatttaatcctggcgggcttaaaacctgtgcttttcatagtttatggtaagcagcagctcactgaataatgacttccattgagtaaacatttggctctggttatcttcagggatgctgttggctcatgatccaagctcaggggactctggaggcggggctgggctgagggagagaaagggaaacacagtgttcccaggcacatgttcttagcaataatacagttgcagaactttacatttgtgtcttccagatctggagaagaacagacatatttaaatcattcttgttgaacagtttttgtatgtacagtattatggtacttttttttttttagtatgagaactttttttgtatttgtacattgaactgctgtagttatacttttatattaaaggggaaaaagtccttataaataatgcctattaggctagtgctattactttgttcagcaaattctaccctggctttagagtttttaatagatgctacacctaataaaagtgcctctcatattgcaggaacgatttcagatgtgtaaggagactgaagaggagataccagtttttagtcttggaaagcaagttcacagtagaaggaggttgagatctttcttttatgtgagaaatctttgaatctcattcatgcgatcagagttgtagccaatttttgaaaaccttattttcaaaggaaataaatgattcactgtaggattcctttaaatatcaagcatcaccagtatatgctttgatggtatatgtatataacttaaagttctttcaaaagcctgatacagaaacgtgtccccagtttggtagcaatgtggaaaacctggctagagatgatatggagctgtccctcagaaagcaaagccatgcctggaatccctaataggctgcttagttgtgaacctgtttgatttgccttaagcctctatccagaaacctgcccgcttccgtctggttaagaagccagtggtggatattttctttgttaacattagaaatgcaaacattcccttgtcaaccaagaatactcaaagctacttgtattggaaatggcagaaggcctaaatccaaatttcttattttttataatttaccatagaagttttgtgattaaattcttacttctgccagtggaggtttatgcctgaaaggtcatggggtcctgtctgtaaatagacctaaagagaagtgcagtatttattctttgtaggcataatgtgtttgtcactgacaagcattcatgttcatcccactagtcttttattgcagtcttttattgtcattttcagccttatgttggagagctttgctttctcatcatgttcacattgtcttaagttttgtgagcttctgagaaagagcttggtaaaggtttaaaggggactttgttccaccagggagcattttatttgggcgtctcacccttttctaatgaaagctgttgtaagccacctctgacttggaaattctgaaagtatgaatattttttatatcttaattgtaaaatgccagttctccattatttagatgaatagtagaacactgcaccctttgtgcagtgtttttgtttctctactgcattcctacccccaccaaaaaaaagaaacttaaggaaatttttttttgagacagggtctccctctttcacccagggctggagtgcagcagcatgatctcagctcactgcagcctctgcctcccaggctcaagcaatcattccacctcagcctcttgattagctgggactacaggcatgtgccaccatactcggctaattctgttttaaaaattttttttgtagagatgaggtctcactatgttacccaggctggtctcgaacttttgggttcaagtgatcctcccgcctcagcctctcaaagtgttagtattataggtgtgagccaccatgcccagcctagaaaatttaaccttatcttttagccattcatttacttttatttgcttttttaaaaaaaaatctttaaattttagcctagagaagcacctcaggaactctaaacatcttaggcaaaaattaaactcaggtgagactgaaggagaaatttcagaaatacacatgtacctcatgggtaattaatagacatgcacagtttccttcaaatcaaatgtttaataaggaaattcatataattccaagaaaacaggcaaaatttggaatacataagcctagctaagataaagaactaccagttaattcttaacatcactggagcttccagcaggttttttaattgaaggacaaaaagtgtccatacatttgtgttatctcttcagagcctgagggagaagagagtggctttgccctgtggaaaggctggggatttgagaatgatacagggggaaggagtcaagcagaaatgccaggaagaaccaggcaaagacatttggcgccagaagcatccacttaatttctgtgaagagtgcccctggtgtttcatcttggcctgttttgatgagaatgttatcttttgtgtctggataacgcgtcagcttcttaaagtacatataaagatattctgtcacctccccacatgcacacacttttaaaatctatttttattctcttgctaaagttgtaattatgtcaagaattttccagctctaactgccttcttagtacatgtctttctgcctttgaagcatatgagtttgccaaagtcattctcccctaatgacatattgtggacttacattaagaaaatgggccaggcgcggtggctcacacctgtaatcccagcactttgggaggcccaggcgggtggattacctgaggtcaggagttcaagaccagactggtcaacatggtgaaactccatctctactaaaaatacagaaattagccaggagtgctgggtggacgcctgcaatcccagctacttgggaggttgaggcaggagaattgcttgaacccaggaggcagaggttgcagtgagctgagatcataccattgcactccagcctgcaagacagagtgaaactcttgtctcaaaaaaaaaagaaaaaaagaaagtgagcctgttgatgtctagctaacccattggtggagtctgcattgaatctgtaagaatattgttctggatcatgcaggtgggatttgtataaaaagcctgtccaacatttagttctcactcgcatcagaatcatactgttttgaattgccatataagacatgctccatcatgacacttgcttctcctcccgccacctgtgtgttcttttgatacatttatcttctgtttttctcaaataaagttcaaaggcaaccacctgtt

SEQ ID NO: 299019 - DNA, 3997 bp, Homo sapiens
atcaccatgagttggagcttcctgactcgcctgctagaggagattcacaaccattccacatttgtggggaagatctggctcactgttctgattgtcttccggatcgtccttacagctgtaggaggagaatccatctattacgatgagcaaagcaaatttgtgtgcaacacagaacagccgggctgtgagaatgtctgttatgatgcgtttgcacctctctcccatgtacgcttctgggtgttccagatcatcctggtggcaactccctctgtgatgtacctgggctatgctatccacaagattgccaaaatggagcacggtgaagcagacaagaaggcagctcggagcaagccctatgcaatgcgctggaaacaacaccgggctctggaagaaacggaggaggacaacgaagaggatcctatgatgtatccagagatggagttagaaagtgataaggaaaataaagagcagagccaacccaaacctaagcatgatggccgacgacggattcgggaagatgggctcatgaaaatctatgtgctgcagttgctggcaaggaccgtgtttgaggtgggttttctgatagggcagtattttctgtatggcttccaagtccacccgttttatgtgtgcagcagacttccttgtcctcataagatagactgctttatttctagacccactgaaaagaccatcttccttctgataatgtatggtgttacaggcctttgcctcttgcttaacatttgggagatgcttcatttagggtttgggaccattcgagactcactaaacagtaaaaggagggaacttgaggatccgggtgcttataattatcctttcacttggaatacaccatctgctccccctggctataacattgctgtcaaaccagatcaaatccagtacaccgaactgtccaatgctaagatcgcctacaagcaaaacaaggccaacacagcccaggaacagcagtatggcagccatgaggagaacctcccagctgacctggaggctctgcagcgggagatcaggatggctcaggaacgcttggatctggcagttcaggcctacagtcaccaaaacaaccctcatggtccccgggagaagaaggccaaagtggggtccaaagctgggtccaacaaaagcactgccagtagcaaatcaggggatgggaagacctccgtctggatttaatcctggcgggcttaaaacctgtgcttttcatagtttatggtaagcagcagctcactgaataatgacttccattgagtaaacatttggctctggttatcttcagggatgctgttggctcatgatccaagctcaggggactctggaggcggggctgggctgagggagagaaagggaaacacagtgttcccaggcacatgttcttagcaataatacagttgcagaactttacatttgtgtcttccagatctggagaagaacagacatatttaaatcattcttgttgaacagtttttgtatgtacagtattatggtacttttttttttttagtatgagaactttttttgtatttgtacattgaactgctgtagttatacttttatattaaaggggaaaaagtccttataaataatgcctattaggctagtgctattactttgttcagcaaattctaccctggctttagagtttttaatagatgctacacctaataaaagtgcctctcatattgcaggaacgatttcagatgtgtaaggagactgaagaggagataccagtttttagtcttggaaagcaagttcacagtagaaggaggttgagatctttcttttatgtgagaaatctttgaatctcattcatgcgatcagagttgtagccaatttttgaaaaccttattttcaaaggaaataaatgattcactgtaggattcctttaaatatcaagcatcaccagtatatgctttgatggtatatgtatataacttaaagttctttcaaaagcctgatacagaaacgtgtccccagtttggtagcaatgtggaaaacctggctagagatgatatggagctgtccctcagaaagcaaagccatgcctggaatccctaataggctgcttagttgtgaacctgtttgatttgccttaagcctctatccagaaacctgcccgcttccgtctggttaagaagccagtggtggatattttctttgttaacattagaaatgcaaacattcccttgtcaaccaagaatactcaaagctacttgtattggaaatggcagaaggcctaaatccaaatttcttattttttataatttaccatagaagttttgtgattaaattcttacttctgccagtggaggtttatgcctgaaaggtcatggggtcctgtctgtaaatagacctaaagagaagtgcagtatttattctttgtaggcataatgtgtttgtcactgacaagcattcatgttcatcccactagtcttttattgcagtcttttattgtcattttcagccttatgttggagagctttgctttctcatcatgttcacattgtcttaagttttgtgagcttctgagaaagagcttggtaaaggtttaaaggggactttgttccaccagggagcattttatttgggcgtctcacccttttctaatgaaagctgttgtaagccacctctgacttggaaattctgaaagtatgaatattttttatatcttaattgtaaaatgccagttctccattatttagatgaatagtagaacactgcaccctttgtgcagtgtttttgtttctctactgcattcctacccccaccaaaaaaaagaaacttaaggaaatttttttttgagacagggtctccctctttcacccagggctggagtgcagcagcatgatctcagctcactgcagcctctgcctcccaggctcaagcaatcattccacctcagcctcttgattagctgggactacaggcatgtgccaccatactcggctaattctgttttaaaaattttttttgtagagatgaggtctcactatgttacccaggctggtctcgaacttttgggttcaagtgatcctcccgcctcagcctctcaaagtgttagtattataggtgtgagccaccatgcccagcctagaaaatttaaccttatcttttagccattcatttacttttatttgcttttttaaaaaaaaatctttaaattttagcctagagaagcacctcaggaactctaaacatcttaggcaaaaattaaactcaggtgagactgaaggagaaatttcagaaatacacatgtacctcatgggtaattaatagacatgcacagtttccttcaaatcaaatgtttaataaggaaattcatataattccaagaaaacaggcaaaatttggaatacataagcctagctaagataaagaactaccagttaattcttaacatcactggagcttccagcaggttttttaattgaaggacaaaaagtgtccatacatttgtgttatctcttcagagcctgagggagaagagagtggctttgccctgtggaaaggctggggatttgagaatgatacagggggaaggagtcaagcagaaatgccaggaagaaccaggcaaagacatttggcgccagaagcatccacttaatttctgtgaagagtgcccctggtgtttcatcttggcctgttttgatgagaatgttatcttttgtgtctggataacgcgtcagcttcttaaagtacatataaagatattctgtcacctccccacatgcacacacttttaaaatctatttttattctcttgctaaagttgtaattatgtcaagaattttccagctctaactgccttcttagtacatgtctttctgcctttgaagcatatgagtttgccaaagtcattctcccctaatgacatattgtggacttacattaagaaaatgggccaccatgcccagcctagaaaatttaaccttatcttttagccattcatttacttttatttgcttttttaaaaaaa

SEQ ID NO: 299020 - DNA, 2351 bp, Homo sapiens
aaaagaccttcaaggaccaaccattattattggtcacttgtttgaacttggcgcttaaaaaaaaagttggactgtgatgctttggtgctctttatcacagacatcagtgatggtctgaaacactctctagcagtttatacgaagaatggacttacatgttatcagttacactcatgatttactcgttcagcttctacaagtccatactttatgctgtctcatttaagagacagtccacttctgaaaataaaatcgatagttgatgatacatttttggctagccagctttctgtaaaaggcaagtatgttagacatgcacagtttccttcaaatcaaatgtttaataaggtacttcaagaaacgcctttttaaaaatcaaaggttttggccaggcatggtggctcacgcctgtaatcccagcactttgggaggccaaggtgggcgaatcacaaggtcaggagtttgagaccagcctggccaacatggtgaaaccccgtctctactaaaaataccaaaaattagccgggcgtggtggtgggtacctgtaatcccagctactcaggaggctgagatgagaatcacttgatcccaggaggtagaggttgcagtgagccgagattgcgccattgcacttcagcctgggcaacgagtgaaactctcaaaaaaaaattcatagtaataataaagtccctgcatgcagtttggaaataaaatttaaactcatttatgtgtaataaatatgtaataattcacagtcaccatcaaatgttggaatcattgaattgcatacttgtactcattccggccacatcatgaagtgtttaaagatttgtatttgctgttgtccctatgtagttctattgatgtttggtttgttttttggggtttgttttgagcccaggctagagtgcaatggcacaatctcaactcactacagcctggacctccttggctcaagcagtcctcccacttcagcctcccaagtagctggtctgcaggtgctcaccaccacacctggctaattttgtatttttgtagagacagagctctcactatgttgcctagactggtctcaaactcctgggcccaagcaatcctcccatcacagcctccgaaggtgctgggattacaggcataagccactgtgcccagcctgtttttaataatgatattaagtgggttggttcatgtgttattaatcagtgttaataatcgtacttttttttttttttaaaagaaaccatggtattctaaaatcaggagtccaaataaaagaaagttctcggctgtgcgtggtggctaacacctgtaatcccagcactttgggaggctgaggtgggtggatcactagaggtcaggagtttggaaacaagcctggccaacatggtaaaaccccctctctactaaaaatacaaaaattagccgggcatggtggtgcacacctgtaatcccagctactcgggatgttgaggcatgagatttccttgaacctggaaggcagaggttgctgtgagccgagatcgcgccactgcactccagcctgggtgacagagtaagactgtcgccaaaaaagaggaaaaaagttatccagtgcagtttctacagagataaaagaagtaatagttctggctgggtgtggtggcttatgcctgtaatcccaacactttgggaggccaaggcaggtggatcacatgaggtcaggagttcgagaccagcctggccaacatggcaaaactgtctctactaaaaatataaaaattaggtatggtggcacgtgcctgtacttacagctacttgggaggctgaggcatgagatgagaatctcttgaacccaggaggcggaggttgcagtgagctgagattgcaccactgcactccagcttgggtgatggagtgagactcaaataaaaaaggtactagttctgcatttcagagttggcttgttgaaccaggctatatgcttccaagatttaaatgtttttctgtattatactctcaattgtgttttaaaaaaatctcttacagaaatctctacctcaggcactaagtgttatgacatgggtagcatattgatattgaaaacttagctaggacttccagccttttaagataatttaaatgtaaaattaaatggttaaccagcaatctaatgtcatgtggtgtgcagtttggatattgcatgaacagctaaggaatcacctgttctagtgccaaagatcactcattgctaattttgttctgtacagcttatgtaatattttcatggtggagacggactctgtgtgctcagggccttgtctctaggaagattttgtcaattccaaatacagttttgaagattcaaaaaaaat

SEQ ID NO: 299021 - DNA, 2188 bp, Homo sapiens
atcaccatgagttggagcttcctgactcgcctgctagaggagattcacaaccattccacatttgtggggaagatctggctcactgttctgattgtcttccggatcgtccttacagctgtaggaggagaatccatctattacgatgagcaaagcaaatttgtgtgcaacacagaacagccgggctgtgagaatgtctgttatgatgcgtttgcacctctctcccatgtacgcttctgggtgttccagatcatcctggtggcaactccctctgtgatgtacctgggctatgctatccacaagattgccaaaatggagcacggtgaagcagacaagaaggcagctcggagcaagccctatgcaatgcgctggaaacaacaccgggctctggaagctactcaggaggctgagatgagaatcacttgatcccaggaggtagaggttgcagtgagccgagattgcgccattgcacttcagcctgggcaacgagtgaaactctcaaaaaaaaattcatagtaataataaagtccctgcatgcagtttggaaataaaatttaaactcatttatgtgtaataaatatgtaataattcacagtcaccatcaaatgttggaatcattgaattgcatacttgtactcattccggccacatcatgaagtgtttaaagatttgtatttgctgttgtccctatgtagttctattgatgtttggtttgttttttggggtttgttttgagcccaggctagagtgcaatggcacaatctcaactcactacagcctggacctccttggctcaagcagtcctcccacttcagcctcccaagtagctggtctgcaggtgctcaccaccacacctggctaattttgtatttttgtagagacagagctctcactatgttgcctagactggtctcaaactcctgggcccaagcaatcctcccatcacagcctccgaaggtgctgggattacaggcataagccactgtgcccagcctgtttttaataatgatattaagtgggttggttcatgtgttattaatcagtgttaataatcgtacttttttttttttttaaaagaaaccatggtattctaaaatcaggagtccaaataaaagaaagttctcggctgtgcgtggtggctaacacctgtaatcccagcactttgggaggctgaggtgggtggatcactagaggtcaggagtttggaaacaagcctggccaacatggtaaaaccccctctctactaaaaatacaaaaattagccgggcatggtggtgcacacctgtaatcccagctactcgggatgttgaggcatgagatttccttgaacctggaaggcagaggttgctgtgagccgagatcgcgccactgcactccagcctgggtgacagagtaagactgtcgccaaaaaagaggaaaaaagttatccagtgcagtttctacagagataaaagaagtaatagttctggctgggtgtggtggcttatgcctgtaatcccaacactttgggaggccaaggcaggtggatcacatgaggtcaggagttcgagaccagcctggccaacatggcaaaactgtctctactaaaaatataaaaattaggtatggtggcacgtgcctgtacttacagctacttgggaggctgaggcatgagatgagaatctcttgaacccaggaggcggaggttgcagtgagctgagattgcaccactgcactccagcttgggtgatggagtgagactcaaataaaaaaggtactagttctgcatttcagagttggcttgttgaaccaggctatatgcttccaagatttaaatgtttttctgtattatactctcaattgtgttttaaaaaaatctcttacagaaatctctacctcaggcactaagtgttatgacatgggtagcatattgatattgaaaacttagctaggacttccagccttttaagataatttaaatgtaaaattaaatggttaaccagcaatctaatgtcatgtggtgtgcagtttggatattgcatgaacagctaaggaatcacctgttctagtgccaaagatcactcattgctaattttgttctgtacagcttatgtaatattttcatggtggagacggactctgtgtgctcagggccttgtctctaggaagattttgtcaattccaaatacagttttgaagattcaaaaaaaat

SEQ ID NO: 299022 - DNA, 1615 bp, Homo sapiens
atcaccatgagttggagcttcctgactcgcctgctagaggagattcacaaccattccacatttgtggggaagatctggctcactgttctgattgtcttccggatcgtccttacagctgtaggaggagaatccatctattacgatgagcaaagcaaatttgtgtgcaacacagaacagccgggctgtgagaatgtctgttatgatgcgtttgcacctctctcccatgtacgcttctgggtgttccagatcatcctggtggcaactccctctgtgatgtacctgggctatgctatccacaagattgccaaaatggagcacggtgaagcagacaagaaggcagctcggagcaagccctatgcaatgcgctggaaacaacaccgggctctggaagctactcaggaggctgagatgagaatcacttgatcccaggaggtagaggttgcagtgagccgagattgcgccattgcacttcagcctgggcaacgagtgaaactctcaaaaaaaaattcatagtaataataaagtccctgcatgcagtttggaaataaaatttaaactcatttatgtgtaataaatatgtaataattcacagtcaccatcaaatgttggaatcattgaattgcatacttgtactcattccggccaacatggtaaaaccccctctctactaaaaatacaaaaattagccgggcatggtggtgcacacctgtaatcccagctactcgggatgttgaggcatgagatttccttgaacctggaaggcagaggttgctgtgagccgagatcgcgccactgcactccagcctgggtgacagagtaagactgtcgccaaaaaagaggaaaaaagttatccagtgcagtttctacagagataaaagaagtaatagttctggctgggtgtggtggcttatgcctgtaatcccaacactttgggaggccaaggcaggtggatcacatgaggtcaggagttcgagaccagcctggccaacatggcaaaactgtctctactaaaaatataaaaattaggtatggtggcacgtgcctgtacttacagctacttgggaggctgaggcatgagatgagaatctcttgaacccaggaggcggaggttgcagtgagctgagattgcaccactgcactccagcttgggtgatggagtgagactcaaataaaaaaggtactagttctgcatttcagagttggcttgttgaaccaggctatatgcttccaagatttaaatgtttttctgtattatactctcaattgtgttttaaaaaaatctcttacagaaatctctacctcaggcactaagtgttatgacatgggtagcatattgatattgaaaacttagctaggacttccagccttttaagataatttaaatgtaaaattaaatggttaaccagcaatctaatgtcatgtggtgtgcagtttggatattgcatgaacagctaaggaatcacctgttctagtgccaaagatcactcattgctaattttgttctgtacagcttatgtaatattttcatggtggagacggactctgtgtgctcagggccttgtctctaggaagattttgtcaattccaaatacagttttgaagattcaaaaaaaat

SEQ ID NO: 299023 - DNA, 3484 bp, Homo sapiens
accgcctcttgtttttcccgcgaaactcggcggctgagcgtggaggttcttgtctcccctggtttgtgaagtgcggaaaaccagaggcgcagtcatgtcgggattcgacgatcctggcattttctacagcgacagcttcgggggcgacgcccaggccgacgaggggcaggcccgcaaatcgcagctgcagaggcgcttcaaggagttcctgcggcagtaccgagtgggcaccgaccgcacgggcttcaccttcaaatacagggatgaactcaagcggcattacaacctgggggagtactggattgaggtggagatggaggatctggccagctttgatgaggacctggccgactacttgtacaagcagccagccgagcacctgcagctgctggaggaagctgccaaggaggtagctgatgaggtgacccggccccggccttctggggaggaggtgctccaggacatccaggtcatgctcaagtcggacgccagcccttccagcattcgtagcctgaagtcggacatgatgtcacacctggtgaagatccctggcatcatcatcgcggcctctgcggtccgtgccaaggccacccgcatctctatccagtgccgcagctgccgcaacaccctcaccaacattgccatgcgccctggcctcgagggctatgccctgcccaggaagtgcaacacagatcaggctgggcgccccaaatgcccattggacccgtacttcatcatgcccgacaaatgcaaatgcgtggacttccagaccctgaagctgcaggagctgcctgatgcagtcccccacggggagatgcccagacacatgcagctctactgcgacaggtacctgtgtgacaaggtcgtccctgggaacagggttaccatcatgggcatctactccatcaagaagtttggcctgactaccagcaggggccgtgacagggtgggcgtgggcatccgaagctcctacatccgtgtcctgggcatccaggtggacacagatggctctggccgcagctttgctggggccgtgagcccccaggaggaggaggagttccgtcgcctggctgccctcccaaatgtctatgaggtcatctccaagagcatcgccccctccatctttgggggcacagacatgaagaaggccattgcctgcctgctctttgggggctcccgaaagaggctccctgatggacttactcgccgaggagacatcaacctgctgatgctaggggaccctgggacagccaagtcccagcttctgaagtttgtggagaagtgttctcccattggggtatacacgtctgggaaaggcagcagcgcagctggactgacagcctcggtgatgagggacccttcgtcccggaatttcatcatggagggcggagccatggtcctggccgatggtggggtcgtctgtattgacgagtttgacaagatgcgagaagatgaccgtgtggcaatccacgaagccatggagcagcagaccatctctatcgccaaggctgggatcaccaccaccctgaactcccgctgctccgtcctggctgctgccaactcagtgttcggccgctgggatgagacgaagggggaggacaacattgacttcatgcccaccatcttgtcgcgcttcgacatgatcttcatcgtcaaggatgagcacaatgaggagagggatgtgatgctggccaagcatgtcatcactctgcacgtgagcgcactgacacagacacaggctgtggagggcgagattgacctggccaagctgaagaagtttattgcctactgccgagtgaagtgtggcccccggctgtcagcagaggctgcagagaaactgaagaaccgctacatcatcatgcggagcggggcccgtcagcacgagagggacagtgaccgccgctccagcatccccatcactgtgcggcagctggaggccattgtgcgcatcgcggaagccctcagcaagatgaagctgcagcccttcgccacagaggcagatgtggaggaggccctgcggctcttccaagtgtccacgttggatgctgccttgtccggtaccctgtcaggggtggagggcttcaccagccaggaggaccaggagatgctgagccgcatcgagaagcagctcaagcgccgctttgccattggctcccaggtgtctgagcacagcatcatcaaggacttcaccaagcagaaatacccggagcacgccatccacaaggtgctgcagctcatgctgcggcgcggcgagatccagcatcgcatgcagcgcaaggttctctaccgcctcaagtgagtcgcgccgcctcactggactcatggactcgcccacgcctcgcccctcctgccgctgcctgccattgacaatgttgctgggacctctgcctccccactgcagccctcgaacttcccaggcaccctcctttctgccccagaggaaggagctgtagtgtcctgctgcctctgggcgcccgcctctagcgcggttctgggaagtgtgcttttggcatccgttaataataaagccacggtgtgttcaggtatctgtgggtttgtgcactcggtgacctgtcacctccatcgtgccctcatggcagggtaagtgtgagggaacagggtctggaggcagactggccagggtttctgacttggatctgccactcagacttctgggtaagtcacgtgacttgagtgctccggtttcttcatctgtttagcggggctcataaagccactcccttgatgctgggaatccagtgagaccagggagtggggaagcgcttctcaaagtgtgtgattttgatccgcctcacctgttccccagtaacttattggggggctgcgagccgtggtgcggcggtcagactgcctggattcatggaccctctccatgccttagtttccttatctgtaagcaggctgatactagaacctgcttcacagggttgtgcttagggtcagtgagcagctgttagtgaggggaatgtagtggccaccaggcaggaactaggactccagccagttctttcctggtgggccacgtgtaactgtgtggccttgggcgagacatttcacttttctgtgcctgagtttatcagtaaactggagatggggggattcctcaccctgagttgtgaggattgaatgacagaaggcactagtgacagtgatgctggaggaaggagtgttgccaagtgcctcggtcactttgcctaatttcagaaagtcactctgagttggtatgttttgtgtttttaaaaaagctaggattcataaaattaaatagaaatcagtgaaataaaatatttgatatttaaaatacatttagaaatacaaagtgtcaagcaaaacgtgaatttggaaatctatggaacattagataaggtatttaaaagtaattgccatgtaaaaatgacacgaacttgaagtaagattatttgatttttctaaaaatacaagaaagcttggtgcaaaaaaaagg

SEQ ID NO: 299024 - DNA, 3498 bp, Homo sapiens
  misc_feature (19)..(19): n is a, c, g, or t
caactgcatcgttgccgtncccgggataaggtagcgaggctcggcggctgagcgtggaggttcttgtctcccctggtttgtgaagtgcggaaaaccagaggcgcagtcatgtcgggattcgacgatcctggcattttctacagcgacagcttcgggggcgacgcccaggccgacgaggggcaggcccgcaaatcgcagctgcagaggcgcttcaaggagttcctgcggcagtaccgagtgggcaccgaccgcacgggcttcaccttcaaatacagggatgaactcaagcggcattacaacctgggggagtactggattgaggtggagatggaggatctggccagctttgatgaggacctggccgactacttgtacaagcagccagccgagcacctgcagctgctggaggaagctgccaaggaggtagctgatgaggtgacccggccccggccttctggggaggaggtgctccaggacatccaggtcatgctcaagtcggacgccagcccttccagcattcgtagcctgaagtcggacatgatgtcacacctggtgaagatccctggcatcatcatcgcggcctctgcggtccgtgccaaggccacccgcatctctatccagtgccgcagctgccgcaacaccctcaccaacattgccatgcgccctggcctcgagggctatgccctgcccaggaagtgcaacacagatcaggctgggcgccccaaatgcccattggacccgtacttcatcatgcccgacaaatgcaaatgcgtggacttccagaccctgaagctgcaggagctgcctgatgcagtcccccacggggagatgcccagacacatgcagctctactgcgacaggtacctgtgtgacaaggtcgtccctgggaacagggttaccatcatgggcatctactccatcaagaagtttggcctgactaccagcaggggccgtgacagggtgggcgtgggcatccgaagctcctacatccgtgtcctgggcatccaggtggacacagatggctctggccgcagctttgctggggccgtgagcccccaggaggaggaggagttccgtcgcctggctgccctcccaaatgtctatgaggtcatctccaagagcatcgccccctccatctttgggggcacagacatgaagaaggccattgcctgcctgctctttgggggctcccgaaagaggctccctgatggacttactcgccgaggagacatcaacctgctgatgctaggggaccctgggacagccaagtcccagcttctgaagtttgtggagaagtgttctcccattggggtatacacgtctgggaaaggcagcagcgcagctggactgacagcctcggtgatgagggacccttcgtcccggaatttcatcatggagggcggagccatggtcctggccgatggtggggtcgtctgtattgacgagtttgacaagatgcgagaagatgaccgtgtggcaatccacgaagccatggagcagcagaccatctctatcgccaaggctgggatcaccaccaccctgaactcccgctgctccgtcctggctgctgccaactcagtgttcggccgctgggatgagacgaagggggaggacaacattgacttcatgcccaccatcttgtcgcgcttcgacatgatcttcatcgtcaaggatgagcacaatgaggagagggatgtgatgctggccaagcatgtcatcactctgcacgtgagcgcactgacacagacacaggctgtggagggcgagattgacctggccaagctgaagaagtttattgcctactgccgagtgaagtgtggcccccggctgtcagcagaggctgcagagaaactgaagaaccgctacatcatcatgcggagcggggcccgtcagcacgagagggacagtgaccgccgctccagcatccccatcactgtgcggcagctggaggccattgtgcgcatcgcggaagccctcagcaagatgaagctgcagcccttcgccacagaggcagatgtggaggaggccctgcggctcttccaagtgtccacgttggatgctgccttgtccggtaccctgtcaggggtggagggcttcaccagccaggaggaccaggagatgctgagccgcatcgagaagcagctcaagcgccgctttgccattggctcccaggtgtctgagcacagcatcatcaaggacttcaccaagcagaaatacccggagcacgccatccacaaggtgctgcagctcatgctgcggcgcggcgagatccagcatcgcatgcagcgcaaggttctctaccgcctcaagtgagtcgcgccgcctcactggactcatggactcgcccacgcctcgcccctcctgccgctgcctgccattgacaatgttgctgggacctctgcctccccactgcagccctcgaacttcccaggcaccctcctttctgccccagaggaaggagctgtagtgtcctgctgcctctgggcgcccgcctctagcgcggttctgggaagtgtgcttttggcatccgttaataataaagccacggtgtgttcaggtatctgtgggtttgtgcactcggtgacctgtcacctccatcgtgccctcatggcagggtaagtgtgagggaacagggtctggaggcagactggccagggtttctgacttggatctgccactcagacttctgggtaagtcacgtgacttgagtgctccggtttcttcatctgtttagcggggctcataaagccactcccttgatgctgggaatccagtgagaccagggagtggggaagcgcttctcaaagtgtgtgattttgatccgcctcacctgttccccagtaacttattggggggctgcgagccgtggtgcggcggtcagactgcctggattcatggaccctctccatgccttagtttccttatctgtaagcaggctgatactagaacctgcttcacagggttgtgcttagggtcagtgagcagctgttagtgaggggaatgtagtggccaccaggcaggaactaggactccagccagttctttcctggtgggccacgtgtaactgtgtggccttgggcgagacatttcacttttctgtgcctgagtttatcagtaaactggagatggggggattcctcaccctgagttgtgaggattgaatgacagaaggcactagtgacagtgatgctggaggaaggagtgttgccaagtgcctcggtcactttgcctaatttcagaaagtcactctgagttggtatgttttgtgtttttaaaaaagctaggattcataaaattaaatagaaatcagtgaaataaaatatttgatatttaaaatacatttagaaatacaaagtgtcaagcaaaacgtgaatttggaaatctatggaacattagataaggtatttaaaagtaattgccatgtaaaaatgacacgaacttgaagtaagattatttgatttttctaaaaatacaagaaagcttggtgcaaaaaaaagg

SEQ ID NO: 299025 - DNA, 3458 bp, Homo sapiens
aaggctaggtacgaggcctgggtgttgctcccctggtttgtgaagtgcggaaaaccagaggcgcagtcatgtcgggattcgacgatcctggcattttctacagcgacagcttcgggggcgacgcccaggccgacgaggggcaggcccgcaaatcgcagctgcagaggcgcttcaaggagttcctgcggcagtaccgagtgggcaccgaccgcacgggcttcaccttcaaatacagggatgaactcaagcggcattacaacctgggggagtactggattgaggtggagatggaggatctggccagctttgatgaggacctggccgactacttgtacaagcagccagccgagcacctgcagctgctggaggaagctgccaaggaggtagctgatgaggtgacccggccccggccttctggggaggaggtgctccaggacatccaggtcatgctcaagtcggacgccagcccttccagcattcgtagcctgaagtcggacatgatgtcacacctggtgaagatccctggcatcatcatcgcggcctctgcggtccgtgccaaggccacccgcatctctatccagtgccgcagctgccgcaacaccctcaccaacattgccatgcgccctggcctcgagggctatgccctgcccaggaagtgcaacacagatcaggctgggcgccccaaatgcccattggacccgtacttcatcatgcccgacaaatgcaaatgcgtggacttccagaccctgaagctgcaggagctgcctgatgcagtcccccacggggagatgcccagacacatgcagctctactgcgacaggtacctgtgtgacaaggtcgtccctgggaacagggttaccatcatgggcatctactccatcaagaagtttggcctgactaccagcaggggccgtgacagggtgggcgtgggcatccgaagctcctacatccgtgtcctgggcatccaggtggacacagatggctctggccgcagctttgctggggccgtgagcccccaggaggaggaggagttccgtcgcctggctgccctcccaaatgtctatgaggtcatctccaagagcatcgccccctccatctttgggggcacagacatgaagaaggccattgcctgcctgctctttgggggctcccgaaagaggctccctgatggacttactcgccgaggagacatcaacctgctgatgctaggggaccctgggacagccaagtcccagcttctgaagtttgtggagaagtgttctcccattggggtatacacgtctgggaaaggcagcagcgcagctggactgacagcctcggtgatgagggacccttcgtcccggaatttcatcatggagggcggagccatggtcctggccgatggtggggtcgtctgtattgacgagtttgacaagatgcgagaagatgaccgtgtggcaatccacgaagccatggagcagcagaccatctctatcgccaaggctgggatcaccaccaccctgaactcccgctgctccgtcctggctgctgccaactcagtgttcggccgctgggatgagacgaagggggaggacaacattgacttcatgcccaccatcttgtcgcgcttcgacatgatcttcatcgtcaaggatgagcacaatgaggagagggatgtgatgctggccaagcatgtcatcactctgcacgtgagcgcactgacacagacacaggctgtggagggcgagattgacctggccaagctgaagaagtttattgcctactgccgagtgaagtgtggcccccggctgtcagcagaggctgcagagaaactgaagaaccgctacatcatcatgcggagcggggcccgtcagcacgagagggacagtgaccgccgctccagcatccccatcactgtgcggcagctggaggccattgtgcgcatcgcggaagccctcagcaagatgaagctgcagcccttcgccacagaggcagatgtggaggaggccctgcggctcttccaagtgtccacgttggatgctgccttgtccggtaccctgtcaggggtggagggcttcaccagccaggaggaccaggagatgctgagccgcatcgagaagcagctcaagcgccgctttgccattggctcccaggtgtctgagcacagcatcatcaaggacttcaccaagcagaaatacccggagcacgccatccacaaggtgctgcagctcatgctgcggcgcggcgagatccagcatcgcatgcagcgcaaggttctctaccgcctcaagtgagtcgcgccgcctcactggactcatggactcgcccacgcctcgcccctcctgccgctgcctgccattgacaatgttgctgggacctctgcctccccactgcagccctcgaacttcccaggcaccctcctttctgccccagaggaaggagctgtagtgtcctgctgcctctgggcgcccgcctctagcgcggttctgggaagtgtgcttttggcatccgttaataataaagccacggtgtgttcaggtatctgtgggtttgtgcactcggtgacctgtcacctccatcgtgccctcatggcagggtaagtgtgagggaacagggtctggaggcagactggccagggtttctgacttggatctgccactcagacttctgggtaagtcacgtgacttgagtgctccggtttcttcatctgtttagcggggctcataaagccactcccttgatgctgggaatccagtgagaccagggagtggggaagcgcttctcaaagtgtgtgattttgatccgcctcacctgttccccagtaacttattggggggctgcgagccgtggtgcggcggtcagactgcctggattcatggaccctctccatgccttagtttccttatctgtaagcaggctgatactagaacctgcttcacagggttgtgcttagggtcagtgagcagctgttagtgaggggaatgtagtggccaccaggcaggaactaggactccagccagttctttcctggtgggccacgtgtaactgtgtggccttgggcgagacatttcacttttctgtgcctgagtttatcagtaaactggagatggggggattcctcaccctgagttgtgaggattgaatgacagaaggcactagtgacagtgatgctggaggaaggagtgttgccaagtgcctcggtcactttgcctaatttcagaaagtcactctgagttggtatgttttgtgtttttaaaaaagctaggattcataaaattaaatagaaatcagtgaaataaaatatttgatatttaaaatacatttagaaatacaaagtgtcaagcaaaacgtgaatttggaaatctatggaacattagataaggtatttaaaagtaattgccatgtaaaaatgacacgaacttgaagtaagattatttgatttttctaaaaatacaagaaagcttggtgcaaaaaaaagg

SEQ ID NO: 299026 - DNA, 2645 bp, Homo sapiens
accgcctcttgtttttcccgcgaaactcggcggctgagcgtggaggttcttgtctcccctggtttgtgaagtgcggaaaaccagaggcgcagtcatgtcgggattcgacgatcctggcattttctacagcgacagcttcgggggcgacgcccaggccgacgaggggcaggcccgcaaatcgcagctgcagaggcgcttcaaggagttcctgcggcagtaccgagtgggcaccgaccgcacgggcttcaccttcaaatacagggatgaactcaagcggcattacaacctgggggagtactggattgaggtggagatggaggatctggccagctttgatgaggacctggccgactacttgtacaagcagccagccgagcacctgcagctgctggaggaagctgccaaggaggtagctgatgaggtgacccggccccggccttctggggaggaggtgctccaggacatccaggtcatgctcaagtcggacgccagcccttccagcattcgtagcctgaagtcggacatgatgtcacacctggtgaagatccctggcatcatcatcgcggcctctgcggtccgtgccaaggccacccgcatctctatccagtgccgcagctgccgcaacaccctcaccaacattgccatgcgccctggcctcgagggctatgccctgcccaggaagtgcaacacagatcaggctgggcgccccaaatgcccattggacccgtacttcatcatgcccgacaaatgcaaatgcgtggacttccagaccctgaagctgcaggagctgcctgatgcagtcccccacggggagatgcccagacacatgcagctctactgcgacaggtacctgtgtgacaaggtcgtccctgggaacagggttaccatcatgggcatctactccatcaagaagtttggcctgactaccagcaggggccgtgacagggtgggcgtgggcatccgaagctcctacatccgtgtcctgggcatccaggtggacacagatggctctggccgcagctttgctggggccgtgagcccccaggaggaggaggagttccgtcgcctggctgccctcccaaatgtctatgaggtcatctccaagagcatcgccccctccatctttgggggcacagacatgaagaaggccattgcctgcctgctctttgggggctcccgaaagaggctccctgatggacttactcgccgaggagacatcaacctgctgatgctaggggaccctgggacagccaagtcccagcttctgaagtttgtggagaagtgttctcccattggggtatacacgtctgggaaaggcagcagcgcagctggactgacagcctcggtgatgagggacccttcgtcccggaatttcatcatggagggcggagccatggtcctggccgatggtggggtcgtctgtattgacgagtttgacaagatgcgagaagatgaccgtgtggcaatccacgaagccatggagcagcagaccatctctatcgccaaggctgggatcaccaccaccctgaactcccgctgctccgtcctggctgctgccaactcagtgttcggccgctgggatgagacgaagggggaggacaacattgacttcatgcccaccatcttgtcgcgcttcgacatgatcttcatcgtcaaggatgagcacaatgaggagagggatgtgatgctggccaagcatgtcatcactctgcacgtgagcgcactgacacagacacaggctgtggagggcgagattgacctggccaagctgaagaagtttattgcctactgccgagtgaagtgtggcccccggctgtcagcagaggctgcagagaaactgaagaaccgctacatcatcatgcggagcggggcccgtcagcacgagagggacagtgaccgccgctccagcatccccatcactgtgcggcagctggaggccattgtgcgcatcgcggaagccctcagcaagatgaagctgcagcccttcgccacagaggcagatgtggaggaggccctgcggctcttccaagtgtccacgttggatgctgccttgtccggtaccctgtcaggggtggagggcttcaccagccaggaggaccaggagatgctgagccgcatcgagaagcagctcaagcgccgctttgccattggctcccaggtgtctgagcacagcatcatcaaggacttcaccaagcagaaatacccggagcacgccatccacaaggtgctgcagctcatgctgcggcgcggcgagatccagcatcgcatgcagcgcaaggttctctaccgcctcaagtgagtcgcgccgcctcactggactcatggactcgcccacgcctcgcccctcctgccgctgcctgccattgacaatgttgctgggacctctgcctccccactgcagccctcgaacttcccaggcaccctcctttctgccccagaggaaggagctgtagtgtcctgctgcctctgggcgcccgcctctagcgcggttctgggaagtgtgcttttggcatccgttaatataagcccgggggtcaggtcacaccccacaaaaattcggggcctttcgcggggacaaggttagggcacgtgcaagtccgccccttttccagggaatccgcccaaggcatataaggcaccccaga

SEQ ID NO: 299027 - DNA, 3457 bp, Homo sapiens
aggggaggaggtgccaggcgctgcccccagcctgttctggccgtttgttcccaccccaggcgcagtcatgtcgggattcgacgatcctggcattttctacagcgacagcttcgggggcgacgcccaggccgacgaggggcaggcccgcaaatcgcagctgcagaggcgcttcaaggagttcctgcggcagtaccgagtgggcaccgaccgcacgggcttcaccttcaaatacagggatgaactcaagcggcattacaacctgggggagtactggattgaggtggagatggaggatctggccagctttgatgaggacctggccgactacttgtacaagcagccagccgagcacctgcagctgctggaggaagctgccaaggaggtagctgatgaggtgacccggccccggccttctggggaggaggtgctccaggacatccaggtcatgctcaagtcggacgccagcccttccagcattcgtagcctgaagtcggacatgatgtcacacctggtgaagatccctggcatcatcatcgcggcctctgcggtccgtgccaaggccacccgcatctctatccagtgccgcagctgccgcaacaccctcaccaacattgccatgcgccctggcctcgagggctatgccctgcccaggaagtgcaacacagatcaggctgggcgccccaaatgcccattggacccgtacttcatcatgcccgacaaatgcaaatgcgtggacttccagaccctgaagctgcaggagctgcctgatgcagtcccccacggggagatgcccagacacatgcagctctactgcgacaggtacctgtgtgacaaggtcgtccctgggaacagggttaccatcatgggcatctactccatcaagaagtttggcctgactaccagcaggggccgtgacagggtgggcgtgggcatccgaagctcctacatccgtgtcctgggcatccaggtggacacagatggctctggccgcagctttgctggggccgtgagcccccaggaggaggaggagttccgtcgcctggctgccctcccaaatgtctatgaggtcatctccaagagcatcgccccctccatctttgggggcacagacatgaagaaggccattgcctgcctgctctttgggggctcccgaaagaggctccctgatggacttactcgccgaggagacatcaacctgctgatgctaggggaccctgggacagccaagtcccagcttctgaagtttgtggagaagtgttctcccattggggtatacacgtctgggaaaggcagcagcgcagctggactgacagcctcggtgatgagggacccttcgtcccggaatttcatcatggagggcggagccatggtcctggccgatggtggggtcgtctgtattgacgagtttgacaagatgcgagaagatgaccgtgtggcaatccacgaagccatggagcagcagaccatctctatcgccaaggctgggatcaccaccaccctgaactcccgctgctccgtcctggctgctgccaactcagtgttcggccgctgggatgagacgaagggggaggacaacattgacttcatgcccaccatcttgtcgcgcttcgacatgatcttcatcgtcaaggatgagcacaatgaggagagggatgtgatgctggccaagcatgtcatcactctgcacgtgagcgcactgacacagacacaggctgtggagggcgagattgacctggccaagctgaagaagtttattgcctactgccgagtgaagtgtggcccccggctgtcagcagaggctgcagagaaactgaagaaccgctacatcatcatgcggagcggggcccgtcagcacgagagggacagtgaccgccgctccagcatccccatcactgtgcggcagctggaggccattgtgcgcatcgcggaagccctcagcaagatgaagctgcagcccttcgccacagaggcagatgtggaggaggccctgcggctcttccaagtgtccacgttggatgctgccttgtccggtaccctgtcaggggtggagggcttcaccagccaggaggaccaggagatgctgagccgcatcgagaagcagctcaagcgccgctttgccattggctcccaggtgtctgagcacagcatcatcaaggacttcaccaagcagaaatacccggagcacgccatccacaaggtgctgcagctcatgctgcggcgcggcgagatccagcatcgcatgcagcgcaaggttctctaccgcctcaagtgagtcgcgccgcctcactggactcatggactcgcccacgcctcgcccctcctgccgctgcctgccattgacaatgttgctgggacctctgcctccccactgcagccctcgaacttcccaggcaccctcctttctgccccagaggaaggagctgtagtgtcctgctgcctctgggcgcccgcctctagcgcggttctgggaagtgtgcttttggcatccgttaataataaagccacggtgtgttcaggtatctgtgggtttgtgcactcggtgacctgtcacctccatcgtgccctcatggcagggtaagtgtgagggaacagggtctggaggcagactggccagggtttctgacttggatctgccactcagacttctgggtaagtcacgtgacttgagtgctccggtttcttcatctgtttagcggggctcataaagccactcccttgatgctgggaatccagtgagaccagggagtggggaagcgcttctcaaagtgtgtgattttgatccgcctcacctgttccccagtaacttattggggggctgcgagccgtggtgcggcggtcagactgcctggattcatggaccctctccatgccttagtttccttatctgtaagcaggctgatactagaacctgcttcacagggttgtgcttagggtcagtgagcagctgttagtgaggggaatgtagtggccaccaggcaggaactaggactccagccagttctttcctggtgggccacgtgtaactgtgtggccttgggcgagacatttcacttttctgtgcctgagtttatcagtaaactggagatggggggattcctcaccctgagttgtgaggattgaatgacagaaggcactagtgacagtgatgctggaggaaggagtgttgccaagtgcctcggtcactttgcctaatttcagaaagtcactctgagttggtatgttttgtgtttttaaaaaagctaggattcataaaattaaatagaaatcagtgaaataaaatatttgatatttaaaatacatttagaaatacaaagtgtcaagcaaaacgtgaatttggaaatctatggaacattagataaggtatttaaaagtaattgccatgtaaaaatgacacgaacttgaagtaagattatttgatttttctaaaaatacaagaaagcttggtgcaaaaaaaagg

SEQ ID NO: 299028 - DNA, 3580 bp, Homo sapiens
accgcctcttgtttttcccgcgaaactcggcggctgagcgtggaggttcttgtctcccctggtttgtgaagtgcggaaaaccagaggcgcagtcatgtcgggattcgacgatcctggcattttctacagcgacagcttcgggggcgacgcccaggccgacgaggggcaggcccgcaaatcgcagctgcagaggcgcttcaaggagttcctgcggcagtaccgagtgggcaccgaccgcacgggcttcaccttcaaatacagtcttgcaccttcattgattgagcacctgctgcctgccagatactgttctgggtgctgggctgcagcactgaagctggacctggctcctgcttctagggatgaactcaagcggcattacaacctgggggagtactggattgaggtggagatggaggatctggccagctttgatgaggacctggccgactacttgtacaagcagccagccgagcacctgcagctgctggaggaagctgccaaggaggtagctgatgaggtgacccggccccggccttctggggaggaggtgctccaggacatccaggtcatgctcaagtcggacgccagcccttccagcattcgtagcctgaagtcggacatgatgtcacacctggtgaagatccctggcatcatcatcgcggcctctgcggtccgtgccaaggccacccgcatctctatccagtgccgcagctgccgcaacaccctcaccaacattgccatgcgccctggcctcgagggctatgccctgcccaggaagtgcaacacagatcaggctgggcgccccaaatgcccattggacccgtacttcatcatgcccgacaaatgcaaatgcgtggacttccagaccctgaagctgcaggagctgcctgatgcagtcccccacggggagatgcccagacacatgcagctctactgcgacaggtacctgtgtgacaaggtcgtccctgggaacagggttaccatcatgggcatctactccatcaagaagtttggcctgactaccagcaggggccgtgacagggtgggcgtgggcatccgaagctcctacatccgtgtcctgggcatccaggtggacacagatggctctggccgcagctttgctggggccgtgagcccccaggaggaggaggagttccgtcgcctggctgccctcccaaatgtctatgaggtcatctccaagagcatcgccccctccatctttgggggcacagacatgaagaaggccattgcctgcctgctctttgggggctcccgaaagaggctccctgatggacttactcgccgaggagacatcaacctgctgatgctaggggaccctgggacagccaagtcccagcttctgaagtttgtggagaagtgttctcccattggggtatacacgtctgggaaaggcagcagcgcagctggactgacagcctcggtgatgagggacccttcgtcccggaatttcatcatggagggcggagccatggtcctggccgatggtggggtcgtctgtattgacgagtttgacaagatgcgagaagatgaccgtgtggcaatccacgaagccatggagcagcagaccatctctatcgccaaggctgggatcaccaccaccctgaactcccgctgctccgtcctggctgctgccaactcagtgttcggccgctgggatgagacgaagggggaggacaacattgacttcatgcccaccatcttgtcgcgcttcgacatgatcttcatcgtcaaggatgagcacaatgaggagagggatgtgatgctggccaagcatgtcatcactctgcacgtgagcgcactgacacagacacaggctgtggagggcgagattgacctggccaagctgaagaagtttattgcctactgccgagtgaagtgtggcccccggctgtcagcagaggctgcagagaaactgaagaaccgctacatcatcatgcggagcggggcccgtcagcacgagagggacagtgaccgccgctccagcatccccatcactgtgcggcagctggaggccattgtgcgcatcgcggaagccctcagcaagatgaagctgcagcccttcgccacagaggcagatgtggaggaggccctgcggctcttccaagtgtccacgttggatgctgccttgtccggtaccctgtcaggggtggagggcttcaccagccaggaggaccaggagatgctgagccgcatcgagaagcagctcaagcgccgctttgccattggctcccaggtgtctgagcacagcatcatcaaggacttcaccaagcagaaatacccggagcacgccatccacaaggtgctgcagctcatgctgcggcgcggcgagatccagcatcgcatgcagcgcaaggttctctaccgcctcaagtgagtcgcgccgcctcactggactcatggactcgcccacgcctcgcccctcctgccgctgcctgccattgacaatgttgctgggacctctgcctccccactgcagccctcgaacttcccaggcaccctcctttctgccccagaggaaggagctgtagtgtcctgctgcctctgggcgcccgcctctagcgcggttctgggaagtgtgcttttggcatccgttaataataaagccacggtgtgttcaggtatctgtgggtttgtgcactcggtgacctgtcacctccatcgtgccctcatggcagggtaagtgtgagggaacagggtctggaggcagactggccagggtttctgacttggatctgccactcagacttctgggtaagtcacgtgacttgagtgctccggtttcttcatctgtttagcggggctcataaagccactcccttgatgctgggaatccagtgagaccagggagtggggaagcgcttctcaaagtgtgtgattttgatccgcctcacctgttccccagtaacttattggggggctgcgagccgtggtgcggcggtcagactgcctggattcatggaccctctccatgccttagtttccttatctgtaagcaggctgatactagaacctgcttcacagggttgtgcttagggtcagtgagcagctgttagtgaggggaatgtagtggccaccaggcaggaactaggactccagccagttctttcctggtgggccacgtgtaactgtgtggccttgggcgagacatttcacttttctgtgcctgagtttatcagtaaactggagatggggggattcctcaccctgagttgtgaggattgaatgacagaaggcactagtgacagtgatgctggaggaaggagtgttgccaagtgcctcggtcactttgcctaatttcagaaagtcactctgagttggtatgttttgtgtttttaaaaaagctaggattcataaaattaaatagaaatcagtgaaataaaatatttgatatttaaaatacatttagaaatacaaagtgtcaagcaaaacgtgaatttggaaatctatggaacattagataaggtatttaaaagtaattgccatgtaaaaatgacacgaacttgaagtaagattatttgatttttctaaaaatacaagaaagcttggtgcaaaaaaaagg

SEQ ID NO: 299029 - DNA, 3316 bp, Homo sapiens
accgcctcttgtttttcccgcgaaactcggcggctgagcgtggaggttcttgtctcccctggtttgtgaagtgcggaaaaccagaggcgcagtcatgtcgggattcgacgatcctggcattttctacagcgacagcttcgggggcgacgcccaggccgacgaggggcaggcccgcaaatcgcagtacttgtacaagcagccagccgagcacctgcagctgctggaggaagctgccaaggaggtagctgatgaggtgacccggccccggccttctggggaggaggtgctccaggacatccaggtcatgctcaagtcggacgccagcccttccagcattcgtagcctgaagtcggacatgatgtcacacctggtgaagatccctggcatcatcatcgcggcctctgcggtccgtgccaaggccacccgcatctctatccagtgccgcagctgccgcaacaccctcaccaacattgccatgcgccctggcctcgagggctatgccctgcccaggaagtgcaacacagatcaggctgggcgccccaaatgcccattggacccgtacttcatcatgcccgacaaatgcaaatgcgtggacttccagaccctgaagctgcaggagctgcctgatgcagtcccccacggggagatgcccagacacatgcagctctactgcgacaggtacctgtgtgacaaggtcgtccctgggaacagggttaccatcatgggcatctactccatcaagaagtttggcctgactaccagcaggggccgtgacagggtgggcgtgggcatccgaagctcctacatccgtgtcctgggcatccaggtggacacagatggctctggccgcagctttgctggggccgtgagcccccaggaggaggaggagttccgtcgcctggctgccctcccaaatgtctatgaggtcatctccaagagcatcgccccctccatctttgggggcacagacatgaagaaggccattgcctgcctgctctttgggggctcccgaaagaggctccctgatggacttactcgccgaggagacatcaacctgctgatgctaggggaccctgggacagccaagtcccagcttctgaagtttgtggagaagtgttctcccattggggtatacacgtctgggaaaggcagcagcgcagctggactgacagcctcggtgatgagggacccttcgtcccggaatttcatcatggagggcggagccatggtcctggccgatggtggggtcgtctgtattgacgagtttgacaagatgcgagaagatgaccgtgtggcaatccacgaagccatggagcagcagaccatctctatcgccaaggctgggatcaccaccaccctgaactcccgctgctccgtcctggctgctgccaactcagtgttcggccgctgggatgagacgaagggggaggacaacattgacttcatgcccaccatcttgtcgcgcttcgacatgatcttcatcgtcaaggatgagcacaatgaggagagggatgtgatgctggccaagcatgtcatcactctgcacgtgagcgcactgacacagacacaggctgtggagggcgagattgacctggccaagctgaagaagtttattgcctactgccgagtgaagtgtggcccccggctgtcagcagaggctgcagagaaactgaagaaccgctacatcatcatgcggagcggggcccgtcagcacgagagggacagtgaccgccgctccagcatccccatcactgtgcggcagctggaggccattgtgcgcatcgcggaagccctcagcaagatgaagctgcagcccttcgccacagaggcagatgtggaggaggccctgcggctcttccaagtgtccacgttggatgctgccttgtccggtaccctgtcaggggtggagggcttcaccagccaggaggaccaggagatgctgagccgcatcgagaagcagctcaagcgccgctttgccattggctcccaggtgtctgagcacagcatcatcaaggacttcaccaagcagaaatacccggagcacgccatccacaaggtgctgcagctcatgctgcggcgcggcgagatccagcatcgcatgcagcgcaaggttctctaccgcctcaagtgagtcgcgccgcctcactggactcatggactcgcccacgcctcgcccctcctgccgctgcctgccattgacaatgttgctgggacctctgcctccccactgcagccctcgaacttcccaggcaccctcctttctgccccagaggaaggagctgtagtgtcctgctgcctctgggcgcccgcctctagcgcggttctgggaagtgtgcttttggcatccgttaataataaagccacggtgtgttcaggtatctgtgggtttgtgcactcggtgacctgtcacctccatcgtgccctcatggcagggtaagtgtgagggaacagggtctggaggcagactggccagggtttctgacttggatctgccactcagacttctgggtaagtcacgtgacttgagtgctccggtttcttcatctgtttagcggggctcataaagccactcccttgatgctgggaatccagtgagaccagggagtggggaagcgcttctcaaagtgtgtgattttgatccgcctcacctgttccccagtaacttattggggggctgcgagccgtggtgcggcggtcagactgcctggattcatggaccctctccatgccttagtttccttatctgtaagcaggctgatactagaacctgcttcacagggttgtgcttagggtcagtgagcagctgttagtgaggggaatgtagtggccaccaggcaggaactaggactccagccagttctttcctggtgggccacgtgtaactgtgtggccttgggcgagacatttcacttttctgtgcctgagtttatcagtaaactggagatggggggattcctcaccctgagttgtgaggattgaatgacagaaggcactagtgacagtgatgctggaggaaggagtgttgccaagtgcctcggtcactttgcctaatttcagaaagtcactctgagttggtatgttttgtgtttttaaaaaagctaggattcataaaattaaatagaaatcagtgaaataaaatatttgatatttaaaatacatttagaaatacaaagtgtcaagcaaaacgtgaatttggaaatctatggaacattagataaggtatttaaaagtaattgccatgtaaaaatgacacgaacttgaagtaagattatttgatttttctaaaaatacaagaaagcttggtgcaaaaaaaagg

SEQ ID NO: 299030 - DNA, 2436 bp, Homo sapiens
accgcctcttgtttttcccgcgaaactcggcggctgagcgtggaggttcttgtctcccctggtttgtgaagtgcggaaaaccagaggcgcagtcatgtcgggattcgacgatcctggcattttctacagcgacagcttcgggggcgacgcccaggccgacgaggggcaggcccgcaaatcgcagctgcagaggcgcttcaaggagttcctgcggcagtaccgagtgggcaccgaccgcacgggcttcaccttcaaatacagggatgaactcaagcggcattacaacctgggggagtactggattgaggtggagatggaggatctggccagctttgatgaggacctggccgactacttgtacaagcagccagccgagcacctgcagctgctggaggaagctgccaaggaggtagctgatgaggtgacccggccccggccttctggggaggaggtgctccaggacatccaggtcatgctcaagtcggacgccagcccttccagcattcgtagcctgaagtcggacatgatgtcacacctggtgaagatccctggcatcatcatcgcggcctctgcggtccgtgccaaggccacccgcatctctatccagtgccgcagctgccgcaacaccctcaccaacattgccatgcgccctggcctcgagggctatgccctgcccaggaagtgcaacacagatcaggctgggcgccccaaatgcccattggacccgtacttcatcatgcccgacaaatgcaaatgcgtggacttccagaccctgaagctgcaggagctgcctgatgcagtcccccacggggagatgcccagacacatgcagctctactgcgacaggtacctgtgtgacaaggtcgtccctgggaacagggttaccatcatgggcatctactccatcaagaagtttggcctgactaccagcaggggccgtgacagggtgggcgtgggcatccgaagctcctacatccgtgtcctgggcatccaggtggacacagatggctctggccgcagctttgctggggccgtgagcccccaggaggaggaggagttccgtcgcctggctgccctcccaaatgtctatgaggtcatctccaagagcatcgccccctccatctttgggggcacagacatgaagaaggccattgcctgcctgctctttgggggctcccgaaagaggctccctgatggacttactcgccgaggagacatcaacctgctgatgctaggggaccctgggacagccaagtcccagcttctgaagtttgtggagaagtgttctcccattggggtatacacgtctgggaaaggcagcagcgcagctggactgacagcctcggtgatgagggacccttcgtcccggaatttcatcatggagggcggagccatggtcctggccgatggtggggtcgtctgtattgacgagtttgacaagatgcgagaagatgaccgtgtggcaatccacgaagccatggagcagcagaccatctctatcgccaaggctgggatcaccaccaccctgaactcccgctgctccgtcctggctgctgccaactcagtgttcggccgctgggatgagacgaagggggaggacaacattgacttcatgcccaccatcttgtcgcgcttcgacatgatcttcatcgtcaaggatgagcacaatgaggagagggatgtgatgctggccaagcatgtcatcactctgcacgtgagcgcactgacacagacacaggctgtggagggcgagattgacctggccaagctgaagaagtttattgcctactgccgagtgaagtgtggcccccggctgtcagcagaggctgcagagaaactgaagaaccgctacatcatcatgcggagcggggcccgtcagcacgagagggacagtgaccgccgctccagcatccccatcactgtgcggcagctggaggccattgtgcgcatcgcggaagccctcagcaagatgaagctgcagcccttcgccacagaggcagatgtggaggaggccctgcggctcttccaagtgtccacgttggatgctgccttgtccggtaccctgtcaggggtggagggcttcaccagccaggaggaccaggagatgctgagccgcatcgagaagcagctcaagcgccgctttgccattggctcccaggtgtctgagcacagcatcatcaaggacttcaccaagcagggggccctccttccagaaacaccctgcctgcttctggtggtataatagaggacactcagcatggcaccctctcactttatgcctggtgatgggcctgatctgtcgggtcagtgcctttccccagaaggaacgtggtggcatttgttgattcatccgtttgtgtcatggagataatgaccgtacctacaataaagggcgaggtgagcattaaatgcatgaatgtatgcagagctcttaga

SEQ ID NO: 299031 - DNA, 3042 bp, Homo sapiens
accgcctcttgtttttcccgcgaaactcggcggctgagcgtggaggttcttgtctcccctggtttgtgaagtgcggaaaaccagaggcgcagtcatgtcgggattcgacgatcctggcattttctacagcgacagcttcgggggcgacgcccaggccgacgaggggcaggcccgcaaatcgcagctgcagaggcgcttcaaggagttcctgcggcagtaccgagtgggcaccgaccgcacgggcttcaccttcaaatacagggatgaactcaagcggcattacaacctgggggagtactggattgaggtggagatggaggatctggccagctttgatgaggacctggccgactacttgtacaagcagccagccgagcacctgcagctgctggaggaagctgccaaggaggtagctgatgaggtgacccggccccggccttctggggaggaggtgctccaggacatccaggtcatgctcaagtcggacgccagcccttccagcattcgtagcctgaagtcggacatgatgtcacacctggtgaagatccctggcatcatcatcgcggcctctgcggtccgtgccaaggccacccgcatctctatccagtgccgcagctgccgcaacaccctcaccaacattgccatgcgccctggcctcgagggctatgccctgcccaggaagtgcaacacagatcaggctgggcgccccaaatgcccattggacccgtacttcatcatgcccgacaaatgcaaatgcgtggacttccagaccctgaagctgcaggagctgcctgatgcagtcccccacggggagatgcccagacacatgcagctctactgcgacaggtacctgtgtgacaaggtcgtccctgggaacagggttaccatcatgggcatctactccatcaagaagtttggcctgactaccagcaggggccgtgacagggtgggcgtgggcatccgaagctcctacatccgtgtcctgggcatccaggtggacacagatggctctggccgcagctttgctggggccgtgagcccccaggaggaggaggagttccgtcgcctggctgccctcccaaatgtctatgaggtcatctccaagagcatcgccccctccatctttgggggcacagacatgaagaaggccattgcctgcctgctctttgggggctcccgaaagaggctccctgatggacttactcgccgaggagacatcaacctgctgatgctaggggaccctgggacagccaagtcccagcttctgaagtttgtggagaagtgttctcccattggggtatacacgtctgggaaaggcagcagcgcagctggactgacagcctcggtgatgagggacccttcgtcccggaatttcatcatggagggcggagccatggtcctggccgatggtggggtcgtctgtattgacgagtttgacaagatgcgagaagatgaccgtgtggcaatccacgaagccatggagcagcagaccatctctatcgccaaggctgggatcaccaccaccctgaactcccgctgctccgtcctggctgctgccaactcagtgttcggccgctgggatgagacgaagggggaggacaacattgacttcatgcccaccatcttgtcgcgcttcgacatgatcttcatcgtcaaggatgagcacaatgaggagagggatgtgatgctggccaagcatgtcatcactctgcacgtgagcgcactgacacagacacaggctgtggagggcgagattgacctggccaagctgaagaagtttattgcctactgccgagtgaagtgtggcccccggctgtcagcagaggctgcagagaaactgaagaaccgctacatcatcatgcggagcggggcccgtcagcacgagagggacagtgaccgccgctccagcatccccatcactgtgcggcagctggaggccattgtgcgcatcgcggaagcccctcgaacttcccaggcaccctcctttctgccccagaggaaggagctgtagtgtcctgctgcctctgggcgcccgcctctagcgcggttctgggaagtgtgcttttggcatccgttaataataaagccacggtgtgttcaggtatctgtgggtttgtgcactcggtgacctgtcacctccatcgtgccctcatggcagggtaagtgtgagggaacagggtctggaggcagactggccagggtttctgacttggatctgccactcagacttctgggtaagtcacgtgacttgagtgctccggtttcttcatctgtttagcggggctcataaagccactcccttgatgctgggaatccagtgagaccagggagtggggaagcgcttctcaaagtgtgtgattttgatccgcctcacctgttccccagtaacttattggggggctgcgagccgtggtgcggcggtcagactgcctggattcatggaccctctccatgccttagtttccttatctgtaagcaggctgatactagaacctgcttcacagggttgtgcttagggtcagtgagcagctgttagtgaggggaatgtagtggccaccaggcaggaactaggactccagccagttctttcctggtgggccacgtgtaactgtgtggccttgggcgagacatttcacttttctgtgcctgagtttatcagtaaactggagatggggggattcctcaccctgagttgtgaggattgaatgacagaaggcactagtgacagtgatgctggaggaaggagtgttgccaagtgcctcggtcactttgcctaatttcagaaagtcactctgagttggtatgttttgtgtttttaaaaaagctaggattcataaaattaaatagaaatcagtgaaataaaatatttgatatttaaaatacatttagaaatacaaagtgtcaagcaaaacgtgaatttggaaatctatggaacattagataaggtatttaaaagtaattgccatgtaaaaatgacacgaacttgaagtaagattatttgatttttctaaaaatacaagaaagcttggtgcaaaaaaaagg

SEQ ID NO: 299032 - DNA, 2171 bp, Homo sapiens
accgcctcttgtttttcccgcgaaactcggcggctgagcgtggaggttcttgtctcccctggtttgtgaagtgcggaaaaccagaggcgcagtcatgtcgggattcgacgatcctggcattttctacagcgacagcttcgggggcgacgcccaggccgacgaggggcaggcccgcaaatcgcagctgcagaggcgcttcaaggagttcctgcggcagtaccgagtgggcaccgaccgcacgggcttcaccttcaaatacagggatgaactcaagcggcattacaacctgggggagtactggattgaggtggagatggaggatctggccagctttgatgaggacctggccgactacttgtacaagcagccagccgagcacctgcagctgctggaggaagctgccaaggaggtagctgatgaggtgacccggccccggccttctggggaggaggtgctccaggacatccaggtcatgctcaagtcggacgccagcccttccagcattcgtagcctgaagtcggacatgatgtcacacctggtgaagatccctggcatcatcatcgcggcctctgcggtccgtgccaaggccacccgcatctctatccagtgccgcagctgccgcaacaccctcaccaacattgccatgcgccctggcctcgagggctatgccctgcccaggaagtgcaacacagatcaggctgggcgccccaaatgcccattggacccgtacttcatcatgcccgacaaatgcaaatgcgtggacttccagaccctgaagctgcaggagctgcctgatgcagtcccccacggggagatgcccagacacatgcagctctactgcgacaggtacctgtgtgacaaggtcgtccctgggaacagggttaccatcatgggcatctactccatcaagaagtttggcctgactaccagcaggggccgtgacagggtgggcgtgggcatccgaagctcctacatccgtgtcctgggcatccaggtggacacagatggctctggccgcagctttgctggggccgtgagcccccaggaggaggaggagttccgtcgcctggctgccctcccaaatgtctatgaggtcatctccaagagcatcgccccctccatctttgggggcacagacatgaagaaggccattgcctgcctgctctttgggggctcccgaaagaggctccctgatggacttactcgccgaggagacatcaacctgctgatgctaggggaccctgggacagccaagtcccagcttctgaagtttgtggagaagtgttctcccattggggtatacacgtctgggaaaggcagcagcgcagctggactgacagcctcggtgatgagggacccttcgtcccggaatttcatcatggagggcggagccatggtcctggccgatggtggggtcgtctgtattgacgagtttgacaagatgcgagaagatgaccgtgtggcaatccacgaagccatggagcagcagaccatctctatcgccaaggctgggatcaccaccaccctgaactcccgctgctccgtcctggctgctgccaactcagtgttcggccgctgggatgagacgaagggggaggacaacattgacttcatgcccaccatcttgtcgcgcttcgacatgatcttcatcgtcaaggatgagcacaatgaggagagggatgtgatgctggccaagcatgtcatcactctgcacgtgagcgcactgacacagacacaggctgtggagggcgagattgacctggccaagctgaagaagtttattgcctactgccgagtgaagtgtggcccccggctgtcagcagaggctgcagagaaactgaagaaccgctacatcatcatgcggagcggggcccgtcagcacgagagggacagtgaccgccgctccagcatccccatcactgtgcggcagctggaggccattgtgcgcatcgcggaagccctcagcaagatgaagctgcagcccttcgccacagaggcagatgtggaggaggccctgcggctcttccaagtgtccacgttggatgctgccttgtccggtaccctgtcaggggtggagggcttcaccagccaggaggaccaggagatgctgtgctcagacacctgggagccaatggcaaagcggcgcttgagctgcttctcgatgcggctca

SEQ ID NO: 299033 - DNA, 3006 bp, Homo sapiens
cacacagtgagctgacagcagacacgtggagatggggcttttggagggctctgtgggctggcactaagcctcctaaaccagcgtacaaatgagttagcgagttcagcgagagtcaggccaccacctgcctttctgtttggctgtcactgtgggcaacaccatcctccaagcagctgagcatgggctgagtgacgtggggagagaggccgttctctgggctccgtggggctggagccagctcagcatgtggtgcctgtggcaaaaatgctgcagtggaccctgcgtgtcctgggcatgggtggaatcagagacttgctgtccaagtcagaatctcagcttttctcctttctcctctaccctcctctcaggtacctgtgtgacaaggtcgtccctgggaacagggttaccatcatgggcatctactccatcaagaagtttggcctgactaccagcaggggccgtgacagggtgggcgtgggcatccgaagctcctacatccgtgtcctgggcatccaggtggacacagatggctctggccgcagctttgctggggccgtgagcccccaggaggaggaggagttccgtcgcctggctgccctcccaaatgtctatgaggtcatctccaagagcatcgccccctccatctttgggggcacagacatgaagaaggccattgcctgcctgctctttgggggctcccgaaagaggctccctgatggacttactcgccgaggagacatcaacctgctgatgctaggggaccctgggacagccaagtcccagcttctgaagtttgtggagaagtgttctcccattggggtatacacgtctgggaaaggcagcagcgcagctggactgacagcctcggtgatgagggacccttcgtcccggaatttcatcatggagggcggagccatggtcctggccgatggtggggtcgtctgtattgacgagtttgacaagatgcgagaagatgaccgtgtggcaatccacgaagccatggagcagcagaccatctctatcgccaaggctgggatcaccaccaccctgaactcccgctgctccgtcctggctgctgccaactcagtgttcggccgctgggatgagacgaagggggaggacaacattgacttcatgcccaccatcttgtcgcgcttcgacatgatcttcatcgtcaaggatgagcacaatgaggagagggatgtgatgctggccaagcatgtcatcactctgcacgtgagcgcactgacacagacacaggctgtggagggcgagattgacctggccaagctgaagaagtttattgcctactgccgagtgaagtgtggcccccggctgtcagcagaggctgcagagaaactgaagaaccgctacatcatcatgcggagcggggcccgtcagcacgagagggacagtgaccgccgctccagcatccccatcactgtgcggcagctggaggccattgtgcgcatcgcggaagccctcagcaagatgaagctgcagcccttcgccacagaggcagatgtggaggaggccctgcggctcttccaagtgtccacgttggatgctgccttgtccggtaccctgtcaggggtggagggcttcaccagccaggaggaccaggagatgctgagccgcatcgagaagcagctcaagcgccgctttgccattggctcccaggtgtctgagcacagcatcatcaaggacttcaccaagcagaaatacccggagcacgccatccacaaggtgctgcagctcatgctgcggcgcggcgagatccagcatcgcatgcagcgcaaggttctctaccgcctcaagtgagtcgcgccgcctcactggactcatggactcgcccacgcctcgcccctcctgccgctgcctgccattgacaatgttgctgggacctctgcctccccactgcagccctcgaacttcccaggcaccctcctttctgccccagaggaaggagctgtagtgtcctgctgcctctgggcgcccgcctctagcgcggttctgggaagtgtgcttttggcatccgttaataataaagccacggtgtgttcaggtatctgtgggtttgtgcactcggtgacctgtcacctccatcgtgccctcatggcagggtaagtgtgagggaacagggtctggaggcagactggccagggtttctgacttggatctgccactcagacttctgggtaagtcacgtgacttgagtgctccggtttcttcatctgtttagcggggctcataaagccactcccttgatgctgggaatccagtgagaccagggagtggggaagcgcttctcaaagtgtgtgattttgatccgcctcacctgttccccagtaacttattggggggctgcgagccgtggtgcggcggtcagactgcctggattcatggaccctctccatgccttagtttccttatctgtaagcaggctgatactagaacctgcttcacagggttgtgcttagggtcagtgagcagctgttagtgaggggaatgtagtggccaccaggcaggaactaggactccagccagttctttcctggtgggccacgtgtaactgtgtggccttgggcgagacatttcacttttctgtgcctgagtttatcagtaaactggagatggggggattcctcaccctgagttgtgaggattgaatgacagaaggcactagtgacagtgatgctggaggaaggagtgttgccaagtgcctcggtcactttgcctaatttcagaaagtcactctgagttggtatgttttgtgtttttaaaaaagctaggattcataaaattaaatagaaatcagtgaaataaaatatttgatatttaaaatacatttagaaatacaaagtgtcaagcaaaacgtgaatttggaaatctatggaacattagataaggtatttaaaagtaattgccatgtaaaaatgacacgaacttgaagtaagattatttgatttttctaaaaatacaagaaagcttggtgcaaaaaaaagg

SEQ ID NO: 299034 - DNA, 1482 bp, Homo sapiens
  misc_feature (1200)..(1200): n is a, c, g, or t
  misc_feature (1203)..(1203): n is a, c, g, or t
  misc_feature (1232)..(1232): n is a, c, g, or t
  misc_feature (1261)..(1261): n is a, c, g, or t
accgcctcttgtttttcccgcgaaactcggcggctgagcgtggaggttcttgtctcccctggtttgtgaagtgcggaaaaccagaggcgcagtcatgtcgggattcgacgatcctggcattttctacagcgacagcttcgggggcgacgcccaggccgacgaggggcaggcccgcaaatcgcagctgcagaggcgcttcaaggagttcctgcggcagtaccgagtgggcaccgaccgcacgggcttcaccttcaaatacagggatgaactcaagcggcattacaacctgggggagtactggattgaggtggagatggaggatctggccagctttgatgaggacctggccgactacttgtacaagcagccagccgagcacctgcagctgctggaggaagctgccaaggaggtagctgatgaggtgacccggccccggccttctggggaggaggtgctccaggacatccaggtcatgctcaagtcggacgccagcccttccagcattcgtagcctgaagtcggacatgatgtcacacctggtgaagatccctggcatcatcatcgcggcctctgcggtccgtgccaaggccacccgcatctctatccagtgccgcagctgccgcaacaccctcaccaacattgccatgcgccctggcctcgagggctatgccctgcccaggaagtgcaacacagatcaggctgggcgccccaaatgcccattggacccgtacttcatcatgcccgacaaatgcaaatgcgtggacttccagaccctgaagctgcaggagctgcctgatgcagtcccccacggggagatgcccagacacatgcagctctactgcgacaggtacctgtgtgacaaggtcgtccctgggaacagggttaccatcatgggcatctactccatcaagaagtttggcctgactaccagcaggggccgtgacagggtgggcgtgggcatccgaagctcctacatccgtgtcctgggcatccaggtggacacagatggctctggccgcagctttgctggggccgtgagcccccaggaggaggaggagttccgtcgcctggctgccctcccaaatgtctatgaggtcatctccaagagcatcgccccctccatctttgggggcacagacatgaagaaggccattgcctgcctgctctttgggggctcccgaaagaggtcctgatggattantcngcgaggagaatcaactgtgatgctagggnacctggaagcagtccagtctgagttgggngaggtccccttgggtttccgtctgggaaaggcgcgccgcgtgacggcgctctgtgatgggacctcggcccgattctcctggggcggccctgccgccagtggggcctgtttgcttgccaacgcgcgagtcctggtccccgggccctttccggggacccccccgtccgggcccccgcggacggggctccctcctttcacgggctttccgctagcggtccgcct

SEQ ID NO: 299035 - DNA, 847 bp, Homo sapiens
accgcctcttgtttttcccgcgaaactcggcggctgagcgtggaggttcttgtctcccctggtttgtgaagtgcggaaaaccagaggcgcagtcatgtcgggattcgacgatcctggcattttctacagcgacagcttcgggggcgacgcccaggccgacgaggggcaggcccgcaaatcgcagctgcagaggcgcttcaaggagttcctgcggcagtaccgagtgggcaccgaccgcacgggcttcaccttcaaatacagggatgaactcaagcggcattacaacctgggggagtactggattgaggtggagatggaggatctggccagctttgatgaggacctggccgactacttgtacaagcagccagccgagcacctgcagctgctggaggaagctgccaaggaggtagctgatgaggtgacccggccccggccttctggggaggaggtgctccaggacatccaggtcatgctcaagtcggacgccagcccttccagcattcgtagcctgaagtcggacatgatgtcacacctggtgaagatccctggcatcatcatcgcggcctctgcggtccgtgccaaggccacccgcatctctatccagtgccgcagctgccgcaacaccctcaccaacattgccatgcgccctggcctcgagggctatgccctgcccaggaagtgcaacacgatcaggctgggccccaaatgccttgggccgattcatctggcccgaatgcattgcggtggcttccgacctgactgaggagtgctggtgcgcccccggggggatgccgaacttgtgcctttgacgccgtggagggccgggggggcaccgggcccccag

SEQ ID NO: 299036 - DNA, 1605 bp, Homo sapiens
gattcagggcagtttaatgggtggtatcgtgtctattctataggtgcgcagactgaggcttagagaaaggtttagagcttcggttctagagtcagatgggacttaagtccagctctacctcttaattgctgtgaccttgagcaagtggcttagctccgtgtgcctcagtgtctggtacacagtgggcactcaggaagtgtgggccctttaggtcaaaggagcctgagtacaaagttccccgtgagcctggggatgtctgggctctgtcggagtcccctcgggcagcacgtgccgttagccagccatgtgctcccacagaaatacccggagcacgccatccacaaggtgctgcagctcatgctgcggcgcggcgagatccagcatcgcatgcagcgcaaggttctctaccgcctcaagtgagtcgcgccgcctcactggactcatggactcgcccacgcctcgcccctcctgccgctgcctgccattgacaatgttgctgggacctctgcctccccactgcagccctcgaacttcccaggcaccctcctttctgccccagaggaaggagctgtagtgtcctgctgcctctgggcgcccgcctctagcgcggttctgggaagtgtgcttttggcatccgttaataataaagccacggtgtgttcaggtatctgtgggtttgtgcactcggtgacctgtcacctccatcgtgccctcatggcagggtaagtgtgagggaacagggtctggaggcagactggccagggtttctgacttggatctgccactcagacttctgggtaagtcacgtgacttgagtgctccggtttcttcatctgtttagcggggctcataaagccactcccttgatgctgggaatccagtgagaccagggagtggggaagcgcttctcaaagtgtgtgattttgatccgcctcacctgttccccagtaacttattggggggctgcgagccgtggtgcggcggtcagactgcctggattcatggaccctctccatgccttagtttccttatctgtaagcaggctgatactagaacctgcttcacagggttgtgcttagggtcagtgagcagctgttagtgaggggaatgtagtggccaccaggcaggaactaggactccagccagttctttcctggtgggccacgtgtaactgtgtggccttgggcgagacatttcacttttctgtgcctgagtttatcagtaaactggagatggggggattcctcaccctgagttgtgaggattgaatgacagaaggcactagtgacagtgatgctggaggaaggagtgttgccaagtgcctcggtcactttgcctaatttcagaaagtcactctgagttggtatgttttgtgtttttaaaaaagctaggattcataaaattaaatagaaatcagtgaaataaaatatttgatatttaaaatacatttagaaatacaaagtgtcaagcaaaacgtgaatttggaaatctatggaacattagataaggtatttaaaagtaattgccatgtaaaaatgacacgaacttgaagtaagattatttgatttttctaaaaatacaagaaagcttggtgcaaaaaaaagg

SEQ ID NO: 299037 - DNA, 1403 bp, Homo sapiens
cttttctagccatcattccttccctagggacatcttcatcaggagcagggatgggggtattttttctgtcccacgaaggggaggggagagcagaggtggttggattctggtgaaacaaatacccggagcacgccatccacaaggtgctgcagctcatgctgcggcgcggcgagatccagcatcgcatgcagcgcaaggttctctaccgcctcaagtgagtcgcgccgcctcactggactcatggactcgcccacgcctcgcccctcctgccgctgcctgccattgacaatgttgctgggacctctgcctccccactgcagccctcgaacttcccaggcaccctcctttctgccccagaggaaggagctgtagtgtcctgctgcctctgggcgcccgcctctagcgcggttctgggaagtgtgcttttggcatccgttaataataaagccacggtgtgttcaggtatctgtgggtttgtgcactcggtgacctgtcacctccatcgtgccctcatggcagggtaagtgtgagggaacagggtctggaggcagactggccagggtttctgacttggatctgccactcagacttctgggtaagtcacgtgacttgagtgctccggtttcttcatctgtttagcggggctcataaagccactcccttgatgctgggaatccagtgagaccagggagtggggaagcgcttctcaaagtgtgtgattttgatccgcctcacctgttccccagtaacttattggggggctgcgagccgtggtgcggcggtcagactgcctggattcatggaccctctccatgccttagtttccttatctgtaagcaggctgatactagaacctgcttcacagggttgtgcttagggtcagtgagcagctgttagtgaggggaatgtagtggccaccaggcaggaactaggactccagccagttctttcctggtgggccacgtgtaactgtgtggccttgggcgagacatttcacttttctgtgcctgagtttatcagtaaactggagatggggggattcctcaccctgagttgtgaggattgaatgacagaaggcactagtgacagtgatgctggaggaaggagtgttgccaagtgcctcggtcactttgcctaatttcagaaagtcactctgagttggtatgttttgtgtttttaaaaaagctaggattcataaaattaaatagaaatcagtgaaataaaatatttgatatttaaaatacatttagaaatacaaagtgtcaagcaaaacgtgaatttggaaatctatggaacattagataaggtatttaaaagtaattgccatgtaaaaatgacacgaacttgaagtaagattatttgatttttctaaaaatacaagaaagcttggtgcaaaaaaaagg

SEQ ID NO: 299038 - DNA, 1396 bp, Homo sapiens
tttccccgttggcgggcgtttcatggagtgggaaggggcagagccatgagagtgagctttctggctcactgaggagggtactgttggccccagccatgtgctcccacagaaatacccggagcacgccatccacaaggtgctgcagctcatgctgcggcgcggcgagatccagcatcgcatgcagcgcaaggttctctaccgcctcaagtgagtcgcgccgcctcactggactcatggactcgcccacgcctcgcccctcctgccgctgcctgccattgacaatgttgctgggacctctgcctccccactgcagccctcgaacttcccaggcaccctcctttctgccccagaggaaggagctgtagtgtcctgctgcctctgggcgcccgcctctagcgcggttctgggaagtgtgcttttggcatccgttaataataaagccacggtgtgttcaggtatctgtgggtttgtgcactcggtgacctgtcacctccatcgtgccctcatggcagggtaagtgtgagggaacagggtctggaggcagactggccagggtttctgacttggatctgccactcagacttctgggtaagtcacgtgacttgagtgctccggtttcttcatctgtttagcggggctcataaagccactcccttgatgctgggaatccagtgagaccagggagtggggaagcgcttctcaaagtgtgtgattttgatccgcctcacctgttccccagtaacttattggggggctgcgagccgtggtgcggcggtcagactgcctggattcatggaccctctccatgccttagtttccttatctgtaagcaggctgatactagaacctgcttcacagggttgtgcttagggtcagtgagcagctgttagtgaggggaatgtagtggccaccaggcaggaactaggactccagccagttctttcctggtgggccacgtgtaactgtgtggccttgggcgagacatttcacttttctgtgcctgagtttatcagtaaactggagatggggggattcctcaccctgagttgtgaggattgaatgacagaaggcactagtgacagtgatgctggaggaaggagtgttgccaagtgcctcggtcactttgcctaatttcagaaagtcactctgagttggtatgttttgtgtttttaaaaaagctaggattcataaaattaaatagaaatcagtgaaataaaatatttgatatttaaaatacatttagaaatacaaagtgtcaagcaaaacgtgaatttggaaatctatggaacattagataaggtatttaaaagtaattgccatgtaaaaatgacacgaacttgaagtaagattatttgatttttctaaaaatacaagaaagcttggtgcaaaaaaaagg

SEQ ID NO: 299039 - DNA, 705 bp, Homo sapiens
accgcctcttgtttttcccgcgaaactcggcggctgagcgtggaggttcttgtctcccctggtttgtgaagtgcggaaaaccagaggcgcagtcatgtcgggattcgacgatcctggcattttctacagcgacagcttcgggggcgacgcccaggccgacgaggggcaggcccgcaaatcgcagctgcagaggcgcttcaaggagttcctgcggcagtaccgagtgggcaccgaccgcacgggcttcaccttcaaatacagggatgaactcaagcggcattacaacctgggggagtactggattgaggtggagatggaggatctggccagctttgatgaggacctggccgactacttgtacaagcagccagccgagcacctgcagctgctggaggaagctgccaaggaggtagctgatgaggtgacccggccccggccttctggggaggaggtgctccaggacatccaggtcatgctcaagtcggacgccagcccttccagcattcgtagcctgaagtcggacatgatgtcacacctggtgaagatccctggcatcatcatcgcggcctctgcggtccgtgccaaggccacccgtcctggcccgcacatccgtactggcccgctttctgccttggccatggtgaggagacccacacagaaaaccaagatgtggccaagagacgccattgtccacatccgtactgg

SEQ ID NO: 299040 - DNA, 1403 bp, Homo sapiens
gggctgctttttgaatgagacaggtgtgttcctgcctctgtgactttgtgcttggcctggagtgtccccacatgtgccatatcctgtctcctcaatcaggcctgcaccaccctggcacactcggtgcccttttctgacttactcttcggggcctggctcaggctgttcttccttgggctagaggctgtctctgtccaagaactcccattgtcccagctccccggctgcctcactggactcatggactcgcccacgcctcgcccctcctgccgctgcctgccattgacaatgttgctgggacctctgcctccccactgcagccctcgaacttcccaggcaccctcctttctgccccagaggaaggagctgtagtgtcctgctgcctctgggcgcccgcctctagcgcggttctgggaagtgtgcttttggcatccgttaataataaagccacggtgtgttcaggtatctgtgggtttgtgcactcggtgacctgtcacctccatcgtgccctcatggcagggtaagtgtgagggaacagggtctggaggcagactggccagggtttctgacttggatctgccactcagacttctgggtaagtcacgtgacttgagtgctccggtttcttcatctgtttagcggggctcataaagccactcccttgatgctgggaatccagtgagaccagggagtggggaagcgcttctcaaagtgtgtgattttgatccgcctcacctgttccccagtaacttattggggggctgcgagccgtggtgcggcggtcagactgcctggattcatggaccctctccatgccttagtttccttatctgtaagcaggctgatactagaacctgcttcacagggttgtgcttagggtcagtgagcagctgttagtgaggggaatgtagtggccaccaggcaggaactaggactccagccagttctttcctggtgggccacgtgtaactgtgtggccttgggcgagacatttcacttttctgtgcctgagtttatcagtaaactggagatggggggattcctcaccctgagttgtgaggattgaatgacagaaggcactagtgacagtgatgctggaggaaggagtgttgccaagtgcctcggtcactttgcctaatttcagaaagtcactctgagttggtatgttttgtgtttttaaaaaagctaggattcataaaattaaatagaaatcagtgaaataaaatatttgatatttaaaatacatttagaaatacaaagtgtcaagcaaaacgtgaatttggaaatctatggaacattagataaggtatttaaaagtaattgccatgtaaaaatgacacgaacttgaagtaagattatttgatttttctaaaaatacaagaaagcttggtgcaaaaaaaagg

SEQ ID NO: 299041 - DNA, 833 bp, Homo sapiens
agttgagtccaggaattcaagaccagcctgggaaatatagcaagactcccttctccacaaaaaaagaaaaaaataggcaaaggacttgaatagaaatttctcgactgagtgtggtggctcacacctgtaatcccagcactttgggaggctaaggcaggtggatcacctgcggtcaggagttcgaaaccagcctggccaacatggtgaaacccatctctactaaaaatacaaaaattagccgggcatggtgacacgtgcatgtaatcccagctactcgggaggctgaggcaggagaatcgcttgaacccgggaggcagaggttgcagtgagctgagagcgcgccactgcacttcagcctgggcaacaagagcaagactccatctaaaggaaaaagaaaaagaaaaaaaaaattcccaaaaagaaatggccaataagcacatgaaaagatattcaacattgttagtcattaggaaaatgcaaatcaaaaacacaatgagaaaccactttacatccacaagagtgggtataataaaagaagtgttggccaggtgcagtgtaatcccctcatgcctgtaatccccaaactttgggaggctgaggcaggtggatcacctgaggtcgagacttcgagaccagcctgaccaacatggagaaacccctctctcctaaaaatacaaaattagccgggcatggtggtacatgtctgtaatcccaggtacttgggagactgaggcaggagaatcacttgaacctgggaggcagaggttgcagggagccaagatcatgccactacactccagcctgggtaacaagagcgaaactctgtcttaaaa

SEQ ID NO: 299042 - DNA, 323 bp, Homo sapiens
tactactactactactaatttcgcggccgcgtcgaccctctcggtcctgtaccacgagtcatggctgtgggcaccagtaatgtgctgggacaggtacccaaaccagactctgaagccatccctgtactggtggtacctcttggagctgggtttctacctctcactgctaatcaggctgccctttgatgtcaagcgcaaggatttcaaggagcaggtgatacaccacttcgtggcggtcatcctgatgaccttctcctacagtgccaacctgctgcgcattggctctctggtgctgctgaggttccgtcgacgcggccgcgaat

SEQ ID NO: 299043 - DNA, 395 bp, Homo sapiens
tgaccagagtagcatagagaggcccggcgcggtggctcacgcctgtaatcccagcactttgagaggccgaggcgggcagatcacctgaggtcaggagttcgagaccagcctggccaatatagtgaaaccccgtctctactaaaaatataaaaattaaccctgtgtggtggcatgctcctgtaatcccagctaccaggaggcagaggttgcagtgagccaagatcgcactactgcactactgcactccagcctgggtgacagagcaagacactgtctcaaaaacaaacaaacaaaaaacagagtagcatagaagagaccttcccctccctgagtctggactttatacctttgttaataggatgctgtcacacacacacacactgaaccgcctggag

SEQ ID NO: 299044 - DNA, 1827 bp, Homo sapiens
ctccccccactcaagccttttttcccctgctgggggccgaggcccggccaggagcagagtccggctgcctggggcgggcggcgcgtgtctgcagctgctccgggtagcccgctaggcgcgccgtccccagccccgccgccggccctcggtgcgcccggccgcctgcacccccaggagcagctgctgtgaataaacacagaagtggagctgggggactgattagaagcctcattcagtgcacctgggccccagcaggcccagccaggcgtggaggaagaggcattgaggactttccttacctgtttttccagctcacccactgccagcagagaatgctgtccagtttcaacgagtggttttggcaggacaggttctggttaccacccaatgtcacgtggacagagctagaagaccgggatggccgtgtctacccccacccccaggacttgttggcagccctgcccctggcgctggtcctcctggccatgcgccttgcctttgagagattcattggcctgcccctgagccggtggctgggtgtgagggatcagaccaggaggcaagtgaagcccaacgccacgctggagaaacacttcctcacggaagggcacaggcccaaggagccccagctgtctctcctggccgcccagtgtggcctcacgctgcagcagacccagcgatggttccggagacgccggaaccaggatcgaccccagctgaccaagaagttctgtgaggccagctggaggtttctcttctacctgtcctccttcgtgggcggcctctcggtcctgtaccacgagtcatggctgtgggcaccagtaatgtgctgggacaggtacccaaaccagactctgaagccatccctgtactggtggtacctcttggagctgggtttctacctctcactgctaatcaggctgccctttgatgtcaagcgcaaggatttcaaggagcaggtgatacaccacttcgtggcggtcatcctgatgaccttctcctacagtgccaacctgctgcgcattggctctctggtgctgctgttacacgattcctctgactacctgctggaggcctgtaagatggtcaactacatgcagtatcagcaagtgtgcgacgctctcttcctcatcttctcctttgtcttcttctacacccgactggtcctctttcccacccagatcctctacaccacatactacgagtccatcagcaacaggggccccttcttcggctactacttcttcaacgggcttctgatgttgctgcagctgctgcacgtgttctggtcttgcctcattctgcgcatgctctatagcttcatgaagaagggccagatggagaaggacattcgtagtgatgtagaagaatcagactccagtgaggaggcggcggcggcccaggaacctctgcagctaaagaacgggacagctggagggcccaggccagcccccactgatggccctcggagccgggtggccgggcgtctgaccaacaggcacacaacagccacatagccgggcggggctggctgtaaggggttgcccccccgccagtgccttggatatttctggggtgactggactggcgcccctgggccacctttctggagacagggagggccccacccggggtgggtgggaaggctgatgatctgtctccagccccttccttctgcccacccacccttcttccctctgggcaactggacagatctgggagccagcagctggatgctgtggctggccagagacacctccaggctgtggcctgggggctggggggagccccaggctgaaaagggtccaattaaaacaaatggagcca

SEQ ID NO: 299045 - DNA, 2290 bp, Homo sapiens
  misc_feature (2028)..(2028): n is a, c, g, or t
  misc_feature (2172)..(2172): n is a, c, g, or t
  misc_feature (2274)..(2274): n is a, c, g, or t
ctccccccactcaagccttttttcccctgctgggggccgaggcccggccaggagcagagtccggctgcctggggcgggcggcgcgtgtctgcagctgctccgggtagcccgctaggcgcgccgtccccagccccgccgccggccctcggtgcgcccggccgcctgcacccccaggagcagctgctgtgaataaacacagaagtggagctgggggactgattagaagcctcattcagtgcacctgggccccagcaggcccagccaggcgtggaggaagaggcattgaggactttccttacctgtttttccagctcacccactgccagcagagaatgctgtccagtttcaacgagtggttttggcaggacaggttctggttaccacccaatgtcacgtggacagagctagaagaccgggatggccgtgtctacccccacccccaggacttgttggcagccctgcccctggcgctggtcctcctggccatgcgccttgcctttgagagattcattggcctgcccctgagccggtggctgggtgtgagggatcagaccaggaggcaagtgaagcccaacgccacgctggagaaacacttcctcacggaagggcacaggcccaaggagccccagctgtctctcctggccgcccagtgtggcctcacgctgcagcagacccagcgatggttccggagacgccggaaccaggatcgaccccagctgaccaagaagttctgtgaggccagctggaggtttctcttctacctgtcctccttcgtgggcggcctctcggtcctgtaccacgagtcatggctgtgggcaccagtaatgtgctgggacaggtacccaaaccagactctgaagccatccctgtactggtggtacctcttggagctgggtttctacctctcactgctaatcaggctgccctttgatgtcaagcgcaaggatttcaaggagcaggtgatacaccacttcgtggcggtcatcctgatgaccttctcctacagtgccaacctgctgcgcattggctctctggtgctgctgttacacgattcctctgactacctgctggaggcctgtaagatggtcaactacatgcagtatcagcaagtgtgcgacgctctcttcctcatcttctcctttgtcttcttctacacccgactggtcctctttcccacccagatcctctacaccacatactacgagtccatcagcaacaggggccccttcttcggctactacttcttcaacgggcttctgatgttgctgcagctgctgcacgtgttctggtcttgcctcattctgcgcatgctctatagcttcatgaagaagggccagatggagaaggacattcgtagtgatgtagaagaatcagactccagtgaggaggcggcggcggcccaggaacctctgcagctaaagaacgggacagctggagggcccaggccagcccccactgatggccctcggagccgggtggccgggcgtctgaccaacaggcacacaacagccacatagccgggcggggctggctgtaaggggttgcccccccgccagtgccttggatatttctggggtgactggactggcgcccctgggccacctttctggagacagggagggccccacccggggtgggtgggaaggctgatgatctgtctccagccccttccttctgcccacccacccttcttccctctgggcaactggacagatctgggagccagcagctggatgctgtggctggccagagacacctccaggctgtggcctgggggctggggggagccccaggctgaaaagggtccaattaaaacaaatggagccaaattttctgcctgagaacttgggtccctatcaaagttccttcttcatccccagagacccccgagggagccaggcctctgcttacataccccacctacgggatactcactgccacccaaggatgcagggccccaggggcccagacagcaacagagctcagagaccacccgctccccacgctgttcccagatgagcccctgantcgccagccagtgactcaaacaagcccctccctccacccttagggtacccttgggtcagcctctcaaagacccccttgcagactagctctgaaaggtcaagtcctttgcccaagctcacaggtaggtcacagaccaggcctgtntctgcagtcctttcttaagtccggtagattgcccacctttgtggtccctggatccttccttgggacagtggagggagtgggctgaaatcccacagacttccnaagggttagcctgggg

SEQ ID NO: 299046 - DNA, 2423 bp, Homo sapiens
ctccccccactcaagccttttttcccctgctgggggccgaggcccggccaggagcagagtccggctgcctggggcgggcggcgcgtgtctgcagctgctccgggtagcccgctaggcgcgccgtccccagccccgccgccggccctcggtgcgcccggccgcctgcacccccaggagcagctgctgtgaataaacacagaagtggagctgggggactgattagaagcctcattcagtgcacctgggccccagcaggcccagccaggcgtggaggaagaggcattgaggactttccttacctgtttttccagctcacccactgccagcagagaatgctgtccagtttcaacgagtggttttggcaggacaggttctggttaccacccaatgtcacgtggacagagctagaagaccgggatggccgtgtctacccccacccccaggacttgttggcagccctgcccctggcgctggtcctcctggccatgcgccttgcctttgagagattcattggcctgcccctgagccggtggctgggtgtgagggatcagaccaggaggcaagtgaagcccaacgccacgctggagaaacacttcctcacggaagggcacaggcccaaggagccccagctgtctctcctggccgcccagtgtggcctcacgctgcagcagacccagcgatggttccggagacgccggaaccaggatcgaccccagctgaccaagaagttctgtgaggccagctggaggtttctcttctacctgtcctccttcgtgggcggcctctcggtcctgtaccacgagtcatggctgtgggcaccagtaatgtgctgggacaggtacccaaaccagactctgaagccatccctgtactggtggtacctcttggagctgggtttctacctctcactgctaatcaggctgccctttgatgtcaagcgcaaggatttcaaggagcaggtgatacaccacttcgtggcggtcatcctgatgaccttctcctacagtgccaacctgctgcgcattggctctctggtgctgctgttacacgattcctctgactacctgctggaggcctgtaagatggtcaactacatgcagtatcagcaagtgtgcgacgctctcttcctcatcttctcctttgtcttcttctacacccgactggtcctctttcccacccagatcctctacaccacatactacgagtccatcagcaacaggggccccttcttcggctactacttcttcaacgggcttctgatgttgctgcagctgctgcacgtgttctggtcttgcctcattctgcgcatgctctatagcttcatgaagaagggccagatggagaaggacattcgtagtgatgtagaagaatcagactccagtgaggaggcggcggcggcccaggaacctctgcagctaaagaacgggacagctggagggcccaggccagcccccactgatggccctcggagccgggtggccgggcgtctgaccaacaggcacacaacagccacatagccgggcggggctggctgtaaggggttgcccccccgccagtgccttggatatttctggggtgactggactggcgcccctgggccacctttctggagacagggagggccccacccggggtgggtgggaaggctgatgatctgtctccagccccttccttctgcccacccacccttcttccctctgggcaactggacagatctgggagccagcagctggatgctgtggctggccagagacacctccaggctgtggcctgggggctggggggagccccaggctgaaaagggtccaattaaaacaaatggagccaaattttctgcctgagaacttgggtccctatcaaagttccttcttcatccccagagacccccgagggagccaggcctctgcttacataccccacctacgggatagccactgcacttcagcctgggcaacaagagcaagactccatctaaaggaaaaagaaaaagaaaaaaaaaattcccaaaaagaaatggccaataagcacatgaaaagatattcaacattgttagtcattaggaaaatgcaaatcaaaaacacaatgagaaaccactttacatccacaagagtgggtataataaaagaagtgttggccaggtgcagtgtaatcccctcatgcctgtaatccccaaactttgggaggctgaggcaggtggatcacctgaggtcgagacttcgagaccagcctgaccaacatggagaaacccctctctcctaaaaatacaaaattagccgggcatggtggtacatgtctgtaatcccaggtacttgggagactgaggcaggagaatcacttgaacctgggaggcagaggttgcagggagccaagatcatgccactacactccagcctgggtaacaagagcgaaactctgtcttaaaa

SEQ ID NO: 299047 - DNA, 1944 bp, Homo sapiens
ctccccccactcaagccttttttcccctgctgggggccgaggcccggccaggagcagagtccggctgcctggggcgggcggcgcgtgtctgcagctgctccgggtagcccgctaggcgcgccgtccccagccccgccgccggccctcggtgcgcccggccgcctgcacccccaggagcagctgctgtgaataaacacagaagtggagctgggggactgattagaagcctcattcagtgcacctgggccccagcaggcccagccaggcgtggaggaagaggcattgaggactttccttacctgtttttccagctcacccactgccagcagaggatctgctccgtcacccaggctggagtgcagtggtgtgatcacagctcactgcagcctcaaactcctgggctcaaccagtcctctcacctcagcctcctgagtagccgggattacagaatgctgtccagtttcaacgagtggttttggcaggacaggttctggttaccacccaatgtcacgtggacagagctagaagaccgggatggccgtgtctacccccacccccaggacttgttggcagccctgcccctggcgctggtcctcctggccatgcgccttgcctttgagagattcattggcctgcccctgagccggtggctgggtgtgagggatcagaccaggaggcaagtgaagcccaacgccacgctggagaaacacttcctcacggaagggcacaggcccaaggagccccagctgtctctcctggccgcccagtgtggcctcacgctgcagcagacccagcgatggttccggagacgccggaaccaggatcgaccccagctgaccaagaagttctgtgaggccagctggaggtttctcttctacctgtcctccttcgtgggcggcctctcggtcctgtaccacgagtcatggctgtgggcaccagtaatgtgctgggacaggtacccaaaccagactctgaagccatccctgtactggtggtacctcttggagctgggtttctacctctcactgctaatcaggctgccctttgatgtcaagcgcaaggatttcaaggagcaggtgatacaccacttcgtggcggtcatcctgatgaccttctcctacagtgccaacctgctgcgcattggctctctggtgctgctgttacacgattcctctgactacctgctggaggcctgtaagatggtcaactacatgcagtatcagcaagtgtgcgacgctctcttcctcatcttctcctttgtcttcttctacacccgactggtcctctttcccacccagatcctctacaccacatactacgagtccatcagcaacaggggccccttcttcggctactacttcttcaacgggcttctgatgttgctgcagctgctgcacgtgttctggtcttgcctcattctgcgcatgctctatagcttcatgaagaagggccagatggagaaggacattcgtagtgatgtagaagaatcagactccagtgaggaggcggcggcggcccaggaacctctgcagctaaagaacgggacagctggagggcccaggccagcccccactgatggccctcggagccgggtggccgggcgtctgaccaacaggcacacaacagccacatagccgggcggggctggctgtaaggggttgcccccccgccagtgccttggatatttctggggtgactggactggcgcccctgggccacctttctggagacagggagggccccacccggggtgggtgggaaggctgatgatctgtctccagccccttccttctgcccacccacccttcttccctctgggcaactggacagatctgggagccagcagctggatgctgtggctggccagagacacctccaggctgtggcctgggggctggggggagccccaggctgaaaagggtccaattaaaacaaatggagcca

SEQ ID NO: 299048 - DNA, 1670 bp, Homo sapiens
ctccccccactcaagccttttttcccctgctgggggccgaggcccggccaggagcagagtccggctgcctggggcgggcggcgcgtgtctgcagctgctccgggtagcccgctaggcgcgccgtccccagccccgccgccggccctcggtgcgcccggccgcctgcacccccagaatgctgtccagtttcaacgagtggttttggcaggacaggttctggttaccacccaatgtcacgtggacagagctagaagaccgggatggccgtgtctacccccacccccaggacttgttggcagccctgcccctggcgctggtcctcctggccatgcgccttgcctttgagagattcattggcctgcccctgagccggtggctgggtgtgagggatcagaccaggaggcaagtgaagcccaacgccacgctggagaaacacttcctcacggaagggcacaggcccaaggagccccagctgtctctcctggccgcccagtgtggcctcacgctgcagcagacccagcgatggttccggagacgccggaaccaggatcgaccccagctgaccaagaagttctgtgaggccagctggaggtttctcttctacctgtcctccttcgtgggcggcctctcggtcctgtaccacgagtcatggctgtgggcaccagtaatgtgctgggacaggtacccaaaccagactctgaagccatccctgtactggtggtacctcttggagctgggtttctacctctcactgctaatcaggctgccctttgatgtcaagcgcaaggatttcaaggagcaggtgatacaccacttcgtggcggtcatcctgatgaccttctcctacagtgccaacctgctgcgcattggctctctggtgctgctgttacacgattcctctgactacctgctggaggcctgtaagatggtcaactacatgcagtatcagcaagtgtgcgacgctctcttcctcatcttctcctttgtcttcttctacacccgactggtcctctttcccacccagatcctctacaccacatactacgagtccatcagcaacaggggccccttcttcggctactacttcttcaacgggcttctgatgttgctgcagctgctgcacgtgttctggtcttgcctcattctgcgcatgctctatagcttcatgaagaagggccagatggagaaggacattcgtagtgatgtagaagaatcagactccagtgaggaggcggcggcggcccaggaacctctgcagctaaagaacgggacagctggagggcccaggccagcccccactgatggccctcggagccgggtggccgggcgtctgaccaacaggcacacaacagccacatagccgggcggggctggctgtaaggggttgcccccccgccagtgccttggatatttctggggtgactggactggcgcccctgggccacctttctggagacagggagggccccacccggggtgggtgggaaggctgatgatctgtctccagccccttccttctgcccacccacccttcttccctctgggcaactggacagatctgggagccagcagctggatgctgtggctggccagagacacctccaggctgtggcctgggggctggggggagccccaggctgaaaagggtccaattaaaacaaatggagcca

SEQ ID NO: 299049 - DNA, 1676 bp, Homo sapiens
gtgacctgggagcagcagaaatctggaaactgacagcatggacgtgctggccgcagcttccaggatctgctccgtcacccaggctggagtgcagtggtgtgatcacagctcactgcagcctcaaactcctgggctcaaccagtcctctcacctcagcctcctgagtagccgggattacagaatgctgtccagtttcaacgagtggttttggcaggacaggttctggttaccacccaatgtcacgtggacagagctagaagaccgggatggccgtgtctacccccacccccaggacttgttggcagccctgcccctggcgctggtcctcctggccatgcgccttgcctttgagagattcattggcctgcccctgagccggtggctgggtgtgagggatcagaccaggaggcaagtgaagcccaacgccacgctggagaaacacttcctcacggaagggcacaggcccaaggagccccagctgtctctcctggccgcccagtgtggcctcacgctgcagcagacccagcgatggttccggagacgccggaaccaggatcgaccccagctgaccaagaagttctgtgaggccagctggaggtttctcttctacctgtcctccttcgtgggcggcctctcggtcctgtaccacgagtcatggctgtgggcaccagtaatgtgctgggacaggtacccaaaccagactctgaagccatccctgtactggtggtacctcttggagctgggtttctacctctcactgctaatcaggctgccctttgatgtcaagcgcaaggatttcaaggagcaggtgatacaccacttcgtggcggtcatcctgatgaccttctcctacagtgccaacctgctgcgcattggctctctggtgctgctgttacacgattcctctgactacctgctggaggcctgtaagatggtcaactacatgcagtatcagcaagtgtgcgacgctctcttcctcatcttctcctttgtcttcttctacacccgactggtcctctttcccacccagatcctctacaccacatactacgagtccatcagcaacaggggccccttcttcggctactacttcttcaacgggcttctgatgttgctgcagctgctgcacgtgttctggtcttgcctcattctgcgcatgctctatagcttcatgaagaagggccagatggagaaggacattcgtagtgatgtagaagaatcagactccagtgaggaggcggcggcggcccaggaacctctgcagctaaagaacgggacagctggagggcccaggccagcccccactgatggccctcggagccgggtggccgggcgtctgaccaacaggcacacaacagccacatagccgggcggggctggctgtaaggggttgcccccccgccagtgccttggatatttctggggtgactggactggcgcccctgggccacctttctggagacagggagggccccacccggggtgggtgggaaggctgatgatctgtctccagccccttccttctgcccacccacccttcttccctctgggcaactggacagatctgggagccagcagctggatgctgtggctggccagagacacctccaggctgtggcctgggggctggggggagccccaggctgaaaagggtccaattaaaacaaatggagcca

SEQ ID NO: 299050 - DNA, 1702 bp, Homo sapiens
ctccccccactcaagccttttttcccctgctgggggccgaggcccggccaggagcagagtccggctgcctggggcgggcggcgcgtgtctgcagctgctccgggtagcccgctaggcgcgccgtccccagccccgccgccggccctcggtgcgcccggccgcctgcacccccagacctcccagctaactggaacctgtgtccacagaatgctgtccagtttcaacgagtggttttggcaggacaggttctggttaccacccaatgtcacgtggacagagctagaagaccgggatggccgtgtctacccccacccccaggacttgttggcagccctgcccctggcgctggtcctcctggccatgcgccttgcctttgagagattcattggcctgcccctgagccggtggctgggtgtgagggatcagaccaggaggcaagtgaagcccaacgccacgctggagaaacacttcctcacggaagggcacaggcccaaggagccccagctgtctctcctggccgcccagtgtggcctcacgctgcagcagacccagcgatggttccggagacgccggaaccaggatcgaccccagctgaccaagaagttctgtgaggccagctggaggtttctcttctacctgtcctccttcgtgggcggcctctcggtcctgtaccacgagtcatggctgtgggcaccagtaatgtgctgggacaggtacccaaaccagactctgaagccatccctgtactggtggtacctcttggagctgggtttctacctctcactgctaatcaggctgccctttgatgtcaagcgcaaggatttcaaggagcaggtgatacaccacttcgtggcggtcatcctgatgaccttctcctacagtgccaacctgctgcgcattggctctctggtgctgctgttacacgattcctctgactacctgctggaggcctgtaagatggtcaactacatgcagtatcagcaagtgtgcgacgctctcttcctcatcttctcctttgtcttcttctacacccgactggtcctctttcccacccagatcctctacaccacatactacgagtccatcagcaacaggggccccttcttcggctactacttcttcaacgggcttctgatgttgctgcagctgctgcacgtgttctggtcttgcctcattctgcgcatgctctatagcttcatgaagaagggccagatggagaaggacattcgtagtgatgtagaagaatcagactccagtgaggaggcggcggcggcccaggaacctctgcagctaaagaacgggacagctggagggcccaggccagcccccactgatggccctcggagccgggtggccgggcgtctgaccaacaggcacacaacagccacatagccgggcggggctggctgtaaggggttgcccccccgccagtgccttggatatttctggggtgactggactggcgcccctgggccacctttctggagacagggagggccccacccggggtgggtgggaaggctgatgatctgtctccagccccttccttctgcccacccacccttcttccctctgggcaactggacagatctgggagccagcagctggatgctgtggctggccagagacacctccaggctgtggcctgggggctggggggagccccaggctgaaaagggtccaattaaaacaaatggagcca

SEQ ID NO: 299051 - DNA, 1793 bp, Homo sapiens
ctccccccactcaagccttttttcccctgctgggggccgaggcccggccaggagcagagtccggctgcctggggcgggcggcgcgtgtctgcagctgctccgggtagcccgctaggcgcgccgtccccagccccgccgccggccctcggtgcgcccggccgcctgcacccccaggagcagctgctgtgaataaacacagaagtggagctgggggactgattagaagcctcattcagtgcacctgggccccagcaggcccagccaggcgtggaggaagaggcattgaggactttccttacctgtttttccagctcacccactgccagcagaggacaggttctggttaccacccaatgtcacgtggacagagctagaagaccgggatggccgtgtctacccccacccccaggacttgttggcagccctgcccctggcgctggtcctcctggccatgcgccttgcctttgagagattcattggcctgcccctgagccggtggctgggtgtgagggatcagaccaggaggcaagtgaagcccaacgccacgctggagaaacacttcctcacggaagggcacaggcccaaggagccccagctgtctctcctggccgcccagtgtggcctcacgctgcagcagacccagcgatggttccggagacgccggaaccaggatcgaccccagctgaccaagaagttctgtgaggccagctggaggtttctcttctacctgtcctccttcgtgggcggcctctcggtcctgtaccacgagtcatggctgtgggcaccagtaatgtgctgggacaggtacccaaaccagactctgaagccatccctgtactggtggtacctcttggagctgggtttctacctctcactgctaatcaggctgccctttgatgtcaagcgcaaggatttcaaggagcaggtgatacaccacttcgtggcggtcatcctgatgaccttctcctacagtgccaacctgctgcgcattggctctctggtgctgctgttacacgattcctctgactacctgctggaggcctgtaagatggtcaactacatgcagtatcagcaagtgtgcgacgctctcttcctcatcttctcctttgtcttcttctacacccgactggtcctctttcccacccagatcctctacaccacatactacgagtccatcagcaacaggggccccttcttcggctactacttcttcaacgggcttctgatgttgctgcagctgctgcacgtgttctggtcttgcctcattctgcgcatgctctatagcttcatgaagaagggccagatggagaaggacattcgtagtgatgtagaagaatcagactccagtgaggaggcggcggcggcccaggaacctctgcagctaaagaacgggacagctggagggcccaggccagcccccactgatggccctcggagccgggtggccgggcgtctgaccaacaggcacacaacagccacatagccgggcggggctggctgtaaggggttgcccccccgccagtgccttggatatttctggggtgactggactggcgcccctgggccacctttctggagacagggagggccccacccggggtgggtgggaaggctgatgatctgtctccagccccttccttctgcccacccacccttcttccctctgggcaactggacagatctgggagccagcagctggatgctgtggctggccagagacacctccaggctgtggcctgggggctggggggagccccaggctgaaaagggtccaattaaaacaaatggagcca

SEQ ID NO: 299052 - DNA, 1653 bp, Homo sapiens
ctccccccactcaagccttttttcccctgctgggggccgaggcccggccaggagcagagtccggctgcctggggcgggcggcgcgtgtctgcagctgctccgggtagcccgctaggcgcgccgtccccagccccgccgccggccctcggtgcgcccggccgcctgcacccccaggagcagctgctgtgaataaacacagaagtggagctgggggactgattagaagcctcattcagtgcacctgggccccagcaggcccagccaggcgtggaggaagaggcattgaggactttccttacctgtttttccagctcacccactgccagcagagattcattggcctgcccctgagccggtggctgggtgtgagggatcagaccaggaggcaagtgaagcccaacgccacgctggagaaacacttcctcacggaagggcacaggcccaaggagccccagctgtctctcctggccgcccagtgtggcctcacgctgcagcagacccagcgatggttccggagacgccggaaccaggatcgaccccagctgaccaagaagttctgtgaggccagctggaggtttctcttctacctgtcctccttcgtgggcggcctctcggtcctgtaccacgagtcatggctgtgggcaccagtaatgtgctgggacaggtacccaaaccagactctgaagccatccctgtactggtggtacctcttggagctgggtttctacctctcactgctaatcaggctgccctttgatgtcaagcgcaaggatttcaaggagcaggtgatacaccacttcgtggcggtcatcctgatgaccttctcctacagtgccaacctgctgcgcattggctctctggtgctgctgttacacgattcctctgactacctgctggaggcctgtaagatggtcaactacatgcagtatcagcaagtgtgcgacgctctcttcctcatcttctcctttgtcttcttctacacccgactggtcctctttcccacccagatcctctacaccacatactacgagtccatcagcaacaggggccccttcttcggctactacttcttcaacgggcttctgatgttgctgcagctgctgcacgtgttctggtcttgcctcattctgcgcatgctctatagcttcatgaagaagggccagatggagaaggacattcgtagtgatgtagaagaatcagactccagtgaggaggcggcggcggcccaggaacctctgcagctaaagaacgggacagctggagggcccaggccagcccccactgatggccctcggagccgggtggccgggcgtctgaccaacaggcacacaacagccacatagccgggcggggctggctgtaaggggttgcccccccgccagtgccttggatatttctggggtgactggactggcgcccctgggccacctttctggagacagggagggccccacccggggtgggtgggaaggctgatgatctgtctccagccccttccttctgcccacccacccttcttccctctgggcaactggacagatctgggagccagcagctggatgctgtggctggccagagacacctccaggctgtggcctgggggctggggggagccccaggctgaaaagggtccaattaaaacaaatggagcca

SEQ ID NO: 299053 - DNA, 1886 bp, Homo sapiens
ctccccccactcaagccttttttcccctgctgggggccgaggcccggccaggagcagagtccggctgcctggggcgggcggcgcgtgtctgcagctgctccgggtagcccgctaggcgcgccgtccccagccccgccgccggccctcggtgcgcccggccgcctgcacccccaggagcagctgctgtgaataaacacagaagtggagctgggggactgattagaagcctcattcagtgcacctgggccccagcaggcccagccaggcgtggaggaagaggcattgaggactttccttacctgtttttccagctcacccactgccagcagagggagaaggtgatggggacaaggatgaggcttgaaggagcagctagacatctggaggaagagtgctccgggcagaaggcccagcaggtgcaaaggccctgaggctggaacaggcatggatctgctccgtcacccaggctggagtgcagtggtgtgatcacagctcactgcagcctcaaactcctgggctcaaccagtcctctcacctcagcctcctgagtagccgggattacagattcattggcctgcccctgagccggtggctgggtgtgagggatcagaccaggaggcaagtgaagcccaacgccacgctggagaaacacttcctcacggaagggcacaggcccaaggagccccagctgtctctcctggccgcccagtgtggcctcacgctgcagcagacccagcgatggttccggagacgccggaaccaggatcgaccccagctgaccaagaagttctgtgaggccagctggaggtttctcttctacctgtcctccttcgtgggcggcctctcggtcctgtaccacgagtcatggctgtgggcaccagtaatgtgctgggacaggtacccaaaccagactctgaagccatccctgtactggtggtacctcttggagctgggtttctacctctcactgctaatcaggctgccctttgatgtcaagcgcaaggatttcaaggagcaggtgatacaccacttcgtggcggtcatcctgatgaccttctcctacagtgccaacctgctgcgcattggctctctggtgctgctgttacacgattcctctgactacctgctggaggcctgtaagatggtcaactacatgcagtatcagcaagtgtgcgacgctctcttcctcatcttctcctttgtcttcttctacacccgactggtcctctttcccacccagatcctctacaccacatactacgagtccatcagcaacaggggccccttcttcggctactacttcttcaacgggcttctgatgttgctgcagctgctgcacgtgttctggtcttgcctcattctgcgcatgctctatagcttcatgaagaagggccagatggagaaggacattcgtagtgatgtagaagaatcagactccagtgaggaggcggcggcggcccaggaacctctgcagctaaagaacgggacagctggagggcccaggccagcccccactgatggccctcggagccgggtggccgggcgtctgaccaacaggcacacaacagccacatagccgggcggggctggctgtaaggggttgcccccccgccagtgccttggatatttctggggtgactggactggcgcccctgggccacctttctggagacagggagggccccacccggggtgggtgggaaggctgatgatctgtctccagccccttccttctgcccacccacccttcttccctctgggcaactggacagatctgggagccagcagctggatgctgtggctggccagagacacctccaggctgtggcctgggggctggggggagccccaggctgaaaagggtccaattaaaacaaatggagcca

SEQ ID NO: 299054 - DNA, 1454 bp, Homo sapiens
agctgtgctctctgagcctgtaactttgcccctccgagacttggttatcccaccggcagcatgtctgcccccacacacaggcagtcccatctcttcacctgggctgataggctctgtctcctttgcacccagattcattggcctgcccctgagccggtggctgggtgtgagggatcagaccaggaggcaagtgaagcccaacgccacgctggagaaacacttcctcacggaagggcacaggcccaaggagccccagctgtctctcctggccgcccagtgtggcctcacgctgcagcagacccagcgatggttccggagacgccggaaccaggatcgaccccagctgaccaagaagttctgtgaggccagctggaggtttctcttctacctgtcctccttcgtgggcggcctctcggtcctgtaccacgagtcatggctgtgggcaccagtaatgtgctgggacaggtacccaaaccagactctgaagccatccctgtactggtggtacctcttggagctgggtttctacctctcactgctaatcaggctgccctttgatgtcaagcgcaaggatttcaaggagcaggtgatacaccacttcgtggcggtcatcctgatgaccttctcctacagtgccaacctgctgcgcattggctctctggtgctgctgttacacgattcctctgactacctgctggaggcctgtaagatggtcaactacatgcagtatcagcaagtgtgcgacgctctcttcctcatcttctcctttgtcttcttctacacccgactggtcctctttcccacccagatcctctacaccacatactacgagtccatcagcaacaggggccccttcttcggctactacttcttcaacgggcttctgatgttgctgcagctgctgcacgtgttctggtcttgcctcattctgcgcatgctctatagcttcatgaagaagggccagatggagaaggacattcgtagtgatgtagaagaatcagactccagtgaggaggcggcggcggcccaggaacctctgcagctaaagaacgggacagctggagggcccaggccagcccccactgatggccctcggagccgggtggccgggcgtctgaccaacaggcacacaacagccacatagccgggcggggctggctgtaaggggttgcccccccgccagtgccttggatatttctggggtgactggactggcgcccctgggccacctttctggagacagggagggccccacccggggtgggtgggaaggctgatgatctgtctccagccccttccttctgcccacccacccttcttccctctgggcaactggacagatctgggagccagcagctggatgctgtggctggccagagacacctccaggctgtggcctgggggctggggggagccccaggctgaaaagggtccaattaaaacaaatggagcca

SEQ ID NO: 299055 - DNA, 1977 bp, Homo sapiens
ctccccccactcaagccttttttcccctgctgggggccgaggcccggccaggagcagagtccggctgcctggggcgggcggcgcgtgtctgcagctgctccgggtagcccgctaggcgcgccgtccccagccccgccgccggccctcggtgcgcccggccgcctgcacccccaggagcagctgctgtgaataaacacagaagtggagctgggggactgattagaagcctcattcagtgcacctgggccccagcaggcccagccaggcgtggaggaagaggcattgaggactttccttacctgtttttccagctcacccactgccagcagagaatgctgtccagtttcaacgagtggttttggcaggacaggttctggttaccacccaatgtcacgtggacagagctagaagaccgggatggccgtgtctacccccacccccaggacttgttggcagccctgcccctggcgctggtcctcctggccatgcgccttgcctttgagagattcattggcctgcccctgagccggtggctgggtgtgagggatcagaccaggaggcaagtgaagcccaacgccacgctggagaaacacttcctcacggaagggcacaggcccaaggagccccagctgtctctcctggccgcccagtgtggcctcacgctgcagcagacccagcgatggttccggagacgccggaaccaggatcgaccccagctgaccaagaagttctgtgaggccagctggaggtttctcttctacctgtcctccttcgtgggcggcctctcggtcctgtaccacgagtcatggctgtgggcaccagtaatgtgctgggacaggtacccaaaccagactctgaagccatccctgtactggtggtacctcttggagctgggtttctacctctcactgctaatcaggctgccctttgatgtcaagcgcaaggatttcaaggagcaggtgatacaccacttcgtggcggtcatcctgatgaccttctcctacagtgccaacctgctgcgcattggctctctggtgctgctgttacacgattcctctgactacctgctggaggcctgtaagatggtcaactacatgcagtatcagcaagtgtgcgacgctctcttcctcatcttctcctttgtcttcttctacacccgactggtcctctttcccacccaccggacgtgatggtgcatacctgtaatcccagctactcgggaggctgaggcaggaggatcacttaaacccagaaggcagaggctacagcgaatcaagattgtaccactgcactccagcctggccaacatggcaaaaaccacctctctactaaaaatacaaaaattagctgggcgtggtggcaggggcctataatcccagctacttgggaggctgaggcaggagaatcgctggaacctgggaggcagaggttgcagtgagccgagatcacgccattgcactccagcctgggtgacagagcaagactccatctcaaaaaaaaaaaaaaaaaaaacagagtagcatagaagagaccttcccctccctgagtctggactttatacctttgttaataggatgctgtcacacacacgcacactgaaccgcctggagctcagctcagctttccctccctaccccctcctggactcccagagacagattttaatccagggtcccatgacactgtgtctgaagagtgatcattacctatcagctatgccctggggaccccttctgccctgtgcctggccccactttcctcccacccctgtctgtctgtctgtctgtcatttgttcattcagcacagacttaggaagtgtctgcagtgggaggcactggggacagacagccacaggaagccttacggagctgatgtccccgcaaggagaaggtaatggggacaaggatgaggcttgaaggagcagctagacatctggaggaagagtgctccgggcagaaggccagcaggtgcaaggc

SEQ ID NO: 299056 - DNA, 1004 bp, Homo sapiens
tcccagctactcgggaggctgaggcaggaagatggcttgagcccaggagatcgaggctgcagtgagctatgattgcaccgctgcattccagcctggaagacagagtgagagattgcctccctgcagaaaatgtagtctcttagcaattttccagtatatactatattattaactaaaatcatcatgatgtacagatctcttggacttactactgctgctgttacacgattcctctgactacctgctggaggcctgtaagatggtcaactacatgcagtatcagcaagtgtgcgacgctctcttcctcatcttctcctttgtcttcttctacacccgactggtcctctttcccacccagatcctctacaccacatactacgagtccatcagcaacaggggccccttcttcggctactacttcttcaacgggcttctgatgttgctgcagctgctgcacgtgttctggtcttgcctcattctgcgcatgctctatagcttcatgaagaagggccagatggagaaggacattcgtagtgatgtagaagaatcagactccagtgaggaggcggcggcggcccaggaacctctgcagctaaagaacgggacagctggagggcccaggccagcccccactgatggccctcggagccgggtggccgggcgtctgaccaacaggcacacaacagccacatagccgggcggggctggctgtaaggggttgcccccccgccagtgccttggatatttctggggtgactggactggcgcccctgggccacctttctggagacagggagggccccacccggggtgggtgggaaggctgatgatctgtctccagccccttccttctgcccacccacccttcttccctctgggcaactggacagatctgggagccagcagctggatgctgtggctggccagagacacctccaggctgtggcctgggggctggggggagccccaggctgaaaagggtccaattaaaacaaatggagcca

SEQ ID NO: 299057 - DNA, 984 bp, Homo sapiens
tgagaagaggatgtggtgggagctgggctccaggacagtgtcccaggcaacaagcaaggaggagttcgagggaaggagcagtgctggggaacattctttccaactggcttgggttgcacagtgaaaatgaagccccgcccctcccagcctccgtgggagacaaagccccacctctgtccggctacctgggagatgaggccccaccccttttttactccttgggagatgaggccccgcccctcttaaactctgggagatggagccctgctccctgtgtcttcctgggagatgaggccccaccgcctgccttcctgacatgaagcccctcccctatgaggatcctctacaccacatactacgagtccatcagcaacaggggccccttcttcggctactacttcttcaacgggcttctgatgttgctgcagctgctgcacgtgttctggtcttgcctcattctgcgcatgctctatagcttcatgaagaagggccagatggagaaggacattcgtagtgatgtagaagaatcagactccagtgaggaggcggcggcggcccaggaacctctgcagctaaagaacgggacagctggagggcccaggccagcccccactgatggccctcggagccgggtggccgggcgtctgaccaacaggcacacaacagccacatagccgggcggggctggctgtaaggggttgcccccccgccagtgccttggatatttctggggtgactggactggcgcccctgggccacctttctggagacagggagggccccacccggggtgggtgggaaggctgatgatctgtctccagccccttccttctgcccacccacccttcttccctctgggcaactggacagatctgggagccagcagctggatgctgtggctggccagagacacctccaggctgtggcctgggggctggggggagccccaggctgaaaagggtccaattaaaacaaatggagcca

SEQ ID NO: 299058 - DNA, 767 bp, Homo sapiens
tgccgaggctctcctcaccagccacccagggagtcacctccctcagcctcccgcctgccccacacggaggctctggctgtcctctttctccactccatttgcttggctctttcccacccagatcctctacaccacatactacgagtccatcagcaacaggggccccttcttcggctactacttcttcaacgggcttctgatgttgctgcagctgctgcacgtgttctggtcttgcctcattctgcgcatgctctatagcttcatgaagaagggccagatggagaaggacattcgtagtgatgtagaagaatcagactccagtgaggaggcggcggcggcccaggaacctctgcagctaaagaacgggacagctggagggcccaggccagcccccactgatggccctcggagccgggtggccgggcgtctgaccaacaggcacacaacagccacatagccgggcggggctggctgtaaggggttgcccccccgccagtgccttggatatttctggggtgactggactggcgcccctgggccacctttctggagacagggagggccccacccggggtgggtgggaaggctgatgatctgtctccagccccttccttctgcccacccacccttcttccctctgggcaactggacagatctgggagccagcagctggatgctgtggctggccagagacacctccaggctgtggcctgggggctggggggagccccaggctgaaaagggtccaattaaaacaaatggagcca

SEQ ID NO: 299059 - DNA, 881 bp, Homo sapiens
ctccccccactcaagccttttttcccctgctgggggccgaggcccggccaggagcagagtccggctgcctggggcgggcggcgcgtgtctgcagctgctccgggtagcccgctaggcgcgccgtccccagccccgccgccggccctcggtgcgcccggccgcctgcacccccaggagcagctgctgtgaataaacacagaagtggagctgggggactgattagaagcctcattcagtgcacctgggccccagcaggcccagccaggcgtggaggaagaggcattgaggactttccttacctgtttttccagctcacccactgccagcagagaatgctgtccagtttcaacgagtggttttggcaggacaggttctggttaccacccaatgtcacgtggacagagctagaagaccgggatggccgtgtctacccccacccccaggacttgttggcagccctgcccctggcgctggtcctcctggccatgcgccttgcctttgagagattcattggcctgcccctgagccggtggctgggtgtgagggatcagaccaggaggcaagtgaagcccaacgccacgctggagaaacacttcctcacggaagggcacaggcccaaggagccccagctgtctctcctggccgcccagtgtggcctcacgctgcagcagacccagcgatggttccggagacgccggaaccaggatcgaccccagctgaccaagaagttctgtgaggccagcctgacgttctctttctacatgtcctccttcgtgggccggcctctcggttctggtaccacgagtcatggctgtgggcaccagttaatgtgctgggcacacggttaccaaaccaaactctggatgccctcctttactcgg

SEQ ID NO: 299060 - DNA, 210 bp, Homo sapiens
aggacagttccaaagtcccaggcaaggggagttccatcttccagtcctgcctcctggttgtcaactgcgctgataggggcccgagtaggagttctgaggctccagcctctcaggccccacttgccccacccattctgcttgcagacctcccagctaactggaacctgtgtccacagaatgctgtccagtttcaacgagtggttttggcag

SEQ ID NO: 299061 - DNA, 562 bp, Homo sapiens
tgcagctgaggagagagcgagctttgcaagatggtggtgaatgttcactcaacaggtatttggatttactatgcaccaaaagttggggttctgcagtgaatgagccccccagtcgagagtgagaagcaggaaaaagcagggctgggtgaaggtagcatctatgtgactgtggaaggagaaccaaagagaccgcagacccagggtgggaggttggattctcacctctgcacagcctgacacccatttccctgcaggagtcatggctgtgggcaccagtaatgtgctgggacaggtacccaaaccaggtgagtggcagagtgtgtgtgaatgcttggagggtgagggcgatgatcacagttgctgcagccatgggcatgggacccgaaccctgacactacactgtcattccccactgagtcccacgctctttgattcctctggggaatagagaggggccagaaaaccaagcaggagcttccaccaaaccactgcccttgattacctccagggatggggagctcactcattgggattcaagtatcctggttttgagcaaacggag

SEQ ID NO: 299062 - DNA, 1257 bp, Homo sapiens
tcctgggctccgctgtgtttttctattctggggtgtaaggggcagctggaccactccagctgggactgctaggaaggttgcgggtccacccggccgagccgaacgagggaaatggtcctcacccggccactcgccggttgaaaaggggccgccctggcagggaagcggccgccgcggcgcggtgcagcgcagcggcgagaaggagtgcgttatcgtcttgcgctactgctgaatgtccgtcccggaggaggaggagaggcttttgccgctgacccagagatggccccgagcgagcaaattcctactgtccggctgcgcggctaccgtggccgagctaggtacccggctgcccacgcctgggcctcccgggccagtggcacgcgccgcgctgggggagggtgcgcgggcggcttcgcgcccggcagtgcgcatcggagaggtcgccccttccatgcccgcctggcagaggtggcggtggaggccaggcccgcggtgggaggaggagggattgaggtctccacggccttttccttctaatctcttctaatgcttcccttaggcatgtgctgtggtgcttgaatgttgtactttaagaagcttcgcgagctgtcattcctctgtaggaatcattttccttttcatgaggatgacctttttaaaaacgtaatctgttttccatccttactgagatcatctctgtggtttatagtcttacacagccacactgtcattatcttgtgggtccaagttgtggacctaccttgtgggacttccgttattaacctgccactcacagagcatcgactacttgacctctttgagtgtaattcatctatactgtttaccttgcaggattctgagaagtcaataatatatgattgctaaacccaaggcaggacacccattagttgcgacatttttataattcctacaataccagggactgtggatatatatttgaaaagacccagttctgaccttcttacaggctgctggggagacagagaaagacaattataatgtgctacttgttataatgaagatattattaggtgtcataaaagcatagaagagcagttacatctgcctacatgagtaagaaaaaactttaagaggccatctagagtggaatgatgatgcccttgaatgagcaagtagcgtttattccaaggattttgtgagtagtatactcatgtgtttcctgtgaagccttaactgtgtattttaagattacccttacattttcttgcctgttac

SEQ ID NO: 299063 - DNA, 2076 bp, Homo sapiens
tcctgggctccgctgtgtttttctattctggggtgtaaggggcagctggaccactccagctgggactgctaggaaggttgcgggtccacccggccgagccgaacgagggaaatggtcctcacccggccactcgccggttgaaaaggggccgccctggcagggaagcggccgccgcggcgcggtgcagcgcagcggcgagaaggagtgcgttatcgtcttgcgctactgctgaatgtccgtcccggaggaggaggagaggcttttgccgctgacccagagatggccccgagcgagcaaattcctactgtccggctgcgcggctaccgtggccgagctagcaacctttcccctggatctcacaaaaactcgactccaaatgcaaggagaagcagctcttgctcggttgggagacggtgcaagagaatctgccccctataggggaatggtgcgcacagccctagggatcattgaagaggaaggctttctaaagctttggcaaggagtgacacccgccatttacagacacgtagtgtattctggaggtcgaatggtcacatatgaacatctccgagaggttgtgtttggcaaaagtgaagatgagcattatcccctttggaaatcagtcattggagggatgatggctggtgttattggccagtttttagccaatccaactgacctagtgaaggttcagatgcaaatggaaggaaaaaggaaactggaaggaaaaccattgcgatttcgtggtgtacatcatgcatttgcaaaaatcttagctgaaggaggaatacgagggctttgggcaggctgggtacccaatatacaaagagcagcactggtgaatatgggagatttaaccacttatgatacagtgaaacactacttggtattgaatacaccacttgaggacaatatcatgactcacggtttatcaagtttatgttctggactggtagcttctattctgggaacaccagccgatgtcatcaaaagcagaataatgaatcaaccacgagataaacaaggaaggggacttttgtataaatcatcgactgactgcttgattcaggctgttcaaggtgaaggattcatgagtctatataaaggctttttaccatcttggctgagaatgaccccttggtcaatggtgttctggcttacttatgaaaaaatcagagagatgagtggagtcagtccattttaaacccctaaagatgcaacccttaaagatacagtgttcagtattattgaaatatgggcatctgcaacacataccccctattatttctacctctttaggaagacacctattccacagagactgatttatagggggcagcactttatttttttctggaaacccaagttctctttgactcctctttttgtccaaaagtgatctggtcggatctcacaaggccatccaatgagaccccgcacagcattttctaaagaagaatcgaagcctgaccactttcaccttgggcaagaagaaaggtaagagttcttcaaattcagctacataccaccggctctcccaacctcagacggtgggcatttctggatggatggctgcggttatggataaaggctgtaactgttaacacagaaaaacatgaaaagctcaggcccaagaaaggccttggagccagccaaacagaatttgttctaatggacatggatgatgttgaacagaaaaaagtttacaagtgctttgtggttgcactaatgtatactcactgccattttaagagggggaagtacattttaaaatatatttgaatgtcatgtactgatatgcagtagcttattgtttttctagttgcagagaatgtgaagtttaatctcttaaaatatttagatggtctactttttcattgaatttgtcaatatgtaattgcgttgtaaaatatatatatatatatatatatatatatatatatatatatgcttaacttcccaagtgttctgcattgaaccacttagggaaaattttgtttgtttttatgttttgtaatttttaaaattaagtaaagactggatcaaaataattgcatccaacctggaccgtgaaaa

SEQ ID NO: 299064 - DNA, 2051 bp, Homo sapiens
tcctgggctccgctgtgtttttctattctggggtgtaaggggcagctggaccactccagctgggactgctaggaaggttgcgggtccacccggccgagccgaacgagggaaatggtcctcacccggccactcgccggttgaaaaggggccgccctggcagggaagcggccgccgcggcgcggtgcagcgcagcggcgagaaggagtgcgttatcgtcttgcgctactgctgaatgtccgtcccggaggaggaggagaggcttttgccgctgacccagagatggccccgagcgagcaaattcctactgtccggctgcgcggctaccgtggccgagctagcaacctttcccctggatctcacaaaaactcgactccaaatgcaaggagaagcagctcttgctcggttgggagacggtgcaagagaatctgccccctataggggaatggtgcgcacagccctagggatcattgaagaggaaggctttctaaagctttggcaaggagtgacacccgccatttacagacacgtagtgtattctggaggtcgaatggtcacatatgaacatctccgagaggttgtgtttggcaaaagtgaagatgagcattatcccctttggaaatcagtcattggagggatgatggctggtgttattggccagtttttagccaatccaactgacctagtgaaggttcagatgcaaatggaaggaaaaaggaaactggaaggaaaaccattgcgatttcgtggtgtacatcatgcatttgcaaaaatcttagctgaaggaggaatacgagggctttgggcaggctgggtacccaatatacaaagagcagcactggtgaatatgggagatttaaccacttatgatacagtgaaacactacttggtattgaatacaccacttgaggacaatatcatgactcacggtttatcaagtttatgttctggactggtagcttctattctgggaacaccagccgatgtcatcaaaagcagaataatgaatcaaccacgagataaacaaggaaggggacttttgtataaatcatcgactgactgcttgattcaggctgttcaaggtgaaggattcatgagtctatataaaggctttttaccatcttggctgagaatgaccccttggtcaatggtgttctggcttacttatgaaaaaatcagagagatgagtggagtcagtccattttaaacccctaaagatgcaacccttaaagatacagtgttcagtattattgaaatatgggcatctgcaacacataccccctattatttctacctctttaggaagacacctattccacagagactgatttatagggggcagcactttatttttttctggaaacccaagttctctttgactcctctttttgtccaaaagtgatctggtcggatctcacaaggccatccaatgagaccccgcacagcattttctaaagaagaatcgaagcctgaccactttcaccttgggcaagaagaaaggtaagagttcttcaaattcagctacataccaccggctctcccaacctcagacggtgggcatttctggatggatggctgcggttatggataaaggctgtaactgttaacacagaaaaacatgaaaagctcaggcccaagaaaggccttggagccagccaaacagaatttgttctaatggacatggatgatgttgaacagaaaaaagtttacaagtgctttgtggttgcactaatgtatactcactgccattttaagagggggaagtacattttaaaatatatttgaatgtcatgtactgatatgcagtagcttattgtttttctagttgcagagaatgtgaagtttaatctcttaaaatatttagatggtctactttttcattgaatttgtcaatatgtaattgcgttgtaaaatattatatatatatgcttaacttcccaagtgttctgcattgaaccacttagggaaaattttgtttgtttttatgttttgtaatttttaaaattaagtaaagactggatcaaaataattgcatccaacctggaccgtgaaaa

SEQ ID NO: 299065 - DNA, 3023 bp, Homo sapiens
  misc_feature (8)..(8): n is a, c, g, or t
aagagtanaagctactctttcagagagaaaaataggagattcatgtgacaaagatttgcctctgaaattttgtgagttcccacagaagactataatgcctggatttaaaacaactgtatatgtttctcatataaatgacctttcagacttttatgttcaactaatagaagatgaagctgaaattagtcatctttcagagagattaaacagtgttaaaacaaggcccgaatattatgtaggtccacctttgcaaagaggagatatgatatgtgctgttttcccagaagataatttatggtatcgtgctgtgatcaaggagcaacaacccaatgaccttctctctgtgcagtttatagattatggcaatgtttctgtggttcatactaacaaaataggtaggcttgaccttgttaatgcaatattgccggggttgtgcattcattgctccttgcagggatttgaggttcctgacaataaaaattctaagaaaatgatgcattacttttcccaacggaccagcgaggctgcaataagatgtgaatttgttaaatttcaagacagatgggaagttattcttgctgatgaacatgggatcatagcagatgatatgattagcaggtatgctctcagtgaaaaatctcaagtagaactttctacccaagtaattaaaagtgccagttcaaagtctgttaacaaatcagacattgacacttcagtatttcttaactggtataatccagaaaaaaaaatgataagagcttatgccactgtgatagatggacctgagtacttttggtgtcagtttgctgatacggagaaacttcagtgtttagaagtagaagtacagactgctggagaacaggtagcagacaggagaaattgtatcccatgtccttatattggagatccttgtatagtaagatacagagaagatggacattattatagggcacttatcactaatatttgtgaagattatcttgtatctgtcaggcttgtggactttggaaacattgaagactgtgtggacccaaaagcactctgggccattccttctgaacttctgtcggttcccatgcaagcctttccatgttgcctctcagggtttaacatttcagaaggattatgttctcaagagggaaatgactatttctatgaaataataacagaagatgtgttggaaataacaatactagaaatcagaagggatgtttgtgatatccctttagcaattgttgacttgaaaagcaaaggtaaaagtattaatgagaaaatggagaaatattctaagactggtattaaaagtgctcttccctatgaaaatattgactcagagataaagcagactcttgggtcctacaatcttgatgtaggacttaagaaattaagtaataaagctgtacaaaataaaatatatatggaacaacagacagatgagcttgctgaaataactgaaaaagatgtaaacattattggaaccaaaccaagtaacttccgtgaccctaaaactgataacatttgtgaagggtttgaaaacccctgcaaagataaaattgatactgaggaactggaaggtgaattagagtgccatctggttgacaaagcagagtttgatgataaatacctgattacaggatttaacacattactaccacatgctaatgaaacaaaggagatactagaactgaattcacttgaggtgccgctttctcctgatgatgaatcaaaagaattcttagaactggaatctattgagttacagaattctctggtggtggatgaagaaaaaggggagctaagcccggtgccaccgaatgtgccactctcccaagagtgtgtcacaaaaggcgccatggagctatttacactgcagcttcctctcagctgtgaagctgagaaacagccagaactagaactacctacagcccagctgcctttagatgacaagatggatcctttgtctttaggagttagtcagaaagcacaggaatccatgtgtactgaggacatgagaaagtcaagttgtgtagaatcttttgatgaccagcgcaggatgtcattgcatctacatggagcagattgtgatcctaaaacacagaatgaaatgaatatatgtgaagaagaatttgtagagtataaaaacagggatgccatttcggcattgatgcctttgttctctgaggaagaaagcagtgatggaagcaagcacaataatggtttaccagatcatatctcagctcaactacagaacacctacactctgaaagcctttactgttggatctaaatgtgttgtgtggtcaagtctaagaaacacatggtctaaatgtgagattttagaaacagctgaagaaggaacaagggttttgaacctttcaaatggtatggaggagatagtgaaccctgagaatgtctggaatggcatacccaaattggataagagtccacctgagaaaaggggtttggaggtgatggagatttaaccgtggatctatagctgtggccaatcagtcagaagctgcccttgaacaagtggcatcttacgcagaccaacagagtatttgagaaaattgaaaacatgtaaccacaagaagttgtcattttcaaaaacttctatataggtggaaaacaaattaggtctcaggttgatggtggggtgtgtttatagtgatcctgttatatatacagatctgggatctttcgtctttattgtcttacgtttctaattagttgggaggatttattttgctaaacagtttactaacacattacatttcaaaaactattttggtacctttcaaatacagtgtttaaattaaaatagaaaaataagggctcatgacaagtacattatttgattctacttaggatagctttttagcaggatctccttcagaatttttgtcttgactttgaatctttgcctgtttgtctaaacatttgactaacattctgtttgaatttggaagtattctaatacaagatttgaataaagtttatccttaaataaagtttatccttata

SEQ ID NO: 299066 - DNA, 3348 bp, Homo sapiens
  misc_feature (8)..(8): n is a, c, g, or t
aagagtanaagctactctttcagagagaaaaataggagattcatgtgacaaagatttgcctctgaaattttgtgagttcccacagaagactataatgcctggatttaaaacaactgtatatgtttctcatataaatgacctttcagacttttatgttcaactaatagaagatgaagctgaaattagtcatctttcagagagattaaacagtgttaaaacaaggcccgaatattatgtaggtccacctttgcaaagaggagatatgatatgtgctgttttcccagaagataatttatggtatcgtgctgtgatcaaggagcaacaacccaatgaccttctctctgtgcagtttatagattatggcaatgtttctgtggttcatactaacaaaataggtaggcttgaccttgttaatgcaatattgccggggttgtgcattcattgctccttgcagggatttgaggttcctgacaataaaaattctaagaaaatgatgcattacttttcccaacggaccagcgaggctgcaataagatgtgaatttgttaaatttcaagacagatgggaagttattcttgctgatgaacatgggatcatagcagatgatatgattagcaggtatgctctcagtgaaaaatctcaagtagaactttctacccaagtaattaaaagtgccagttcaaagtctgttaacaaatcagacattgacacttcagtatttcttaactggtataatccagaaaaaaaaatgataagagcttatgccactgtgatagatggacctgagtacttttggtgtcagtttgctgatacggagaaacttcagtgtttagaagtagaagtacagactgctggagaacaggtagcagacaggagaaattgtatcccatgtccttatattggagatccttgtatagtaagatacagagaagatggacattattatagggcacttatcactaatatttgtgaagattatcttgtatctgtcaggcttgtggactttggaaacattgaagactgtgtggacccaaaagcactctgggccattccttctgaacttctgtcggttcccatgcaagcctttccatgttgcctctcagggtttaacatttcagaaggattatgttctcaagagggaaatgactatttctatgaaataataacagaagatgtgttggaaataacaatactagaaatcagaagggatgtttgtgatatccctttagcaattgttgacttgaaaagcaaaggtaaaagtattaatgagaaaatggagaaatattctaagactggtattaaaagtgctcttccctatgaaaatattgactcagagataaagcagactcttgggtcctacaatcttgatgtaggacttaagaaattaagtaataaagctgtacaaaataaaatatatatggaacaacagacagatgagcttgctgaaataactgaaaaagatgtaaacattattggaaccaaaccaagtaacttccgtgaccctaaaactgataacatttgtgaagggtttgaaaacccctgcaaagataaaattgatactgaggaactggaaggtgaattagagtgccatctggttgacaaagcagagtttgatgataaatacctgattacaggatttaacacattactaccacatgctaatgaaacaaaggagatactagaactgaattcacttgaggtgccgctttctcctgatgatgaatcaaaagaattcttagaactggaatctattgagttacagaattctctggtggtggatgaagaaaaaggggagctaagcccggtgccaccgaatgtgccactctcccaagagtgtgtcacaaaaggcgccatggagctatttacactgcagcttcctctcagctgtgaagctgagaaacagccagaactagaactacctacagcccagctgcctttagatgacaagatggatcctttgtctttaggagttagtcagaaagcacaggaatccatgtgtactgaggacatgagaaagtcaagttgtgtagaatcttttgatgaccagcgcaggatgtcattgcatctacatggagcagattgtgatcctaaaacacagaatgaaatgaatatatgtgaagaagaatttgtagagtataaaaacagggatgccatttcggcattgatgcctttgttctctgaggaagaaagcagtgatggaagcaagcacaataatggtttaccagatcatatctcagctcaactacagaacacctacactctgaaagcctttactgttggatctaaatgtgttgtgtggtcaagtctaagaaacacatggtctaaatgtgagattttagaaacagctgaagaaggaacaagggttttgaacctttcaaatggtatggaggagatagtgaaccctgagaatgtctggaatggcatacccaaattggataagagtccacctgagaaaaggggtttggaggtgatggagatttaaccgtggatctatagctgtggccaatcagtcagaagctgcccttgaacaagtggcatcttacgcagaccaacagagtatttgagaaaattgaaaacatgtaaccacaagaagttgtcattttcaaaaacttctatataggtggaaaacaaattaggtctcaggttgatggtggggtgtgtttatagtgatcctgttatatatacagatctgggatctttcgtctttattgtcttacgtttctaattagttgggaggatttattttgctaaacagtttactaacacattacatttcaaaaactattttggtacctttcaaatacagtgtttaaattaaaatagaaaaataagggctcatgacaagtacattatttgattctacttaggatagctttttagcaggatctccttcagaatttttgtcttgactttgaatctttgcctgtttgtctaaacatttgactaacattctgtttgaatttggaagtattctaatacaagatttgaataaagtttatccttaaataaagtttatccttataaaaaaaaaataacaatggcctccttggcctcaccgggggactctgcgggccgtcccttttatgaggccaatgcatgttcctccctcctgactcccgccctcggcgtcccgtcgcggaggcgtccactccttcttggccgactcgggtttccccaattctcggccaaccatgaagatagtgtgccgtaacgccgcatcggcctctactctacccggcactccgctcctattactatcccccgctccttcccaatcccctacctcctctccccatacgtgtatccctccgcattctttttccatcctctccatcacctctcctccct

SEQ ID NO: 299067 - DNA, 1914 bp, Homo sapiens
tcctgggctccgctgtgtttttctattctggggtgtaaggggcagctggaccactccagctgggactgctaggaaggttgcgggtccacccggccgagccgaacgagggaaatggtcctcacccggccactcgccggttgaaaaggggccgccctggcagggaagcggccgccgcggcgcggtgcagcgcagcggcgagaaggagtgcgttatcgtcttgcgctactgctgaatgtccgtcccggaggaggaggagaggcttttgccgctgacccagagatggccccgagcgagcaaattcctactgtccggctgcgcggctaccgtggccgagctagcaacctttcccctggatctcacaaaaactcgactccaaatgcaaggagaagcagctcttgctcggttgggagacggtgcaagagaatctgccccctataggggaatggtgcgcacagccctagggatcattgaagaggaaggctttctaaagctttggcaaggagtgacacccgccatttacagacacgtagtgtattctggaggtcgaatggtcacatatgaacatctccgagaggttgtgtttggcaaaagtgaagatgagcattatcccctttggaaatcagtcattggagggatgatggctggtgttattggccagtttttagccaatccaactgacctagtgaaggttcagatgcaaatggaaggaaaaaggaaactggaaggaaaaccattgcgatttcgtggtgtacatcatgcatttgcaaaaatcttagctgaaggaggaatacgagggctttgggcaggctgggtacccaatatacaaagagcagcactggtgaatatgggagatttaaccacttatgatacagtgaaacactacttggtattgaatacaccacttgaggacaatatcatgactcacggtttatcaagtttatgttctggactggtagcttctattctgggaacaccagccgatgtcatcaaaagcagaataatgaatcaaccacgagataaacaaggaaggggacttttgtataaatcatcgactgactgcttgattcaggctgttcaaggtgaaggattcatgagtctatataaaggctttttaccatcttggctgagaatgaccccttggtcaatggtgttctggcttacttatgaaaaaatcagagagatgagtggagtcagtccattttaaacccctaaagatgcaacccttaaagatacagtgttcagtattattgaaatatgggcatctgcaacacataccccctattatttctacctctttaggaagacacctattccacagagactgatttatagggggcagcactttatttttttctggaaacccaagttctctttgactcctctttttgtccaaaagtgatctggtcggatctcacaaggccatccaatgagaccccgcacagcattttctaaagaagaatcgaagcctgaccactttcaccttgggcaagaaggtttggcctttgagttgctattctatgctgaagagcctgcttagaggaggagtaccaggagggagccagcatttcagatctgaagtagacgataggaatgtggaagaacacatacatagtgcttaagaaatacatttaacctgttatgtcagtatttatcaatgaagtttgataattcacttttctgtcattgttaaagcgtacatactgtaaattaaagggaggtgaatggaaattaatgaataaacattttgagtttccctagtgttgaaggaaggtgtactttttcttgtcagaaagataaaaaaaatcaagttgagatgatgtttgaatttcaagaaaagaggctgctttctgtcagtgccctctcattagatctgtgttaattagttagcactccactgcacatgctaatgacttc

SEQ ID NO: 299068 - DNA, 1983 bp, Homo sapiens
tcctgggctccgctgtgtttttctattctggggtgtaaggggcagctggaccactccagctgggactgctaggaaggttgcgggtccacccggccgagccgaacgagggaaatggtcctcacccggccactcgccggttgaaaaggggccgccctggcagggaagcggccgccgcggcgcggtgcagcgcagcggcgagaaggagtgcgttatcgtcttgcgctactgctgaatgtccgtcccggaggaggaggagaggcttttgccgctgacccagagatggccccgagcgagcaaattcctactgtccggctgcgcggctaccgtggccgagctagcaacctttcccctggatctcacaaaaactcgactccaaatgcaaggagaagcagctcttgctcggttgggagacggtgcaagagaatctgccccctataggggaatggtgcgcacagccctagggatcattgaagaggaaggctttctaaagctttggcaaggagtgacacccgccatttacagacacgtagtgtattctggaggtcgaatggtcacatatgaacatctccgagaggttgtgtttggcaaaagtgaagatgagcattatcccctttggaaatcagtcattggagggatgatggctggtgttattggccagtttttagccaatccaactgacctagtgaaggttcagatgcaaatggaaggaaaaaggaaactggaaggaaaaccattgcgatttcgtggtgtacatcatgcatttgcaaaaatcttagctgaaggaggaatacgagggctttgggcaggctgggtacccaatatacaaagagcagcactggtgaatatgggagatttaaccacttatgatacagtgaaacactacttggtattgaatacaccacttgaggacaatatcatgactcacggtttatcaagtttatgttctggactggtagcttctattctgggaacaccagccgatgtcatcaaaagcagaataatgaatcaaccacgagataaacaaggaaggggacttttgtataaatcatcgactgactgcttgattcaggctgttcaaggtgaaggattcatgagtctatataaaggctttttaccatcttggctgagaatgaacaggctgctgtgattgtcaacagcagcaggagccagttgaaggtttgataaaagcagatgaagatgcttaaagatgtctgtttgctgaaaatatctttactgttggatctaaatgtgttgtgtggtcaagtctaagaaacacatggtctaaatgtgagattttagaaacagctgaagaaggaacaagggttttgaacctttcaaatggtatggaggagatagtgaaccctgagaatgtctggaatggcatacccaaattggataagagtccacctgagaaaaggggtttggaggtgatggagatttaaccgtggatctatagctgtggccaatcagtcagaagctgcccttgaacaagtggcatcttacgcagaccaacagagtatttgagaaaattgaaaacatgtaaccacaagaagttgtcattttcaaaaacttctatataggtggaaaacaaattaggtctcaggttgatggtggggtgtgtttatagtgatcctgttatatatacagatctgggatctttcgtctttattgtcttacgtttctaattagttgggaggatttattttgctaaacagtttactaacacattacatttcaaaaactattttggtacctttcaaatacagtgtttaaattaaaatagaaaaataagggctcatgacaagtacattatttgattctacttaggatagctttttagcaggatctccttcagaatttttgtcttgactttgaatctttgcctgtttgtctaaacatttgactaacattctgtttgaatttggaagtattctaatacaagatttgaataaagtttatccttaaataaagtttatccttata

SEQ ID NO: 299069 - DNA, 1812 bp, Homo sapiens
tcctgggctccgctgtgtttttctattctggggtgtaaggggcagctggaccactccagctgggactgctaggaaggttgcgggtccacccggccgagccgaacgagggaaatggtcctcacccggccactcgccggttgaaaaggggccgccctggcagggaagcggccgccgcggcgcggtgcagcgcagcggcgagaaggagtgcgttatcgtcttgcgctactgctgaatgtccgtcccggaggaggaggagaggcttttgccgctgacccagagatggccccgagcgagcaaattcctactgtccggctgcgcggctaccgtggccgagctagcaacctttcccctggatctcacaaaaactcgactccaaatgcaaggagaagcagctcttgctcggttgggagacggtgcaagagaatctgccccctataggggaatggtgcgcacagccctagggatcattgaagaggaaggctttctaaagctttggcaaggagtgacacccgccatttacagacacgtagtgtattctggaggtcgaatggtcacatatgaacatctccgagaggttgtgtttggcaaaagtgaagatgagcattatcccctttggaaatcagtcattggagggatgatggctggtgttattggccagtttttagccaatccaactgacctagtgaaggttcagatgcaaatggaaggaaaaaggaaactggaaggaaaaccattgcgatttcgtggtgtacatcatgcatttgcaaaaatcttagctgaaggaggaatacgagggctttgggcaggctgggtacccaatatacaaagagcagcactggtgaatatgggagatttaaccacttatgatacagtgaaacactacttggtattgaatacaccacttgaggacaatatcatgactcacggtttatcaagtttatgttctggactggtagcttctattctgggaacaccagccgatgtcatcaaaagcagaataatgaatcaaccacgagataaacaaggaaggggacttttgtataaatcatcgactgactgcttgattcaggctgttcaaggtgaaggattcatgagtctatataaaggctttttaccatcttggctgagaatgtgatctggtcggatctcacaaggccatccaatgagaccccgcacagcattttctaaagaagaatcgaagcctgaccactttcaccttgggcaagaagaaaggtaagagttcttcaaattcagctacataccaccggctctcccaacctcagacggtgggcatttctggatggatggctgcggttatggataaaggctgtaactgttaacacagaaaaacatgaaaagctcaggcccaagaaaggccttggagccagccaaacagaatttgttctaatggacatggatgatgttgaacagaaaaaagtttacaagtgctttgtggttgcactaatgtatactcactgccattttaagagggggaagtacattttaaaatatatttgaatgtcatgtactgatatgcagtagcttattgtttttctagttgcagagaatgtgaagtttaatctcttaaaatatttagatggtctactttttcattgaatttgtcaatatgtaattgcgttgtaaaatatatatatatatatatatatatatatatatatatatatgcttaacttcccaagtgttctgcattgaaccacttagggaaaattttgtttgtttttatgttttgtaatttttaaaattaagtaaagactggatcaaaataattgcatccaacctggaccgtgaaaa

SEQ ID NO: 299070 - DNA, 1909 bp, Homo sapiens
tcctgggctccgctgtgtttttctattctggggtgtaaggggcagctggaccactccagctgggactgctaggaaggttgcgggtccacccggccgagccgaacgagggaaatggtcctcacccggccactcgccggttgaaaaggggccgccctggcagggaagcggccgccgcggcgcggtgcagcgcagcggcgagaaggagtgcgttatcgtcttgcgctactgctgaatgtccgtcccggaggaggaggagaggcttttgccgctgacccagagatggccccgagcgagcaaattcctactgtccggctgcgcggctaccgtggccgagctagcaacctttcccctggatctcacaaaaactcgactccaaatgcaaggagaagcagctcttgctcggttgggagacggtgcaagagaatctgccccctataggggaatggtgcgcacagccctagggatcattgaagaggaaggctttctaaagctttggcaaggagtgacacccgccatttacagacacgtagtgtattctggaggtcgaatggtcacatatgaacatctccgagaggttgtgtttggcaaaagtgaagatgagcattatcccctttggaaatcagtcattggagggatgatggctggtgttattggccagtttttagccaatccaactgacctagtgaaggttcagatgcaaatggaaggaaaaaggaaactggaaggaaaaccattgcgatttcgtggtgtacatcatgcatttgcaaaaatcttagctgaaggaggaatacgagggctttgggcaggctgggtacccaatatacaaagagcagcactggtgaatatgggagatttaaccacttatgatacagtgaaacactacttggtattgaatacaccacttgaggacaatatcatgactcacggtttatcaagtttatgttctggactggtagcttctattctgggaacaccagccgatgtcatcaaaagcagaataatgaatcaaccacgagataaacaaggaaggggacttttgtataaatcatcgactgactgcttgattcaggctgttcaaggtgaaggattcatgagtctatataaaggctttttaccatcttggctgagaatggaagacacctattccacagagactgatttatagggggcagcactttatttttttctggaaacccaagttctctttgactcctctttttgtccaaaagtgatctggtcggatctcacaaggccatccaatgagaccccgcacagcattttctaaagaagaatcgaagcctgaccactttcaccttgggcaagaagaaaggtaagagttcttcaaattcagctacataccaccggctctcccaacctcagacggtgggcatttctggatggatggctgcggttatggataaaggctgtaactgttaacacagaaaaacatgaaaagctcaggcccaagaaaggccttggagccagccaaacagaatttgttctaatggacatggatgatgttgaacagaaaaaagtttacaagtgctttgtggttgcactaatgtatactcactgccattttaagagggggaagtacattttaaaatatatttgaatgtcatgtactgatatgcagtagcttattgtttttctagttgcagagaatgtgaagtttaatctcttaaaatatttagatggtctactttttcattgaatttgtcaatatgtaattgcgttgtaaaatatatatatatatatatatatatatatatatatatatatgcttaacttcccaagtgttctgcattgaaccacttagggaaaattttgtttgtttttatgttttgtaatttttaaaattaagtaaagactggatcaaaataattgcatccaacctggaccgtgaaaa

SEQ ID NO: 299071 - DNA, 1650 bp, Homo sapiens
tcctgggctccgctgtgtttttctattctggggtgtaaggggcagctggaccactccagctgggactgctaggaaggttgcgggtccacccggccgagccgaacgagggaaatggtcctcacccggccactcgccggttgaaaaggggccgccctggcagggaagcggccgccgcggcgcggtgcagcgcagcggcgagaaggagtgcgttatcgtcttgcgctactgctgaatgtccgtcccggaggaggaggagaggcttttgccgctgacccagagatggccccgagcgagcaaattcctactgtccggctgcgcggctaccgtggccgagctagcaacctttcccctggatctcacaaaaactcgactccaaatgcaaggagaagcagctcttgctcggttgggagacggtgcaagagaatctgccccctataggggaatggtgcgcacagccctagggatcattgaagaggaaggctttctaaagctttggcaaggagtgacacccgccatttacagacacgtagtgtattctggaggtcgaatggtcacatatgaacatctccgagaggttgtgtttggcaaaagtgaagatgagcattatcccctttggaaatcagtcattggagggatgatggctggtgttattggccagtttttagccaatccaactgacctagtgaaggttcagatgcaaatggaaggaaaaaggaaactggaaggaaaaccattgcgatttcgtggtgtacatcatgcatttgcaaaaatcttagctgaaggaggaatacgagggctttgggcaggctgggtacccaatatacaaagagcagcactggtgaatatgggagatttaaccacttatgatacagtgaaacactacttggtattgaatacaccacttgaggacaatatcatgactcacggtttatcaagtttatgttctggactggtagcttctattctgggaacaccagccgatgtcatcaaaagcagaataatgaatcaaccacgagataaacaaggaaggggacttttgtataaatcatcgactgactgcttgattcaggctgttcaaggtgaaggattcatgagtctatataaaggctttttaccatcttggctgagaatgtgatctggtcggatctcacaaggccatccaatgagaccccgcacagcattttctaaagaagaatcgaagcctgaccactttcaccttgggcaagaaggtttggcctttgagttgctattctatgctgaagagcctgcttagaggaggagtaccaggagggagccagcatttcagatctgaagtagacgataggaatgtggaagaacacatacatagtgcttaagaaatacatttaacctgttatgtcagtatttatcaatgaagtttgataattcacttttctgtcattgttaaagcgtacatactgtaaattaaagggaggtgaatggaaattaatgaataaacattttgagtttccctagtgttgaaggaaggtgtactttttcttgtcagaaagataaaaaaaatcaagttgagatgatgtttgaatttcaagaaaagaggctgctttctgtcagtgccctctcattagatctgtgttaattagttagcactccactgcacatgctaatgacttc

SEQ ID NO: 299072 - DNA, 1996 bp, Homo sapiens
ttacagctaagattcatttcatacgtttgatgcttagctgaaaaattacaataaattctccaatgaaattatgtatctttatttaatgaaaatgcctgctgcgtaccaaggtatgtactagggcatctggggtaagtaaaaacaaacacatagagcctgcctggagaagctcatggtctgatggaaagataagcaagaagagttaatttctaatcaatatgataaaaaggtcagagagcagtttctgaaaaacatgtttttgagttgagtcctgaaagacaaggagatgttagtaaagcagagaagggagaattcattctagaaagatcagacagtgtgtgggaagggcagagtctgaaaagagcatgccccatttggagaagcatcaagaagcccacgtgttagaagcaccggccccatgagacaaagacacagctagagagattgactaggccatgtcggaatgtcctcttattttatacatacataagcatatagatacatatagccaaagttacctttttaatgatcttttttacccagtgtattctggaggtcgaatggtcacatatgaacatctccgagaggttgtgtttggcaaaagtgaagatgagcattatcccctttggaaatcagtcattggagggatgatggctggtgttattggccagtttttagccaatccaactgacctagtgaaggttcagatgcaaatggaaggaaaaaggaaactggaaggaaaaccattgcgatttcgtggtgtacatcatgcatttgcaaaaatcttagctgaaggaggaatacgagggctttgggcaggctgggtacccaatatacaaagagcagcactggtgaatatgggagatttaaccacttatgatacagtgaaacactacttggtattgaatacaccacttgaggacaatatcatgactcacggtttatcaagtttatgttctggactggtagcttctattctgggaacaccagccgatgtcatcaaaagcagaataatgaatcaaccacgagataaacaaggaaggggacttttgtataaatcatcgactgactgcttgattcaggctgttcaaggtgaaggattcatgagtctatataaaggctttttaccatcttggctgagaatgaacaggctgctgtgattgtcaacagcagcaggagccagttgaaggtttgataaaagcagatgaagatgcttaaagatgtctgtttgctgaaaatatctttactgttggatctaaatgtgttgtgtggtcaagtctaagaaacacatggtctaaatgtgagattttagaaacagctgaagaaggaacaagggttttgaacctttcaaatggtatggaggagatagtgaaccctgagaatgtctggaatggcatacccaaattggataagagtccacctgagaaaaggggtttggaggtgatggagatttaaccgtggatctatagctgtggccaatcagtcagaagctgcccttgaacaagtggcatcttacgcagaccaacagagtatttgagaaaattgaaaacatgtaaccacaagaagttgtcattttcaaaaacttctatataggtggaaaacaaattaggtctcaggttgatggtggggtgtgtttatagtgatcctgttatatatacagatctgggatctttcgtctttattgtcttacgtttctaattagttgggaggatttattttgctaaacagtttactaacacattacatttcaaaaactattttggtacctttcaaatacagtgtttaaattaaaatagaaaaataagggctcatgacaagtacattatttgattctacttaggatagctttttagcaggatctccttcagaatttttgtcttgactttgaatctttgcctgtttgtctaaacatttgactaacattctgtttgaatttggaagtattctaatacaagatttgaataaagtttatccttaaataaagtttatccttata

SEQ ID NO: 299073 - DNA, 2006 bp, Homo sapiens
ctaatatgccactcattaagggcttttacctcggctgtccacatccagtcatgcatttggggccaggcatgcctgcgaaatgattgacattcctgtaggtgccccatagaggtgtggcattgagaaattatgtctggaaaatacagccagtgtagtgagcagctgagttaccattcagcctcatggtctgatggaaagataagcaagaagagttaatttctaatcaatatgataaaaaggtcagagagcagtttctgaaaaacatgtttttgagttgagtcctgaaagacaaggagatgttagtaaagcagagaagggagaattcattctagaaagatcagacagtgtgtgggaagggcagagtctgaaaagagcatgccccatttggagaagcatcaagaagcccacgtgttagaagcaccggccccatgagacaaagacacagctagagagattgactaggccatgtcggaatgtcctcttattttatacatacataagcatatagatacatatagccaaagttacctttttaatgatcttttttacccagtgtattctggaggtcgaatggtcacatatgaacatctccgagaggttgtgtttggcaaaagtgaagatgagcattatcccctttggaaatcagtcattggagggatgatggctggtgttattggccagtttttagccaatccaactgacctagtgaaggttcagatgcaaatggaaggaaaaaggaaactggaaggaaaaccattgcgatttcgtggtgtacatcatgcatttgcaaaaatcttagctgaaggaggaatacgagggctttgggcaggctgggtacccaatatacaaagagcagcactggtgaatatgggagatttaaccacttatgatacagtgaaacactacttggtattgaatacaccacttgaggacaatatcatgactcacggtttatcaagtttatgttctggactggtagcttctattctgggaacaccagccgatgtcatcaaaagcagaataatgaatcaaccacgagataaacaaggaaggggacttttgtataaatcatcgactgactgcttgattcaggctgttcaaggtgaaggattcatgagtctatataaaggctttttaccatcttggctgagaatgaacaggctgctgtgattgtcaacagcagcaggagccagttgaaggtttgataaaagcagatgaagatgcttaaagatgtctgtttgctgaaaatatctttactgttggatctaaatgtgttgtgtggtcaagtctaagaaacacatggtctaaatgtgagattttagaaacagctgaagaaggaacaagggttttgaacctttcaaatggtatggaggagatagtgaaccctgagaatgtctggaatggcatacccaaattggataagagtccacctgagaaaaggggtttggaggtgatggagatttaaccgtggatctatagctgtggccaatcagtcagaagctgcccttgaacaagtggcatcttacgcagaccaacagagtatttgagaaaattgaaaacatgtaaccacaagaagttgtcattttcaaaaacttctatataggtggaaaacaaattaggtctcaggttgatggtggggtgtgtttatagtgatcctgttatatatacagatctgggatctttcgtctttattgtcttacgtttctaattagttgggaggatttattttgctaaacagtttactaacacattacatttcaaaaactattttggtacctttcaaatacagtgtttaaattaaaatagaaaaataagggctcatgacaagtacattatttgattctacttaggatagctttttagcaggatctccttcagaatttttgtcttgactttgaatctttgcctgtttgtctaaacatttgactaacattctgtttgaatttggaagtattctaatacaagatttgaataaagtttatccttaaataaagtttatccttata

SEQ ID NO: 299074 - DNA, 1517 bp, Homo sapiens
tcctgggctccgctgtgtttttctattctggggtgtaaggggcagctggaccactccagctgggactgctaggaaggttgcgggtccacccggccgagccgaacgagggaaatggtcctcacccggccactcgccggttgaaaaggggccgccctggcagggaagcggccgccgcggcgcggtgcagcgcagcggcgagaaggagtgcgttatcgtcttgcgctactgctgaatgtccgtcccggaggaggaggagaggcttttgccgctgacccagagatggccccgagcgagcaaattcctactgtccggctgcgcggctaccgtggccgagctagcaacctttcccctggatctcacaaaaactcgactccaaatgcaaggagaagcagctcttgctcggttgggagacggtgcaagagaatctgccccctataggggaatggtgcgcacagccctagggatcattgaagaggaaggctttctaaagctttggcaaggagtgacacccgccatttacagacacgtagtgtattctggaggtcgaatggtcacatatgaacatctccgagaggttgtgtttggcaaaagtgaagatgagcattatcccctttggaaatcagtcattggagggatgatggctggtgttattggccagtttttagccaatccaactgacctagtgaaggttcagatgcaaatggaaggaaaaaggaaactggaaggaaaaccattgcgatttcgtggtgtacatcatgcatttgcaaaaatcttagctgaaggaggaatacgagggctttgggcaggctgggtacccaatatacaaagagcagcactggtgaatatgggagatttaaccacttatgatacagtgaaacactacttggtattgaatacaccacttgaggacaatatcatgactcacggtttatcaagtttatgttctggactggtagcttctattctgggaacaccagccgatgtcatcaaaagcagaataatgaatcaaccacgagataaacaaggaaggggacttttgtataaatcatcgactgactgcttgattcaggctgttcaaggtgaaggattcatgagtctatataaaggctttttaccatcttggctgagaatgtgatctggtcggatctcacaaggccatccaatgagaccccgcacagcattttctaaagaagaatcgaagcctgaccactttcaccttgggcaagaaggtttggcctttgagttgctattctatgctgaagagcctgcttagaggaggagtaccaggagggagccagcatttcagatctgaagtagacgataggaatgtggaagaacacatacatagtgcttaagaaatacatttaacctgttatgtcagtatttatcaacccccccctacaagcgccctgcgcgcacgggagggagcgtgcccctccgcgctcaaggaccggggtactcggtacgtaagtgcccttcgtcttgagattcggggcacgaatgaaaaggcggccgct

SEQ ID NO: 299075 - DNA, 1976 bp, Homo sapiens
ttacagctaagattcatttcatacgtttgatgcttagctgaaaaattacaataaattctccaatgaaattatgtatctttatttaatgaaaatgcctgctgcgtaccaaggtatgtactagggcatctggggtaagtaaaaacaaacacatagagcctgcctggagaagctcatggtctgatggaaagataagcaagaagagttaatttctaatcaatatgataaaaaggtcagagagcagtttctgaaaaacatgtttttgagttgagtcctgaaagacaaggagatgttagtaaagcagagaagggagaattcattctagaaagatcagacagtgtgtgggaagggcagagtctgaaaagagcatgccccatttggagaagcatcaagaagcccacgtgttagaagcaccggccccatgagacaaagacacagctagagagattgactaggccatgtcggaatgtcctcttattttatacatacataagcatatagatacatatagccaaagttacctttttaatgatcttttttacccagtgtattctggaggtcgaatggtcacatatgaacatctccgagaggttgtgtttggcaaaagtgaagatgagcattatcccctttggaaatcagtcattggagggatgatggctggtgttattggccagtttttagccaatccaactgacctagtgaaggttcagatgcaaatggaaggaaaaaggaaactggaaggaaaaccattgcgatttaaccacttatgatacagtgaaacactacttggtattgaatacaccacttgaggacaatatcatgactcacggtttatcaagtttatgttctggactggtagcttctattctgggaacaccagccgatgtcatcaaaagcagaataatgaatcaaccacgagataaacaaggaaggggacttttgtataaatcatcgactgactgcttgattcaggctgttcaaggtgaaggattcatgagtctatataaaggctttttaccatcttggctgagaatgaccccttggtcaatggtgttctggcttacttatgaaaaaatcagagagatgagtggagtcagtccattttaaacccctaaagatgcaacccttaaagatacagtgttcagtattattgaaatatgggcatctgcaacacataccccctattatttctacctctttaggaagacacctattccacagagactgatttatagggggcagcactttatttttttctggaaacccaagttctctttgactcctctttttgtccaaaagtgatctggtcggatctcacaaggccatccaatgagaccccgcacagcattttctaaagaagaatcgaagcctgaccactttcaccttgggcaagaagaaaggtaagagttcttcaaattcagctacataccaccggctctcccaacctcagacggtgggcatttctggatggatggctgcggttatggataaaggctgtaactgttaacacagaaaaacatgaaaagctcaggcccaagaaaggccttggagccagccaaacagaatttgttctaatggacatggatgatgttgaacagaaaaaagtttacaagtgctttgtggttgcactaatgtatactcactgccattttaagagggggaagtacattttaaaatatatttgaatgtcatgtactgatatgcagtagcttattgtttttctagttgcagagaatgtgaagtttaatctcttaaaatatttagatggtctactttttcattgaatttgtcaatatgtaattgcgttgtaaaatatatatatatatatatatatatatatatatatatatatgcttaacttcccaagtgttctgcattgaaccacttagggaaaattttgtttgtttttatgttttgtaatttttaaaattaagtaaagactggatcaaaataattgcatccaacctggaccgtgaaaa

SEQ ID NO: 299076 - DNA, 1942 bp, Homo sapiens
ttacagctaagattcatttcatacgtttgatgcttagctgaaaaattacaataaattctccaatgaaattatgtatctttatttaatgaaaatgcctgctgcgtaccaaggtatgtactagggcatctggggtaagtaaaaacaaacacatagagcctgcctggagaagctcatggtctgatggaaagataagcaagaagagttaatttctaatcaatatgataaaaaggtcagagagcagtttctgaaaaacatgtttttgagttgagtcctgaaagacaaggagatgttagtaaagcagagaagggagaattcattctagaaagatcagacagtgtgtgggaagggcagagtctgcggccccatgagacaaagacacagctagagagattgactaggccatgtcggaatgtcctcttattttatacatacataagcatatagatacatatagccaaagttacctttttaatgatcttttttacccagtgtattctggaggtcgaatggtcacatatgaacatctccgagaggttgtgtttggcaaaagtgaagatgagcattatcccctttggaaatcagtcattggagggatgatggctggtgttattggccagtttttagccaatccaactgacctagtgaaggttcagatgcaaatggaaggaaaaaggaaactggaaggaaaaccattgcgatttcgtggtgtacatcatgcatttgcaaaaatcttagctgaaggaggaatacgagggctttgggcaggctgggtacccaatatacaaagagcagcactggtgaatatgggagatttaaccacttatgatacagtgaaacactacttggtattgaatacaccacttgaggacaatatcatgactcacggtttatcaagtttatgttctggactggtagcttctattctgggaacaccagccgatgtcatcaaaagcagaataatgaatcaaccacgagataaacaaggaaggggacttttgtataaatcatcgactgactgcttgattcaggctgttcaaggtgaaggattcatgagtctatataaaggctttttaccatcttggctgagaatgaacaggctgctgtgattgtcaacagcagcaggagccagttgaaggtttgataaaagcagatgaagatgcttaaagatgtctgtttgctgaaaatatctttactgttggatctaaatgtgttgtgtggtcaagtctaagaaacacatggtctaaatgtgagattttagaaacagctgaagaaggaacaagggttttgaacctttcaaatggtatggaggagatagtgaaccctgagaatgtctggaatggcatacccaaattggataagagtccacctgagaaaaggggtttggaggtgatggagatttaaccgtggatctatagctgtggccaatcagtcagaagctgcccttgaacaagtggcatcttacgcagaccaacagagtatttgagaaaattgaaaacatgtaaccacaagaagttgtcattttcaaaaacttctatataggtggaaaacaaattaggtctcaggttgatggtggggtgtgtttatagtgatcctgttatatatacagatctgggatctttcgtctttattgtcttacgtttctaattagttgggaggatttattttgctaaacagtttactaacacattacatttcaaaaactattttggtacctttcaaatacagtgtttaaattaaaatagaaaaataagggctcatgacaagtacattatttgattctacttaggatagctttttagcaggatctccttcagaatttttgtcttgactttgaatctttgcctgtttgtctaaacatttgactaacattctgtttgaatttggaagtattctaatacaagatttgaataaagtttatccttaaataaagtttatccttata

SEQ ID NO: 299077 - DNA, 710 bp, Homo sapiens
actgccagcggcctgactcttactcagtttagcaaaaattcttgcctaaaaagtgataagtaaaaatctgtttatggtatacagttatgtctcgaatctttgaatcaaatccatgttcttattttagaaaggtaagagttcttcaaattcagctacataccaccggctctcccaacctcagacggtgggcatttctggatggatggctgcggttatggataaaggctgtaactgttaacacagaaaaacatgaaaagctcaggcccaagaaaggccttggagccagccaaacagaatttgttctaatggacatggatgatgttgaacagaaaaaagtttacaagtgctttgtggttgcactaatgtatactcactgccattttaagagggggaagtacattttaaaatatatttgaatgtcatgtactgatatgcagtagcttattgtttttctagttgcagagaatgtgaagtttaatctcttaaaatatttagatggtctactttttcattgaatttgtcaatatgtaattgcgttgtaaaatatatatatatatatatatatatatatatatatatatatgcttaacttcccaagtgttctgcattgaaccacttagggaaaattttgtttgtttttatgttttgtaatttttaaaattaagtaaagactggatcaaaataattgcatccaacctggaccgtgaaaa

SEQ ID NO: 299078 - DNA, 578 bp, Homo sapiens
ttagctgaaggaggaatacgagggctttgggcaggctgggtacccaatatacaaagagcagcactggtgaatatgggaggtaatgaaaactttgttaaattctaaaaagtcctaattgccttaatagctgtaagcacttatattagggaaattaaaatttatgttttatttttaatatattggtgaccatatattgttgactggctgtatagatgttctaggtcataactgaatattttccacagagcatttttgcttcattctatagtgatgtatgaaaaggataggatttactaaaataggcaaattgtgacaataaggacacaaggctaaactatttgtaaggcctcccctccagtccagaccttcctttaagattaaaactgatatatacagctatctgatcattattatatccagactgtccaaatctttcccctggcaatcctgctcctattcctaaataatcaatttttatacagtctcacaccccaggctggaaacctcaatgttctcttaactcatccctacccctcacttctcatattcacataccaattctgtctcccaaatatttc

SEQ ID NO: 299079 - DNA, 470 bp, Homo sapiens
gggacttttgtataaatcatcgactgactgcttgattcaggctgttcaaggtgaaggattcatgagtctatataaaggctttttaccatcttggctgagaatggtaaagttaggtttacttcctttgttttttttctttgtacttaaattacttttaatttataagcattttcccttttctcttctggtttgaagcatggccctgccccccaaatcaaggtcctttctttcttttttaaatcttcttttatttcctttcacttctcctcagagttatcttgccttctgtggtagagtaaggtaaaataagttacatccattgacgaataagttgatagtcttgttataaagccagtaaatagattttctgtaatgtaaaatttttagtatttcatttagtcatattttaatacaatattttagaatatatatacagattttacactagagacctctcctacaaaaaaaaa

SEQ ID NO: 299080 - DNA, 5841 bp, Homo sapiens
cagctttccgacatcaccagccaaggatttttttccccgctctccttagtcgccgtccgtccatcagtacctgcaggggggaggaggaggagggaggaaagcggaaagaggaaaaagcataagcttgagccttccgatccgaccacgaatactcctgtaataaacccaccgccccaacaaatctgccatagcagccgccgccgccgccggtcacttctcgtctcagcgctttctttgcttcttggtttgttgggggtagcttttatgaaacaaatctttgctattaagccacttacattttggggggttccttagagtctcccttgggggggcttctccctccctttagcccccctcggtttggaggttggattcagttggatacggcgcaaggttctgggctcctgctggcttttttttcctctctctcatcgacccccctttggttcccaccccccaccttttgcttttcgtatgtatgcatttttaaaaataaatcctgattttggaagctgagccggggaaaatgggcaacggtgattgggaccgaaggggagtctctccgtcactgttgctgggacgcgtgcctgtgctggtgtcttagagcaagagcctccctgagctttcggagtggaaggccaaatgacataggatgaaggctgttcgtaacctgctgatttatatattttccacctatctcctggttatgtttggatttaatgctgcccaagacttctggtgttcaactttggtgaagggagtcatttatggatcgtattctgtaagtgaaatgtttcctaaaaactttacaaactgcacttggacgctggaaaatccagatccaaccaaatatagcatttacctgaaattttccaaaaaggaccttagctgctctaacttttcactcctggcttatcagtttgatcatttttcccatgaaaaaataaaggatcttttaagaaagaatcattctataatgcaactctgcaattccaagaatgctttcgtttttctacagtatgataaaaattttattcaaatacgtcgagtatttccaactaatttcccaggattacagaaaaaaggggaagaagatcagaaatctttttttgagtttttggtattgaacaaggtcagcccaagccagtttggttgccatgtattatgtacttggttggagagctgcttaaaatcagaaaatgggagaacagaatcatgtgggatcatgtatacaaaatgcacctgccctcagcatttgggagagtgggggatcgacgaccagtcgctgattttgttaaataacgtggtgttacccctgaatgagcagacagagggctgcctgacccaggagctgcaaaccacccaagtctgcaatcttaccagggaggccaagcgaccacccaaagaagaatttggaatgatgggagatcatacaattaaaagtcagcgacctcgatctgttcatgaaaaaagggtccctcaggaacaagctgatgctgctaaatttatggcacaaactggtgaatctggtgtggaagagtggtcccagtggagcacatgttcggttacttgtggtcaagggtcgcaggtgcgaaccagaacttgtgtatcaccttacgggacacactgcagcggcccattaagagaatcaagggtttgcaataacactgccctctgtccagtacacggagtatgggaggaatggtcaccatggagtttatgttcatttacatgtggtcgaggccaaagaacaagaacaaggtcatgcacacctcctcagtatggaggaaggccgtgtgaaggacctgaaacacatcataagccttgtaatattgctctttgcccagttgatggacagtggcaagagtggagttcgtggagccagtgctcagtaacgtgctcgaatgggactcagcagagaagccggcagtgcactgcagctgcccatggaggctccgaatgcagagggccatgggcagaaagcagagagtgctataaccctgaatgtacagccaatggtcaatggaatcagtggggtcattggagtggttgttccaagtcctgtgatggcggctgggaaaggcgaataaggacctgtcagggtgcagtgataacagggcagcaatgtgaaggaacgggcgaagaagtgagaagatgcagtgagcagcgatgccctgcaccttatgaaatatgccctgaggattatctgatgtcgatggtgtggaaaagaactccagcaggcgacttggcattcaatcaatgtcccctgaatgccacaggcaccactagcagacgctgctctctcagtcttcatggagtggccttctgggaacagccgagctttgcaagatgcatatcaaatgagtacagacacttgcagcattcaattaaagagcaccttgctaaggggcagcgaatgctggcaggtgatggaatgtcccaggtgaccaagacactgttggatttaactcagagaaaaaatttctatgcaggcgatcttctgatgtctgtggagatcctgagaaatgtgacagacacatttaaaagggcaagttacatccctgcatctgatggtgtccagaacttctttcaaatagttagcaaccttctagatgaagaaaacaaggaaaaatgggaagatgcacaacagatttatccagggtcaatagagttaatgcaggtgattgaagattttatacacattgttggaatggggatgatggactttcagaattcatacttaatgactggaaatgtagtggctagtattcagaagcttcctgcagcctctgttctaacagacatcaactttccaatgaaaggacggaagggaatggttgactgggcaagaaactcagaagatagggtagtaattccaaaaagcattttcactccggtgtcatcaaaagaattagatgaatcatctgtatttgttcttggcgcagtcctatacaaaaacttagatctaattttgcccactttgagaaattatactgtcattaattccaaaatcatcgtggtcacaataaggcctgaacccaaaacaaccgattcgtttctggagatagaactagctcatttggctaatggtactttgaatccctattgtgtattgtgggatgactccaaaacgaacgagtctttgggaacgtggtccacccagggatgtaaaactgtgcttaccgatgcatcccatacgaaatgcttatgtgatcgtctctctaccttcgccattttggctcagcaacctagagaaataatcatggaatcctctggcacaccttcagttaccctaatagtaggcagtggtctttcttgcttggccttgattaccctagcagttgtctatgcagcattatggaggtacatacgctctgagagatccataatactaattaacttctgcctgtctatcatctcatccaatatcctcatactggttggacagactcagacacataataagagtatctgcacaaccaccactgcatttttgcactttttcttcctggcttcattctgttgggttttgactgaggcgtggcaatcatatatggctgtaactggaaaaattaggacacggcttataagaaaacgctttttgtgccttggatggggtttaccagcattagtagtggccacatcagtaggcttcaccagaacaaaaggatatggcactgatcactactgctggctctctcttgaaggaggactactctatgcttttgtgggacctgcagccgctgttgtcctggtcaacatggtgattggcattttggtatttaataaacttgtttccagagatggaatcctagataaaaagctcaaacacagagccggtcagatgagtgagcctcatagcggtttgacgctcaaatgtgccaagtgtggagtagtttcaacaacagctttgtcagccaccaccgccagtaacgccatggcgtctctttggagctcctgtgtggtgttgccccttctggctttgacgtggatgtctgcggttctggccatgacagataaacgctccatattgtttcaaatactttttgctgtgtttgattcattgcaaggctttgttatagtcatggtccactgcattcttcggagagaggttcaggatgcatttagatgccgattgagaaactgtcaggatcccatcaatgcagattcttcgagttcgtttcctaatgggcatgctcaaatcatgacagactttgaaaaggatgtagacattgcctgtcgatcagttcttcataaggatattggtccttgccgagcagccacaataacaggaacactttctaggatttctctaaatgatgatgaagaagaaaagggaacaaaccctgaagggctaagctattcaacattgcctggaaatgtcatttccaaagtcatcatccagcaacccacaggtttgcacatgcccatgagtatgaatgagcttagcaatccatgtttgaaaaaagaaaatagtgaattgcggagaactgtgtacttatgtacggatgataatttgagaggggctgacatggacatagtccatcctcaagaaagaatgatggaaagtgactatattgtgatgcccagaagttctgtaaataaccagccttcaatgaaagaagaaagcaaaatgaatattggcatggaaaccttgccacatgaaaggctattgcactacaaagtaaaccctgaattcaatatgaatccccctgtaatggaccagttcaatatgaacttagagcaacatctcgcaccccaggaacatatgcagaatttgccctttgaacctcgcacagctgtgaagaatttcatggcctctgagttggatgataatgcaggactatcaagaagtgaaactggatcaacgatatcaatgagttctttagagagaagaaaatcacgatattcagaccttgactttgagaaggtcatgcatacaaggaagaggcatatggaactatttcaagaactaaatcagaaatttcaaactttggacagatttcgggatataccaaatacaagcagtatggaaaaccccgcaccaaacaagaatccatgggacactttcaaaaaccccagtgaatacccgcattacaccacaatcaatgtcttagacacagaggcaaaggatgctttggaactgaggccagcagagtgggagaagtgtctgaatttgcctctggatgtgcaagagggtgactttcaaacagaagtttaaaaaaatcaaaatggactaaggtagagacaaaactttattgcactgacacttaagacttgggaagcctgacatttctatctggacagtgtgactatcttatgtcaggaccttcatgtgccaaacgtcagtggtgttttcatatggtaacttctcactagtcaggctagtggagagatgaccaggtgtacagttctgaccatcctgtgttgtaagtacccgtggaatggatttgtaaggtaatctttatagataaacctcaagcaacgattcatgttgtaaccgcttcatatggtttagttttcaaaaaacttcaccatgaagcacaatgtatatatttatgcagtttttaaagtttataacagtctgtttggccattactacactttttactttataatataaaagcaaagtttttgtcattaaatgaatgtttgttgagctacattcttcattgctttaaatgcaataaagtaataatctcacttttatatgaataatatatttcacatctttattattgcagttttctctagaaagctctgagaagctttctctgctgcagctgtgtataaaatatttaaaatgttgtatggtgtaaataaacttttgtctacatatca

SEQ ID NO: 299081 - DNA, 5844 bp, Homo sapiens
cagctttccgacatcaccagccaaggatttttttccccgctctccttagtcgccgtccgtccatcagtacctgcaggggggaggaggaggagggaggaaagcggaaagaggaaaaagcataagcttgagccttccgatccgaccacgaatactcctgtaataaacccaccgccccaacaaatctgccatagcagccgccgccgccgccggtcacttctcgtctcagcgctttctttgcttcttggtttgttgggggtagcttttatgaaacaaatctttgctattaagccacttacattttggggggttccttagagtctcccttgggggggcttctccctccctttagcccccctcggtttggaggttggattcagttggatacggcgcaaggttctgggctcctgctggcttttttttcctctctctcatcgacccccctttggttcccaccccccaccttttgcttttcgtatgtatgcatttttaaaaataaatcctgattttggaagctgagccggggaaaatgggcaacggtgattgggaccgaaggggagtctctccgtcactgttgctgggacgcgtgcctgtgctggtgtcttagagcaagagcctccctgagctttcggagtggaagaacagtggaagagactgcagcctaaagacttttaaaattaacttggcatcacttttatcagctcaaaggctaaacaaacaaacaaaagcagtgtcatttattctaagaaataacttcttaaaggttaaagctgaaaaatattcaagttatttttggataacaacttacagaggccaaatgacataggatgaaggctgttcgtaacctgctgatttatatattttccacctatctcctggttatgtttggatttaatgctgcccaagacttctggtgttcaactttggtgaagggagtcatttatggatcgtattctgtaagtgaaatgtttcctaaaaactttacaaactgcacttggacgctggaaaatccagatccaaccaaatatagcatttacctgaaattttccaaaaaggaccttagctgctctaacttttcactcctggcttatcagtttgatcatttttcccatgaaaaaataaaggatcttttaagaaagaatcattctataatgcaactctgcaattccaagaatgctttcgtttttctacagtatgataaaaattttattcaaatacgtcgagtatttccaactaatttcccaggattacagaaaaaaggggaagaagatcagaaatctttttttgagtttttggtattgaacaaggtcagcccaagccagtttggttgccatgtattatgtacttggttggagagctgcttaaaatcagaaaatgggagaacagaatcatgtgggatcatgtatacaaaatgcacctgccctcagcatttgggagagtgggggatcgacgaccagtcgctgattttgttaaataacgtggtgttacccctgaatgagcagacagagggctgcctgacccaggagctgcaaaccacccaagtctgcaatcttaccagggaggccaagcgaccacccaaagaagaatttggaatgatgggagatcatacaattaaaagtcagcgacctcgatctgttcatgaaaaaagggtccctcaggaacaagctgatgctgctaaatttatggcacaaactggtgaatctggtgtggaagagtggtcccagtggagcacatgttcggttacttgtggtcaagggtcgcaggtgcgaaccagaacttgtgtatcaccttacgggacacactgcagcggcccattaagagaatcaagggtttgcaataacactgccctctgtccagtacacggagtatgggaggaatggtcaccatggagtttatgttcatttacatgtggtcgaggccaaagaacaagaacaaggtcatgcacacctcctcagtatggaggaaggccgtgtgaaggacctgaaacacatcataagccttgtaatattgctctttgcccagttgatggacagtggcaagagtggagttcgtggagccagtgctcagtaacgtgctcgaatgggactcagcagagaagccggcagtgcactgcagctgcccatggaggctccgaatgcagagggccatgggcagaaagcagagagtgctataaccctgaatgtacagccaatggtcaatggaatcagtggggtcattggagtggttgttccaagtcctgtgatggcggctgggaaaggcgaataaggacctgtcagggtgcagtgataacagggcagcaatgtgaaggaacgggcgaagaagtgagaagatgcagtgagcagcgatgccctgcaccttatgaaatatgccctgaggattatctgatgtcgatggtgtggaaaagaactccagcaggcgacttggcattcaatcaatgtcccctgaatgccacaggcaccactagcagacgctgctctctcagtcttcatggagtggccttctgggaacagccgagctttgcaagatgcatatcaaatgagtacagacacttgcagcattcaattaaagagcaccttgctaaggggcagcgaatgctggcaggtgatggaatgtcccaggtgaccaagacactgttggatttaactcagagaaaaaatttctatgcaggcgatcttctgatgtctgtggagatcctgagaaatgtgacagacacatttaaaagggcaagttacatccctgcatctgatggtgtccagatttatccagggtcaatagagttaatgcaggtgattgaagattttatacacattgttggaatggggatgatggactttcagaattcatacttaatgactggaaatgtagtggctagtattcagaagcttcctgcagcctctgttctaacagacatcaactttccaatgaaaggacggaagggaatggttgactgggcaagaaactcagaagatagggtagtaattccaaaaagcattttcactccggtgtcatcaaaagaattagatgaatcatctgtatttgttcttggcgcagtcctatacaaaaacttagatctaattttgcccactttgagaaattatactgtcattaattccaaaatcatcgtggtcacaataaggcctgaacccaaaacaaccgattcgtttctggagatagaactagctcatttggctaatggtactttgaatccctattgtgtattgtgggatgactccaaaacgaacgagtctttgggaacgtggtccacccagggatgtaaaactgtgcttaccgatgcatcccatacgaaatgcttatgtgatcgtctctctaccttcgccattttggctcagcaacctagagaaataatcatggaatcctctggcacaccttcagttaccctaatagtaggcagtggtctttcttgcttggccttgattaccctagcagttgtctatgcagcattatggaggtacatacgctctgagagatccataatactaattaacttctgcctgtctatcatctcatccaatatcctcatactggttggacagactcagacacataataagagtatctgcacaaccaccactgcatttttgcactttttcttcctggcttcattctgttgggttttgactgaggcgtggcaatcatatatggctgtaactggaaaaattaggacacggcttataagaaaacgctttttgtgccttggatggggtaagcatattgatataccgtttcatgctcttctcaaaatgacgttgaacacacattagaaagcagtcatgagtgattagacacaggctactttgtgtctaatttaatctatggaagtgaaaatacatgagctggtcagttttgaacattcattggtcatttggaactttaaaaggaagtaagtattgaatgctcatttagctagtcagttaacattcaacagtgtctagatagtatgaaatgagaccccgagatgcctacacacagaaaaacagtgctctctgttaatattttctgaaagtgcaaaataccttaaaattttcaaggcctaatgtgtgatggttcactaggcatgtactcccaccaagaaaacttagaagatttcatttcaagaaatctcaaagcaattaaagaataaaagcgattcatttcatagggagaacaccatctagagaattaatgaaacctcacagcttgttgacctggtcctcaaaagcagaaacagaattgctgacagactgagaactaattctttacttgtgtttattaagaagtttctctcaaattgcctcatgacatggacatctcaaagatctatattatagggccaattctaatgatagcctagttaatttaagaagctacttttagaaaaagcccaaatatacaataatatctactgtattagaagactggcatatgggatgctaggaggaacctgggaaattacaaataagtgtgcttataacaattccagaattatttaggctggaaaaatatgatcaagaacacgtaaatattattcattaggtttcagcaaggtctattatgtctagctaataaattaggactttatccacagacaaatggaaaagcaattaataagaagttgaagagtaggccagacatggtggctcacgcctgtaatcctagcactttgggaaaccaaggcgggtggactacctgagcgtgggtggactacctgagcgcgggtggactacctgagcacgggagttcgagattagcctgagcaatatggcaaaaccccatctctaccaaaaatgcaaaaaattagccgggagtgatggcacatacctgtagtcccagctactcgggaggctaaggtgggaggattgcatgagcctgggaagtggaggttgcagtgagccaagatcacaccacgacactccaacttgtgtcacagagtaagaccctatctcacaccaacacaaaagttgaagactttgttctacttagaatttcatcaaatttttgtctaaatttcctgacaaaggccttctaaagttgagatagtatttaaatcaagggacacttttgccatgaattagtaccattctaagaaatacagaatacaggtaaaagaacacattttttgatgaagaacaaaacatggtgattttcaagattagtgactaccttgtttaaaattattactaaagattttgaggagagggttcacagacagtctccgtatttacagctaatattaaactactctaggtagcaaaaacctgaactgatggtgctaaagtatcagaaagtttatgggttggcagaatagtggtgtgtgtgtttcattatgaacaagtacaataaaatgaatctagaaaaaatttaatctaaattgtatgaaataaatactattaattcttcagttataacccatgaggaatttttttttcctaatgaacttggtccagtcaatcaaaaaaaatcaacaaatgacatgtgtggaggaagaggagaaggagggacaagaagaggagaaacagaaggaggaaagggaagaggaggaaagggaggataaggatgaggaggggactatatatttataattttatatacatatatgtatagtcaccagtgtttgtttaacactatggtgtgtccttctgagatgttttccatagttcttgtcattaaatctcatgaaggaatgtgatgccactagagaaggctcacagaagagaatagcaggaggtatgtgaaatgatagtaagaaagaagacagacagaggacatacaataaaatgattagatgacggatttttcaaccggaaaaggcaaacatgatcttcctgaaaagaaggcataaccaaaact

SEQ ID NO: 299082 - DNA, 784 bp, Homo sapiens
  misc_feature (738)..(738): n is a, c, g, or t
  misc_feature (741)..(741): n is a, c, g, or t
atgtatagattttttattccttctaacctttgcttatttttctagatttatccagggtcaatagagttaatgcaggtgattgaagattttatacacattgttggaatggggatgatggactttcagaattcatacttaatgactggaaatgtaggtaagaaataggattttcccccaaaatctttctgaaataaaaaaaaattgcaagtatctacaccatacgtttccaagtataatattcattattcatatgtttaactgcatgtgagcaaatatatttctaatacttggtatctgacttttagatgggcctaaacacattgcattatatatatgtacacgtatatttgtatttatcttcatgcatttgtatgattgcttgtaggcctatttttgtgtatctttacatgtatatgtaggataatatgtatttattttttcattctgccaaatgctcattgctatctaatctagttatgaatgtgtgtgtgtgtatacacactagtaattttgaaaaacaacatattagtctttatgatcttccgtacattgttcttgaggatgccgagttactttctcactgattgtcccaggcaggagctgaatctgtgtgtggtagaacacttgagaataacttccagggttaagatgatggtgcaactgctgccaatgcagtttttctgaatatgttccagtacacagtggatctccggtaactcgggtatagtaacccaagcntcnttcaaaatacctaacccgcggtccggagcgggctctccggtgc

SEQ ID NO: 299083 - DNA, 2762 bp, Homo sapiens
caaggacgtcagaggcgagctggactgagtgaagtgtggagtaggaagcttaggaacgagtctttgggaacgtggtccacccagggatgtaaaactgtgcttaccgatgcatcccatacgaaatgcttatgtgatcgtctctctaccttcgccattttggctcagcaacctagagaaataatcatggaatcctctggcacaccttcagttaccctaatagtaggcagtggtctttcttgcttggccttgattaccctagcagttgtctatgcagcattatggaggtacatacgctctgagagatccataatactaattaacttctgcctgtctatcatctcatccaatatcctcatactggttggacagactcagacacataataagagtatctgcacaaccaccactgcatttttgcactttttcttcctggcttcattctgttgggttttgactgaggcgtggcaatcatatatggctgtaactggaaaaattaggacacggcttataagaaaacgctttttgtgccttggatggggtttaccagcattagtagtggccacatcagtaggcttcaccagaacaaaaggatatggcactgatcactactgctggctctctcttgaaggaggactactctatgcttttgtgggacctgcagccgctgttgtcctggtcaacatggtgattggcattttggtatttaataaacttgtttccagagatggaatcctagataaaaagctcaaacacagagccggtcagatgagtgagcctcatagcggtttgacgctcaaatgtgccaagtgtggagtagtttcaacaacagctttgtcagccaccaccgccagtaacgccatggcgtctctttggagctcctgtgtggtgttgccccttctggctttgacgtggatgtctgcggttctggccatgacagataaacgctccatattgtttcaaatactttttgctgtgtttgattcattgcaaggctttgttatagtcatggtccactgcattcttcggagagaggttcaggatgcatttagatgccgattgagaaactgtcaggatcccatcaatgcagattcttcgagttcgtttcctaatgggcatgctcaaatcatgacagactttgaaaaggatgtagacattgcctgtcgatcagttcttcataaggatattggtccttgccgagcagccacaataacaggaacactttctaggatttctctaaatgatgatgaagaagaaaagggaacaaaccctgaagggctaagctattcaacattgcctggaaatgtcatttccaaagtcatcatccagcaacccacaggtttgcacatgcccatgagtatgaatgagcttagcaatccatgtttgaaaaaagaaaatagtgaattgcggagaactgtgtacttatgtacggatgataatttgagaggggctgacatggacatagtccatcctcaagaaagaatgatggaaagtgactatattgtgatgcccagaagttctgtaaataaccagccttcaatgaaagaagaaagcaaaatgaatattggcatggaaaccttgccacatgaaaggctattgcactacaaagtaaaccctgaattcaatatgaatccccctgtaatggaccagttcaatatgaacttagagcaacatctcgcaccccaggaacatatgcagaatttgccctttgaacctcgcacagctgtgaagaatttcatggcctctgagttggatgataatgcaggactatcaagaagtgaaactggatcaacgatatcaatgagttctttagagagaagaaaatcacgatattcagaccttgactttgagaaggtcatgcatacaaggaagaggcatatggaactatttcaagaactaaatcagaaatttcaaactttggacagatttcgggatataccaaatacaagcagtatggaaaaccccgcaccaaacaagaatccatgggacactttcaaaaaccccagtgaatacccgcattacaccacaatcaatgtcttagacacagaggcaaaggatgctttggaactgaggccagcagagtgggagaagtgtctgaatttgcctctggatgtgcaagagggtgactttcaaacagaagtttaaaaaaatcaaaatggactaaggtagagacaaaactttattgcactgacacttaagacttgggaagcctgacatttctatctggacagtgtgactatcttatgtcaggaccttcatgtgccaaacgtcagtggtgttttcatatggtaacttctcactagtcaggctagtggagagatgaccaggtgtacagttctgaccatcctgtgttgtaagtacccgtggaatggatttgtaaggtaatctttatagataaacctcaagcaacgattcatgttgtaaccgcttcatatggtttagttttcaaaaaacttcaccatgaagcacaatgtatatatttatgcagtttttaaagtttataacagtctgtttggccattactacactttttactttataatataaaagcaaagtttttgtcattaaatgaatgtttgttgagctacattcttcattgctttaaatgcaataaagtaataatctcacttttatatgaataatatatttcacatctttattattgcagttttctctagaaagctctgagaagctttctctgctgcagctgtgtataaaatatttaaaatgttgtatggtgtaaataaacttttgtctacatatca

SEQ ID NO: 299084 - DNA, 2957 bp, Homo sapiens
tttcagcacctccggcgctggacagctctctgcacgccgcaccgccgcctgcttgctttttcccactctcgctttgcattactggagatgcatctaaattacatcctgttcaacaacaagtagatttttttttcctgtacaggaattacagtagacgactctctcaattaaactgcattttcttctttacggatttggctatcaggcgtatttatcccgatttcctcccccctcactcccctttgcaggaacgagtctttgggaacgtggtccacccagggatgtaaaactgtgcttaccgatgcatcccatacgaaatgcttatgtgatcgtctctctaccttcgccattttggctcagcaacctagagaaataatcatggaatcctctggcacaccttcagttaccctaatagtaggcagtggtctttcttgcttggccttgattaccctagcagttgtctatgcagcattatggaggtacatacgctctgagagatccataatactaattaacttctgcctgtctatcatctcatccaatatcctcatactggttggacagactcagacacataataagagtatctgcacaaccaccactgcatttttgcactttttcttcctggcttcattctgttgggttttgactgaggcgtggcaatcatatatggctgtaactggaaaaattaggacacggcttataagaaaacgctttttgtgccttggatggggtttaccagcattagtagtggccacatcagtaggcttcaccagaacaaaaggatatggcactgatcactactgctggctctctcttgaaggaggactactctatgcttttgtgggacctgcagccgctgttgtcctggtcaacatggtgattggcattttggtatttaataaacttgtttccagagatggaatcctagataaaaagctcaaacacagagccggtcagatgagtgagcctcatagcggtttgacgctcaaatgtgccaagtgtggagtagtttcaacaacagctttgtcagccaccaccgccagtaacgccatggcgtctctttggagctcctgtgtggtgttgccccttctggctttgacgtggatgtctgcggttctggccatgacagataaacgctccatattgtttcaaatactttttgctgtgtttgattcattgcaaggctttgttatagtcatggtccactgcattcttcggagagaggttcaggatgcatttagatgccgattgagaaactgtcaggatcccatcaatgcagattcttcgagttcgtttcctaatgggcatgctcaaatcatgacagactttgaaaaggatgtagacattgcctgtcgatcagttcttcataaggatattggtccttgccgagcagccacaataacaggaacactttctaggatttctctaaatgatgatgaagaagaaaagggaacaaaccctgaagggctaagctattcaacattgcctggaaatgtcatttccaaagtcatcatccagcaacccacaggtttgcacatgcccatgagtatgaatgagcttagcaatccatgtttgaaaaaagaaaatagtgaattgcggagaactgtgtacttatgtacggatgataatttgagaggggctgacatggacatagtccatcctcaagaaagaatgatggaaagtgactatattgtgatgcccagaagttctgtaaataaccagccttcaatgaaagaagaaagcaaaatgaatattggcatggaaaccttgccacatgaaaggctattgcactacaaagtaaaccctgaattcaatatgaatccccctgtaatggaccagttcaatatgaacttagagcaacatctcgcaccccaggaacatatgcagaatttgccctttgaacctcgcacagctgtgaagaatttcatggcctctgagttggatgataatgcaggactatcaagaagtgaaactggatcaacgatatcaatgagttctttagagagaagaaaatcacgatattcagaccttgactttgagaaggtcatgcatacaaggaagaggcatatggaactatttcaagaactaaatcagaaatttcaaactttggacagatttcgggatataccaaatacaagcagtatggaaaaccccgcaccaaacaagaatccatgggacactttcaaaaaccccagtgaatacccgcattacaccacaatcaatgtcttagacacagaggcaaaggatgctttggaactgaggccagcagagtgggagaagtgtctgaatttgcctctggatgtgcaagagggtgactttcaaacagaagtttaaaaaaatcaaaatggactaaggtagagacaaaactttattgcactgacacttaagacttgggaagcctgacatttctatctggacagtgtgactatcttatgtcaggaccttcatgtgccaaacgtcagtggtgttttcatatggtaacttctcactagtcaggctagtggagagatgaccaggtgtacagttctgaccatcctgtgttgtaagtacccgtggaatggatttgtaaggtaatctttatagataaacctcaagcaacgattcatgttgtaaccgcttcatatggtttagttttcaaaaaacttcaccatgaagcacaatgtatatatttatgcagtttttaaagtttataacagtctgtttggccattactacactttttactttataatataaaagcaaagtttttgtcattaaatgaatgtttgttgagctacattcttcattgctttaaatgcaataaagtaataatctcacttttatatgaataatatatttcacatctttattattgcagttttctctagaaagctctgagaagctttctctgctgcagctgtgtataaaatatttaaaatgttgtatggtgtaaataaacttttgtctacatatca

SEQ ID NO: 299085 - DNA, 3933 bp, Homo sapiens
cagctttccgacatcaccagccaaggatttttttccccgctctccttagtcgccgtccgtccatcagtacctgcaggggggaggaggaggagggaggaaagcggaaagaggaaaaagcataagcttgagccttccgatccgaccacgaatactcctgtaataaacccaccgccccaacaaatctgccatagcagccgccgccgccgccggtcacttctcgtctcagcgctttctttgcttcttggtttgttgggggtagcttttatgaaacaaatctttgctattaagccacttacattttggggggttccttagagtctcccttgggggggcttctccctccctttagcccccctcggtttggaggttggattcagttggatacggcgcaaggttctgggctcctgctggcttttttttcctctctctcatcgacccccctttggttcccaccccccaccttttgcttttcgtatgtatgcatttttaaaaataaatcctgattttggaagctgagccggggaaaatgggcaacggtgattgggaccgaaggggagtctctccgtcactgttgctgggacgcgtgcctgtgctggtgtcttagagcaagagcctccctgagctttcggagtggaaggccaaatgacataggatgaaggctgttcgtaacctgctgatttatatattttccacctatctcctggttatgtttggatttaatgctgcccaagacttctggtgttcaactttggtgaagggagtcatttatggatcgtattctgtaagtgaaatgtttcctaaaaactttacaaactgcacttggacgctggaaaatccagatccaaccaaatatagcatttacctgaaattttccaaaaaggaccttagctgctctaacttttcactcctggcttatcagtttgatcatttttcccatgaaaaaataaaggatcttttaagaaagaatcattctataatgcaactctgcaattccaagaatgctttcgtttttctacagtatgataaaaattttattcaaatacgtcgagtatttccaactaatttcccaggattacagaaaaaaggggaagaagatcagaaatctttttttgagtttttggtattgaacaaggtcagcccaagccagtttggttgccatgtattatgtacttggttggagagctgcttaaaatcagaaaatgggagaacagaatcatgtgggatcatgtatacaaaatgcacctgccctcagcatttgggagagtgggggatcgacgaccagtcgctgattttgttaaataacgtggtgttacccctgaatgagcagacagagggctgcctgacccaggagctgcaaaccacccaagtctgcaatcttaccagggaggccaagcgaccacccaaagaagaatttggaatgatgggagatcatacaattaaaagtcagcgacctcgatctgttcatgaaaaaagggtccctcaggaacaagctgatgctgctaaatttatggcacaaactggtgaatctggtgtggaagagtggtcccagtggagcacatgttcggttacttgtggtcaagggtcgcaggtgcgaaccagaacttgtgtatcaccttacgggacacactgcagcggcccattaagagaatcaagggtttgcaataacactgccctctgtccagtacacggagtatgggaggaatggtcaccatggagtttatgttcatttacatgtggtcgaggccaaagaacaagaacaaggtcatgcacacctcctcagtatggaggaaggccgtgtgaaggacctgaaacacatcataagccttgtaatattgctctttgcccagttgatggacagtggcaagagtggagttcgtggagccagtgctcagtaacgtgctcgaatgggactcagcagagaagccggcagtgcactgcagctgcccatggaggctccgaatgcagagggccatgggcagaaagcagagagtgctataaccctgaatgtacagccaatggtcaatggaatcagtggggtcattggagtggttgttccaagtcctgtgatggcggctgggaaaggcgaataaggacctgtcagggtgcagtgataacagggcagcaatgtgaaggaacgggcgaagaagtgagaagatgcagtgagcagcgatgccctgcaccttatgaaatatgccctgaggattatctgatgtcgatggtgtggaaaagaactccagcaggcgacttggcattcaatcaatgtcccctgaatgccacaggcaccactagcagacgctgctctctcagtcttcatggagtggccttctgggaacagccgagctttgcaagatgcatatcaaatgagtacagacacttgcagcattcaattaaagagcaccttgctaaggggcagcgaatgctggcaggtgatggaatgtcccaggtgaccaagacactgttggatttaactcagagaaaaaatttctatgcaggcgatcttctgatgtctgtggagatcctgagaaatgtgacagacacatttaaaagggcaagttacatccctgcatctgatggtgtccagaacttctttcaaatagttagcaaccttctagatgaagaaaacaaggaaaaatgggaagatgcacaacagatttatccagggtcaatagagttaatgcaggtgattgaagattttatacacattgttggaatggggatgatggactttcagaattcatacttaatgactggaaatgtagtggctagtattcagaagcttcctgcagcctctgttctaacagacatcaactttccaatgaaaggacggaagggaatggttgactgggcaagaaactcagaagatagggtagtaattccaaaaagcattttcactccggtgtcatcaaaagaattagatgaatcatctgtatttgttcttggcgcagtcctatacaaaaacttagatctaattttgcccactttgagaaattatactgtcattaattccaaaatcatcgtggtcacaataaggcctgaacccaaaacaaccgattcgtttctggagatagaactagctcatttggctaatggtactttgaatccctattgtgtattgtgggatgactccaaaacgaacgagtctttgggaacgtggtccacccagggatgtaaaactgtgcttaccgatgcatcccatacgaaatgcttatgtgatcgtctctctaccttcgccattttggctcagcaacctagagaaatatgtctgaatttgcctctggatgtgcaagagggtgactttcaaacagaagtttaaaaaaatcaaaatggactaaggtagagacaaaactttattgcactgacacttaagacttgggaagcctgacatttctatctggacagtgtgactatcttatgtcaggaccttcatgtgccaaacgtcagtggtgttttcatatggtaacttctcactagtcaggctagtggagagatgaccaggtgtacagttctgaccatcctgtgttgtaagtacccgtggaatggatttgtaaggtaatctttatagataaacctcaagcaacgattcatgttgtaaccgcttcatatggtttagttttcaaaaaacttcaccatgaagcacaatgtatatatttatgcagtttttaaagtttataacagtctgtttggccattactacactttttactttataatataaaagcaaagtttttgtcattaaatgaatgtttgttgagctacattcttcattgctttaaatgcaataaagtaataatctcacttttatatgaataatatatttcacatctttattattgcagttttctctagaaagctctgagaagctttctctgctgcagctgtgtataaaatatttaaaatgttgtatggtgtaaataaacttttgtctacatatca

SEQ ID NO: 299086 - DNA, 1778 bp, Homo sapiens
caaggacgtcagaggcgagctggactgagtgaagtgtggagtaggaagcttaggaacgagtctttgggaacgtggtccacccagggatgtaaaactgtgcttaccgatgcatcccatacgaaatgcttatgtgatcgtctctctaccttcgccattttggctcagcaacctagagaaataatcatggaatcctctggcacaccttcagttaccctaatagtaggcagtggtctttcttgcttggccttgattaccctagcagttgtctatgcagcattatggaggtacatacgctctgagagatccataatactaattaacttctgcctgtctatcatctcatccaatatcctcatactggttggacagactcagacacataataagagtatctgcacaaccaccactgcatttttgcactttttcttcctggcttcattctgttgggttttgactgaggcgtggcaatcatatatggctgtaactggaaaaattaggacacggcttataagaaaacgctttttgtgccttggatggggtttaccagcattagtagtggccacatcagtaggcttcaccagaacaaaaggatatggcactgatcactactgctggctctctcttgaaggaggactactctatgcttttgtgggacctgcagccgctgttgtcctggtcaacatggtgattggcattttggtatttaataaacttgtttccagagatggaatcctagataaaaagctcaaacacagagccggtcagatgagtgagcctcatagcggtttgacgctcaaatgtgccaagtgtggagtagtttcaacaacagctttgtcagccaccaccgccagtaacgccatggcgtctctttggagctcctgtgtggtgttgccccttctggctttgacgtggatgtctgcggttctggccatgacagataaacgctccatattgtttcaaatactttttgctgtgtttgattcattgcaaggctttgttatagtcatggtccactgcattcttcggagagaggtgagaagcattcttgtgatagagaacagtgatggttggaatggtatttccttgctaaaaagaatgatcttttaatatcttgatgttcagattaaagctggtctcctccattgacaatcacttgggaatcaaagctgaaggaatgctttaagacacagcttgggagagcccccagcactctgaaagtgacagattagaacagatgggactatgccaggaaaaacacaaccagaggtgtcaaaagccaggaagaatagatttaaaagaagctacatggagtgatttgtataaataagtcttgttagaaaaactagtgaataagagggcatagaggcataagttttaaagacacagttcatgagcataatgcagtgatagttcttaagcttattccctaactcatgtttcttcacacagcacaccctcattgcatatattaactaatactattttaagcagaaagcattgaagatgaatgcttagatcttttgtctctatactaagttttggttatgattgctatggattattgcttttgatatggatgtttactcttagaaaaatactaaaaatgtatacagtgagacatgataggcagtgattatctccaagaactgtagaggtattatcatatcagcatttctctggatcatgattgaggtttattgtcagtagtaggggaagaaataagtcatatttcatgaatgcagacactaactagcaccagatccatccaggacagtgag

SEQ ID NO: 299087 - DNA, 3339 bp, Homo sapiens
cagctttccgacatcaccagccaaggatttttttccccgctctccttagtcgccgtccgtccatcagtacctgcaggggggaggaggaggagggaggaaagcggaaagaggaaaaagcataagcttgagccttccgatccgaccacgaatactcctgtaataaacccaccgccccaacaaatctgccatagcagccgccgccgccgccggtcacttctcgtctcagcgctttctttgcttcttggtttgttgggggtagcttttatgaaacaaatctttgctattaagccacttacattttggggggttccttagagtctcccttgggggggcttctccctccctttagcccccctcggtttggaggttggattcagttggatacggcgcaaggttctgggctcctgctggcttttttttcctctctctcatcgacccccctttggttcccaccccccaccttttgcttttcgtatgtatgcatttttaaaaataaatcctgattttggaagctgagccggggaaaatgggcaacggtgattgggaccgaaggggagtctctccgtcactgttgctgggacgcgtgcctgtgctggtgtcttagagcaagagcctccctgagctttcggagtggaaggccaaatgacataggatgaaggctgttcgtaacctgctgatttatatattttccacctatctcctggttatgtttggatttaatgctgcccaagacttctggtgttcaactttggtgaagggagtcatttatggatcgtattctgtaagtgaaatgtttcctaaaaactttacaaactgcacttggacgctggaaaatccagatccaaccaaatatagcatttacctgaaattttccaaaaaggaccttagctgctctaacttttcactcctggcttatcagtttgatcatttttcccatgaaaaaataaaggatcttttaagaaagaatcattctataatgcaactctgcaattccaagaatgctttcgtttttctacagtatgataaaaattttattcaaatacgtcgagtatttccaactaatttcccaggattacagaaaaaaggggaagaagatcagaaatctttttttgagtttttggtattgaacaaggtcagcccaagccagtttggttgccatgtattatgtacttggttggagagctgcttaaaatcagaaaatgggagaacagaatcatgtgggatcatgtatacaaaatgcacctgccctcagcatttgggagagtgggggatcgacgaccagtcgctgattttgttaaataacgtggtgttacccctgaatgagcagacagagggctgcctgacccaggagctgcaaaccacccaagtctgcaatcttaccagggaggccaagcgaccacccaaagaagaatttggaatgatgggagatcatacaattaaaagtcagcgacctcgatctgttcatgaaaaaagggtccctcaggaacaagctgatgctgctaaatttatggcacaaactggtgaatctggtgtggaagagtggtcccagtggagcacatgttcggttacttgtggtcaagggtcgcaggtgcgaaccagaacttgtgtatcaccttacgggacacactgcagcggcccattaagagaatcaagggtttgcaataacactgccctctgtccagtacacggagtatgggaggaatggtcaccatggagtttatgttcatttacatgtggtcgaggccaaagaacaagaacaaggtcatgcacacctcctcagtatggaggaaggccgtgtgaaggacctgaaacacatcataagccttgtaatattgctctttgcccagttgatggacagtggcaagagtggagttcgtggagccagtgctcagtaacgtgctcgaatgggactcagcagagaagccggcagtgcactgcagctgcccatggaggctccgaatgcagagggccatgggcagaaagcagagagtgctataaccctgaatgtacagccaatggtcaatggaatcagtggggtcattggagtggttgttccaagtcctgtgatggcggctgggaaaggcgaataaggacctgtcagggtgcagtgataacagggcagcaatgtgaaggaacgggcgaagaagtgagaagatgcagtgagcagcgatgccctgcaccttatgaaatatgccctgaggattatctgatgtcgatggtgtggaaaagaactccagcaggcgacttggcattcaatcaatgtcccctgaatgccacaggcaccactagcagacgctgctctctcagtcttcatggagtggccttctgggaacagccgagctttgcaagatgcatatcaaatgagtacagacacttgcagcattcaattaaagagcaccttgctaaggggcagcgaatgctggcaggtgatggaatgtcccaggtgaccaagacactgttggatttaactcagagaaaaaatttctatgcaggcgatcttctgatgtctgtggagatcctgagaaatgtgacagacacatttaaaagggcaagttacatccctgcatctgatggtgtccagaacttctttcaaatagttagcaaccttctagatgaagaaaacaaggaaaaatgggaagatgcacaacagatttatccagggtcaatagagttaatgcaggtgattgaagattttatacacattgttggaatggggatgatggactttcagaattcatacttaatgactggaaatgtaggtaagaaataggattttcccccaaaatctttctgaaataaaaaaaaattgcaagtatctacaccatacgtttccaagtataatattcattattcatatgtttaactgcatgtgagcaaatatatttctaatacttggtatctgacttttagatgggcctaaacacattgcattatatatatgtacacgtatatttgtatttatcttcatgcatttgtatgattgcttgtaggcctatttttgtgtatctttacatgtatatgtaggataatatgtatttattttttcattctgccaaatgctcattgctatctaatctagttatgaatgtgtgtgtgtgtatacacactagtaattttgaaaaacaacatattagtctttatgatcttccgtacattgttcttgaggatgccgagttactttctcactgattgtcccaggcaggagctgaatctgtgtgtggtagaacacttgagaataacttccagggttaagatgatggtgcaactgctgccaatgcagtttttctgaatatgttccagtacacagtggatctctcaggtccctctgagtggattctg

SEQ ID NO: 299088 - DNA, 970 bp, Homo sapiens
aggtgattttctgagtgtgactcctctgttcctggcaccctgtgcatccttagccatagcttacaagagaacagctggttgtgatggcaggaggccctcccaacaccaaggcggagatggaaatgtccctggcagaagaactgaatcatggacgccaaggggaaaaccaagagcacctggtgatagcagaaatgatggagcttggatctcggtcccggggtgcctcccagaagaagcagaagttggaacaaaaagctgctggctctgcttcagccaaacgagtttggaatatgactgccacccgacccaagaaaatgcaacccagggacagatgcagtggcgcagactagcctggaagagttcaatgtactggagatggaagtcatgagaagacagctgtatgcagtcaaccggcgtctgcgcgccctggaggaacagggcgccacctggcgccacagggagaccctgatcatcgccgtgctggtgtcggccagcattgccaacctgtggctgtggatgaaccagtgatcgccccagcgcggcctccgtattggagccctccctgcttccccttctttctttcctctttccccaggccgccactgcccttgcccctttcatctcccagcagccctcaggagcgtcaggatcattttcaactctggttaggcctcctacctggggaggccaggtcactgcactgggaggtcctggctgctgcgaagctggaggaggactgcgtgggctgagatgccaccctttgaagggtgaacagcatggcggcatctgggccccacagtaacacctagtggcaaccttgccttcctgacctcagcggcccttctgttccatcctctgtgggcaggggtgtggctttgttttcctccctcgtttgcttccacctcgtgcacagcgctctgcacagacaacacgctcaataaaagttcagccatagcagcaaaaacctgtg

SEQ ID NO: 299089 - DNA, 1077 bp, Homo sapiens
aggtgattttctgagtgtgactcctctgttcctggcaccctgtgcatccttagccatagcttacaagagaacagctggttgtgatggcaggaggccctcccaacaccaaggcggagatggaaatgtccctggcagaagaactgaatcatggacgccaaggggaaaaccaagagcacctggtgatagcagaaatgatggagcttggatctcggtcccggggtgcctcccagaagaagcagaagttggaacaaaaagctgctggctctgcttcagccaaacgagtttggaatatgactgccacccgacccaagaaaatggggtcccagctgccaaagcccagaatgctgagagaatcaggccatggggatgcccatctccaggagtacgctggcaatttccaaggcatacgtttccattatgatcgcaacccagggacagatgcagtggcgcagactagcctggaagagttcaatgtactggagatggaagtcatgagaagacagctgtatgcagtcaaccggcgtctgcgcgccctggaggaacagggcgccacctggcgccacagggagaccctgatcatcgccgtgctggtgtcggccagcattgccaacctgtggctgtggatgaaccagtgatcgccccagcgcggcctccgtattggagccctccctgcttccccttctttctttcctctttccccaggccgccactgcccttgcccctttcatctcccagcagccctcaggagcgtcaggatcattttcaactctggttaggcctcctacctggggaggccaggtcactgcactgggaggtcctggctgctgcgaagctggaggaggactgcgtgggctgagatgccaccctttgaagggtgaacagcatggcggcatctgggccccacagtaacacctagtggcaaccttgccttcctgacctcagcggcccttctgttccatcctctgtgggcaggggtgtggctttgttttcctccctcgtttgcttccacctcgtgcacagcgctctgcacagacaacacgctcaataaaagttcagccatagcagcaaaaacctgtg

SEQ ID NO: 299090 - DNA, 1030 bp, Homo sapiens
aggtgattttctgagtgtgactcctctgttcctggcaccctgtgcatccttagccatagcttacaagagaacagctggttgtgatggcaggaggccctcccaacaccaaggcggagatggaaatgtccctggcagaagaactgaatcatggacgccaaggggaaaaccaagagcacctggtgatagcagaaatgatggagcttggatctcggtcccggggtgcctcccagaagaagcagaagttggaacaaaaagctgctggctctgcttcagccaaacgagtttggaatatgactgccacccgacccaagaaaatgggatgcccatctccaggagtacgctggcaatttccaaggcatacgtttccattatgatcgcaacccagggacagatgcagtggcgcagactagcctggaagagttcaatgtactggagatggaagtcatgagaagacagctgtatgcagtcaaccggcgtctgcgcgccctggaggaacagggcgccacctggcgccacagggagaccctgatcatcgccgtgctggtgtcggccagcattgccaacctgtggctgtggatgaaccagtgatcgccccagcgcggcctccgtattggagccctccctgcttccccttctttctttcctctttccccaggccgccactgcccttgcccctttcatctcccagcagccctcaggagcgtcaggatcattttcaactctggttaggcctcctacctggggaggccaggtcactgcactgggaggtcctggctgctgcgaagctggaggaggactgcgtgggctgagatgccaccctttgaagggtgaacagcatggcggcatctgggccccacagtaacacctagtggcaaccttgccttcctgacctcagcggcccttctgttccatcctctgtgggcaggggtgtggctttgttttcctccctcgtttgcttccacctcgtgcacagcgctctgcacagacaacacgctcaataaaagttcagccatagcagcaaaaacctgtg

SEQ ID NO: 299091 - DNA, 977 bp, Homo sapiens
gggggtgtggactaagccagctttgaaaggcatttggggtctcagcagtgggatactatttaaggctaagggtatgtagtttattcagtagaaaccaagtgcttattttctctctgaggttctgcattagatttgatgactctttttctgcctccaaaggcttgtaaataaggggaaattctcatcaagcaatccacaaacttgaggagaaacacagatattggaataattccctccgcatgaagcaggtgtattgataaaaacgccagcaactgctgctggagcccctgtgaaattcccagtcatttattttcacttttttttctcctttcagcatggcagggggcttgagatattcctttttaacactgagcagccagttaaaacctaaacctgtgggtgaagaaaacatctgtttggatttgaagagctaaagagtctgcagcaggattggagactgacttgtgactgcgggctgggggggcattcccagtaggaatgtgaagccagaggtttcggattcgtgacatccaccccctgggcaagtgagagcatctgcaaaatgcaaagagaactacctcatatgcaggatgagccaatggcagtctcaagaaatgtactcgggcgacaccttacctgtggaaagcaaatcttttcaaaataagccactgggactcggtaggtggagccccagctgctcttctagggacctatggggccttcgtggcatctctgtgctgtgtgctggggaggaggttgatgtaatggtgactcttttctgatcagcaccttggccgtgattcccaaggtcccagccaaagcaaagggccagttgtttcagtttaaacagacatgtctttagtctaataaaattagttaactgccagtaaagttatttgttagctttgatgaaagctatgttggtatctttccctaatcatcaaagtaaataaaaaatcatttctaaaaaaaaaaaa

SEQ ID NO: 299092 - DNA, 1283 bp, Homo sapiens
agcgggaccagtgcgcagccggggctggcgggcggcggggtccgcggggccgcaggagatgacggccggcggccaggccgaggccgagggcgctggcggggagcccggcgcggcgcggctgccctcgcgggtggcccggctgctgtcggcgctcttctacgggacctgctccttcctcatcgtgcttgtcaacaaggcgctgctgaccacctacggtttcccgtcaccaattttccttggaattggacagatggcagccaccataatgatactatatgtgtccaagctaaacaaaatcattcacttccctgattttgataagaaaattcctgtaaagctgtttcctctgcctctcctctacgttggaaaccacataagtggattatcaagcacaagtaaattaagcctaccgatgttcaccgtgctcaggaaattcaccattccacttaccttacttctggaaaccatcatacttgggaagcagtattcactcaacatcatcctcagtgtctttgccattattctcggggctttcatagcagctgggtaagactttggactgtttctgctcaataacttctttgtgtctttgacaataggcccagccccatcctcagtttttcattttccatctggctgctgttgaattgagcaggcaagagacaaatctgttgaagttagtggaatccccatgtgttcctatgaaagtcaaagtgggtcccacattggccagaaaatttctgagaatatatgaagagagcattgcaagatattaatatagcttttcttcacaaaaagcagtgaactgtttacatttcttactgaatgtttgtcttcattataacaactttacttgagaagttcttaggcatttgattaataataacagacttacaaagcctttgtctgctgatttattttattattccatgataccttagcagttgctgtttccgatggtagaatgctaaatatatttgtacgtttgggatatgagccaacactggtgcatgactactactttaataattattttgcaaaaggaataacgaggactccaagtcttcgtgggcaggcaggtgctcagatttctgctatagcatggtggatagtgcatgtgaatagttacatccctgggttcaaaacttagctccaggctgggtgtggtggctcacccctataatcccagcactgtaggaagcctaggtgggaatatcacctgagcccatgagtttgagataagcttgggaaacattgtgagaacctatttctacaaaaaaaaa

SEQ ID NO: 299093 - DNA, 997 bp, Homo sapiens
tgcttaagaaataatgtaaatttagtctgacttagaaacacttttagtgctttctctgcatcaagcattgtctgctggattttagctataaaaatgctgatgtctattttcaatttgtttaaaaaatataatcatatttcaatgttttcctctctgctccctttcctttcttatttgtgtatttattacaggaagcagtattcactcaacatcatcctcagtgtctttgccattattctcggggctttcatagcagctgggtaagactttggactgtttctgctcaataacttctttgtgtctttgacaataggcccagccccatcctcagtttttcattttccatctggctgctgttgaattgagcaggcaagagacaaatctgttgaagttagtggaatccccatgtgttcctatgaaagtcaaagtgggtcccacattggccagaaaatttctgagaatatatgaagagagcattgcaagatattaatatagcttttcttcacaaaaagcagtgaactgtttacatttcttactgaatgtttgtcttcattataacaactttacttgagaagttcttaggcatttgattaataataacagacttacaaagcctttgtctgctgatttattttattattccatgataccttagcagttgctgtttccgatggtagaatgctaaatatatttgtacgtttgggatatgagccaacactggtgcatgactactactttaataattattttgcaaaaggaataacgaggactccaagtcttcgtgggcaggcaggtgctcagatttctgctatagcatggtggatagtgcatgtgaatagttacatccctgggttcaaaacttagctccaggctgggtgtggtggctcacccctataatcccagcactgtaggaagcctaggtgggaatatcacctgagcccatgagtttgagataagcttgggaaacattgtgagaacctatttctacaaaaaaaaa

SEQ ID NO: 299094 - DNA, 1507 bp, Homo sapiens
agcgggaccagtgcgcagccggggctggcgggcggcggggtccgcggggccgcaggagatgacggccggcggccaggccgaggccgagggcgctggcggggagcccggcgcggcgcggctgccctcgcgggtggcccggctgctgtcggcgctcttctacgggacctgctccttcctcatcgtgcttgtcaacaaggcgctgctgaccacctacggtttcaagcatactgaaaacgggaaagcaaaggaggagtgaacagggcacacacagtactgggattcccctccagcctttgaaatttcccgtcaccaattttccttggaattggacagatggcagccaccataatgatactatatgtgtccaagctaaacaaaatcattcacttccctgattttgataagaaaattcctgtaaagctgtttcctctgcctctcctctacgttggaaaccacataagtggattatcaagcacaagtaaattaagtgatggggtctttcaatgttgctgtgttacccagactcaaatgcagtagctttcactggtgcaatcatggctcactgtggcctcaaactcctgggctcaaatgattctccacctcagcctctcgagtacctgggactgcagcctaccgatgttcaccgtgctcaggaaattcaccattccacttaccttacttctggaaaccatcatacttgggaagcagtattcactcaacatcatcctcagtgtctttgccattattctcggggctttcatagcagctgggtaagactttggactgtttctgctcaataacttctttgtgtctttgacaataggcccagccccatcctcagtttttcattttccatctggctgctgttgaattgagcaggcaagagacaaatctgttgaagttagtggaatccccatgtgttcctatgaaagtcaaagtgggtcccacattggccagaaaatttctgagaatatatgaagagagcattgcaagatattaatatagcttttcttcacaaaaagcagtgaactgtttacatttcttactgaatgtttgtcttcattataacaactttacttgagaagttcttaggcatttgattaataataacagacttacaaagcctttgtctgctgatttattttattattccatgataccttagcagttgctgtttccgatggtagaatgctaaatatatttgtacgtttgggatatgagccaacactggtgcatgactactactttaataattattttgcaaaaggaataacgaggactccaagtcttcgtgggcaggcaggtgctcagatttctgctatagcatggtggatagtgcatgtgaatagttacatccctgggttcaaaacttagctccaggctgggtgtggtggctcacccctataatcccagcactgtaggaagcctaggtgggaatatcacctgagcccatgagtttgagataagcttgggaaacattgtgagaacctatttctacaaaaaaaaa

SEQ ID NO: 299095 - DNA, 1615 bp, Homo sapiens
agcgggaccagtgcgcagccggggctggcgggcggcggggtccgcggggccgcaggagatgacggccggcggccaggccgaggccgagggcgctggcggggagcccggcgcggcgcggctgccctcgcgggtggcccggctgctgtcggcgctcttctacgggacctgctccttcctcatcgtgcttgtcaacaaggcgctgctgaccacctacggtttcccgtcaccaattttccttggaattggacagatggcagccaccataatgatactatatgtgtccaagctaaacaaaatcattcacttccctgattttgataagaaaattcctgtaaagctgtttcctctgcctctcctctacgttggaaaccacataagtggattatcaagcacaagtaaattaagcctaccgatgttcaccgtgctcaggaaattcaccattccacttaccttacttctggaaaccatcatacttgggaagcagtattcactcaacatcatcctcagtgtctttgccattattctcggggctttcatagcagctgggtctgaccttgcttttaacttagaaggctatatttttgtattcctgaatgatatcttcacagcagcaaatggagtttataccaaacagaaaatggacccaaaggagctagggaaatacggagtacttttctacaatgcctgcttcatgattatcccaactcttattattagtgtctccactggagacctgcaacaggctactgaattcaaccaatggaagaatgttgtgtttatcctacagtttcttctttcctgttttttggggtttctgctgatgtactccacggttctgtgcagctattacaattcagccctgacgacagcagtggttggagccatcaagaatgtatccgttgcctacattgggatattaatcggtggagactacattttctctttgttaaactttgtagggttaaatatttgcatggcagggggcttgagatattcctttttaacactgagcagccagttaaaacctaaacctgtgggtgaagaaaacatctgtttggatttgaagagctaaagagtctgcagcaggattggagactgacttgtgactgcgggctgggggggcattcccagtaggaatgtgaagccagaggtttcggattcgtgacatccaccccctgggcaagtgagagcatctgcaaaatgcaaagagaactacctcatatgcaggatgagccaatggcagtctcaagaaatgtactcgggcgacaccttacctgtggaaagcaaatcttttcaaaataagccactgggactcggtaggtggagccccagctgctcttctagggacctatggggccttcgtggcatctctgtgctgtgtgctggggaggaggttgatgtaatggtgactcttttctgatcagcaccttggccgtgattcccaaggtcccagccaaagcaaagggccagttgtttcagtttaaacagacatgtctttagtctaataaaattagttaactgccagtaaagttatttgttagctttgatgaaagctatgttggtatctttccctaatcatcaaagtaaataaaaaatcatttctaaaaaaaaaaaa

SEQ ID NO: 299096 - DNA, 2772 bp, Homo sapiens
agcgggaccagtgcgcagccggggctggcgggcggcggggtccgcggggccgcaggagatgacggccggcggccaggccgaggccgagggcgctggcggggagcccggcgcggcgcggctgccctcgcgggtggcccggctgctgtcggcgctcttctacgggacctgctccttcctcatcgtgcttgtcaacaaggcgctgctgaccacctacggtttcccgtcaccaattttccttggaattggacagatggcagccaccataatgatactatatgtgtccaagctaaacaaaatcattcacttccctgattttgataagaaaattcctgtaaagctgtttcctctgcctctcctctacgttggaaaccacataagtggattatcaagcacaagtaaattaagcctaccgatgttcaccgtgctcaggaaattcaccattccacttaccttacttctggaaaccatcatacttgggaagcagtattcactcaacatcatcctcagtgtctttgccattattctcggggctttcatagcagctgggtctgaccttgcttttaacttagaaggctatatttttgtattcctgaatgatatcttcacagcagcaaatggagtttataccaaacagaaaatggacccaaaggagctagggaaatacggagtacttttctacaatgcctgcttcatgattatcccaactcttattattagtgtctccactggagacctgcaacaggctactgaattcaaccaatggaagaatgttgtgtttatcctacagtttcttctttcctgttttttggggtttctgctgatgtactccacggttctgtgcagctattacaattcagccctgacgacagcagtggttggagccatcaagaatgtatccgttgcctacattgggatattaatcggtggagactacattttctctttgttaaactttgtagggttaaatatttgcatggcagggggcttgagatattcctttttaacactgagcagccagttaaaacctaaacctgtgggtgaagaaaacatctgtttggatttgaagagctaaagagtctgcagcaggattggagactgacttgtgactgcgggctgggggggcattcccagtaggaatgtgaagccagaggtttcggattcgtgacatccaccccctgggcaagtgagagcatctgcaaaatgcaaagagaactacctcatatgcaggatgagccaatggcagtctcaagaaatgtactcgggcgacaccttacctgtggaaagcaaatcttttcaaaataagccactgggactcgctcgacttggtggaagttctgcctcaggtgggcatagccaaaaaggggtcattctcttctcggttcctggggaattggatccaactgggagaagaccacctgaattctcatcccatctaagttgaagatgctattttttaaaaatttaatttgtaattttaagttctgggatacatgtgcaggatgtgcaggtttgttacataggtaaatgtgtgccctggtggtttgctgcacctatcaacctatcacctaggtattaagccccacatgcattagctatttatcctgatgctccctctcccgcacccccctaacaggccccagtgtgtgttgttcccctccctgtgtccatgtattctcattgttcagctcccacttataagtgaaaacatgcagtgtttggttttctgttcctgtgttagtttgctgaggataatggcttctagctccatccatgtccctgcaatggacatgatctcgttccttttgatggctgcatagtattccgtggtgtgtatgtaccatgttttctttatccagtctatcatagatgggcatttgggttgattccatgtttttgctgttgtgaatagtgctgcagtgaacatacacatgcttgtatctttatttttaaaaatctttttttttgaagacagggtctggctctgttgcccaggcaggagtacagtggcattatctcagctcactgcaaccactgcctcccaggctcaagtgatctgccctcctcagcctcctaagtagctgagaccacagggacacaccattacacctggctaattgttgtattttagtagagatgggatctttctatgttgcctaggctggcctcaagtgatcctcctgccttggcctcccaaagtgctgtgattacaggtgtgaaccaccatgcccagccagagatgctcaattcctggtgagtgcagctgaggggctagggccctctctaccaagcccctacccattagatgcaggctctacctcaagtacagcaggccacaaatactggggtccccattacccttgccccagctcacttggaaggctgttccacactggggagagatgatctgacaagaccagaggctaccaccctgtccagcacccagacgagtggctcagagaggctgcccagggaggacgcagcctgtgcagtaaagaatttaatcttgcccaaaaagatgtctggtctttgccctaagcttcttggaatatcatgccaaagaggagtgtctttgtttgcctggggaccttgggttacattagatagtctaacaatgtgatttcagatgggggctggctacaccagaaagaccaacagggtggtttagggtgaaggctttgggtgatacctggggagtctggagacagagatcagccatgtgggcaatcagtgaagtttatgtaatgaagccctaataaaaactctgaacactga

SEQ ID NO: 299097 - DNA, 1532 bp, Homo sapiens
agcgggaccagtgcgcagccggggctggcgggcggcggggtccgcggggccgcaggagatgacggccggcggccaggccgaggccgagggcgctggcggggagcccggcgcggcgcggctgccctcgcgggtggcccggctgctgtcggcgctcttctacgggacctgctccttcctcatcgtgcttgtcaacaaggcgctgctgaccacctacggtttcccgtcaccaattttccttggaattggacagatggcagccaccataatgatactatatgtgtccaagctaaacaaaatcattcacttccctgattttgataagaaaattcctgtaaagctgtttcctctgcctctcctctacgttggaaaccacataagtggattatcaagcacaagtaaattaagcctaccgatgttcaccgtgctcaggaaattcaccattccacttaccttacttctggaaaccatcatacttgggaagcagtattcactcaacatcatcctcagtgtctttgccattattctcggggctttcatagcagctgggtctgaccttgcttttaacttagaaggctatatttttgtattcctgaatgatatcttcacagcagcaaatggagtttataccaaacagaaaatggacccaaaggagctagggaaatacggagtacttttctacaatgcctgcttcatgattatcccaactcttattattagtgtctccactggagacctgcaacaggctactgaattcaaccaatggaagaatgttgtgtttatcctacagtttcttctttcctgttttttggggtttctgctgatgtactccacggttctgtgcagctattacaattcagccctgacgacagcagtggttggagccatcaagcatggcagggggcttgagatattcctttttaacactgagcagccagttaaaacctaaacctgtgggtgaagaaaacatctgtttggatttgaagagctaaagagtctgcagcaggattggagactgacttgtgactgcgggctgggggggcattcccagtaggaatgtgaagccagaggtttcggattcgtgacatccaccccctgggcaagtgagagcatctgcaaaatgcaaagagaactacctcatatgcaggatgagccaatggcagtctcaagaaatgtactcgggcgacaccttacctgtggaaagcaaatcttttcaaaataagccactgggactcggtaggtggagccccagctgctcttctagggacctatggggccttcgtggcatctctgtgctgtgtgctggggaggaggttgatgtaatggtgactcttttctgatcagcaccttggccgtgattcccaaggtcccagccaaagcaaagggccagttgtttcagtttaaacagacatgtctttagtctaataaaattagttaactgccagtaaagttatttgttagctttgatgaaagctatgttggtatctttccctaatcatcaaagtaaataaaaaatcatttctaaaaaaaaaaaa

SEQ ID NO: 299098 - DNA, 389 bp, Homo sapiens
gtgtccaagctaaacaaaatcattcacttccctgattttgataagaaaattcctgtaaaggtaagtaatgaaaagtatgtatgactgtgatagaagatgtgaaaatacacattgattttagagtacaggtcaatttctatacacactgtacttcctgcctgcactggatagaaacttctttttttgtttgagatggactgtcgctctgtcgcccaggctggagtgcaatggtgtgatcttggctcactgcaatctccgcctcctgggttcaagtgattctcgtgcctcagcctccctagtagctgggattacaggtgcctgccaccattcccagctaattttttttgttttgttttgtttttgtatttttagtagagatggggtttcac

SEQ ID NO: 299099 - DNA, 383 bp, Homo sapiens
ctcgaattcaagcttctaacgatgtacggggacatggtggcgtgtgcctgtaatctcagctactcaggaggctgaggcaggagaatcgcttgaacccaggaggcggaggctgcagtgagctgagattgtgccactgcactccagcctgggagacagagcaagactcagtctcaaaaaaaaaaaaaaaaagcatttttctgttttaatgtttggagacttttttttttgttctctccctttcctgaaccctattctgatcctgaaccaaatttatagcaatataattagtgttaatctaaggcattactcatcaaaaaaattgctgcagtctttacagttgaataaataaaaacaactgcataaatatgcccacaaaaatttca

SEQ ID NO: 299100 - DNA, 1311 bp, Homo sapiens
atctgctggatctccggcagcatcctgcagtccggcccaggagagaagtggggaggcggcggtgggggcggggcggcgtccggctctgagagagctgggggaggagcgcggcggcgacggcggcggtggctctagaaggggaggtggaggatctcctttcctcttctcagacccgggagcgtccgggacgcggagcccggagctggggcgacgaggcgattgcgggggcctgggctagaatctccctggaaaaggagacatgaatgtctgcaatgatacttcctgacaagaagttgatacaagaaaaggaaaggagattaacagctagtgagcagaatttcgaacagcaggatttcgtattttttgcttccaactgcacacttccgttgcccacttttaaatcagagatacctacactcaaaacccagacaaggcaaaaggatacttttcttgtatattttttgagatcgaagaaacgacaatgtccaggaaacagaaccagaaggattcatcaggattcatttttgatttgcagtccaataccgtactggcccagggaggagcttttgagaacatgaaagagaagataaatgcggtacgtgcaatagttcctaataagagcaacaatgaaattatcctggttttgcagcactttgataactgtgtggacaaaacagtacaagcattcatggaaggtagtgccagtgaagtactcaaagaatggacagtaacaggcaagaaaaaggtaaaatgaattacatttaaaagcatgatgatgtgtatattatttttaaaaatttaggctctgcaaaaatatttgaaagaaaaggttcacatacatatcttctgtttacctggttaaaaaacatctttggccaggtgcaggggctcacacctgtaatcccagcactttaggaggccaaggcaggtggatcacttgaggtcagtggttcaagactagcccggccaacatggtgaagtcccgtctctactaaaaaatagaaaaaattagccaggtgtggtggcacgtgcctgtaatcccagttactcaggagggtgaggcaggagaataacttgaacccaagaggcagaggttgcagtgagccgagattgggccactgcattccagcctgggtgacagattgagactccatctccaaaaaaaaaaaaaaattcttcgaccttgaaacatagctgtgtctcacagagtaccacacagtcctctccgtgtgatttaaggcaggaaacagaatgactttgccatggtgcagttattagacgggtgaaaaagacagcaaatcaaggaaagca

SEQ ID NO: 299101 - DNA, 687 bp, Homo sapiens
atctgctggatctccggcagcatcctgcagtccggcccaggagagaagtggggaggcggcggtgggggcggggcggcgtccggctctgagagagctgggggaggagcgcggcggcgacggcggcggtggctctagaaggggaggtggaggatctcctttcctcttctcagacccgggagcgtccgggacgcggagcccggagctggggcgacgaggcgattgcgggggcctgggctagctgctggctaccaatattctactttctgtctctatgaatgtgactaccctggttacctcatataatctccctggaaaaggagacatgaatgtctgcaatgatacttcctgacaagaagttgatacaagaaaaggaaaggagattaacagctagtgagcagaatttcgaacagcaggatttcgtattttttgcttccaactgcacatccagcctgggagacagagcaagactcagtctcaaaaaaaaaaaaaaaaagcatttttctgttttaatgtttggagacttttttttttgttctctccctttcctgaaccctattctgatcctgaaccaaatttatagcaatataattagtgttaatctaaggcattactcatcaaaaaaattgctgcagtctttacagttgaataaataaaaacaactgcataaatatgcccacaaaaatttca

SEQ ID NO: 299102 - DNA, 925 bp, Homo sapiens
atctgctggatctccggcagcatcctgcagtccggcccaggagagaagtggggaggcggcggtgggggcggggcggcgtccggctctgagagagctgggggaggagcgcggcggcgacggcggcggtggctctagaaggggaggtggaggatctcctttcctcttctcagacccgggagcgtccgggacgcggagcccggagctggggcgacgaggcgattgcgggggcctgggctagctgctggctaccaatattctactttctgtctctatgaatgtgactaccctggttacctcatatttatttgcagtgacttaaaatttggaggcaaattttccttaagaggatatcaagttccagtatcttcagatgttgataagccgttagaatctccctggaaaaggagacatgaatgtctgcaatgatacttcctgacaagaagttgatacaagaaaaggaaaggagattaacagctagtgagcagaatttcgaacagcaggatttcgtattttttgcttccaactgcacacttccgttgcccacttttaaatcagagatacctacactcaaaacccagacaaggcaaaaggatacttttcttgtatattttttgagatcgaagaaacgacaatgtccaggaaacagaaccagaagggaaggagagcgcgagtgaacaaggaaggaactggagggcatgagtgctggaaccggctggctgcttcagtaccagcaggggtgaactctgtgtgggccccgtggcagcatccaggctgtggggtgcctgtgacccccgaagctccagagggcatgttacagtgctcttctggctctgcctttgtggacggcttaagtgttaacagctcagtgggccctttccccccgtgtgtggggtggctgccctctgccagcaagggcaaagggcca

SEQ ID NO: 299103 - DNA, 208 bp, Homo sapiens
caccacaaagcaaaaccgatatggtaaggaaaattattttcatccagaggttgaatactagggtactactgtctccttatacattgaaggctgtgggctcttttataacaacatggaaaagctttatgtgcctataaaccatttatatttgcagtggaaaaaattctaattgcctatttaatgttctttttctgtaaaaagcctacca

SEQ ID NO: 299104 - DNA, 3364 bp, Homo sapiens
atctgctggatctccggcagcatcctgcagtccggcccaggagagaagtggggaggcggcggtgggggcggggcggcgtccggctctgagagagctgggggaggagcgcggcggcgacggcggcggtggctctagaaggggaggtggaggatctcctttcctcttctcagacccgggagcgtccgggacgcggagcccggagctggggcgacgaggcgattgcgggggcctgggctagctgctggctaccaatattctactttctgtctctatgaatgtgactaccctggttacctcatataatctccctggaaaaggagacatgaatgtctgcaatgatacttcctgacaagaagttgatacaagaaaaggaaaggagattaacagctagtgagcagaatttcgaacagcaggatttcgtattttttgcttccaactgcacacttccgttgcccacttttaaatcagagatacctacactcaaaacccagacaaggcaaaaggatacttttcttgtatattttttgagatcgaagaaacgacaatgtccaggaaacagaaccagaaggattcatcaggattcatttttgatttgcagtccaataccgtactggcccagggaggagcttttgagaacatgaaagagaagataaatgcggtacgtgcaatagttcctaataagagcaacaatgaaattatcctggttttgcagcactttgataactgtgtggacaaaacagtacaagcattcatggaaggtagtgccagtgaagtactcaaagaatggacagtaacaggcaagaaaaagaacaaaaagaagaaaaacaaaccgaaacctgccgcagaaccaagtaacggcatcccagattccagtaaatcagtttccattcaagaggaacagtctgcgccttcctcagagaaaggtggtatgaatggctaccatgtcaatggtgccatcaatgacactgagtctgtggactcactcagtgaaggtttggagacactttcaatagatgccagagaattggaggatcccgagtctgccatgctagatacgctggatagaacaggatccatgctgcagaatggtgtctctgattttgagaccaagtctttgactatgcactctattcacaattctcaacaacccaggaatgctgccaaatctctctcaagacctaccacagaaactcagttttcaaatatggggatggaagatgttcccctcgccaccagtaaaaagctaagttccaatattgaaaaatctgtaaaagacctccagcgctgcacagtgtctcttgcacggtatcgagttgtagttaaagaagagatggatgcctccattaagaaaatgaaacaagcctttgctgaattggagagctgtttaatggatcgagaagtggcgttgcttgctgaaatggacaaagtgaaagctgaagcaatggaaattttgctcagccgacaaaagaaggctgaacttctaaagaagatgactcatgtggctgttcaaatgtcagagcagcaattggttgagctcagagctgatatcaagcactttgttagtgaacgtaaatatgatgaggatctgggacgagtagcccggttcacctgtgatgtagagaccctaaagaagagcattgattcatttggacaagtgtctcatccaaagaacagctattcgaccagatcccgatgtagctcagttacatctgtgtccttgagtagcccaagtgatgcctctgctgcttcctcttccacctgtgcctctcctcccagccttacaagtgctaacaagaaaaactttgcaccgggagagactcctgcagccatagcaaactccagtggccagccctaccagccacttcgggaggtattgccagggaacagacgaggaggacagggctataggccacaaggccaaaagtccaatgaccccatgaaccaagggcggcatgacagtatgggtcgttacagaaacagctcgtggtattcatctggttccaggtatcagagtgctccatctcaggcaccaggaaacaccattgaaagaggccagactcactctgcagggaccaatggaactggagtcagcatggagcccagccctcccacgccttcattcaaaaaggggctcccccagcgcaaacccaggacctctcagactgaagccgtgaactcttgagagaaaatccagttggcctctctcctctatccacacaattcaacttgataactggactttaggaaacttacagttagatgtaataacaaaaagaagtttatgcgtatcactttttgtgccattctaagtatttttggtttcttgtctccttatttcctctttaccatttttggaggggaagctattttttttccttgatctttcccagtgatatggattgaatctggttggtcatttccaccaggaatcagaggcagctgttaccaggtttcggccttccagttgatccctccactgtccaggctgtctcaggaggaggtgaatcagagctagtctgtcacctttccaatctaagccgaagccacaggtgcctgacaggttcccttctaacaactatttgaccaagagaggcaatcagggggttgtatactgcactggattcgccagagaagggaaaatttaattagtgaaaaggaaagaacactaggaaacatttgagaacctgcctctatcccagaatgtgctggagatttgacactcaaatcagtgtttagtcttctgcttggcaccatagcttaacctgcagtttcttcaaaatgcccaatgccttgtttcctattaccttagattgcaaaccagtctagggaagtctatgagaaagtagcatttaattaaagtttaaaaaaaaaaaggttgggcgttgtggctcatgcctgtaatcccagcactttgggaggctgaggcgggtggatcactaggtcaggagttcaagaccagcctggccaacatggtgaaaccctgtctgtactaaaaatacaaaagttagctgagcatggtggcgtgtgcctgtaatctcagctactcaggaggctgaggcaggagaatcgcttgaacccaggaggcggaggctgcagtgagctgagattgtgccactgcactccagcctgggagacagagcaagactcagtctcaaaaaaaaaaaaaaaaagcatttttctgttttaatgtttggagacttttttttttgttctctccctttcctgaaccctattctgatcctgaaccaaatttatagcaatataattagtgttaatctaaggcattactcatcaaaaaaattgctgcagtctttacagttgaataaataaaaacaactgcataaatatgcccacaaaaatttca

SEQ ID NO: 299105 - DNA, 3158 bp, Homo sapiens
gcgcgcgccgggtccctaaccgatgccgccggctgctggctaccaatattctactttctgtctctatgaatgtgactaccctggttacctcatataatctccctggaaaaggagacatgaatgtctgcaatgatacttcctgacaagaagttgatacaagaaaaggaaaggagattaacagctagtgagcagaatttcgaacagcaggatttcgtattttttgcttccaactgcacacttccgttgcccacttttaaatcagagatacctacactcaaaacccagacaaggcaaaaggatacttttcttgtatattttttgagatcgaagaaacgacaatgtccaggaaacagaaccagaaggattcatcaggattcatttttgatttgcagtccaataccgtactggcccagggaggagcttttgagaacatgaaagagaagataaatgcggtacgtgcaatagttcctaataagagcaacaatgaaattatcctggttttgcagcactttgataactgtgtggacaaaacagtacaagcattcatggaaggtagtgccagtgaagtactcaaagaatggacagtaacaggcaagaaaaagaacaaaaagaagaaaaacaaaccgaaacctgccgcagaaccaagtaacggcatcccagattccagtaaatcagtttccattcaagaggaacagtctgcgccttcctcagagaaaggtggtatgaatggctaccatgtcaatggtgccatcaatgacactgagtctgtggactcactcagtgaaggtttggagacactttcaatagatgccagagaattggaggatcccgagtctgccatgctagatacgctggatagaacaggatccatgctgcagaatggtgtctctgattttgagaccaagtctttgactatgcactctattcacaattctcaacaacccaggaatgctgccaaatctctctcaagacctaccacagaaactcagttttcaaatatggggatggaagatgttcccctcgccaccagtaaaaagctaagttccaatattgaaaaatctgtaaaagacctccagcgctgcacagtgtctcttgcacggtatcgagttgtagttaaagaagagatggatgcctccattaagaaaatgaaacaagcctttgctgaattggagagctgtttaatggatcgagaagtggcgttgcttgctgaaatggacaaagtgaaagctgaagcaatggaaattttgctcagccgacaaaagaaggctgaacttctaaagaagatgactcatgtggctgttcaaatgtcagagcagcaattggttgagctcagagctgatatcaagcactttgttagtgaacgtaaatatgatgaggatctgggacgagtagcccggttcacctgtgatgtagagaccctaaagaagagcattgattcatttggacaagtgtctcatccaaagaacagctattcgaccagatcccgatgtagctcagttacatctgtgtccttgagtagcccaagtgatgcctctgctgcttcctcttccacctgtgcctctcctcccagccttacaagtgctaacaagaaaaactttgcaccgggagagactcctgcagccatagcaaactccagtggccagccctaccagccacttcgggaggtattgccagggaacagacgaggaggacagggctataggccacaaggccaaaagtccaatgaccccatgaaccaagggcggcatgacagtatgggtcgttacagaaacagctcgtggtattcatctggttccaggtatcagagtgctccatctcaggcaccaggaaacaccattgaaagaggccagactcactctgcagggaccaatggaactggagtcagcatggagcccagccctcccacgccttcattcaaaaaggggctcccccagcgcaaacccaggacctctcagactgaagccgtgaactcttgagagaaaatccagttggcctctctcctctatccacacaattcaacttgataactggactttaggaaacttacagttagatgtaataacaaaaagaagtttatgcgtatcactttttgtgccattctaagtatttttggtttcttgtctccttatttcctctttaccatttttggaggggaagctattttttttccttgatctttcccagtgatatggattgaatctggttggtcatttccaccaggaatcagaggcagctgttaccaggtttcggccttccagttgatccctccactgtccaggctgtctcaggaggaggtgaatcagagctagtctgtcacctttccaatctaagccgaagccacaggtgcctgacaggttcccttctaacaactatttgaccaagagaggcaatcagggggttgtatactgcactggattcgccagagaagggaaaatttaattagtgaaaaggaaagaacactaggaaacatttgagaacctgcctctatcccagaatgtgctggagatttgacactcaaatcagtgtttagtcttctgcttggcaccatagcttaacctgcagtttcttcaaaatgcccaatgccttgtttcctattaccttagattgcaaaccagtctagggaagtctatgagaaagtagcatttaattaaagtttaaaaaaaaaaaggttgggcgttgtggctcatgcctgtaatcccagcactttgggaggctgaggcgggtggatcactaggtcaggagttcaagaccagcctggccaacatggtgaaaccctgtctgtactaaaaatacaaaagttagctgagcatggtggcgtgtgcctgtaatctcagctactcaggaggctgaggcaggagaatcgcttgaacccaggaggcggaggctgcagtgagctgagattgtgccactgcactccagcctgggagacagagcaagactcagtctcaaaaaaaaaaaaaaaaagcatttttctgttttaatgtttggagacttttttttttgttctctccctttcctgaaccctattctgatcctgaaccaaatttatagcaatataattagtgttaatctaaggcattactcatcaaaaaaattgctgcagtctttacagttgaataaataaaaacaactgcataaatatgcccacaaaaatttca

SEQ ID NO: 299106 - DNA, 3464 bp, Homo sapiens
atctgctggatctccggcagcatcctgcagtccggcccaggagagaagtggggaggcggcggtgggggcggggcggcgtccggctctgagagagctgggggaggagcgcggcggcgacggcggcggtggctctagaaggggaggtggaggatctcctttcctcttctcagacccgggagcgtccgggacgcggagcccggagctggggcgacgaggcgattgcgggggcctgggctagagctgaggtcactagtgaactctgcttccaagtactcctgcaaagtacaccacaagcctgtctatattctcaagccatccgcttcagttcatatgaccacacttgcatgtcagcaacagaagagaacacacatcatacagcatttacagcagtggacaaagagaatctccctggaaaaggagacatgaatgtctgcaatgatacttcctgacaagaagttgatacaagaaaaggaaaggagattaacagctagtgagcagaatttcgaacagcaggatttcgtattttttgcttccaactgcacacttccgttgcccacttttaaatcagagatacctacactcaaaacccagacaaggcaaaaggatacttttcttgtatattttttgagatcgaagaaacgacaatgtccaggaaacagaaccagaaggattcatcaggattcatttttgatttgcagtccaataccgtactggcccagggaggagcttttgagaacatgaaagagaagataaatgcggtacgtgcaatagttcctaataagagcaacaatgaaattatcctggttttgcagcactttgataactgtgtggacaaaacagtacaagcattcatggaaggtagtgccagtgaagtactcaaagaatggacagtaacaggcaagaaaaagaacaaaaagaagaaaaacaaaccgaaacctgccgcagaaccaagtaacggcatcccagattccagtaaatcagtttccattcaagaggaacagtctgcgccttcctcagagaaaggtggtatgaatggctaccatgtcaatggtgccatcaatgacactgagtctgtggactcactcagtgaaggtttggagacactttcaatagatgccagagaattggaggatcccgagtctgccatgctagatacgctggatagaacaggatccatgctgcagaatggtgtctctgattttgagaccaagtctttgactatgcactctattcacaattctcaacaacccaggaatgctgccaaatctctctcaagacctaccacagaaactcagttttcaaatatggggatggaagatgttcccctcgccaccagtaaaaagctaagttccaatattgaaaaatctgtaaaagacctccagcgctgcacagtgtctcttgcacggtatcgagttgtagttaaagaagagatggatgcctccattaagaaaatgaaacaagcctttgctgaattggagagctgtttaatggatcgagaagtggcgttgcttgctgaaatggacaaagtgaaagctgaagcaatggaaattttgctcagccgacaaaagaaggctgaacttctaaagaagatgactcatgtggctgttcaaatgtcagagcagcaattggttgagctcagagctgatatcaagcactttgttagtgaacgtaaatatgatgaggatctgggacgagtagcccggttcacctgtgatgtagagaccctaaagaagagcattgattcatttggacaagtgtctcatccaaagaacagctattcgaccagatcccgatgtagctcagttacatctgtgtccttgagtagcccaagtgatgcctctgctgcttcctcttccacctgtgcctctcctcccagccttacaagtgctaacaagaaaaactttgcaccgggagagactcctgcagccatagcaaactccagtggccagccctaccagccacttcgggaggtattgccagggaacagacgaggaggacagggctataggccacaaggccaaaagtccaatgaccccatgaaccaagggcggcatgacagtatgggtcgttacagaaacagctcgtggtattcatctggttccaggtatcagagtgctccatctcaggcaccaggaaacaccattgaaagaggccagactcactctgcagggaccaatggaactggagtcagcatggagcccagccctcccacgccttcattcaaaaaggggctcccccagcgcaaacccaggacctctcagactgaagccgtgaactcttgagagaaaatccagttggcctctctcctctatccacacaattcaacttgataactggactttaggaaacttacagttagatgtaataacaaaaagaagtttatgcgtatcactttttgtgccattctaagtatttttggtttcttgtctccttatttcctctttaccatttttggaggggaagctattttttttccttgatctttcccagtgatatggattgaatctggttggtcatttccaccaggaatcagaggcagctgttaccaggtttcggccttccagttgatccctccactgtccaggctgtctcaggaggaggtgaatcagagctagtctgtcacctttccaatctaagccgaagccacaggtgcctgacaggttcccttctaacaactatttgaccaagagaggcaatcagggggttgtatactgcactggattcgccagagaagggaaaatttaattagtgaaaaggaaagaacactaggaaacatttgagaacctgcctctatcccagaatgtgctggagatttgacactcaaatcagtgtttagtcttctgcttggcaccatagcttaacctgcagtttcttcaaaatgcccaatgccttgtttcctattaccttagattgcaaaccagtctagggaagtctatgagaaagtagcatttaattaaagtttaaaaaaaaaaaggttgggcgttgtggctcatgcctgtaatcccagcactttgggaggctgaggcgggtggatcactaggtcaggagttcaagaccagcctggccaacatggtgaaaccctgtctgtactaaaaatacaaaagttagctgagcatggtggcgtgtgcctgtaatctcagctactcaggaggctgaggcaggagaatcgcttgaacccaggaggcggaggctgcagtgagctgagattgtgccactgcactccagcctgggagacagagcaagactcagtctcaaaaaaaaaaaaaaaaagcatttttctgttttaatgtttggagacttttttttttgttctctccctttcctgaaccctattctgatcctgaaccaaatttatagcaatataattagtgttaatctaaggcattactcatcaaaaaaattgctgcagtctttacagttgaataaataaaaacaactgcataaatatgcccacaaaaatttca

SEQ ID NO: 299107 - DNA, 3301 bp, Homo sapiens
atctgctggatctccggcagcatcctgcagtccggcccaggagagaagtggggaggcggcggtgggggcggggcggcgtccggctctgagagagctgggggaggagcgcggcggcgacggcggcggtggctctagaaggggaggtggaggatctcctttcctcttctcagacccgggagcgtccgggacgcggagcccggagctggggcgacgaggcgattgcgggggcctgggctagaatctccctggaaaaggagacatgaatgtctgcaatgatacttcctgacaagaagttgatacaagaaaaggaaaggagattaacagctagtgagcagaatttcgaacagcaggatttcgtattttttgcttccaactgcacacttccgttgcccacttttaaatcagagatacctacactcaaaacccagacaaggcaaaaggatacttttcttgtatattttttgagatcgaagaaacgacaatgtccaggaaacagaaccagaaggattcatcaggattcatttttgatttgcagtccaataccgtactggcccagggaggagcttttgagaacatgaaagagaagataaatgcggtacgtgcaatagttcctaataagagcaacaatgaaattatcctggttttgcagcactttgataactgtgtggacaaaacagtacaagcattcatggaaggtagtgccagtgaagtactcaaagaatggacagtaacaggcaagaaaaagaacaaaaagaagaaaaacaaaccgaaacctgccgcagaaccaagtaacggcatcccagattccagtaaatcagtttccattcaagaggaacagtctgcgccttcctcagagaaaggtggtatgaatggctaccatgtcaatggtgccatcaatgacactgagtctgtggactcactcagtgaaggtttggagacactttcaatagatgccagagaattggaggatcccgagtctgccatgctagatacgctggatagaacaggatccatgctgcagaatggtgtctctgattttgagaccaagtctttgactatgcactctattcacaattctcaacaacccaggaatgctgccaaatctctctcaagacctaccacagaaactcagttttcaaatatggggatggaagatgttcccctcgccaccagtaaaaagctaagttccaatattgaaaaatctgtaaaagacctccagcgctgcacagtgtctcttgcacggtatcgagttgtagttaaagaagagatggatgcctccattaagaaaatgaaacaagcctttgctgaattggagagctgtttaatggatcgagaagtggcgttgcttgctgaaatggacaaagtgaaagctgaagcaatggaaattttgctcagccgacaaaagaaggctgaacttctaaagaagatgactcatgtggctgttcaaatgtcagagcagcaattggttgagctcagagctgatatcaagcactttgttagtgaacgtaaatatgatgaggatctgggacgagtagcccggttcacctgtgatgtagagaccctaaagaagagcattgattcatttggacaagtgtctcatccaaagaacagctattcgaccagatcccgatgtagctcagttacatctgtgtccttgagtagcccaagtgatgcctctgctgcttcctcttccacctgtgcctctcctcccagccttacaagtgctaacaagaaaaactttgcaccgggagagactcctgcagccatagcaaactccagtggccagccctaccagccacttcgggaggtattgccagggaacagacgaggaggacagggctataggccacaaggccaaaagtccaatgaccccatgaaccaagggcggcatgacagtatgggtcgttacagaaacagctcgtggtattcatctggttccaggtatcagagtgctccatctcaggcaccaggaaacaccattgaaagaggccagactcactctgcagggaccaatggaactggagtcagcatggagcccagccctcccacgccttcattcaaaaaggggctcccccagcgcaaacccaggacctctcagactgaagccgtgaactcttgagagaaaatccagttggcctctctcctctatccacacaattcaacttgataactggactttaggaaacttacagttagatgtaataacaaaaagaagtttatgcgtatcactttttgtgccattctaagtatttttggtttcttgtctccttatttcctctttaccatttttggaggggaagctattttttttccttgatctttcccagtgatatggattgaatctggttggtcatttccaccaggaatcagaggcagctgttaccaggtttcggccttccagttgatccctccactgtccaggctgtctcaggaggaggtgaatcagagctagtctgtcacctttccaatctaagccgaagccacaggtgcctgacaggttcccttctaacaactatttgaccaagagaggcaatcagggggttgtatactgcactggattcgccagagaagggaaaatttaattagtgaaaaggaaagaacactaggaaacatttgagaacctgcctctatcccagaatgtgctggagatttgacactcaaatcagtgtttagtcttctgcttggcaccatagcttaacctgcagtttcttcaaaatgcccaatgccttgtttcctattaccttagattgcaaaccagtctagggaagtctatgagaaagtagcatttaattaaagtttaaaaaaaaaaaggttgggcgttgtggctcatgcctgtaatcccagcactttgggaggctgaggcgggtggatcactaggtcaggagttcaagaccagcctggccaacatggtgaaaccctgtctgtactaaaaatacaaaagttagctgagcatggtggcgtgtgcctgtaatctcagctactcaggaggctgaggcaggagaatcgcttgaacccaggaggcggaggctgcagtgagctgagattgtgccactgcactccagcctgggagacagagcaagactcagtctcaaaaaaaaaaaaaaaaagcatttttctgttttaatgtttggagacttttttttttgttctctccctttcctgaaccctattctgatcctgaaccaaatttatagcaatataattagtgttaatctaaggcattactcatcaaaaaaattgctgcagtctttacagttgaataaataaaaacaactgcataaatatgcccacaaaaatttca

SEQ ID NO: 299108 - DNA, 3310 bp, Homo sapiens
atctgctggatctccggcagcatcctgcagtccggcccaggagagaagtggggaggcggcggtgggggcggggcggcgtccggctctgagagagctgggggaggagcgcggcggcgacggcggcggtggctctagaaggggaggtggaggatctcctttcctcttctcagacccgggagcgtccgggacgcggagcccggagctggggcgacgaggcgattgcgggggcctgggctagctgctggctaccaatattctactttctgtctctatgaatgtgactaccctggttacctcatataatctccctggaaaaggagacatgaatgtctgcaatgatacttcctgacaagaagttgatacaagaaaaggaaaggagattaacagctagtgagcagaatttcgaacagcaggatttcgtattttttgcttccaactgcacacttccgttgcccacttttaaatcagagatacctacactcaaaacccagacaaggcaaaaggatacttttcttgtatattttttgagatcgaagaaacgacaatgtccaggaaacagaaccagaaggattcatcaggattcatttttgatttgcagtccaataccgtactggcccagggaggagcttttgagaacatgaaagagaagataaatgcggtacgtgcaatagttcctaataagagcaacaatgaaattatcctggttttgcagcactttgataactgtgtggacaaaacagtacaagcattcatggaaggtagtgccagtgaagtactcaaagaatggacagtaacaggcaagaaaaagaacaaaaagaagaaaaacaaaccgaaacctgccgcagaaccaagtaacggcatcccagattccagtaaatcagtttccattcaagaggaacagtctgcgccttcctcagagaaaggtggtatgaatggctaccatgtcaatggtgccatcaatgacactgagtctgtggactcactcagtgaaggtttggagacactttcaatagatgccagagaattggaggatcccgagtctgccatgctagatacgctggatagaacaggatccatgctgcagaatggtgtctctgattttgagaccaagtctttgactatgcactctattcacaattctcaacaacccaggaatgctgccaaatctctctcaagacctaccacagaaactcagttttcaaatatggggatggaagatgttcccctcgccaccagtaaaaagctaagttccaatattgaaaaatctgtaaaagacctccagcgctgcacagtgtctcttgcacggtatcgagttgtagttaaagaagagatggatgcctccattaagaaaatgaaacaagcctttgctgaattggagagctgtttaatggatcgagaagtggcgttgcttgctgaaatggacaaagtgaaagctgaagcaatggaaattttgctcagccgacagcagcaattggttgagctcagagctgatatcaagcactttgttagtgaacgtaaatatgatgaggatctgggacgagtagcccggttcacctgtgatgtagagaccctaaagaagagcattgattcatttggacaagtgtctcatccaaagaacagctattcgaccagatcccgatgtagctcagttacatctgtgtccttgagtagcccaagtgatgcctctgctgcttcctcttccacctgtgcctctcctcccagccttacaagtgctaacaagaaaaactttgcaccgggagagactcctgcagccatagcaaactccagtggccagccctaccagccacttcgggaggtattgccagggaacagacgaggaggacagggctataggccacaaggccaaaagtccaatgaccccatgaaccaagggcggcatgacagtatgggtcgttacagaaacagctcgtggtattcatctggttccaggtatcagagtgctccatctcaggcaccaggaaacaccattgaaagaggccagactcactctgcagggaccaatggaactggagtcagcatggagcccagccctcccacgccttcattcaaaaaggggctcccccagcgcaaacccaggacctctcagactgaagccgtgaactcttgagagaaaatccagttggcctctctcctctatccacacaattcaacttgataactggactttaggaaacttacagttagatgtaataacaaaaagaagtttatgcgtatcactttttgtgccattctaagtatttttggtttcttgtctccttatttcctctttaccatttttggaggggaagctattttttttccttgatctttcccagtgatatggattgaatctggttggtcatttccaccaggaatcagaggcagctgttaccaggtttcggccttccagttgatccctccactgtccaggctgtctcaggaggaggtgaatcagagctagtctgtcacctttccaatctaagccgaagccacaggtgcctgacaggttcccttctaacaactatttgaccaagagaggcaatcagggggttgtatactgcactggattcgccagagaagggaaaatttaattagtgaaaaggaaagaacactaggaaacatttgagaacctgcctctatcccagaatgtgctggagatttgacactcaaatcagtgtttagtcttctgcttggcaccatagcttaacctgcagtttcttcaaaatgcccaatgccttgtttcctattaccttagattgcaaaccagtctagggaagtctatgagaaagtagcatttaattaaagtttaaaaaaaaaaaggttgggcgttgtggctcatgcctgtaatcccagcactttgggaggctgaggcgggtggatcactaggtcaggagttcaagaccagcctggccaacatggtgaaaccctgtctgtactaaaaatacaaaagttagctgagcatggtggcgtgtgcctgtaatctcagctactcaggaggctgaggcaggagaatcgcttgaacccaggaggcggaggctgcagtgagctgagattgtgccactgcactccagcctgggagacagagcaagactcagtctcaaaaaaaaaaaaaaaaagcatttttctgttttaatgtttggagacttttttttttgttctctccctttcctgaaccctattctgatcctgaaccaaatttatagcaatataattagtgttaatctaaggcattactcatcaaaaaaattgctgcagtctttacagttgaataaataaaaacaactgcataaatatgcccacaaaaatttca

SEQ ID NO: 299109 - DNA, 3408 bp, Homo sapiens
atctgctggatctccggcagcatcctgcagtccggcccaggagagaagtggggaggcggcggtgggggcggggcggcgtccggctctgagagagctgggggaggagcgcggcggcgacggcggcggtggctctagaaggggaggtggaggatctcctttcctcttctcagacccgggagcgtccgggacgcggagcccggagctggggcgacgaggcgattgcgggggcctgggctagctgctggctaccaatattctactttctgtctctatgaatgtgactaccctggttacctcatataatctccctggaaaaggagacatgaatgtctgcaatgatacttcctgacaagaagttgatacaagaaaaggaaaggagattaacagctagtgagcagaatttcgaacagcaggatttcgtattttttgcttccaactgcacacttccgttgcccacttttaaatcagagatacctacactcaaaacccagacaaggcaaaaggatacttttcttgtatattttttgagatcgaagaaacgacaatgtccaggaaacagaaccagaaggattcatcaggattcatttttgatttgcagtccaataccgtactggcccagggaggagcttttgagaacatgaaagagaagataaatgcggtacgtgcaatagttcctaataagagcaacaatgaaattatcctggttttgcagcactttgataactgtgtggacaaaacagtacaagcattcatggaaggtagtgccagtgaagtactcaaagaatggacagtaacaggcaagaaaaagaacaaaaagaagaaaaacaaaccgaaacctgccgcagaaccaagtaacggcatcccagattccagtaaatcagtttccattcaagaggaacagtctgcgccttcctcagagaaaggtggtatgaatggctaccatgtcaatggtgccatcaatgacactgagtctgtggactcactcagtgaaggtttggagacactttcaatagatgccagagaattggaggatcccgagtctgccatgctagatacgctggatagaacaggatccatgctgcagaatggtgtctctgattttgagaccaagtctttgactatgcactctattcacaattctcaacaacccaggaatgctgccaaatctctctcaagacctaccacagaaactcagttttcaaatatggggatggaagatgttcccctcgccaccagtaaaaagctaagttccaatattgaaaaatctgtaaaagacctccagcgctgcacagtgtctcttgcacggtatcgagttgtagttaaagaagagatggatgcctccattaagaaaatgaaacaagcctttgctgaattggagagctggtattccaatgctgctagagttcttggagcaaaatattgccaagtttaatggatcgagaagtggcgttgcttgctgaaatggacaaagtgaaagctgaagcaatggaaattttgctcagccgacaaaagaaggctgaacttctaaagaagatgactcatgtggctgttcaaatgtcagagcagcaattggttgagctcagagctgatatcaagcactttgttagtgaacgtaaatatgatgaggatctgggacgagtagcccggttcacctgtgatgtagagaccctaaagaagagcattgattcatttggacaagtgtctcatccaaagaacagctattcgaccagatcccgatgtagctcagttacatctgtgtccttgagtagcccaagtgatgcctctgctgcttcctcttccacctgtgcctctcctcccagccttacaagtgctaacaagaaaaactttgcaccgggagagactcctgcagccatagcaaactccagtggccagccctaccagccacttcgggaggtattgccagggaacagacgaggaggacagggctataggccacaaggccaaaagtccaatgaccccatgaaccaagggcggcatgacagtatgggtcgttacagaaacagctcgtggtattcatctggttccaggtatcagagtgctccatctcaggcaccaggaaacaccattgaaagaggccagactcactctgcagggaccaatggaactggagtcagcatggagcccagccctcccacgccttcattcaaaaaggggctcccccagcgcaaacccaggacctctcagactgaagccgtgaactcttgagagaaaatccagttggcctctctcctctatccacacaattcaacttgataactggactttaggaaacttacagttagatgtaataacaaaaagaagtttatgcgtatcactttttgtgccattctaagtatttttggtttcttgtctccttatttcctctttaccatttttggaggggaagctattttttttccttgatctttcccagtgatatggattgaatctggttggtcatttccaccaggaatcagaggcagctgttaccaggtttcggccttccagttgatccctccactgtccaggctgtctcaggaggaggtgaatcagagctagtctgtcacctttccaatctaagccgaagccacaggtgcctgacaggttcccttctaacaactatttgaccaagagaggcaatcagggggttgtatactgcactggattcgccagagaagggaaaatttaattagtgaaaaggaaagaacactaggaaacatttgagaacctgcctctatcccagaatgtgctggagatttgacactcaaatcagtgtttagtcttctgcttggcaccatagcttaacctgcagtttcttcaaaatgcccaatgccttgtttcctattaccttagattgcaaaccagtctagggaagtctatgagaaagtagcatttaattaaagtttaaaaaaaaaaaggttgggcgttgtggctcatgcctgtaatcccagcactttgggaggctgaggcgggtggatcactaggtcaggagttcaagaccagcctggccaacatggtgaaaccctgtctgtactaaaaatacaaaagttagctgagcatggtggcgtgtgcctgtaatctcagctactcaggaggctgaggcaggagaatcgcttgaacccaggaggcggaggctgcagtgagctgagattgtgccactgcactccagcctgggagacagagcaagactcagtctcaaaaaaaaaaaaaaaaagcatttttctgttttaatgtttggagacttttttttttgttctctccctttcctgaaccctattctgatcctgaaccaaatttatagcaatataattagtgttaatctaaggcattactcatcaaaaaaattgctgcagtctttacagttgaataaataaaaacaactgcataaatatgcccacaaaaatttca

SEQ ID NO: 299110 - DNA, 3230 bp, Homo sapiens
atctgctggatctccggcagcatcctgcagtccggcccaggagagaagtggggaggcggcggtgggggcggggcggcgtccggctctgagagagctgggggaggagcgcggcggcgacggcggcggtggctctagaaggggaggtggaggatctcctttcctcttctcagacccgggagcgtccgggacgcggagcccggagctggggcgacgaggcgattgcgggggcctgggctagctgctggctaccaatattctactttctgtctctatgaatgtgactaccctggttacctcatataatctccctggaaaaggagacatgaatgtctgcaatgatacttcctgacaagaagttgatacaagaaaaggaaaggagattaacagctagtgagcagaatttcgaacagcaggatttcgtattttttgcttccaactgcacacttccgttgcccacttttaaatcagagatacctacactcaaaacccagacaaggcaaaaggatacttttcttgtatattttttgagatcgaagaaacgacaatgtccaggaaacagaaccagaaggattcatcaggattcatttttgatttgcagtccaataccgtactggcccagggaggagcttttgagaacatgaaagagaagataaatgcggtacgtgcaatagttcctaataagagcaacaatgaaattatcctggttttgcagcactttgataactgtgtggacaaaacagtacaagcattcatggaaggtagtgccagtgaagtactcaaagaatggacagtaacaggcaagaaaaagaacaaaaagaagaaaaacaaaccgaaacctgccgcagaaccaagtaacggcatcccagattccagtaaatcagtttccattcaagaggaacagtctgcgccttcctcagagaaaggtggtatgaatggctaccatgtcaatggtgccatcaatgacactgagtctgtggactcactcagtgaaggtttggagacactttcaatagatgccagagaattggaggatcccgagtctgccatgctagatacgctggatagaacaggatccatgctgcagaatggtgtctctgattttgagaccaagtctttgactatgcactctattcacaattctcaacaacccaggaatgctgccaaatctctctcaagacctaccacagaaactcagttttcaaatatggggatggaagatgttcccctcgccaccagtaaaaagctaagttccaatattgaaaaatctgtaaaagacctccagcgctgcacagtgtctcttgcacggtatcgagttgtagttaaagaagagatggatgcctccattaagaaaatgaaacaagcctttgctgaattggagagctgtttaatggatcgagaagtggcgttgcttgctgaaatggacaaagtgaaagctgaagcaatggaaattttgctcagccgacaaaagaaggctgaacttctaaagaagatgactcatgtggctgttcaaatgtcagagcagcaattggttgagctcagagctgatatcaagcactttgttagtgaacgtaaatatgatgaggatctgggacgagtagcccggttcacctgtgatgtagagaccctaaagaagagcattgattcatttggacaagtgtctcatccaaagaacagctattcgaccagatcccgatgtagctcagttacatctgtgtccttgagtagcccaagtgatgcctctgctgcttcctcttccacctgtgcctctcctcccagccttacaagtgctaacaagaaaaactttgcaccgggagagactcctgcagccatagcaaactccagtggccagccctaccagccacttcgggaggtatcagagtgctccatctcaggcaccaggaaacaccattgaaagaggccagactcactctgcagggaccaatggaactggagtcagcatggagcccagccctcccacgccttcattcaaaaaggggctcccccagcgcaaacccaggacctctcagactgaagccgtgaactcttgagagaaaatccagttggcctctctcctctatccacacaattcaacttgataactggactttaggaaacttacagttagatgtaataacaaaaagaagtttatgcgtatcactttttgtgccattctaagtatttttggtttcttgtctccttatttcctctttaccatttttggaggggaagctattttttttccttgatctttcccagtgatatggattgaatctggttggtcatttccaccaggaatcagaggcagctgttaccaggtttcggccttccagttgatccctccactgtccaggctgtctcaggaggaggtgaatcagagctagtctgtcacctttccaatctaagccgaagccacaggtgcctgacaggttcccttctaacaactatttgaccaagagaggcaatcagggggttgtatactgcactggattcgccagagaagggaaaatttaattagtgaaaaggaaagaacactaggaaacatttgagaacctgcctctatcccagaatgtgctggagatttgacactcaaatcagtgtttagtcttctgcttggcaccatagcttaacctgcagtttcttcaaaatgcccaatgccttgtttcctattaccttagattgcaaaccagtctagggaagtctatgagaaagtagcatttaattaaagtttaaaaaaaaaaaggttgggcgttgtggctcatgcctgtaatcccagcactttgggaggctgaggcgggtggatcactaggtcaggagttcaagaccagcctggccaacatggtgaaaccctgtctgtactaaaaatacaaaagttagctgagcatggtggcgtgtgcctgtaatctcagctactcaggaggctgaggcaggagaatcgcttgaacccaggaggcggaggctgcagtgagctgagattgtgccactgcactccagcctgggagacagagcaagactcagtctcaaaaaaaaaaaaaaaaagcatttttctgttttaatgtttggagacttttttttttgttctctccctttcctgaaccctattctgatcctgaaccaaatttatagcaatataattagtgttaatctaaggcattactcatcaaaaaaattgctgcagtctttacagttgaataaataaaaacaactgcataaatatgcccacaaaaatttca

SEQ ID NO: 299111 - DNA, 2381 bp, Homo sapiens
aaaaaaaaaaaaaaaagtatgtgagtacatacatggttaagtaagtaatttccacacggacttttgctttagcacagcttactaaaaaatgtgttttgtagcttgctactgccatctgctggttctcaactcttagacgtctacaattggtgtactgctgcaatgtaccaatattgcaatataaaagggaattgggtctatttattttatttatgggaaaatcttaaaatattctttgttgagagtaagacatcagaatttgtatgtgatccatacaatattattttttagtatgcttttagcaaacaaactcactggtctttctttactattaataatgtgctaattttgtatttgagtttctgatcaaactttttattcctttgtcatcttttcctagtttaatggatcgagaagtggcgttgcttgctgaaatggacaaagtgaaagctgaagcaatggaaattttgctcagccgacaaaagaaggctgaacttctaaagaagatgactcatgtggctgttcaaatgtcagagcagcaattggttgagctcagagctgatatcaagcactttgttagtgaacgtaaatatgatgaggatctgggacgagtagcccggttcacctgtgatgtagagaccctaaagaagagcattgattcatttggacaagtgtctcatccaaagaacagctattcgaccagatcccgatgtagctcagttacatctgtgtccttgagtagcccaagtgatgcctctgctgcttcctcttccacctgtgcctctcctcccagccttacaagtgctaacaagaaaaactttgcaccgggagagactcctgcagccatagcaaactccagtggccagccctaccagccacttcgggaggtattgccagggaacagacgaggaggacagggctataggccacaaggccaaaagtccaatgaccccatgaaccaagggcggcatgacagtatgggtcgttacagaaacagctcgtggtattcatctggttccaggtatcagagtgctccatctcaggcaccaggaaacaccattgaaagaggccagactcactctgcagggaccaatggaactggagtcagcatggagcccagccctcccacgccttcattcaaaaaggggctcccccagcgcaaacccaggacctctcagactgaagccgtgaactcttgagagaaaatccagttggcctctctcctctatccacacaattcaacttgataactggactttaggaaacttacagttagatgtaataacaaaaagaagtttatgcgtatcactttttgtgccattctaagtatttttggtttcttgtctccttatttcctctttaccatttttggaggggaagctattttttttccttgatctttcccagtgatatggattgaatctggttggtcatttccaccaggaatcagaggcagctgttaccaggtttcggccttccagttgatccctccactgtccaggctgtctcaggaggaggtgaatcagagctagtctgtcacctttccaatctaagccgaagccacaggtgcctgacaggttcccttctaacaactatttgaccaagagaggcaatcagggggttgtatactgcactggattcgccagagaagggaaaatttaattagtgaaaaggaaagaacactaggaaacatttgagaacctgcctctatcccagaatgtgctggagatttgacactcaaatcagtgtttagtcttctgcttggcaccatagcttaacctgcagtttcttcaaaatgcccaatgccttgtttcctattaccttagattgcaaaccagtctagggaagtctatgagaaagtagcatttaattaaagtttaaaaaaaaaaaggttgggcgttgtggctcatgcctgtaatcccagcactttgggaggctgaggcgggtggatcactaggtcaggagttcaagaccagcctggccaacatggtgaaaccctgtctgtactaaaaatacaaaagttagctgagcatggtggcgtgtgcctgtaatctcagctactcaggaggctgaggcaggagaatcgcttgaacccaggaggcggaggctgcagtgagctgagattgtgccactgcactccagcctgggagacagagcaagactcagtctcaaaaaaaaaaaaaaaaagcatttttctgttttaatgtttggagacttttttttttgttctctccctttcctgaaccctattctgatcctgaaccaaatttatagcaatataattagtgttaatctaaggcattactcatcaaaaaaattgctgcagtctttacagttgaataaataaaaacaactgcataaatatgcccacaaaaatttca

SEQ ID NO: 299112 - DNA, 2271 bp, Homo sapiens
aaaaaaaaaaaaaaaagtatgtgagtacatacatggttaagtaagtaatttccacacggacttttgctttagcacagcttactaaaaaatgtgttttgtagcttgctactgccatctgctggttctcaactcttagacgtctacaattggtgtactgctgcaatgtaccaatattgcaatataaaagggaattgggtctatttattttatttatgggaaaatcttaaaatattctttgttgagagtaagacatcagaatttgtatgtgatccatacaatattattttttagtatgcttttagcaaacaaactcactggtctttctttactattaataatgtgctaattttgtatttgagtttctgatcaaactttttattcctttgtcatcttttcctagtttaatggatcgagaagtggcgttgcttgctgaaatggacaaagtgaaagctgaagcaacactttgttagtgaacgtaaatatgatgaggatctgggacgagtagcccggttcacctgtgatgtagagaccctaaagaagagcattgattcatttggacaagtgtctcatccaaagaacagctattcgaccagatcccgatgtagctcagttacatctgtgtccttgagtagcccaagtgatgcctctgctgcttcctcttccacctgtgcctctcctcccagccttacaagtgctaacaagaaaaactttgcaccgggagagactcctgcagccatagcaaactccagtggccagccctaccagccacttcgggaggtattgccagggaacagacgaggaggacagggctataggccacaaggccaaaagtccaatgaccccatgaaccaagggcggcatgacagtatgggtcgttacagaaacagctcgtggtattcatctggttccaggtatcagagtgctccatctcaggcaccaggaaacaccattgaaagaggccagactcactctgcagggaccaatggaactggagtcagcatggagcccagccctcccacgccttcattcaaaaaggggctcccccagcgcaaacccaggacctctcagactgaagccgtgaactcttgagagaaaatccagttggcctctctcctctatccacacaattcaacttgataactggactttaggaaacttacagttagatgtaataacaaaaagaagtttatgcgtatcactttttgtgccattctaagtatttttggtttcttgtctccttatttcctctttaccatttttggaggggaagctattttttttccttgatctttcccagtgatatggattgaatctggttggtcatttccaccaggaatcagaggcagctgttaccaggtttcggccttccagttgatccctccactgtccaggctgtctcaggaggaggtgaatcagagctagtctgtcacctttccaatctaagccgaagccacaggtgcctgacaggttcccttctaacaactatttgaccaagagaggcaatcagggggttgtatactgcactggattcgccagagaagggaaaatttaattagtgaaaaggaaagaacactaggaaacatttgagaacctgcctctatcccagaatgtgctggagatttgacactcaaatcagtgtttagtcttctgcttggcaccatagcttaacctgcagtttcttcaaaatgcccaatgccttgtttcctattaccttagattgcaaaccagtctagggaagtctatgagaaagtagcatttaattaaagtttaaaaaaaaaaaggttgggcgttgtggctcatgcctgtaatcccagcactttgggaggctgaggcgggtggatcactaggtcaggagttcaagaccagcctggccaacatggtgaaaccctgtctgtactaaaaatacaaaagttagctgagcatggtggcgtgtgcctgtaatctcagctactcaggaggctgaggcaggagaatcgcttgaacccaggaggcggaggctgcagtgagctgagattgtgccactgcactccagcctgggagacagagcaagactcagtctcaaaaaaaaaaaaaaaaagcatttttctgttttaatgtttggagacttttttttttgttctctccctttcctgaaccctattctgatcctgaaccaaatttatagcaatataattagtgttaatctaaggcattactcatcaaaaaaattgctgcagtctttacagttgaataaataaaaacaactgcataaatatgcccacaaaaatttca

SEQ ID NO: 299113 - DNA, 1442 bp, Homo sapiens
  misc_feature (1391)..(1391): n is a, c, g, or t
  misc_feature (1414)..(1414): n is a, c, g, or t
atctgctggatctccggcagcatcctgcagtccggcccaggagagaagtggggaggcggcggtgggggcggggcggcgtccggctctgagagagctgggggaggagcgcggcggcgacggcggcggtggctctagaaggggaggtggaggatctcctttcctcttctcagacccgggagcgtccgggacgcggagcccggagctggggcgacgaggcgattgcgggggcctgggctagctgctggctaccaatattctactttctgtctctatgaatgtgactaccctggttacctcatataatctccctggaaaaggagacatgaatgtctgcaatgatacttcctgacaagaagttgatacaagaaaaggaaaggagattaacagctagtgagcagaatttcgaacagcaggatttcgtattttttgcttccaactgcacacttccgttgcccacttttaaatcagagatacctacactcaaaacccagacaaggcaaaaggatacttttcttgtatattttttgagatcgaagaaacgacaatgtccaggaaacagaaccagaaggattcatcaggattcatttttgatttgcagtccaataccgtactggcccagggaggagcttttgagaacatgaaagagaagataaatgcggtacgtgcaatagttcctaataagagcaacaatgaaattatcctggttttgcagcactttgataactgtgtggacaaaacagtacaagcattcatggaaggtagtgccagtgaagtactcaaagaatggacagtaacaggcaagaaaaagaacaaaaagaagaaaaacaaaccgaaacctgccgcagaaccaagtaacggcatcccagattccagtaaatcagtttccattcaagaggaacagtctgcgccttcctcagagaaaggtggtatgaatggctaccatgtcaatggtgccatcaatgacactgagtctgtggactcactcagtgaaggtttggagacactttcaatagatgccagagaattggaggatcccgagtctgccatgctagatacgctggatagaacaggatccatgctgcagaatggtgtctctgattttgagaccaagtctttgactatgcactctattcacaattctcaacaacccaggaatgctgccaaatctctctcaagacctaccacagaaactcagttttcaaatatggggatggaagatgttcccctcgccaccagtaaaaagctaagttccaatattgaaaaatctgtaaaagacctccagcgctgcacagtgtctcttgcacggtatcgagttgtagttaaagaagagatggatgcctccattaagaaaatgaaacaagcctttgctgaattggagagctgtgattganactgttatggtcagaatggcgtnttctgatggcaagtgaactgaacatgga

SEQ ID NO: 299114 - DNA, 1521 bp, Homo sapiens
atctgctggatctccggcagcatcctgcagtccggcccaggagagaagtggggaggcggcggtgggggcggggcggcgtccggctctgagagagctgggggaggagcgcggcggcgacggcggcggtggctctagaaggggaggtggaggatctcctttcctcttctcagacccgggagcgtccgggacgcggagcccggagctggggcgacgaggcgattgcgggggcctgggctagctgctggctaccaatattctactttctgtctctatgaatgtgactaccctggttacctcatataatctccctggaaaaggagacatgaatgtctgcaatgatacttcctgacaagaagttgatacaagaaaaggaaaggagattaacagctagtgagcagaatttcgaacagcaggatttcgtattttttgcttccaactgcacacttccgttgcccacttttaaatcagagatacctacactcaaaacccagacaaggcaaaaggatacttttcttgtatattttttgagatcgaagaaacgacaatgtccaggaaacagaaccagaaggattcatcaggattcatttttgatttgcagtccaataccgtactggcccagggaggagcttttgagaacatgaaagagaagataaatgcggtacgtgcaatagttcctaataagagcaacaatgaaattatcctggttttgcagcactttgataactgtgtggacaaaacagtacaagcattcatggaaggtagtgccagtgaagtactcaaagaatggacagtaacaggcaagaaaaagaacaaaaagaagaaaaacaaaccgaaacctgccgcagaaccaagtaacggcatcccagattccagtaaatcagtttccattcaagaggaacagtctgcgccttcctcagagaaaggtggtatgaatggctaccatgtcaatggtgccatcaatgacactgagtctgtggactcactcagtgaaggtttggagacactttcaatagatgccagagaattggaggatcccgagtctgccatgctagatacgctggatagaacaggatccatgctgcagaatggtgtctctgattttgagaccaagtctttgactatgcactctattcacaattctcaacaacccaggaatgctgccaaatctctctcaagacctaccacagaaactcagttttcaaatatggggatggaagatgttcccctcgccaccagtaaaaagctaagttccaatattgaaaaatctgtaaaagacctccagcgctgcacagtgtctcttgcacggtatcgagttgtagttaaagaagagatggatgcctccattaagaaaatgaaacaagcctttgctgaattggagagctgtgtttaatggatccaggaagtggccgttgctttgcttgaaatggcccaaaagtggaaagcttgaaacccaatggaaaattttggttcaaccccgccaaaaggaaggcttgaactttcttaaaggaagaaggaccttca

SEQ ID NO: 299115 - DNA, 1761 bp, Homo sapiens
atctgctggatctccggcagcatcctgcagtccggcccaggagagaagtggggaggcggcggtgggggcggggcggcgtccggctctgagagagctgggggaggagcgcggcggcgacggcggcggtggctctagaaggggaggtggaggatctcctttcctcttctcagacccgggagcgtccgggacgcggagcccggagctggggcgacgaggcgattgcgggggcctgggctagctgctggctaccaatattctactttctgtctctatgaatgtgactaccctggttacctcatataatctccctggaaaaggagacatgaatgtctgcaatgatacttcctgacaagaagttgatacaagaaaaggaaaggagattaacagctagtgagcagaatttcgaacagcaggatttcgtattttttgcttccaactgcacacttccgttgcccacttttaaatcagagatacctacactcaaaacccagacaaggcaaaaggatacttttcttgtatattttttgagatcgaagaaacgacaatgtccaggaaacagaaccagaaggattcatcaggattcatttttgatttgcagtccaataccgtactggcccagggaggagcttttgagaacatgaaagagaagataaatgcggtacgtgcaatagttcctaataagagcaacaatgaaattatcctggttttgcagcactttgataactgtgtggacaaaacagtacaagcattcatggaaggtagtgccagtgaagtactcaaagaatggacagtaacaggcaagaaaaagaacaaaaagaagaaaaacaaaccgaaacctgccgcagaaccaagtaacggcatcccagattccagtaaatcagtttccattcaagaggaacagtctgcgccttcctcagagaaaggtggtatgaatggctaccatgtcaatggtgccatcaatgacactgagtctgtggactcactcagtgaaggtttggagacactttcaatagatgccagagaattggaggatcccgagtctgccatgctagatacgctggatagaacaggatccatgctgcagaatggtgtctctgattttgagaccaagtctttgactatgcactctattcacaattctcaacaacccaggaatgctgccaaatctctctcaagacctaccacagaaactcagttttcaaatatggggatggaagatgttcccctcgccaccagtaaaaagctaagttccaatattgaaaaatctgtaaaagacctccagcgctgcacagtgtctcttgcacggtatcgagttgtagttaaagaagagatggatgcctccattaagaaaatgaaacaagcctttgctgaattggagagctggtattccaatgctgctagagttcttggagcaaaatattgccaaggtttgggaaatgctttcttagcaaagtattgctaccccacaataattgtatcttctctccagtttgatgcttttggattaatatgtcaaccaaatttgtttagttacaagtctgtttattaacatcatgcgtaacgattatcaaacctatgttctctggcacttccctataaaagatttgctccttgaggaaatgaccctgccttagacatttttgtatgtctcacactatagtctccacattaactactttgtgctaacataactatgtattgagctaaattgaattagagcgagagagaaagagtgtgtgtgtgtgtgtgtgtgtgtgtgtg

SEQ ID NO: 299116 - DNA, 706 bp, Homo sapiens
gttgtgcttttgttttgtcttttaggtattccaatgctgctagagttcttggagcaaaatattgccaaggtttgggaaatgctttcttagcaaagtattgctaccccacaataattgtatcttctctccagtttgatgcttttggattaatatgtcaaccaaatttgtttagttacaagtctgtttattaacatcatgcgtaacgattatcaaacctatgttctctggcacttccctataaaagatttgctccttgaggaaatgaccctgccttagacatttttgtatgtctcacactatagtctccacattaactactttgtgctaacataactatgtattgagctaaattgaattagagcgagagagaaagagtgtgtgtgtgtgtgtgtgtgtgtgtgtgagtgtgattacaaccagaaacaagagtggaacttttatttaccctgtagttatattccccttcaaaaggagaaatcagaatgaactccaaatttgaagaaagttggaacattgcatgtttgtgcaagtattaacattctagatttttttttctttttgccaccacaaagcaaaaccgatatggtaaggaaaattattttcatccagaggttgaatactagggtactactgtctccttatacattgaaggctgtgggctcttttataacaacatggaaaagctttatgtgcctataaaccattt

SEQ ID NO: 299117 - DNA, 2064 bp, Homo sapiens
ttcggccggttctcccgggaagctattaatagcattacgtcagcctgggactggcaacacggagtaaacgaccgcgccgccagcctgagggctataaaaggggtgatgcaacgctctccaagccacagtcgcacgcagccaggcgcgcactgcacagctctcttctctcgccgccgcccgagcgcacccttcagcccgcgcgccggccgtgagtcctcggtgctcgcccgccggccagacaaacagcccgcccgaccccgtcccgaccctggccgccccgagcggagcctggagcaaaatgatgcttcaacacccaggccaggtctctgcctcggaagtgagtgcttctgccatcgtcccctgcctgtcccctcctgggtcactggtgtttgaggattttgctaacctgacgccctttgtcaaggaagagctgaggtttgccatccagaacaagcacctctgccaccggatgtcctctgcgctggaatcagtcactgtcagcgacagacccctcggggtgtccatcacaaaagccgaggtagcccctgaagaagatgaaaggaaaaagaggcgacgagaaagaaataagattgcagctgcaaagtgccgaaacaagaagaaggagaagacggagtgcctgcagaaagagtcggagaagctggaaagtgtgaatgctgaactgaaggctcagattgaggagctcaagaacgagaagcagcatttgatatacatgctcaaccttcatcggcccacgtgtattgtccgggctcagaatgggaggactccagaagatgagagaaacctctttatccaacagataaaagaaggaacattgcagagctaagcagtcgtggtatgggggcgactggggagtcctcattgaatcctcattttatacccaaaaccctgaagccattggagagctgtcttcctgtgtacctctagaatcccagcagcagagaaccatcaaggcgggagggcctgcagtgattcagcaggcccttcccattctgccccagagtgggtcttggaccagggcaagtgcatctttgcctcaactccaggatttaggccttaacacactggccattcttatgttccagatggcccccagctggtgtcctgcccgcctttcatctggattctacaaaaaaccaggatgcccaccgttaggattcaggcagcagtgtctgtacctcgggtgggagggatggggccatctccttcaccgtggctaccattgtcactcgtaggggatgtggagtgagaacagcatttagtgaagttgtgcaacggccagggttgtgctttctagcaaatatgctgttatgtccagaaattgtgtgtgcaagaaaactaggcaatgtactcttccgatgtttgtgtcacacaacactgatgtgacttttatatgctttttctcagatctggtttctaagagttttggggggcggggctgtcaccacgtgcagtatctcaagatattcaggtggccagaagagcttgtcagcaagaggaggacagaattctcccagcgttaacacaaaatccatgggcagcatgatggcaggtcctctgttgcaaactcagttccaaagtcacaggaagaaagcagaaagttcaacttccaaagggttaggactctccactcaatgtcttaggtcaggagttgtgtctaggctggaagagccaaagaatattccattttcctttccttgtggttgaaaaccacagtcagtggagagatgtttggaaaccacagtcagtggagcctgggtggtacccaggctttagcattattggatgtcaatagcattgtttttgtcatgtagctgttttaagaaatctggcccagggtgtttgcagctgtgagaagtcactcacactggccacaaggacgctggctactgtctattaaaattctgatgtttctgtgaaattctcagagtgtttaattgtactcaatggtatcattacaattttctgtaagagaaaatattacttatttatcctagtattcctaacctgtcagaataataaatattggaaccaagacatggtaaa

SEQ ID NO: 299118 - DNA, 2209 bp, Homo sapiens
ttcggccggttctcccgggaagctattaatagcattacgtcagcctgggactggcaacacggagtaaacgaccgcgccgccagcctgagggctataaaaggggtgatgcaacgctctccaagccacagtcgcacgcagccaggcgcgcactgcacagctctcttctctcgccgccgcccgagcgcacccttcagcccgcgcgccggccgtgagtcctcggtgctcgcccgccggccagacaaacagcccgcccgaccccgtcccgaccctggccgccccgagcggagcctggagcaaaatgatgcttcaacacccaggccaggtctctgcctcggaagtgagtgcttctgccatcgtcccctgcctgtcccctcctgggtcactggtgtttgaggattttgctaacctgacgccctttgtcaaggaagagctgaggtttgccatccagaacaagcacctctgccaccggatgtcctctgcgctggaatcagtcactgtcagcgacagacccctcggggtgtccatcacaaaagccgaggtagcccctgaagaagatgaaaggaaaaagaggcgacgagaaagaaataagattgcagctgcaaagtgccgaaacaagaagaaggagaagacggagtgcctgcagaaacttcagtattagcagagccacaggccgcctctgtggcatcaccagggtttctctgaagaagagggtctgcattttcctaaacccagtgctgctctcccatctcccatcttcctctcgcagcttgatgagccccggtgtgtcccaggagtcggagaagctggaaagtgtgaatgctgaactgaaggctcagattgaggagctcaagaacgagaagcagcatttgatatacatgctcaaccttcatcggcccacgtgtattgtccgggctcagaatgggaggactccagaagatgagagaaacctctttatccaacagataaaagaaggaacattgcagagctaagcagtcgtggtatgggggcgactggggagtcctcattgaatcctcattttatacccaaaaccctgaagccattggagagctgtcttcctgtgtacctctagaatcccagcagcagagaaccatcaaggcgggagggcctgcagtgattcagcaggcccttcccattctgccccagagtgggtcttggaccagggcaagtgcatctttgcctcaactccaggatttaggccttaacacactggccattcttatgttccagatggcccccagctggtgtcctgcccgcctttcatctggattctacaaaaaaccaggatgcccaccgttaggattcaggcagcagtgtctgtacctcgggtgggagggatggggccatctccttcaccgtggctaccattgtcactcgtaggggatgtggagtgagaacagcatttagtgaagttgtgcaacggccagggttgtgctttctagcaaatatgctgttatgtccagaaattgtgtgtgcaagaaaactaggcaatgtactcttccgatgtttgtgtcacacaacactgatgtgacttttatatgctttttctcagatctggtttctaagagttttggggggcggggctgtcaccacgtgcagtatctcaagatattcaggtggccagaagagcttgtcagcaagaggaggacagaattctcccagcgttaacacaaaatccatgggcagcatgatggcaggtcctctgttgcaaactcagttccaaagtcacaggaagaaagcagaaagttcaacttccaaagggttaggactctccactcaatgtcttaggtcaggagttgtgtctaggctggaagagccaaagaatattccattttcctttccttgtggttgaaaaccacagtcagtggagagatgtttggaaaccacagtcagtggagcctgggtggtacccaggctttagcattattggatgtcaatagcattgtttttgtcatgtagctgttttaagaaatctggcccagggtgtttgcagctgtgagaagtcactcacactggccacaaggacgctggctactgtctattaaaattctgatgtttctgtgaaattctcagagtgtttaattgtactcaatggtatcattacaattttctgtaagagaaaatattacttatttatcctagtattcctaacctgtcagaataataaatattggaaccaagacatggtaaa

SEQ ID NO: 299119 - DNA, 1010 bp, Homo sapiens
  misc_feature (955)..(955): n is a, c, g, or t
  misc_feature (984)..(984): n is a, c, g, or t
  misc_feature (990)..(990): n is a, c, g, or t
ttcggccggttctcccgggaagctattaatagcattacgtcagcctgggactggcaacacggagtaaacgaccgcgccgccagcctgagggctataaaaggggtgatgcaacgctctccaagccacagtcgcacgcagccaggcgcgcactgcacagctctcttctctcgccgccgcccgagcgcacccttcagcccgcgcgccggccgtgagtcctcggtgctcgcccgccggccagacaaacagcccgcccgaccccgtcccgaccctggccgccccgagcggagcctggagcaaaatgatgcttcaacacccaggccaggtctctgcctcggaagtgagtgcttctgccatcgtcccctgcctgtcccctcctgggtcactggtgtttgaggattttgctaacctgacgccctttgtcaaggaagagctgaggtttgccatccagaacaagcacctctgccaccggatgtcctctgcgctggaatcagtcactgtcagcgacagacccctcggggtgtccatcacaaaagccgaggtagcccctgaagaagatgaaaggaaaaagaggcgacgagaaagaaataagattgcagctgcaaagtgccgaaacaagaagaaggagaagacggagtgcctgcagaaaagtgagtgccttctagccttacccttcctctcgctcacgcctgtcttcaccagcttcatgtggctatcagaagaagagttagaaaaccccctacttggttatagtttcccaagaagggccttgtagctggtagcagaaatgccagttgcagaatgaggaggtggcaaagcagttaacacaatggatgtgacggtggatgtataaaaacaggtgtgtgaattcgtctgatgcctgactcccagcagcctcggccggttcatacatgtccatcagcttccaggctgcaggacatgccagcccagttaaagnttcattgatgttctaaaaagactgcactntattgntacttgaagcttaatacttt

SEQ ID NO: 299120 - DNA, 859 bp, Homo sapiens
ttcggccggttctcccgggaagctattaatagcattacgtcagcctgggactggcaacacggagtaaacgaccgcgccgccagcctgagggctataaaaggggtgatgcaacgctctccaagccacagtcgcacgcagccaggcgcgcactgcacagctctcttctctcgccgccgcccgagcgcacccttcagcccgcgcgccggccgtgagtcctcggtgctcgcccgccggccagacaaacagcccgcccgaccccgtcccgaccctggccgccccgagcggagcctggaggtgagcgctggaagccgagggagtgagcgcgacgagggctgctcgccttcattcccttcgcgcccctctaagtaaccagtccgccgacccctgacccaccccggatccgcgcccccagcctccggcttggaaataactctggcttaaacttcttctaagccaccgctgctcctcggcgcttcgaaaagtttcccgcaaagcgaaagaactaactttctcttttgacttggggcgcgaaaggttcctggtgacggaggtcgggcgtccactctgccgccagcctcgagcgccgcttctctccgccgacggcgctggcttgcccggctgggagagggcgtaaggtgggtgggcgggtgcgttggggtgtccgaggctgcctcgctcgccgtcccgctccatccctcgcttcgagacacggcactgtgggagccgatccttcccgggtggggtgggggggggcgcagagaggcacgaaggccggaggcttgcgggagggctgccccacgcgccgagaggaatgaatggggaaggggcgagagggcgggaggcgtcccgggcgcggccg

SEQ ID NO: 299121 - DNA, 3187 bp, Homo sapiens
ttcggccggttctcccgggaagctattaatagcattacgtcagcctgggactggcaacacggagtaaacgaccgcgccgccagcctgagggctataaaaggggtgatgcaacgctctccaagccacagtcgcacgcagccaggcgcgcactgcacagctctcttctctcgccgccgcccgagcgcacccttcagcccgcgcgccggccgtgagtcctcggtgctcgcccgccggccagacaaacagcccgcccgaccccgtcccgaccctggccgccccgagcggagcctggagcaaaatgatgcttcaacacccaggccaggtctctgcctcggaagtgagtgcttctgccatcgtcccctgcctgtcccctcctgggtcactggtgtttgaggattttgctaacctgacgccctttgtcaaggaagagctgaggtttgccatccagaacaagcacctctgccaccggatgtcctctgcgctggaatcagtcactgtcagcgacagacccctcggggtgtccatcacaaaagccgaggtagcccctgaagaagatgaaaggaaaaagaggcgacgagaaagaaataagattgcagctgcaaagtgccgaaacaagaagaaggagaagacggagtgcctgcagaaaagtgagtgccttctagccttacccttcctctcgctcacgcctgtcttcaccagcttcatgtggctatcagaagaagagttagaaaaccccctacttggttatagtttcccaagaagggccttgtagctggtagcagaaatgccagttgcagaatgaggaggtggcaaagcagttaacacaatggatgtgacggtggatgtataaaaacaggtgtgtgaattcgtctgatgcctgactcccagcagcctcggccggttcatacatgtccatcagcttccaggctgcaggacatgccagcccagttaaagaggcttcacttgactgttttcctgagaaaaggaagctgccagctctcatttggctcactatgaaaagcctttaattaatctcttcaaacaagttatttccttaatccacaagcagtggttacacttgctttgcattcttgtctggttcctaactctagagcccttctccctggcttagccagtaagctgagcccctggctgcgttcagccggcccgcctgagagacactaggggaaatagcttttgtgggcaagcagggtggccggtggtgctcagcagtctttccagtggctgtgtccctcctccaaatgtggacaggccatgacagagtcttagcccaagtcccacagatccccaaaagttctgttgattgcttcaggggatcagtgaaaattagggaattttgtgtgttgctatatacattttttctggggagatgagcttctcattgagatctgtgactcagaatcgactaagccaccataagtctggatttctccccagctcccaaggcccttttgggtccagaagacctgcatatgggctgtgactcatgcaaatgaggtatctgaactgcagcttcagtattagcagagccacaggccgcctctgtggcatcaccagggtttctctgaagaagagggtctgcattttcctaaacccagtgctgctctcccatctcccatcttcctctcgcagcttgatgagccccggtgtgtcccaggtacacccctgcatccaggcagcagcccaggccaccccctcctcactggcccttggctcctttcttgatgcctctgttgcttgtcccccaggagtcggagaagctggaaagtgtgaatgctgaactgaaggctcagattgaggagctcaagaacgagaagcagcatttgatatacatgctcaaccttcatcggcccacgtgtattgtccgggctcagaatgggaggactccagaagatgagagaaacctctttatccaacagataaaagaaggaacattgcagagctaagcagtcgtggtatgggggcgactggggagtcctcattgaatcctcattttatacccaaaaccctgaagccattggagagctgtcttcctgtgtacctctagaatcccagcagcagagaaccatcaaggcgggagggcctgcagtgattcagcaggcccttcccattctgccccagagtgggtcttggaccagggcaagtgcatctttgcctcaactccaggatttaggccttaacacactggccattcttatgttccagatggcccccagctggtgtcctgcccgcctttcatctggattctacaaaaaaccaggatgcccaccgttaggattcaggcagcagtgtctgtacctcgggtgggagggatggggccatctccttcaccgtggctaccattgtcactcgtaggggatgtggagtgagaacagcatttagtgaagttgtgcaacggccagggttgtgctttctagcaaatatgctgttatgtccagaaattgtgtgtgcaagaaaactaggcaatgtactcttccgatgtttgtgtcacacaacactgatgtgacttttatatgctttttctcagatctggtttctaagagttttggggggcggggctgtcaccacgtgcagtatctcaagatattcaggtggccagaagagcttgtcagcaagaggaggacagaattctcccagcgttaacacaaaatccatgggcagcatgatggcaggtcctctgttgcaaactcagttccaaagtcacaggaagaaagcagaaagttcaacttccaaagggttaggactctccactcaatgtcttaggtcaggagttgtgtctaggctggaagagccaaagaatattccattttcctttccttgtggttgaaaaccacagtcagtggagagatgtttggaaaccacagtcagtggagcctgggtggtacccaggctttagcattattggatgtcaatagcattgtttttgtcatgtagctgttttaagaaatctggcccagggtgtttgcagctgtgagaagtcactcacactggccacaaggacgctggctactgtctattaaaattctgatgtttctgtgaaattctcagagtgtttaattgtactcaatggtatcattacaattttctgtaagagaaaatattacttatttatcctagtattcctaacctgtcagaataataaatattggaaccaagacatggtaaa

SEQ ID NO: 299122 - DNA, 3141 bp, Homo sapiens
tgatgctccaggtgaagtcagaggtgaatggggttgcccttgggtcttgaattgaagaagaggccgggagtgggtggctaggtaatgatcctgagatcattcctggttctcaaagaaaggagatgtttaccagacagaatctgtttcggctttaaatgattatagttaataccaatagttatcaatttgcatattatcctcatctcaaaatccaaatgcatttttaaaattggctaacttttaatttactaatatattgccggtataattttaactttgatttttgttgttcactcacgtgtgtgtgtgtgcgtgtgtgtgtgtgtgtgtgtaggggttttcacacaaaagtctagagctttagtatttcggggtcttttagcgctagcattgcccttgtctgccagcttttgctggcagtaaaaggcagtgtatttgaggtaggtggcatttcttactgccctttaaatgtgtttcttttggattttacaggtagcccctgaagaagatgaaaggaaaaagaggcgacgagaaagaaataagattgcagctgcaaagtgccgaaacaagaagaaggagaagacggagtgcctgcagaaaagtgagtgccttctagccttacccttcctctcgctcacgcctgtcttcaccagcttcatgtggctatcagaagaagagttagaaaaccccctacttggttatagtttcccaagaagggccttgtagctggtagcagaaatgccagttgcagaatgaggaggtggcaaagcagttaacacaatggatgtgacggtggatgtataaaaacaggtgtgtgaattcgtctgatgcctgactcccagcagcctcggccggttcatacatgtccatcagcttccaggctgcaggacatgccagcccagttaaagaggcttcacttgactgttttcctgagaaaaggaagctgccagctctcatttggctcactatgaaaagcctttaattaatctcttcaaacaagttatttccttaatccacaagcagtggttacacttgctttgcattcttgtctggttcctaactctagagcccttctccctggcttagccagtaagctgagcccctggctgcgttcagccggcccgcctgagagacactaggggaaatagcttttgtgggcaagcagggtggccggtggtgctcagcagtctttccagtggctgtgtccctcctccaaatgtggacaggccatgacagagtcttagcccaagtcccacagatccccaaaagttctgttgattgcttcaggggatcagtgaaaattagggaattttgtgtgttgctatatacattttttctggggagatgagcttctcattgagatctgtgactcagaatcgactaagccaccataagtctggatttctccccagctcccaaggcccttttgggtccagaagacctgcatatgggctgtgactcatgcaaatgaggtatctgaactgcagcttcagtattagcagagccacaggccgcctctgtggcatcaccagggtttctctgaagaagagggtctgcattttcctaaacccagtgctgctctcccatctcccatcttcctctcgcagcttgatgagccccggtgtgtcccaggtacacccctgcatccaggcagcagcccaggccaccccctcctcactggcccttggctcctttcttgatgcctctgttgcttgtcccccaggagtcggagaagctggaaagtgtgaatgctgaactgaaggctcagattgaggagctcaagaacgagaagcagcatttgatatacatgctcaaccttcatcggcccacgtgtattgtccgggctcagaatgggaggactccagaagatgagagaaacctctttatccaacagataaaagaaggaacattgcagagctaagcagtcgtggtatgggggcgactggggagtcctcattgaatcctcattttatacccaaaaccctgaagccattggagagctgtcttcctgtgtacctctagaatcccagcagcagagaaccatcaaggcgggagggcctgcagtgattcagcaggcccttcccattctgccccagagtgggtcttggaccagggcaagtgcatctttgcctcaactccaggatttaggccttaacacactggccattcttatgttccagatggcccccagctggtgtcctgcccgcctttcatctggattctacaaaaaaccaggatgcccaccgttaggattcaggcagcagtgtctgtacctcgggtgggagggatggggccatctccttcaccgtggctaccattgtcactcgtaggggatgtggagtgagaacagcatttagtgaagttgtgcaacggccagggttgtgctttctagcaaatatgctgttatgtccagaaattgtgtgtgcaagaaaactaggcaatgtactcttccgatgtttgtgtcacacaacactgatgtgacttttatatgctttttctcagatctggtttctaagagttttggggggcggggctgtcaccacgtgcagtatctcaagatattcaggtggccagaagagcttgtcagcaagaggaggacagaattctcccagcgttaacacaaaatccatgggcagcatgatggcaggtcctctgttgcaaactcagttccaaagtcacaggaagaaagcagaaagttcaacttccaaagggttaggactctccactcaatgtcttaggtcaggagttgtgtctaggctggaagagccaaagaatattccattttcctttccttgtggttgaaaaccacagtcagtggagagatgtttggaaaccacagtcagtggagcctgggtggtacccaggctttagcattattggatgtcaatagcattgtttttgtcatgtagctgttttaagaaatctggcccagggtgtttgcagctgtgagaagtcactcacactggccacaaggacgctggctactgtctattaaaattctgatgtttctgtgaaattctcagagtgtttaattgtactcaatggtatcattacaattttctgtaagagaaaatattacttatttatcctagtattcctaacctgtcagaataataaatattggaaccaagacatggtaaa

SEQ ID NO: 299123 - DNA, 3104 bp, Homo sapiens
ttttgttcatgtcactgagctatgtgtattttaagaacctgctttacttaagatgaggatggcatgaaatgaaaacaaaacagaaacccaagggcttatgggacttttctctgagggtggggctctggtgttggaggtctggtgggggagggggacttgatcccatgccccagagcccctgaaacagtttgggtttcaatgtgtctttcagcaaaatgatgcttcaacacccaggccaggtctctgcctcggaagtgagtgcttctgccatcgtcccctgcctgtcccctcctgggtcactggtgtttgaggattttgctaacctgacgccctttgtcaaggaagagctgaggtttgccatccagaacaagcacctctgccaccggatgtcctctgcgctggaatcagtcactgtcagcgacagacccctcggggtgtccatcacaaaagccgaggtagcccctgaagaagatgaaaggaaaaagaggcgacgagaaagaaataagattgcagctgcaaagtgccgaaacaagaagaaggagaagacggagtgcctgcagaaaagtgagtgccttctagccttacccttcctctcgctcacgcctgtcttcaccagcttcatgtggctatcagaagaagagttagaaaaccccctacttggttatagtttcccaagaagggccttgtagctggtagcagaaatgccagttgcagaatgaggaggtggcaaagcagttaacacaatggatgtgacggtggatgtataaaaacaggtgtgtgaattcgtctgatgcctgactcccagcagcctcggccggttcatacatgtccatcagcttccaggctgcaggacatgccagcccagttaaagaggcttcacttgactgttttcctgagaaaaggaagctgccagctctcatttggctcactatgaaaagcctttaattaatctcttcaaacaagttatttccttaatccacaagcagtggttacacttgctttgcattcttgtctggttcctaactctagagcccttctccctggcttagccagtaagctgagcccctggctgcgttcagccggcccgcctgagagacactaggggaaatagcttttgtgggcaagcagggtggccggtggtgctcagcagtctttccagtggctgtgtccctcctccaaatgtggacaggccatgacagagtcttagcccaagtcccacagatccccaaaagttctgttgattgcttcaggggatcagtgaaaattagggaattttgtgtgttgctatatacattttttctggggagatgagcttctcattgagatctgtgactcagaatcgactaagccaccataagtctggatttctccccagctcccaaggcccttttgggtccagaagacctgcatatgggctgtgactcatgcaaatgaggtatctgaactgcagcttcagtattagcagagccacaggccgcctctgtggcatcaccagggtttctctgaagaagagggtctgcattttcctaaacccagtgctgctctcccatctcccatcttcctctcgcagcttgatgagccccggtgtgtcccaggtacacccctgcatccaggcagcagcccaggccaccccctcctcactggcccttggctcctttcttgatgcctctgttgcttgtcccccaggagtcggagaagctggaaagtgtgaatgctgaactgaaggctcagattgaggagctcaagaacgagaagcagcatttgatatacatgctcaaccttcatcggcccacgtgtattgtccgggctcagaatgggaggactccagaagatgagagaaacctctttatccaacagataaaagaaggaacattgcagagctaagcagtcgtggtatgggggcgactggggagtcctcattgaatcctcattttatacccaaaaccctgaagccattggagagctgtcttcctgtgtacctctagaatcccagcagcagagaaccatcaaggcgggagggcctgcagtgattcagcaggcccttcccattctgccccagagtgggtcttggaccagggcaagtgcatctttgcctcaactccaggatttaggccttaacacactggccattcttatgttccagatggcccccagctggtgtcctgcccgcctttcatctggattctacaaaaaaccaggatgcccaccgttaggattcaggcagcagtgtctgtacctcgggtgggagggatggggccatctccttcaccgtggctaccattgtcactcgtaggggatgtggagtgagaacagcatttagtgaagttgtgcaacggccagggttgtgctttctagcaaatatgctgttatgtccagaaattgtgtgtgcaagaaaactaggcaatgtactcttccgatgtttgtgtcacacaacactgatgtgacttttatatgctttttctcagatctggtttctaagagttttggggggcggggctgtcaccacgtgcagtatctcaagatattcaggtggccagaagagcttgtcagcaagaggaggacagaattctcccagcgttaacacaaaatccatgggcagcatgatggcaggtcctctgttgcaaactcagttccaaagtcacaggaagaaagcagaaagttcaacttccaaagggttaggactctccactcaatgtcttaggtcaggagttgtgtctaggctggaagagccaaagaatattccattttcctttccttgtggttgaaaaccacagtcagtggagagatgtttggaaaccacagtcagtggagcctgggtggtacccaggctttagcattattggatgtcaatagcattgtttttgtcatgtagctgttttaagaaatctggcccagggtgtttgcagctgtgagaagtcactcacactggccacaaggacgctggctactgtctattaaaattctgatgtttctgtgaaattctcagagtgtttaattgtactcaatggtatcattacaattttctgtaagagaaaatattacttatttatcctagtattcctaacctgtcagaataataaatattggaaccaagacatggtaaa

SEQ ID NO: 299124 - DNA, 1845 bp, Homo sapiens
gacaagaagagaaatcctcctctatataggatgctctgctgtttcctaaggattttcagcaccttgccccaaaatcaaaatgatgcttcaacacccaggccaggtctctgcctcggaagtgagtgcttctgccatcgtcccctgcctgtcccctcctgggtcactggtgtttgaggattttgctaacctgacgccctttgtcaaggaagagctgaggtttgccatccagaacaagcacctctgccaccggatgtcctctgcgctggaatcagtcactgtcagcgacagacccctcggggtgtccatcacaaaagccgaggtagcccctgaagaagatgaaaggaaaaagaggcgacgagaaagaaataagattgcagctgcaaagtgccgaaacaagaagaaggagaagacggagtgcctgcagaaagagtcggagaagctggaaagtgtgaatgctgaactgaaggctcagattgaggagctcaagaacgagaagcagcatttgatatacatgctcaaccttcatcggcccacgtgtattgtccgggctcagaatgggaggactccagaagatgagagaaacctctttatccaacagataaaagaaggaacattgcagagctaagcagtcgtggtatgggggcgactggggagtcctcattgaatcctcattttatacccaaaaccctgaagccattggagagctgtcttcctgtgtacctctagaatcccagcagcagagaaccatcaaggcgggagggcctgcagtgattcagcaggcccttcccattctgccccagagtgggtcttggaccagggcaagtgcatctttgcctcaactccaggatttaggccttaacacactggccattcttatgttccagatggcccccagctggtgtcctgcccgcctttcatctggattctacaaaaaaccaggatgcccaccgttaggattcaggcagcagtgtctgtacctcgggtgggagggatggggccatctccttcaccgtggctaccattgtcactcgtaggggatgtggagtgagaacagcatttagtgaagttgtgcaacggccagggttgtgctttctagcaaatatgctgttatgtccagaaattgtgtgtgcaagaaaactaggcaatgtactcttccgatgtttgtgtcacacaacactgatgtgacttttatatgctttttctcagatctggtttctaagagttttggggggcggggctgtcaccacgtgcagtatctcaagatattcaggtggccagaagagcttgtcagcaagaggaggacagaattctcccagcgttaacacaaaatccatgggcagcatgatggcaggtcctctgttgcaaactcagttccaaagtcacaggaagaaagcagaaagttcaacttccaaagggttaggactctccactcaatgtcttaggtcaggagttgtgtctaggctggaagagccaaagaatattccattttcctttccttgtggttgaaaaccacagtcagtggagagatgtttggaaaccacagtcagtggagcctgggtggtacccaggctttagcattattggatgtcaatagcattgtttttgtcatgtagctgttttaagaaatctggcccagggtgtttgcagctgtgagaagtcactcacactggccacaaggacgctggctactgtctattaaaattctgatgtttctgtgaaattctcagagtgtttaattgtactcaatggtatcattacaattttctgtaagagaaaatattacttatttatcctagtattcctaacctgtcagaataataaatattggaaccaagacatggtaaa

SEQ ID NO: 299125 - DNA, 1602 bp, Homo sapiens
ggtgtctaagatcccggtacgctactagtgccagtgctgctctcccatctcccatcttcctctcgcagcttgatgagccccggtgtgtcccaggtacacccctgcatccaggcagcagcccaggccaccccctcctcactggcccttggctcctttcttgatgcctctgttgcttgtcccccaggagtcggagaagctggaaagtgtgaatgctgaactgaaggctcagattgaggagctcaagaacgagaagcagcatttgatatacatgctcaaccttcatcggcccacgtgtattgtccgggctcagaatgggaggactccagaagatgagagaaacctctttatccaacagataaaagaaggaacattgcagagctaagcagtcgtggtatgggggcgactggggagtcctcattgaatcctcattttatacccaaaaccctgaagccattggagagctgtcttcctgtgtacctctagaatcccagcagcagagaaccatcaaggcgggagggcctgcagtgattcagcaggcccttcccattctgccccagagtgggtcttggaccagggcaagtgcatctttgcctcaactccaggatttaggccttaacacactggccattcttatgttccagatggcccccagctggtgtcctgcccgcctttcatctggattctacaaaaaaccaggatgcccaccgttaggattcaggcagcagtgtctgtacctcgggtgggagggatggggccatctccttcaccgtggctaccattgtcactcgtaggggatgtggagtgagaacagcatttagtgaagttgtgcaacggccagggttgtgctttctagcaaatatgctgttatgtccagaaattgtgtgtgcaagaaaactaggcaatgtactcttccgatgtttgtgtcacacaacactgatgtgacttttatatgctttttctcagatctggtttctaagagttttggggggcggggctgtcaccacgtgcagtatctcaagatattcaggtggccagaagagcttgtcagcaagaggaggacagaattctcccagcgttaacacaaaatccatgggcagcatgatggcaggtcctctgttgcaaactcagttccaaagtcacaggaagaaagcagaaagttcaacttccaaagggttaggactctccactcaatgtcttaggtcaggagttgtgtctaggctggaagagccaaagaatattccattttcctttccttgtggttgaaaaccacagtcagtggagagatgtttggaaaccacagtcagtggagcctgggtggtacccaggctttagcattattggatgtcaatagcattgtttttgtcatgtagctgttttaagaaatctggcccagggtgtttgcagctgtgagaagtcactcacactggccacaaggacgctggctactgtctattaaaattctgatgtttctgtgaaattctcagagtgtttaattgtactcaatggtatcattacaattttctgtaagagaaaatattacttatttatcctagtattcctaacctgtcagaataataaatattggaaccaagacatggtaaa

SEQ ID NO: 299126 - DNA, 2041 bp, Homo sapiens
ttcggccggttctcccgggaagctattaatagcattacgtcagcctgggactggcaacacggagtaaacgaccgcgccgccagcctgagggctataaaaggggtgatgcaacgctctccaagccacagtcgcacgcagccaggcgcgcactgcacagctctcttctctcgccgccgcccgagcgcacccttcagcccgcgcgccggccgtgagtcctcggtgctcgcccgccggccagacaaacagcccgcccgaccccgtcccgaccctggccgccccgagcggagcctggaggccaggtctctgcctcggaagtgagtgcttctgccatcgtcccctgcctgtcccctcctgggtcactggtgtttgaggattttgctaacctgacgccctttgtcaaggaagagctgaggtttgccatccagaacaagcacctctgccaccggatgtcctctgcgctggaatcagtcactgtcagcgacagacccctcggggtgtccatcacaaaagccgaggtagcccctgaagaagatgaaaggaaaaagaggcgacgagaaagaaataagattgcagctgcaaagtgccgaaacaagaagaaggagaagacggagtgcctgcagaaagagtcggagaagctggaaagtgtgaatgctgaactgaaggctcagattgaggagctcaagaacgagaagcagcatttgatatacatgctcaaccttcatcggcccacgtgtattgtccgggctcagaatgggaggactccagaagatgagagaaacctctttatccaacagataaaagaaggaacattgcagagctaagcagtcgtggtatgggggcgactggggagtcctcattgaatcctcattttatacccaaaaccctgaagccattggagagctgtcttcctgtgtacctctagaatcccagcagcagagaaccatcaaggcgggagggcctgcagtgattcagcaggcccttcccattctgccccagagtgggtcttggaccagggcaagtgcatctttgcctcaactccaggatttaggccttaacacactggccattcttatgttccagatggcccccagctggtgtcctgcccgcctttcatctggattctacaaaaaaccaggatgcccaccgttaggattcaggcagcagtgtctgtacctcgggtgggagggatggggccatctccttcaccgtggctaccattgtcactcgtaggggatgtggagtgagaacagcatttagtgaagttgtgcaacggccagggttgtgctttctagcaaatatgctgttatgtccagaaattgtgtgtgcaagaaaactaggcaatgtactcttccgatgtttgtgtcacacaacactgatgtgacttttatatgctttttctcagatctggtttctaagagttttggggggcggggctgtcaccacgtgcagtatctcaagatattcaggtggccagaagagcttgtcagcaagaggaggacagaattctcccagcgttaacacaaaatccatgggcagcatgatggcaggtcctctgttgcaaactcagttccaaagtcacaggaagaaagcagaaagttcaacttccaaagggttaggactctccactcaatgtcttaggtcaggagttgtgtctaggctggaagagccaaagaatattccattttcctttccttgtggttgaaaaccacagtcagtggagagatgtttggaaaccacagtcagtggagcctgggtggtacccaggctttagcattattggatgtcaatagcattgtttttgtcatgtagctgttttaagaaatctggcccagggtgtttgcagctgtgagaagtcactcacactggccacaaggacgctggctactgtctattaaaattctgatgtttctgtgaaattctcagagtgtttaattgtactcaatggtatcattacaattttctgtaagagaaaatattacttatttatcctagtattcctaacctgtcagaataataaatattggaaccaagacatggtaaa

SEQ ID NO: 299127 - DNA, 1664 bp, Homo sapiens
taacggctaggtagcgaggcctgggtgttgctgaggtttgccatccagaacaagcacctctgccaccggatgtcctctgcgctggaatcagtcactgtcagcgacagacccctcggggtgtccatcacaaaagccgaggtagcccctgaagaagatgaaaggaaaaagaggcgacgagaaagaaataagattgcagctgcaaagtgccgaaacaagaagaaggagaagacggagtgcctgcagaaagagtcggagaagctggaaagtgtgaatgctgaactgaaggctcagattgaggagctcaagaacgagaagcagcatttgatatacatgctcaaccttcatcggcccacgtgtattgtccgggctcagaatgggaggactccagaagatgagagaaacctctttatccaacagataaaagaaggaacattgcagagctaagcagtcgtggtatgggggcgactggggagtcctcattgaatcctcattttatacccaaaaccctgaagccattggagagctgtcttcctgtgtacctctagaatcccagcagcagagaaccatcaaggcgggagggcctgcagtgattcagcaggcccttcccattctgccccagagtgggtcttggaccagggcaagtgcatctttgcctcaactccaggatttaggccttaacacactggccattcttatgttccagatggcccccagctggtgtcctgcccgcctttcatctggattctacaaaaaaccaggatgcccaccgttaggattcaggcagcagtgtctgtacctcgggtgggagggatggggccatctccttcaccgtggctaccattgtcactcgtaggggatgtggagtgagaacagcatttagtgaagttgtgcaacggccagggttgtgctttctagcaaatatgctgttatgtccagaaattgtgtgtgcaagaaaactaggcaatgtactcttccgatgtttgtgtcacacaacactgatgtgacttttatatgctttttctcagatctggtttctaagagttttggggggcggggctgtcaccacgtgcagtatctcaagatattcaggtggccagaagagcttgtcagcaagaggaggacagaattctcccagcgttaacacaaaatccatgggcagcatgatggcaggtcctctgttgcaaactcagttccaaagtcacaggaagaaagcagaaagttcaacttccaaagggttaggactctccactcaatgtcttaggtcaggagttgtgtctaggctggaagagccaaagaatattccattttcctttccttgtggttgaaaaccacagtcagtggagagatgtttggaaaccacagtcagtggagcctgggtggtacccaggctttagcattattggatgtcaatagcattgtttttgtcatgtagctgttttaagaaatctggcccagggtgtttgcagctgtgagaagtcactcacactggccacaaggacgctggctactgtctattaaaattctgatgtttctgtgaaattctcagagtgtttaattgtactcaatggtatcattacaattttctgtaagagaaaatattacttatttatcctagtattcctaacctgtcagaataataaatattggaaccaagacatggtaaa

SEQ ID NO: 299128 - DNA, 1477 bp, Homo sapiens
tcggtccgctgatgtgcagatcttgaagaaggagaagacggagtgcctgcagaatgagcgagtcggagaagctggaaagtgtgaatgctgaactgaaggctcagattgaggagctcaagaacgagaagcagcatttgatatacatgctcaaccttcatcggcccacgtgtattgtccgggctcagaatgggaggactccagaagatgagagaaacctctttatccaacagataaaagaaggaacattgcagagctaagcagtcgtggtatgggggcgactggggagtcctcattgaatcctcattttatacccaaaaccctgaagccattggagagctgtcttcctgtgtacctctagaatcccagcagcagagaaccatcaaggcgggagggcctgcagtgattcagcaggcccttcccattctgccccagagtgggtcttggaccagggcaagtgcatctttgcctcaactccaggatttaggccttaacacactggccattcttatgttccagatggcccccagctggtgtcctgcccgcctttcatctggattctacaaaaaaccaggatgcccaccgttaggattcaggcagcagtgtctgtacctcgggtgggagggatggggccatctccttcaccgtggctaccattgtcactcgtaggggatgtggagtgagaacagcatttagtgaagttgtgcaacggccagggttgtgctttctagcaaatatgctgttatgtccagaaattgtgtgtgcaagaaaactaggcaatgtactcttccgatgtttgtgtcacacaacactgatgtgacttttatatgctttttctcagatctggtttctaagagttttggggggcggggctgtcaccacgtgcagtatctcaagatattcaggtggccagaagagcttgtcagcaagaggaggacagaattctcccagcgttaacacaaaatccatgggcagcatgatggcaggtcctctgttgcaaactcagttccaaagtcacaggaagaaagcagaaagttcaacttccaaagggttaggactctccactcaatgtcttaggtcaggagttgtgtctaggctggaagagccaaagaatattccattttcctttccttgtggttgaaaaccacagtcagtggagagatgtttggaaaccacagtcagtggagcctgggtggtacccaggctttagcattattggatgtcaatagcattgtttttgtcatgtagctgttttaagaaatctggcccagggtgtttgcagctgtgagaagtcactcacactggccacaaggacgctggctactgtctattaaaattctgatgtttctgtgaaattctcagagtgtttaattgtactcaatggtatcattacaattttctgtaagagaaaatattacttatttatcctagtattcctaacctgtcagaataataaatattggaaccaagacatggtaaa

SEQ ID NO: 299129 - DNA, 1662 bp, Homo sapiens
ttcggccggttctcccgggaagctattaatagcattacgtcagcctgggactggcaacacggagtaaacgaccgcgccgccagcctgagggctataaaaggggtgatgcaacgctctccaagccacagtcgcacgcagccaggcgcgcactgcacagctctcttctctcgccgccgcccgagcgcacccttcagcccgcgcgccggccgtgagtcctcggtgctcgcccgccggccagacaaacagcccgcccgaccccgtcccgaccctggccgccccgagcggagcctggagcaaaatgatgcttcaacacccaggccaggtctctgcctcggaagtgagtgcttctgccatcgtcccctgcctgtcccctcctgggtcactggtgtttgaggattttgctaacctgacgccctttgtcaaggaagagctgaggtttgccatccagaacaagcacctctgccaccggattcctcattgaatcctcattttatacccaaaaccctgaagccattggagagctgtcttcctgtgtacctctagaatcccagcagcagagaaccatcaaggcgggagggcctgcagtgattcagcaggcccttcccattctgccccagagtgggtcttggaccagggcaagtgcatctttgcctcaactccaggatttaggccttaacacactggccattcttatgttccagatggcccccagctggtgtcctgcccgcctttcatctggattctacaaaaaaccaggatgcccaccgttaggattcaggcagcagtgtctgtacctcgggtgggagggatggggccatctccttcaccgtggctaccattgtcactcgtaggggatgtggagtgagaacagcatttagtgaagttgtgcaacggccagggttgtgctttctagcaaatatgctgttatgtccagaaattgtgtgtgcaagaaaactaggcaatgtactcttccgatgtttgtgtcacacaacactgatgtgacttttatatgctttttctcagatctggtttctaagagttttggggggcggggctgtcaccacgtgcagtatctcaagatattcaggtggccagaagagcttgtcagcaagaggaggacagaattctcccagcgttaacacaaaatccatgggcagcatgatggcaggtcctctgttgcaaactcagttccaaagtcacaggaagaaagcagaaagttcaacttccaaagggttaggactctccactcaatgtcttaggtcaggagttgtgtctaggctggaagagccaaagaatattccattttcctttccttgtggttgaaaaccacagtcagtggagagatgtttggaaaccacagtcagtggagcctgggtggtacccaggctttagcattattggatgtcaatagcattgtttttgtcatgtagctgttttaagaaatctggcccagggtgtttgcagctgtgagaagtcactcacactggccacaaggacgctggctactgtctattaaaattctgatgtttctgtgaaattctcagagtgtttaattgtactcaatggtatcattacaattttctgtaagagaaaatattacttatttatcctagtattcctaacctgtcagaataataaatattggaaccaagacatggtaaa

SEQ ID NO: 299130 - DNA, 2537 bp, Homo sapiens
ttcggccggttctcccgggaagctattaatagcattacgtcagcctgggactggcaacacggagtaaacgaccgcgccgccagcctgagggctataaaaggggtgatgcaacgctctccaagccacagtcgcacgcagccaggcgcgcactgcacagctctcttctctcgccgccgcccgagcgcacccttcagcccgcgcgccggccgtgagtcctcggtgctcgcccgccggccagacaaacagcccgcccgaccccgtcccgaccctggccgccccgagcggagcctggagcaaaatgatgcttcaacacccaggccaggtctctgcctcggaagtgagtgcttctgccatcgtcccctgcctgtcccctcctgggtcactggtgtttgaggattttgctaacctgacgccctttgtcaaggaagagctgaggtttgccatccagaacaagcacctctgccaccggatgtcctctgcgctggaatcagtcactgtcagcgacagacccctcggggtgtccatcacaaaagccgaggtagcccctgaagaagatgaaaggaaaaagaggcgacgagaaagaaataagattgcagctgcaaagtgccgaaacaagaagaaggagaagacggagtgcctgcagaaagagtcggagaagctggaaagtgtgaatgctgaactgaaggctcagattgaggagctcaagaacgagaagcagcatttgatatacatgctcaaccttcatcggcccacgtgtattgtccgggctcagaatgggaggactccagaagatgagagaaacctctttatccaacagataaaagaaggaacattgcagagctaagcagtcgtggtatgggggcgactggggagtcctcattgaatcctcattttatacccaaaaccctgaagccattggagagctgtcttcctgtgtacctctagaatcccagcagcagagaaccatcaaggcgggagggcctgcagtgattcagcaggcccttcccattctgccccagagtgggtcttggaccagggcaagtgcatctttgcctcaactccaggatttaggccttaacacactggccattcttatgttccagatggcccccagctggtgtcctgcccgcctttcatctggattctacaaaaaaccaggatgcccaccgttaggattcaggcagcagtgtctgtacctcgggtgggagggatggggccatctccttcaccgtggctaccattgtcactcgtaggggatgtggagtgagaacagcatttagtgaagttgtgcaacggccagggttgtgctttctagcaaatatgctgttatgtccagaaattgtgtgtgcaagaaaactaggcaatgtactcttccgatgtttgtgtcacacaacactgatgtgacttttatatgctttttctcagatctggtttctaagagttttggggggcggggctgtcaccacgtgcagtatctcaagatattcaggtggccagaagagcttgtcagcaagaggaggacagaattctcccagcgttaacacaaaatccatgggcagcatgatggcaggtcctctgttgcaaactcagttccaaagtcacaggaagaaagcagaaagttcaacttccaaagggttaggactctccactcaatgtcttaggtcaggagttgtgtctaggctggaagagccaaagaatattccattttcctttccttgtggttgaaaaccacagtcagtggagagatgtttggaaaccacagtcagtggagcctgggtggtacccaggctttagcattattggatgtcaatagcattgtttttgtcatgtagctgttttaagaaatctggcccagggtgtttgcagctgtgagaagtcactcacactggccacaaggacgctggctactgtctattaaaattctgatgtttctgtgaaattctcagagtgtttaattgtactcaatggtatcattacaattttctgtaagagaaaatattacttatttatcctagtattcctaacctgtcagaataataaatattggaaccaagacatggtaaaaaaaaaaaaaaagaaagaaaaaagaaaaaaaacaacaaaggggggggcggcaaaaaaatttcccccggggggcccccattgtgggcgcacccccttttttgggcaaaaagggggcccccaatagggggggatttaaaaacaggcggggcggggtaaacaccgggggcgggggacacctgccgggggctcttgggagagagcccacccggggggggcactagggacaccaccccgggaattcacggcctagggaaataaaactaaggcggacaggggaacccagcgaatttctgcgtagaacgtggcacggctagttaagcattcggggggacatgacacgcgaccacacacagtcggaaaacaataagacagagaacaagctatacagctagtaacgaaacatagtgacagaggcggacagacatgacacactacacagtcgagaggcacatgagcagagagatcacaatctc

SEQ ID NO: 299131 - DNA, 2063 bp, Homo sapiens
ttcggccggttctcccgggaagctattaatagcattacgtcagcctgggactggcaacacggagtaaacgaccgcgccgccagcctgagggctataaaaggggtgatgcaacgctctccaagccacagtcgcacgcagccaggcgcgcactgcacagctctcttctctcgccgccgcccgagcgcacccttcagcccgcgcgccggccgtgagtcctcggtgctcgcccgccggccagacaaacagcccgcccgaccccgtcccgaccctggccgccccgagcggagcctggagcaaaatgatgcttcaacacccaggccaggtctctgcctcggaagtgagtgcttctgccatcgtcccctgcctgtcccctcctgggtcactggtgtttgaggattttgctaacctgacgccctttgtcaaggaagagctgaggtttgccatccagaacaagcacctctgccaccggatgtcctctgcgctggaatcagtcactgtcagcgacagacccctcggggtgtccatcacaaaagccgaggtagcccctgaagaagatgaaaggaaaaagaggcgacgagaaagaaataagattgcagctgcaaagtgccgaaacaagaagaaggagaagacggagtgcctgcagaaagagtcggagaagctggaaagtgtgaatgctgaactgaaggctcagattgaggagctcaagaacgagaagcagcatttgatatacatgctcaaccttcatcggcccacgtgtattgtccgggctcagaatgggaggactccagaagatgagagaaacctctttatccaacagataaaagaaggaacattgcagagctaagcagtcgtggtatgggggcgactggggagtcctcattgaatcctcattttatacccaaaaccctgaagccattggagagctgtcttcctgtgtacctctagaatcccagcagcagagaaccatcaaggcgggagggcctgcagtgattcagcaggcccttcccattctgccccagagtgggtcttggaccagggcaagtgcatctttgcctcaactccaggatttaggccttaacacactggccattcttatgttccagatggcccccagctggtgtcctgcccgcctttcatctggattctacaaaaaaccaggatgcccaccgttaggattcaggcagcagtgtctgtacctcgggtgggagggatggggccatctccttcaccgtggctaccattgtcactcgtaggggatgtggagtgagaacagcatttagtgaagttgtgcaacggccagggttgtgctttctagcaaatatgctgttatgtccagaaattgtgtgtgcaagaaaactaggcaatgtactcttccgatgtttgtgtcacacaacactgatgtgacttttatatgctttttctcagatctggtttctaagagttttggggggcggggctgtcaccacgtgcagtatctcaagatattcaggtggccagaagagcttgtcagcaagaggaggacagaattctcccagcgttaacacaaaatccatgggcagcatgatggcaggtcctctgttgcaaactcagttccaaagtcacaggaagaaagcagaaagttcaacttccaaagggttaggactctccactcaatgtcttaggtcaggagttgtgtctaggctggaagagccaaagaatattccattttcctttccttgtggttgaaaaccacagtcagtggagagatgtttggaaaccacagtcagtggagcctgggtggtacccaggctttagcattattggatgtcaatagcattgtttttgtcatgtagctgttttaagaaatctggcccagggtgtttgcagctgtgagaagtcactcacactggccacaaggacgctggctactgtctattaaaattctgatgtttctgtgaaattctcagagtgtttaattgtactcaatggtatcattacaattttctgtaagagaaaatattacttatttatcctagtattcctaacctgggccccagggggacccaacttcaaatccgaatcct

SEQ ID NO: 299132 - DNA, 734 bp, Homo sapiens
gtattgtatttttcgtcactacctccccgagcaatgtactcttccgatgtttgtgtcacacaacactgatgtgacttttatatgctttttctcagatctggtttctaagagttttggggggcggggctgtcaccacgtgcagtatctcaagatattcaggtggccagaagagcttgtcagcaagaggaggacagaattctcccagcgttaacacaaaatccatgggcagcatgatggcaggtcctctgttgcaaactcagttccaaagtcacaggaagaaagcagaaagttcaacttccaaagggttaggactctccactcaatgtcttaggtcaggagttgtgtctaggctggaagagccaaagaatattccattttcctttccttgtggttgaaaaccacagtcagtggagagatgtttggaaaccacagtcagtggagcctgggtggtacccaggctttagcattattggatgtcaatagcattgtttttgtcatgtagctgttttaagaaatctggcccagggtgtttgcagctgtgagaagtcactcacactggccacaaggacgctggctactgtctattaaaattctgatgtttctgtgaaattctcagagtgtttaattgtactcaatggtatcattacaattttctgtaagagaaaatattacttatttatcctagtattcctaacctgtcagaataataaatattggaaccaagacatggtaaa

SEQ ID NO: 299133 - DNA, 1455 bp, Homo sapiens
ttcggccggttctcccgggaagctattaatagcattacgtcagcctgggactggcaacacggagtaaacgaccgcgccgccagcctgagggctataaaaggggtgatgcaacgctctccaagccacagtcgcacgcagccaggcgcgcactgcacagctctcttctctcgccgccgcccgagcgcacccttcagcccgcgcgccggccgtgagtcctcggtgctcgcccgccggccagacaaacagcccgcccgaccccgtcccgaccctggccgccccgagcggagcctggagcaaaatgatgcttcaacacccaggccaggtctctgcctcggaagtgagtgcttctgccatcgtcccctgcctgtcccctcctgggtcactggtgtttgaggattttgctaacctgacgccctttgtcaaggaagagctgaggtttgccatccagaacaagcacctctgccaccggatgtcctctgcgctggaatcagtcactgtcagcgacagacccctcggggtgtccatcacaaaagccgaggtagcccctgaagaagatgaaaggaaaaagaggcgacgagaaagaaataagattgcagctgcaaagtgccgaaacaagaagaaggagaagacggagtgcctgcagaaagagtcggagaagctggaaagtgtgaatgctgaactgaaggctcagattgaggagctcaagaacgagaagcagcatttgatatacatgctcaaccttcatcggcccacgtgtattgtccgggctcagaatgggaggactccagaagatgagagaaacctctttatccaacagataaaagaaggaacattgcagagctaagcagtcgtggtatgggggcgactggggagtcctcattgaatcctcattttatacccaaaaccctgaagccattggagagctgtcttcctgtgtacctctagaatcccatgatggcaggtcctctgttgcaaactcagttccaaagtcacaggaagaaagcagaaagttcaacttccaaagggttaggactctccactcaatgtcttaggtcaggagttgtgtctaggctggaagagccaaagaatattccattttcctttccttgtggttgaaaaccacagtcagtggagagatgtttggaaaccacagtcagtggagcctgggtggtacccaggctttagcattattggatgtcaatagcattgtttttgtcatgtagctgttttaagaaatctggcccagggtgtttgcagctgtgagaagtcactcacactggccacaaggacgctggctactgtctattaaaattctgatgtttctgtgaaattctcagagtgtttaattgtactcaatggtatcattacaattttctgtaagagaaaatattacttatttatcctagtattcctaacctgtcagaataataaatattggaaccaagacatggtaaa

SEQ ID NO: 299134 - DNA, 2010 bp, Homo sapiens
ttcggccggttctcccgggaagctattaatagcattacgtcagcctgggactggcaacacggagtaaacgaccgcgccgccagcctgagggctataaaaggggtgatgcaacgctctccaagccacagtcgcacgcagccaggcgcgcactgcacagctctcttctctcgccgccgcccgagcgcacccttcagcccgcgcgccggccgtgagtcctcggtgctcgcccgccggccagacaaacagcccgcccgaccccgtcccgaccctggccgccccgagcggagcctggagcaaaatgatgcttcaacacccaggccaggtctctgcctcggaagtgagtgcttctgccatcgtcccctgcctgtcccctcctgggtcactggtgtttgaggattttgctaacctgacgccctttgtcaaggaagagctgaggtttgccatccagaacaagcacctctgccaccggatgtcctctgcgctggaatcagtcactgtcagcgacagacccctcggggtgtccatcacaaaagccgaggtagcccctgaagaagatgaaaggaaaaagaggcgacgagaaagaaataagattgcagctgcaaagtgccgaaacaagaagaaggagaagacggagtgcctgcagaaagagtcggagaagctggaaagtgtgaatgctgaactgaaggctcagattgaggagctcaagaacgagaagcagcatttgatatacatgctcaaccttcatcggcccacgtgtattgtccgggctcagaatgggaggactccagaagatgagagaaacctctttatccaacagataaaagaaggaacattgcagagctaagcagtcgtggtatgggggcgactggggagtcctcattgaatcctcattttatacccaaaaccctgaagccattggagagctgtcttcctgtgtacctctagaatcccagcagcagagaaccatcaaggcgggagggcctgcagtgattcagcaggcccttcccattctgccccagagtgggtcttggaccagggcaagtgcatctttgcctcaactccaggatttaggccttaacacactggccattcttatgttccagatggcccccagctggtgtcctgcccgcctttcatctggattctacaaaaaaccaggatgcccaccgttaggattcaggcagcagtgtctgtacctcgggtgggagggatggggccatctccttcaccgtggctaccattgtcactcgtaggggatgtggagtgagaacagcatttagtgaagttgtgcaacggccagggttgtgctttctagcaaatatgctgttatgtccagaaattgtgtgtgcaagaaaactaggcaatgtactcttccgatgtttgtgtcacacaacactgatgtgacttttatatgctttttctcagatctggtttctaagagttttggggggcggggctgtcaccacgtgcagtatctcaagatattcaggtggccagaagagcttgtcagcaagaggaggacagaattctcccagcgttaacacaaaatccatgggcagcatgatggcaggtcctctgttgcaaactcagttccaaagtcacaggaagaaagcagaaagttcaacttccaaagggttaggactctccactcaatgtcttaggtcaggagttgtgtctaggctggaagagccaaagaatattccattttcctttccttgtggttgggtacccaggctttagcattattggatgtcaatagcattgtttttgtcatgtagctgttttaagaaatctggcccagggtgtttgcagctgtgagaagtcactcacactggccacaaggacgctggctactgtctattaaaattctgatgtttctgtgaaattctcagagtgtttaattgtactcaatggtatcattacaattttctgtaagagaaaatattacttatttatcctagtattcctaacctgtcagaataataaatattggaaccaagacatggtaaa

SEQ ID NO: 299135 - DNA, 1566 bp, Homo sapiens
  misc_feature (1234)..(1234): n is a, c, g, or t
  misc_feature (1365)..(1365): n is a, c, g, or t
  misc_feature (1431)..(1431): n is a, c, g, or t
  misc_feature (1554)..(1554): n is a, c, g, or t
ttcggccggttctcccgggaagctattaatagcattacgtcagcctgggactggcaacacggagtaaacgaccgcgccgccagcctgagggctataaaaggggtgatgcaacgctctccaagccacagtcgcacgcagccaggcgcgcactgcacagctctcttctctcgccgccgcccgagcgcacccttcagcccgcgcgccggccgtgagtcctcggtgctcgcccgccggccagacaaacagcccgcccgaccccgtcccgaccctggccgccccgagcggagcctggagcaaaatgatgcttcaacacccaggccaggtctctgcctcggaagtgagtgcttctgccatcgtcccctgcctgtcccctcctgggtcactggtgtttgaggattttgctaacctgacgccctttgtcaaggaagagctgaggtttgccatccagaacaagcacctctgccaccggatgtcctctgcgctggaatcagtcactgtcagcgacagacccctcggggtgtccatcacaaaagccgaggtagcccctgaagaagatgaaaggaaaaagaggcgacgagaaagaaataagattgcagctgcaaagtgccgaaacaagaagaaggagaagacggagtgcctgcagaaagagtcggagaagctggaaagtgtgaatgctgaactgaaggctcagattgaggagctcaagaacgagaagcagcatttgatatacatgctcaaccttcatcggcccacgtgtattgtccgggctcagaatgggaggactccagaagatgagagaaacctctttatccaacagataaaagaaggaacattgcagagctaagcagtcgtggtatgggggcgactggggagtcctcattgaatcctcattttatacccaaaaccctgaagccattggagagctgtcttcctgtgtacctctagaatcccagcagcagagaaccatcaaggcgggagggcctgcagtgattcagcaggcccttcccattctgccccagagtgggtcttggaccagggcaagtgcatctttgcctcaactccaggatttaggccttaacacactggccattcttatgttccagatggcccccagctggtgtcctgcccgcctttcatctggattctacaaaaaaccaggatgcccaccgttaggattcaggcagcagtgtctgtacctcgggtgggagggatgggcatctctcacgtgtacatngactcgaggatgtgatggacagattatgagtgtcacggcaggtgtctttacaaatgctgatgcgaaatgttcagaactagatgctctcgatgtggaacacatgtgacttaattgcttcaacggtctagagntgggcgctgaccatgcgttcagatcgtgcaaactgacaagagcgattcagtacaatctgcgtagcngtttgacatcagcaggagcagctcaggtgctcatgtgcagtgttgacaatcatttctggacacggggttaaccgggggggcctctttataattttttaaaacgcgggagcctcccgctatatntcgatcgcgcct

SEQ ID NO: 299136 - DNA, 4586 bp, Homo sapiens
aaatagtccagcagaggagtgtgggggaagggggcaggagaggcacaagaataagggagacctggactctgcctttttgggaaaaggaaccaagctcatagcaatttggctgataacacaatcagatttttccaggttaagcttcctttctgttatactttcatcattgtgatgctgtggtagaaagtaaataacagtagtggctcagtcatttaatctttcccctctataatacaacttacttgaaatttaaatcaagaaaaaatttctgacgctgagctaggttggtggcatgatatgccaggggtcagtgggggagcttgcttctgagccccctgttgtccgcctggagtcctgcttgtctttcccagctgtgctgagtggctcttctgtctccctggggtccctggcacatctgctttcccagctctgtgaccttaccagttctctcctcagccggtgacttggttgagctgaatatatgttttaaacttttacataaacaactcaacctgttgcctctcacttccctccatcactgtggcttttaaaactcatgtattttgactcaagtgaaaaaaacacaaaaatccctcatcccagctaggttttgccccctgccctataagagagctatttccccctttctttcctttgaattcttctccaacaccatcccttcattcatactgccctgtgatacacttgaagctgtgttgattggacagacgttcatcagctaacttacctttacttggcaagatggtaaaatagtaacttagtgatgttactaaagtctcgaccattcacctttccatactgaaggaaaggtaaaaaggtttcttctatgggaaattatgcttgacttgcatactctagtttgatgaggataaaaagaaacatgtaattgcagtggtgtttacaaccaagttaccgatcacgggaaccaatcatagatttctttgttccttctccactctcaacacttcatttgactagaaaaaaaaaatgtattcaccaaggaacaggacccaatttgttcagacttttgttaagtttctttactaaggcaatttttgaaacaccagttactatgggatggtgggaatttttcatgcttaagaaatagagacttaggaacaaagaaacatctttctggagaagatgctaatgggaagttacctaaggcttgatgcttggttcaaccttatttaaaatttttataaatgacctgaaagtaggattttacagtgaaatcaaatgtcactacttccaggcagtgaaaggtaatctagaagaggtttaaaaaacacaaaaccggtcgggcacagcggctcacgcctgtaatcccagcactttgggaggccgaggcggggagatcacgagttcaggagatcgagaccatcctggccaacatggtgaaactttgtttccactaaaaatacaaaaattagctgggtgtggtggtgggtgcctgtagttccagctactcgggaggctgaagcaggagaatcgcttgaacccgggaggcagaggttgcagtgagccgagatagcgccattgcactccagcctgtcaacagagtgagactccgtctcacaacaaacaaacaaacacaaaaccacagaagggttactaataagcagggctgagaatactcagaaaactgacaggtgaggttcaacataatataaggaaatgtatttatggaagaattatcaactgatatgcctgaacactgttagaactcaggaaagaaacaagcattgctgagggggaggagagatcaatgtgctgctgtggccaaaagcctaattgccctgtgggcatcatcaggaagggcttttggagataacagagaacagcactttatacaaaaccatggatatgtcttgatcggattatctgtgtttctagtgaccttatttacaagatatatgataaagggaggaaaggtccagagaacagccaaaattatcaggggatggaggtatatccatatgaggacacatttttaaaatatagactctatcctgcaaagatgaaagcagaggggagttagatcaaatatccaatcaagagcaaggacccggtcctgtactactagctctagggctctatctcatagccttagtaaagaaagcacttctcatagcaaatcagaaatgtaaggagctcattgtctaagaagggatgccaccagaaactatacatgggtgcaggtttatgaggaatccttgcatgacggccttctacaaggaattatagaaaagtagggctacttggtaatatacaactgagagggtaactgtgtccctcaacaaactactccttagtgcctctttcaaaggcagaatgttgatctgaatggatcactggtcaagtatggcatctctaatgttcttgaagggggaggaaggagatctggtagctggaaaatataattattccacgttaggctcacctgaattggtttaaaatcatattctgattctcttctcatcccttcctcccctcacccaccatatacctctggcatccctccatgcaaagaaatgtcgaataggcatttcttggtataatttacctacacttgtgcttgtggggtgggagtaaaaacatatccagtaagtaccaaggctaacctcctaatggctggagctcagttaggtctctgggctctctaaaggagtccagagctcttgtccatgtcacaaatggagccttagaatttctgtctttccttatgtggcagctttggccattgtgtcttgaaattctccctcaggaaatgtgataggggatattatcccatgggattttagtaaaaatcagcttgcctaatttcatattcgtgttcataatgaagaaatgcgaagtggtggtagtcctcaggattaagtgtaaaggaaaatatgcaaggaaaaagtagcagtgtcagcccttttggactgcttatgatttctgccttagagctacaagacttggaacaagaaataacaatacctcaagaaaatgtctggagagatagcaccactgtccctcaaagacttcagccactgcacattaccaattcagctgtgaagcatttacaactgtattatctgtgattgtctgcatttcctgtttacatgcatgtgctggggatatgctttagtgtgtatggactagagtttaaatcctgtctttaactgggctgcaaggatggctatcaatcccaaattctgttttcaactcactggaataattaatctggtgttcctgatataaaacaggtgggttctattcacatgatggctgctctttaccatatatttcacctgaccctcattttgccatgggcctcaacctttatgtgtgctttttatggctctgaaaggactggctcccgtgtgtggaatatacaaggtataaacaccacccctcacatacccctgtaacttaaatgcttccatttaactcacttagattactttccccttagtggtaaacgggttgggggatgggtggtagtgcaaagaaggtagtttgaaatattgccatagtaatatgggaactttttattccaaccctttaccctggcttttttttctctcaatatttgcctaaaattctaaaatgagttatagtaaaatcataaaactatggaaacaactgaactttggtacacaagttagttcgatgacatcttgttatttgagaacagtaaaaggtgtgtcattgcctcatgatttatcatagtcattactaagggtttcagagagaatctggtgtgaagcactatcctttcagacactaaggcctttacctagttgctcccctaccttctgtcggaataggattattcccatgcacctctgggtaggtataggtagtagctattgaacggggattattttccccatggcacaaggggaaacactcttggataaccttcaacaatgaggctttgctaagtggccagacttgggatttgatcttcctcacttgttatttattaagtttaagccttattcagtatctctaattgcaatagatatagttcctgtgacttctaaaaaaaattcctgttaatgctgagacagtatcttttttgtcagtttattaatttttggtcaagatttagcctgagtcttaaagcatttatttgtggaatgccccactgaagtgtcttctccattggctaagtacatgtttaaagccatgggttttaatgtaagatactttcagtatctaattctgtttcccccactgagggtgctaaagagaattagaatctttactaagacatgctcaggaaagcttcacgagagaacagcttcaaaatcctccctatgacactgaatggtagtgaggaaagaattcttggggatgccagttacatacaatagccttattactgctaatcactgtcaataaaaggtcacttcattcacctctatttgaggaaaacaatgagaatgtatctgatgaactagaatccttgtcagtattgggaaattttaatgttgcaatatctagtcaaactttgagtgtactggttctgtgaaccacctgaaaaaacaaattaaatgtattaaaccata

SEQ ID NO: 299137 - DNA, 4598 bp, Homo sapiens
gattgagcttctgaactccagcatcaccctaaaggatgatatcccccccatctatccaacatctccaggccccatccccatcactctggccatggaacatgttgtgctgaagaggagtgatgatggtgtgttccacataggcgctgctgctcaggacaaaccatcagctgaagtacttaaaagtgagaagagacagcccccaaaagaacaggtgtttttggtgcccacaggagaggtttttgaacagcaggtgaaagaactgcctatcctacaaaaagaacttatagaaactaaacaagccttggccaatgccaaccaggataaagaaaacttcttcaggagattaggaaatataaccccttctttgagctctgaaaccagtggctcagccatctgtgccaaggagagaggctatcaccagcaatagcaccacctaggacagagggcactgtccagtgctctcctcagccggtgacttggttgagctgaatatatgttttaaacttttacataaacaactcaacctgttgcctctcacttccctccatcactgtggcttttaaaactcatgtattttgactcaagtgaaaaaaacacaaaaatccctcatcccagctaggttttgccccctgccctataagagagctatttccccctttctttcctttgaattcttctccaacaccatcccttcattcatactgccctgtgatacacttgaagctgtgttgattggacagacgttcatcagctaacttacctttacttggcaagatggtaaaatagtaacttagtgatgttactaaagtctcgaccattcacctttccatactgaaggaaaggtaaaaaggtttcttctatgggaaattatgcttgacttgcatactctagtttgatgaggataaaaagaaacatgtaattgcagtggtgtttacaaccaagttaccgatcacgggaaccaatcatagatttctttgttccttctccactctcaacacttcatttgactagaaaaaaaaaatgtattcaccaaggaacaggacccaatttgttcagacttttgttaagtttctttactaaggcaatttttgaaacaccagttactatgggatggtgggaatttttcatgcttaagaaatagagacttaggaacaaagaaacatctttctggagaagatgctaatgggaagttacctaaggcttgatgcttggttcaaccttatttaaaatttttataaatgacctgaaagtaggattttacagtgaaatcaaatgtcactacttccaggcagtgaaaggtaatctagaagaggtttaaaaaacacaaaaccggtcgggcacagcggctcacgcctgtaatcccagcactttgggaggccgaggcggggagatcacgagttcaggagatcgagaccatcctggccaacatggtgaaactttgtttccactaaaaatacaaaaattagctgggtgtggtggtgggtgcctgtagttccagctactcgggaggctgaagcaggagaatcgcttgaacccgggaggcagaggttgcagtgagccgagatagcgccattgcactccagcctgtcaacagagtgagactccgtctcacaacaaacaaacaaacacaaaaccacagaagggttactaataagcagggctgagaatactcagaaaactgacaggtgaggttcaacataatataaggaaatgtatttatggaagaattatcaactgatatgcctgaacactgttagaactcaggaaagaaacaagcattgctgagggggaggagagatcaatgtgctgctgtggccaaaagcctaattgccctgtgggcatcatcaggaagggcttttggagataacagagaacagcactttatacaaaaccatggatatgtcttgatcggattatctgtgtttctagtgaccttatttacaagatatatgataaagggaggaaaggtccagagaacagccaaaattatcaggggatggaggtatatccatatgaggacacatttttaaaatatagactctatcctgcaaagatgaaagcagaggggagttagatcaaatatccaatcaagagcaaggacccggtcctgtactactagctctagggctctatctcatagccttagtaaagaaagcacttctcatagcaaatcagaaatgtaaggagctcattgtctaagaagggatgccaccagaaactatacatgggtgcaggtttatgaggaatccttgcatgacggccttctacaaggaattatagaaaagtagggctacttggtaatatacaactgagagggtaactgtgtccctcaacaaactactccttagtgcctctttcaaaggcagaatgttgatctgaatggatcactggtcaagtatggcatctctaatgttcttgaagggggaggaaggagatctggtagctggaaaatataattattccacgttaggctcacctgaattggtttaaaatcatattctgattctcttctcatcccttcctcccctcacccaccatatacctctggcatccctccatgcaaagaaatgtcgaataggcatttcttggtataatttacctacacttgtgcttgtggggtgggagtaaaaacatatccagtaagtaccaaggctaacctcctaatggctggagctcagttaggtctctgggctctctaaaggagtccagagctcttgtccatgtcacaaatggagccttagaatttctgtctttccttatgtggcagctttggccattgtgtcttgaaattctccctcaggaaatgtgataggggatattatcccatgggattttagtaaaaatcagcttgcctaatttcatattcgtgttcataatgaagaaatgcgaagtggtggtagtcctcaggattaagtgtaaaggaaaatatgcaaggaaaaagtagcagtgtcagcccttttggactgcttatgatttctgccttagagctacaagacttggaacaagaaataacaatacctcaagaaaatgtctggagagatagcaccactgtccctcaaagacttcagccactgcacattaccaattcagctgtgaagcatttacaactgtattatctgtgattgtctgcatttcctgtttacatgcatgtgctggggatatgctttagtgtgtatggactagagtttaaatcctgtctttaactgggctgcaaggatggctatcaatcccaaattctgttttcaactcactggaataattaatctggtgttcctgatataaaacaggtgggttctattcacatgatggctgctctttaccatatatttcacctgaccctcattttgccatgggcctcaacctttatgtgtgctttttatggctctgaaaggactggctcccgtgtgtggaatatacaaggtataaacaccacccctcacatacccctgtaacttaaatgcttccatttaactcacttagattactttccccttagtggtaaacgggttgggggatgggtggtagtgcaaagaaggtagtttgaaatattgccatagtaatatgggaactttttattccaaccctttaccctggcttttttttctctcaatatttgcctaaaattctaaaatgagttatagtaaaatcataaaactatggaaacaactgaactttggtacacaagttagttcgatgacatcttgttatttgagaacagtaaaaggtgtgtcattgcctcatgatttatcatagtcattactaagggtttcagagagaatctggtgtgaagcactatcctttcagacactaaggcctttacctagttgctcccctaccttctgtcggaataggattattcccatgcacctctgggtaggtataggtagtagctattgaacggggattattttccccatggcacaaggggaaacactcttggataaccttcaacaatgaggctttgctaagtggccagacttgggatttgatcttcctcacttgttatttattaagtttaagccttattcagtatctctaattgcaatagatatagttcctgtgacttctaaaaaaaattcctgttaatgctgagacagtatcttttttgtcagtttattaatttttggtcaagatttagcctgagtcttaaagcatttatttgtggaatgccccactgaagtgtcttctccattggctaagtacatgtttaaagccatgggttttaatgtaagatactttcagtatctaattctgtttcccccactgagggtgctaaagagaattagaatctttactaagacatgctcaggaaagcttcacgagagaacagcttcaaaatcctccctatgacactgaatggtagtgaggaaagaattcttggggatgccagttacatacaatagccttattactgctaatcactgtcaataaaaggtcacttcattcacctctatttgaggaaaacaatgagaatgtatctgatgaactagaatccttgtcagtattgggaaattttaatgttgcaatatctagtcaaactttgagtgtactggttctgtgaaccacctgaaaaaacaaattaaatgtattaaaccata

SEQ ID NO: 299138 - DNA, 4663 bp, Homo sapiens
aaatagtccagcagaggagtgtgggggaagggggcaggagaggcacaagaataagggagacctggactctgcctttttgggaaaaggaaccaagctcatagcaatttggctgataacacaatcagatttttccaggttaagcttcctttctgttatactttcatcattgtgatgctgtggtagaaagtaaataacagtagtggctcagtcatttaatctttcccctctataatacaacttacttgaaatttaaatcaagaaaaaatttctgacgctgagctaggttggtggcatgatatgccaggggtcagtgggggagcttgcttctgagccccctgttgtccgcctggagtcctgcttgtctttcccagctgtgctgagtggctcttctgtctccctggggtccctggcacatctgctttcccagctctgtgaccttaccagttctctcctcagccggtgacttggttgagctgaatatatgttttaaacttttacataaacaactcaacctgttgcctctcacttccctccatcactgtggcttttaaaactcatgtattttgactcaagtgaaaaaaacacaaaaatccctcatcccagctaggttttgccccctgccctataagagagctatttccccctttctttcctttgaattcttctccaacaccatcccttcattcatactgccctgtgatacacttgaagctgtgttgattggacagacgttcatcagctaacttacctttacttggcaagatggtaaaatagtaacttagtgatgttactaaagtctcgaccattcacctttccatactgaaggaaaggtaaaaaggtttcttctatgggaaattatgcttgacttgcatactctagtttgatgaggataaaaagaaacatgtaattgcagtggtgtttacaaccaagttaccgatcacgggaaccaatcatagatttctttgttccttctccactctcaacacttcatttgactagaaaaaaaaaatgtattcaccaaggaacaggacccaatttgttcagacttttgttaagtttctttactaaggcaatttttgaaacaccagttactatgggatggtgggaatttttcatgcttaagaaatagagacttaggaacaaagaaacatctttctggagaagatgctaatgggaagttacctaaggcttgatgcttggttcaaccttatttaaaatttttataaatgacctgaaagtaggattttacagtgaaatcaaatgtcactacttccaggcagtgaaaggtaatctagaagaggtttaaaaaacacaaaaccggtcgggcacagcggctcacgcctgtaatcccagcactttgggaggccgaggcggggagatcacgagttcaggagatcgagaccatcctggccaacatggtgaaactttgtttccactaaaaatacaaaaattagctgggtgtggtggtgggtgcctgtagttccagctactcgggaggctgaagcaggagaatcgcttgaacccgggaggcagaggttgcagtgagccgagatagcgccattgcactccagcctgtcaacagagtgagactccgtctcacaacaaacaaacaaacacaaaaccacagaagggttactaataagcagggctgagaatactcagaaaactgacaggtgaggttcaacataatataaggaaatgtatttatggaagaattatcaactgatatgcctgaacactgttagaactcaggaaagaaacaagcattgctgagggggaggagagatcaatgtgctgctgtggccaaaagcctaattgccctgtgggcatcatcaggaagggcttttggagataacagagaacagcactttatacaaaaccatggatatgtcttgatcggattatctgtgtttctagtgaccttatttacaagatatatgataaagggaggaaaggtccagagaacagccaaaattatcaggggatggaggtatatccatatgaggacacatttttaaaatatagactctatcctgcaaagatgaaagcagaggggagttagatcaaatatccaatcaagagcaaggacccggtcctgtactactagctctagggctctatctcatagccttagtaaagaaagcacttctcatagcaaatcagaaatgtaaggagctcattgtctaagaagggatgccaccagaaactatacatgggtgcaggtttatgaggaatccttgcatgacggccttctacaaggaattatagaaaagtagggctacttggtaatatacaactgagagggtaactgtgtccctcaacaaactactccttagtgcctctttcaaaggcagaatgttgatctgaatggatcactggtcaagtatggcatctctaatgttcttgaagggggaggaaggagatctggtagctggaaaatataattattccacgttaggctcacctgaattggtttaaaatcatattctgattctcttctcatcccttcctcccctcacccaccatatacctctggcatccctccatgcaaagaaatgtcgaataggcatttcttggtataatttacctacacttgtgcttgtggggtgggagtaaaaacatatccagtaagtaccaaggctaacctcctaatggctggagctcagttaggtctctgggctctctaaaggagtccagagctcttgtccatgtcacaaatggagccttagaatttctgtctttccttatgtggcagctttggccattgtgtcttgaaattctccctcaggaaatgtgataggggatattatcccatgggattttagtaaaaatcagcttgcctaatttcatattcgtgttcataatgaagaaatgcgaagtggtggtagtcctcaggattaagtgtaaaggaaaatatgcaaggaaaaagtagcagtgtcagcccttttggactgcttatgatttctgccttagagctacaagacttggaacaagaaataacaatacctcaagaaaatgtctggagagatagcaccactgtccctcaaagacttcagccactgcacattaccaattcagctgtgaagcatttacaactgtattatctgtgattgtctgcatttcctgtttacatgcatgtgctggggatatgctttagtgtgtatggactagagtttaaatcctgtctttaactgggctgcaaggatggctatcaatcccaaattctgttttcaactcactggaataattaatctggtgttcctgatataaaacaggtgggttctattcacatgatggctgctctttaccatatatttcacctgaccctcattttgccatgggcctcaacctttatgtgtgctttttatggctctgaaaggactggctcccgtgtgtggaatatacaaggtataaacaccacccctcacatacccctgtaacttaaatgcttccatttaactcacttagattactttccccttagtggtaaacgggttgggggatgggtggtagtgcaaagaaggtagtttgaaatattgccatagtaatatgggaactttttattccaaccctttaccctggcttttttttctctcaatatttgcctaaaattctaaaatgagttatagtaaaatcataaaactatggaaacaactgaactttggtacacaagttagttcgatgacatcttgttatttgagaacagtaaaaggtgtgtcattgcctcatgatttatcatagtcattactaagggtttcagagagaatctggtgtgaagcactatcctttcagacactaaggcctttacctagttgctcccctaccttctgtcggaataggattattcccatgcacctctgggtaggtataggtagtagctattgaacggggattattttccccatggcacaaggggaaacactcttggataaccttcaacaatgaggctttgctaagtggccagacttgggatttgatcttcctcacttgttatttattaagtttaagccttattcagtatctctaattgcaatagatatagttcctgtgacttctaaaaaaaattcctgttaatgctgagacagtatcttttttgtcagtttattaatttttggtcaagatttagcctgagtcttaaagcatttatttgtggaatgccccactgaagtgtcttctccattggctaagtacatgtttaaagccatgggttttaatgtaagatactttcagtatctaattctgtttcccccactgagggtgctaaagagaattagaatctttactaagacatgctcaggaaagcttcacgagagaacagcttcaaaatcctccctatgacactgaatggtagtgaggaaagaattcttggggatgccagttacatacaatagccttattactgctaatcactgtcaataaaaggtcacttcattcacctctatttgaggaaaacaatgagaatgtatctgatgaactagaatccttgtcagtattgggaaattttaatgttgcaatatctagtcaaactttgagtgtactggttctgtgaaccacctgaaaaaacaaattaaatgtattaaaccataatgattgttgtatatccgttgataagaatctgaaatatatgggcttttatattgtttattttcatctcagtcttggg

SEQ ID NO: 299139 - DNA, 3185 bp, Homo sapiens
agcagcatagatattaccggaggttgatactagtataggaacagtcatgtcttctgggtgtggtggtgggtgcctgtagttccagctactcgggaggctgaagcaggagaatcgcttgaacccgggaggcagaggttgcagtgagccgagatagcgccattgcactccagcctgtcaacagagtgagactccgtctcacaacaaacaaacaaacacaaaaccacagaagggttactaataagcagggctgagaatactcagaaaactgacaggtgaggttcaacataatataaggaaatgtatttatggaagaattatcaactgatatgcctgaacactgttagaactcaggaaagaaacaagcattgctgagggggaggagagatcaatgtgctgctgtggccaaaagcctaattgccctgtgggcatcatcaggaagggcttttggagataacagagaacagcactttatacaaaaccatggatatgtcttgatcggattatctgtgtttctagtgaccttatttacaagatatatgataaagggaggaaaggtccagagaacagccaaaattatcaggggatggaggtatatccatatgaggacacatttttaaaatatagactctatcctgcaaagatgaaagcagaggggagttagatcaaatatccaatcaagagcaaggacccggtcctgtactactagctctagggctctatctcatagccttagtaaagaaagcacttctcatagcaaatcagaaatgtaaggagctcattgtctaagaagggatgccaccagaaactatacatgggtgcaggtttatgaggaatccttgcatgacggccttctacaaggaattatagaaaagtagggctacttggtaatatacaactgagagggtaactgtgtccctcaacaaactactccttagtgcctctttcaaaggcagaatgttgatctgaatggatcactggtcaagtatggcatctctaatgttcttgaagggggaggaaggagatctggtagctggaaaatataattattccacgttaggctcacctgaattggtttaaaatcatattctgattctcttctcatcccttcctcccctcacccaccatatacctctggcatccctccatgcaaagaaatgtcgaataggcatttcttggtataatttacctacacttgtgcttgtggggtgggagtaaaaacatatccagtaagtaccaaggctaacctcctaatggctggagctcagttaggtctctgggctctctaaaggagtccagagctcttgtccatgtcacaaatggagccttagaatttctgtctttccttatgtggcagctttggccattgtgtcttgaaattctccctcaggaaatgtgataggggatattatcccatgggattttagtaaaaatcagcttgcctaatttcatattcgtgttcataatgaagaaatgcgaagtggtggtagtcctcaggattaagtgtaaaggaaaatatgcaaggaaaaagtagcagtgtcagcccttttggactgcttatgatttctgccttagagctacaagacttggaacaagaaataacaatacctcaagaaaatgtctggagagatagcaccactgtccctcaaagacttcagccactgcacattaccaattcagctgtgaagcatttacaactgtattatctgtgattgtctgcatttcctgtttacatgcatgtgctggggatatgctttagtgtgtatggactagagtttaaatcctgtctttaactgggctgcaaggatggctatcaatcccaaattctgttttcaactcactggaataattaatctggtgttcctgatataaaacaggtgggttctattcacatgatggctgctctttaccatatatttcacctgaccctcattttgccatgggcctcaacctttatgtgtgctttttatggctctgaaaggactggctcccgtgtgtggaatatacaaggtataaacaccacccctcacatacccctgtaacttaaatgcttccatttaactcacttagattactttccccttagtggtaaacgggttgggggatgggtggtagtgcaaagaaggtagtttgaaatattgccatagtaatatgggaactttttattccaaccctttaccctggcttttttttctctcaatatttgcctaaaattctaaaatgagttatagtaaaatcataaaactatggaaacaactgaactttggtacacaagttagttcgatgacatcttgttatttgagaacagtaaaaggtgtgtcattgcctcatgatttatcatagtcattactaagggtttcagagagaatctggtgtgaagcactatcctttcagacactaaggcctttacctagttgctcccctaccttctgtcggaataggattattcccatgcacctctgggtaggtataggtagtagctattgaacggggattattttccccatggcacaaggggaaacactcttggataaccttcaacaatgaggctttgctaagtggccagacttgggatttgatcttcctcacttgttatttattaagtttaagccttattcagtatctctaattgcaatagatatagttcctgtgacttctaaaaaaaattcctgttaatgctgagacagtatcttttttgtcagtttattaatttttggtcaagatttagcctgagtcttaaagcatttatttgtggaatgccccactgaagtgtcttctccattggctaagtacatgtttaaagccatgggttttaatgtaagatactttcagtatctaattctgtttcccccactgagggtgctaaagagaattagaatctttactaagacatgctcaggaaagcttcacgagagaacagcttcaaaatcctccctatgacactgaatggtagtgaggaaagaattcttggggatgccagttacatacaatagccttattactgctaatcactgtcaataaaaggtcacttcattcacctctatttgaggaaaacaatgagaatgtatctgatgaactagaatccttgtcagtattgggaaattttaatgttgcaatatctagtcaaactttgagtgtactggttctgtgaaccacctgaaaaaacaaattaaatgtattaaaccata

SEQ ID NO: 299140 - DNA, 2059 bp, Homo sapiens
tatcgtaaagcagaagctactcaactgtgattaggagggaagcccttttgaaatcagtgatttgaaaagataaggcaggtaatacataaaaacatatccagtaagtaccaaggctaacctcctaatggctggagctcagttaggtctctgggctctctaaaggagtccagagctcttgtccatgtcacaaatggagccttagaatttctgtctttccttatgtggcagctttggccattgtgtcttgaaattctccctcaggaaatgtgataggggatattatcccatgggattttagtaaaaatcagcttgcctaatttcatattcgtgttcataatgaagaaatgcgaagtggtggtagtcctcaggattaagtgtaaaggaaaatatgcaaggaaaaagtagcagtgtcagcccttttggactgcttatgatttctgccttagagctacaagacttggaacaagaaataacaatacctcaagaaaatgtctggagagatagcaccactgtccctcaaagacttcagccactgcacattaccaattcagctgtgaagcatttacaactgtattatctgtgattgtctgcatttcctgtttacatgcatgtgctggggatatgctttagtgtgtatggactagagtttaaatcctgtctttaactgggctgcaaggatggctatcaatcccaaattctgttttcaactcactggaataattaatctggtgttcctgatataaaacaggtgggttctattcacatgatggctgctctttaccatatatttcacctgaccctcattttgccatgggcctcaacctttatgtgtgctttttatggctctgaaaggactggctcccgtgtgtggaatatacaaggtataaacaccacccctcacatacccctgtaacttaaatgcttccatttaactcacttagattactttccccttagtggtaaacgggttgggggatgggtggtagtgcaaagaaggtagtttgaaatattgccatagtaatatgggaactttttattccaaccctttaccctggcttttttttctctcaatatttgcctaaaattctaaaatgagttatagtaaaatcataaaactatggaaacaactgaactttggtacacaagttagttcgatgacatcttgttatttgagaacagtaaaaggtgtgtcattgcctcatgatttatcatagtcattactaagggtttcagagagaatctggtgtgaagcactatcctttcagacactaaggcctttacctagttgctcccctaccttctgtcggaataggattattcccatgcacctctgggtaggtataggtagtagctattgaacggggattattttccccatggcacaaggggaaacactcttggataaccttcaacaatgaggctttgctaagtggccagacttgggatttgatcttcctcacttgttatttattaagtttaagccttattcagtatctctaattgcaatagatatagttcctgtgacttctaaaaaaaattcctgttaatgctgagacagtatcttttttgtcagtttattaatttttggtcaagatttagcctgagtcttaaagcatttatttgtggaatgccccactgaagtgtcttctccattggctaagtacatgtttaaagccatgggttttaatgtaagatactttcagtatctaattctgtttcccccactgagggtgctaaagagaattagaatctttactaagacatgctcaggaaagcttcacgagagaacagcttcaaaatcctccctatgacactgaatggtagtgaggaaagaattcttggggatgccagttacatacaatagccttattactgctaatcactgtcaataaaaggtcacttcattcacctctatttgaggaaaacaatgagaatgtatctgatgaactagaatccttgtcagtattgggaaattttaatgttgcaatatctagtcaaactttgagtgtactggttctgtgaaccacctgaaaaaacaaattaaatgtattaaaccata

SEQ ID NO: 299141 - DNA, 651 bp, Homo sapiens
gattgagcttctgaactccagcatcaccctaaaggatgatatcccccccatctatccaacatctccaggccccatccccatcactctggccatggaacatgttgtgctgaagaggagtgatgatggtgtgttccacataggcgctgctgctcaggacaaaccatcagctgaagtacttaaaagtgagaagagacagcccccaaaagaacaggtgtttttggtgcccacaggagaggtttttgaacagcaggtgaaagaactgcctatcctacaaaaagaacttatagaaactaaacaagccttggccaatgccaaccaggataaagaaaacttcttcaggagattaggaaatataaccccttctttgagctctgaaaccagtggctcagccatctgtgccaaggagagaggctatcaccagcaatagcaccacctaggacagagggcactgtccagtgctgaataagtcactacggatgccagagggactggggagcactcacttcacttgtgtgggtgtgctttccactagctgttcttacttggactgaggacaagggcaaagcatgattgtatcccaggaaactggggcttgccctgtgtgtggcacaagcatcatgtcttgcctgtataaagccttttggtcctctg

SEQ ID NO: 299142 - DNA, 103 bp, Homo sapiens
cataatgattgttgtatatccgttgataagaatctgaaatatatgggcttttatattgtttattttcatctcagtcttggggggggaattattacactgtttt

SEQ ID NO: 299143 - DNA, 1935 bp, Homo sapiens
gtgcgggaggcctccccaccttcctgtgccctctgccctctgcccttgcacacacttgttaccttcaggctgcttggccacccaggcctgaagaagccttctgaggctctcaccccatcagaacggccattttcactgaggagccagttttttccatttgccatggagctggtttggctggaacctggcctttgtagggaaaacggggagactcaggagccagactcactcttgggacaaatgagaaagagctgagccagtcgttcctgtcggaagggcgggcctgctcatcctggcgagaatttgcttttctgctttataggggattgcaggccaggcccactgacaggagcaccttgagaaccacctgaacacaagagaatgagggtgccccaaagtggaaggaagcttctggcccctgggccgttttgggaagggcccaggatactcacgggggctgaagggcaatgtgaagagtgactgcaagtcctggcattttctgtggtgtcagcaaatgcccctttattttaaatgattccagacatctgggcagcatagcttggccaccatcactcaggcttgatcctgctgttgagctgctcctgtctcctgtttacctcactcctgttgggaaggccatcgcatgctcctaggctccagagtcccctgtaggtctctaccagcaggtcgcctctgggagaacgtttcatcttcaggctctagaaactcctgttgcggaattgctggctttagtagaaaagatatgtcaggatttagaaatcgtattgaactctcctggacttctgctccatgatttcattttgctttcacgaaccagcgatccctaccttggggtgggaaattcaattgtaggcagcaaataactcaaccctcctgtaacccctgaggattataacgaccccatgacccccgatgacagccagcagtttggtgactagagttttttgagcctgccattctcagtagcagctttggtctggagatggaacgtggagcagggaatctgacagccacgtttctcgtgatcacgtggactggagttgtttttgttatctggggtggaaaattgcaatgatcaagtttcttttttattttttttttacttagaaaagcaaatattgtgtttttgtaataaatccctttcagcaaaattgcggaggatcattcatccactagggccccacctgaggcacagcgctgactcatcacggtggtaccagtaggtcagccatctggaaacagaagtggccctaattgggccaaaatgtggtaagactcgctggcctcaggcagggccaggccagttccctcacttctctgcacacctattcccagattccatccagagcaaagctgatgtttatcgtctcattgtacttaggctttcgtactttaaaaaattatgactttttaaaaataagccttcagcagacagaagtgaagaaatttagcctgggttgcctcagcaacaaagtctgcggttcctaagagccacatgttggggaagtggggtgacccaaacttggtgacataggttgattgatcagaccctcagccttacaagcaagagctcatgcagatccacagagccatgcacatcctgtcttcctgaccttcctcaggtggcaccacctgcgccccatggacctgctgtatcggtgtcatgtggaggtctgatgaatcctttaaaacctaactgtgatgtcgtaaatgtaactgtgctacctttatatctactgaagggcagcgtctgcatccgagggaaattcaacatgaaacaaccatcgttttagttgcactcagtctgtccatatgacatacacatgaagtgaatgtttccttatgttttcaggtctacaatgtttagtacatgtaaataaggaaaaaatttgataaatatggtaaattaagtta

SEQ ID NO: 299144 - DNA, 2288 bp, Homo sapiens
gtgcgggaggcctccccaccttcctgtgccctctgccctctgcccttgcacacacttgttaccttcaggctgcttggccacccaggcctgaagaagccttctgaggctctcaccccatcagaacggccattttcactgaggagccagttttttccatttgccatggagctggtttggctggaacctggcctttgtagggaaaacggggagactcaggagccagactcactcttgggacaaatgagaaagagctgagccagtcgttcctgtcggaagggcgggcctgctcatcctggcgagaatttgcttttctgctttataggggattgcaggccaggcccactgacaggagcaccttgagaaccacctgaacacaagagaatgagggtgccccaaagtggaaggaagcttctggcccctgggccgttttgggaagggcccaggatactcacgggggctgaagggcaatgtgaagagtgactgcaagtcctggcattttctgtggtgtcagcaaatgcccctttattttaaatgattccagacatctgggcagcatagcttggccaccatcactcaggcttgatcctgctgttgagctgctcctgtctcctgtttacctcactcctgttgggaaggccatcgcatgctcctaggctccagagtcccctgtaggtctctaccagcaggtcgcctctgggagaacgtttcatcttcaggctctagaaactcctgttgcggaattgctggctttagtagaaaagatatgtcaggatttagaaatcgtattgaactctcctggacttctgctccatgatttcattttgctttcacgaaccagcgatccctaccttggggtgggaaattcaattgtaggcagcaaataactcaaccctcctgtaacccctgaggattataacgaccccatgacccccgatgacagccagcagtttggtgactagagttttttgagcctgccattctcagtagcagctttggtctggagatggaacgtggagcagggaatctgacagccacgtttctcgtgatcacgtggactggagttgtttttgttatctggggtggaaaattgcaatgatcaagtttcttttttattttttttttacttagaaaagcaaatattgtgtttttgtaataaatccctttcagcaaaattgcggaggatcattcatccactagggccccacctgaggcacagcgctgactcatcacggtggtaccagtaggtcagccatctggaaacagaagtggccctaattgggccaaaatgtggtaagactcgctggcctcaggcagggccaggccagttccctcacttctctgcacacctattcccagattccatccagagcaaagctgatgtttatcgtctcattgtacttaggctttcgtactttaaaaaattatgactttttaaaaataagccttcagcagacagaagtgaagaaatttagcctgggttgcctcagcaacaaagtctgcggttcctaagagccacatgttggggaagtggggtgacccaaacttggtgacataggttgattgatcagaccctcagccttacaagcaagagctcatgcagatccacagagccatgcacatcctgtcttcctgaccttcctcaggtggcaccacctgcgccccatggacctgctgtatcggtgtcatgtggaggtctgatgaatcctttaaaacctaactgtgatgtcgtaaatgtaactgtgctacctttatatctactgaagggcagcgtctgcatccgagggaaattcaacatgaaacaaccatcgttttagttgcactcagtctgtccatatgacatacacatgaagtgaatgtttccttatgttttcaggtctacaatgtttagtacatgtaaataaggaaaaaatttgataaatatggtaaattaagttatagcgtgtcatttgattcttattttgctgtctcttgttatttaattttcctaatgctccacatctaggttccttcctaggtggtgggaacaccttgcagacgtgtgtgcaccaggacacaccgcggcccaggcagccacaccgagaaagcacacatctccactgatggcagccacccgactctccagttaacctcttttactctttaattctgatttactgtgatgatttaataaagtggaaacacagcacttcagtgctatatgtttctctcattctcattatagtttataagaaaataaagttcaccctggcatctaataaaaaggtggctttcatttttattggacagaa

SEQ ID NO: 299145 - DNA, 2254 bp, Homo sapiens
gtgcgggaggcctccccaccttcctgtgccctctgccctctgcccttgcacacacttgttaccttcaggctgcttggccacccaggcctgaagaagccttctgaggctctcaccccatcagaacggccattttcactgaggagccagttttttccatttgccatggagctggtttggctggaacctggcctttgtagggaaaacggggagactcaggagccagactcactcttgggacaaatgagaaagagctgagccagtcgttcctgtcggaagggcgggcctgctcatcctggcgagaatttgcttttctgctttataggggattgcaggccaggcccactgacaggagcaccttgagaaccacctgaacacaagagaatgagggtgccccaaagtggaaggaagcttctggcccctgggccgttttgggaagggcccaggatactcacgggggctgaagggcaatgtgaagagtgactgcaagtcctggcattttctgtggtgtcagcaaatgcccctttattttaaatgattccagacatctgggcagcatagcttggccaccatcactcaggcttgatcctgctgttgagctgctcctgtctcctgtttacctcactcctgttgggaaggccatcgcatgctcctaggctccagagtcccctgtaggtctctaccagcaggtcgcctctgggagaacgtttcatcttcaggctctagaaactcctgttgcggaattgctggctttagtagaaaagatatgtcaggatttagaaatcgtattgaactctcctggacttctgctccatgatttcattttgctttcacgaaccagcgatccctaccttggggtgggaaattcaattgtaggcagcaaataactcaaccctcctgtaacccctgaggattataacgaccccatgacccccgatgacagccagcagtttggtgactagagttttttgagcctgccattctcagtagcagctttggtctggagatggaacgtggagcagggaatctgacagccacgtttctcgtgatcacgtggactggagttgtttttgttatctggggtggaaaattgcaatgatcaagtttcttttttattttttttttacttagaaaagcaaatattgtgtttttgtaataaatccctttcagcaaaattgcggaggatcattcatccactagggccccacctgaggcacagcgctgactcatcacggtggtaccagtaggtcagccatctggaaacagaagtggccctaattgggccaaaatgtggtaagactcgctggcctcaggcagggccaggccagttccctcacttctctgcacacctattcccagattccatccagagcaaagctgatgtttatcgtctcattgtacttaggctttcgtactttaaaaaattatgactttttaaaaataagccttcagcagacagaagtgaagaaatttagcctgggttgcctcagcaacaaagtctgcggttcctaagagccacatgttggggaagtggggtgacccaaacttggtgacataggttgattgatcagaccctcagccttacaagcaagagctcatgcagatccacagagccatgcacatcctgtcttcctgaccttcctcaggtggcaccacctgcgccccatggacctgctgtatcggtgtcatgtggaggtctgatgaatcctttaaaacctaactgtgatgtcgtaaatgtaactgtgctacctttatatctactgaagggcagcgtctgcatccgagggaaattcaacatgaaacaaccatcgttttagttgcactcagtctgtccatatgacatacacatgaagtgaatgtttccttatgttttcaggtctacaatgtttagtacatgtaaataaggaaaaaatttgataaatatggtaaattaagttatagcgtgtcatttgattcttattttgctgtctcttgttatttaattttcctaatgctccacatctaggttccttcctaggtggtgggaacaccttgcagacgtgtgtgcaccaggacacaccgcggcccaggcagccacaccgagaaagcacacatctccactgatggcagccacccgactctccagttaacctcttttactctttaattctgatttactgtgatgatttaataaagtggaaacacagcacttcagtgctatatgtttctctcattctcattatagtttataagaaaataaagttcaccctggcatcta

SEQ ID NO: 299146 - DNA, 4492 bp, Homo sapiens
tcctcttcttcttaaacaaaccacaaacggatgtgagggaaggaaggtgtttcttttactcctgagcccagacacctcactctgttccgtctaagcttgttttgctgaacacttttttttaaaaaaggaaaaagaaaaggagttgcttgatgtgagagtgaaatggacgtaagattttatccacctccagcccagcccgccgctgcgcccgacgctccctgtctgggaccttctccctgcctggacccctactattgcaacaagtttgacggtgagaacatgtatatgagcatgacagagccgagccaggactatgtgccagccagccagtcctaccctggtccaagcctggaaagtgaagacttcaacattccaccaattactcctccttccctcccagaccactcgctggtgcacctgaatgaagttgagtctggttaccattctctgtgtcaccccatgaaccataatggcctgctaccatttcatccacaaaacatggacctccctgaaatcacagtctccaatatgctgggccaggatggaacactgctttctaattccatttctgtgatgccagatatacgaaacccagaaggaactcagtacagttcccatcctcagatggcagccatgagaccaaggggccagcctgcagacatcaggcagcagccaggaatgatgccacatggccagctgactaccattaaccagtcacagctaagtgctcaacttggtttgaatatgggaggaagcaatgttccccacaactcaccatctccacctggaagcaagtctgcaactccttcaccatccagttcagtgcatgaagatgaaggcgatgatacctctaagatcaatggtggagagaagcggcctgcctctgatatggggaaaaaaccaaaaactcccaaaaagaagaagaagaaggatcccaatgagccccagaagcctgtgtctgcctatgcgttattctttcgtgatactcaggccgccatcaagggccaaaatccaaacgctacctttggcgaagtctctaaaattgtggcttcaatgtgggacggtttaggagaagagcaaaaacaggtctataaaaagaaaaccgaggctgcgaagaaggagtacctgaagcaactcgcagcatacagagccagccttgtatccaagagctacagtgaacctgttgacgtgaagacatctcaacctcctcagctgatcaattcgaagccgtcggtgttccatgggcccagccaggcccactcggccctgtacctaagttcccactatcaccaacaaccgggaatgaatcctcacctaactgccatgcatcctagtctccccaggaacatagcccccaagccgaataaccaaatgccagtgactgtctctatagcaaacatggctgtgtcccctcctcctcccctccagatcagcccgcctcttcaccagcatctcaacatgcagcagcaccagccgctcaccatgcagcagccccttgggaaccagctccccatgcaggtccagtctgccttacactcacccaccatgcagcaaggatttactcttcaacccgactatcagactattatcaatcctacatctacagctgcacaagttgtcacccaggcaatggagtatgtgcgttcggggtgcagaaatcctcccccacaaccggtggactggaataacgactactgcagtagtgggggcatgcagagggacaaagcactgtaccttacttgagaatctgaacacctcttctttccactgaggaattcagggaagtgttttcaccatggattgctttgtacagtcaaggcagttctccattttattagaaaatacaagttgctaagcacttaggaccatttgagcttgtgggtcacccactctggaagaaatagtcatgcttctttattatttttttaatcctttatggacattgtttttcttcttccctgaaggaaatttggaccattcagattttatgttggttttttgctgtgaagtgctgcgctctagtaactgccttagcaactgtagatgtctcggataaaagtcctggattttccattggttttcataatgggtgtttatatgaaactactaaagactttttaaatggcttgatgtagcagtcatagcaagtttgtaaatagcatctatgttacactctcctagagtataaaatgtgaatgtttttgtagctaaattgtaattgaaactggctcattccagtttattgatttcacaataggggttaaattggcaaacattcatatttttacttcatttttaaaacaactgactgatagttctatattttcaaaatatttgaaaataaaaagtattcccaagtgattttaatttaaaaacaaattggctttgtctcattgatcagacaaaaagaaactagtattaagggaagcgcaaacacatttattttgtactgcagaaaaattgcttttttgtatcactttttgtgtaatggttagtaaatgtcatttaagtccttttatgtataaaactgccaaatgcttacctggtattttattagatgcagaaacagattggaaacagctaaattacaacttttacatatggctctgtcttattgtttcttcatactgtgtctgtatttaatctttttttatggaacctgttgcgcctatttatgaaataataaatataggtgtttgtaagtaaatttgttagtatttgaaagaggtttctttgatgttttaacttttgctggcaaaaaaaaattcacgcttggtgtgaatactttattatttagtttttacagtaacatgaataaagccaaacctgcttttcatttagcagcaaattaaagtaaccagtccttatttctgcatttctttggttgatgcaaacaaaaaactattatatttaagaactttatttcttcatacgacataacagaattgccctccaagtcacacaagctccaagactaaacaaacagacaggtcctctgtcttaaaaaggttacttcttggttctcagctggttctagtcaattctgaaccaccaccccccgccccccgcaaaaaagtaaaagtcaaaccaaacttcctcaagctgcatgcttttcacaaaatccagaaagcatttaagaattgaactaggggctggaagaagtgaaagggaagcatctaaaaatgaaaggtgagtaaccagatagcaaaagaaaagggaaagccatccaaatttgaaagctgttgatagaaattgagattcttgctgtcttttgtgcctctacaagctactactcattccagaattcctgggtcttccaagaggattcttaaggtaccagagatttgctagggaaccaaaagtgcttgagaatctgcctgagggcttgcatagctttcacattaaaaaaagaaaaagctagcagatttactcctttttaggggatcatatcaagaaagttagtctggttggaaaccaagagaatggctgatgtctctttcttggaatatgtgaaataaatttagcagtttaactaaatacaaatatatgcattgtgtaatccactcagaattaaacagacaaaaggtatgcttgctttggaatgattttaggcattgtacaaccttgaatcacttgagcatgtaataactaataaataatgcagatccatgtgattattaaaatgactgtagctgagagctctaattttcctgtcttgaaactgtataagaactcatgtgattaagttcacagtttattgtttgtctgtttagtattttagaaatataccagcactactaattaactaatgtcttttatttattatattatgataaagtaaaaatttcacttgcattaagtctaaactgagaaggtaattactgggaggagaatgagcagctttgactttgacaggcggtttgtgcaggaaagcacagtgccgtgttgtttacagcttttctagagcagctgtgcgaccagggtagagagtgttgaaattcaataccaaatacagtaaaaacaaatgtaaataaaagaaaacacatcatcaataaaactgttattatgcgtgaccgtattctatttggtgatccatcagtctctaaaaagcaagcctagtcagatgagaaatcccaaataaattttatggtggaagtgatcgggcagagtgggggttaatggccgccatggccacaaatgttctttcctgaaactctgagaatgccctctcactaacctgaggctctagtatagtgagctgttgcctaggaaatccccatctttcagaaagccagaatccaccctgggcacagtagcccagcggcttggagcttgtagctgagaggaacagtgggggtgcacgccgagttctctgctgaagcactccgaagatttccagcaccatcagtaaagtcattctgagagataacagcaacactgtggaacgacagatttcttcaccaacacaccaaaaccaaaattatagctgatt

SEQ ID NO: 299147 - DNA, 3595 bp, Homo sapiens
tcctcttcttcttaaacaaaccacaaacggatgtgagggaaggaaggtgtttcttttactcctgagcccagacacctcactctgttccgtctaagcttgttttgctgaacacttttttttaaaaaaggaaaaagaaaaggagttgcttgatgtgagagtgaaatggacgtaagattttatccacctccagcccagcccgccgctgcgcccgacgctccctgtctgggaccttctccctgcctggacccctactattgcaacaagtttgacggtgagaacatgtatatgagcatgacagagccgagccaggactatgtgccagccagccagtcctaccctggtccaagcctggaaagtgaagacttcaacattccaccaattactcctccttccctcccagaccactcgctggtgcacctaactgccatgcatcctagtctccccaggaacatagcccccaagccgaataaccaaatgccagtgactgtctctatagcaaacatggctgtgtcccctcctcctcccctccagatcagcccgcctcttcaccagcatctcaacatgcagcagcaccagccgctcaccatgcagcagccccttgggaaccagctccccatgcaggtccagtctgccttacactcacccaccatgcagcaaggatttactcttcaacccgactatcagactattatcaatcctacatctacagctgcacaagttgtcacccaggcaatggagtatgtgcgttcggggtgcagaaatcctcccccacaaccggtggactggaataacgactactgcagtagtgggggcatgcagagggacaaagcactgtaccttacttgagaatctgaacacctcttctttccactgaggaattcagggaagtgttttcaccatggattgctttgtacagtcaaggcagttctccattttattagaaaatacaagttgctaagcacttaggaccatttgagcttgtgggtcacccactctggaagaaatagtcatgcttctttattatttttttaatcctttatggacattgtttttcttcttccctgaaggaaatttggaccattcagattttatgttggttttttgctgtgaagtgctgcgctctagtaactgccttagcaactgtagatgtctcggataaaagtcctggattttccattggttttcataatgggtgtttatatgaaactactaaagactttttaaatggcttgatgtagcagtcatagcaagtttgtaaatagcatctatgttacactctcctagagtataaaatgtgaatgtttttgtagctaaattgtaattgaaactggctcattccagtttattgatttcacaataggggttaaattggcaaacattcatatttttacttcatttttaaaacaactgactgatagttctatattttcaaaatatttgaaaataaaaagtattcccaagtgattttaatttaaaaacaaattggctttgtctcattgatcagacaaaaagaaactagtattaagggaagcgcaaacacatttattttgtactgcagaaaaattgcttttttgtatcactttttgtgtaatggttagtaaatgtcatttaagtccttttatgtataaaactgccaaatgcttacctggtattttattagatgcagaaacagattggaaacagctaaattacaacttttacatatggctctgtcttattgtttcttcatactgtgtctgtatttaatctttttttatggaacctgttgcgcctatttatgaaataataaatataggtgtttgtaagtaaatttgttagtatttgaaagaggtttctttgatgttttaacttttgctggcaaaaaaaaattcacgcttggtgtgaatactttattatttagtttttacagtaacatgaataaagccaaacctgcttttcatttagcagcaaattaaagtaaccagtccttatttctgcatttctttggttgatgcaaacaaaaaactattatatttaagaactttatttcttcatacgacataacagaattgccctccaagtcacacaagctccaagactaaacaaacagacaggtcctctgtcttaaaaaggttacttcttggttctcagctggttctagtcaattctgaaccaccaccccccgccccccgcaaaaaagtaaaagtcaaaccaaacttcctcaagctgcatgcttttcacaaaatccagaaagcatttaagaattgaactaggggctggaagaagtgaaagggaagcatctaaaaatgaaaggtgagtaaccagatagcaaaagaaaagggaaagccatccaaatttgaaagctgttgatagaaattgagattcttgctgtcttttgtgcctctacaagctactactcattccagaattcctgggtcttccaagaggattcttaaggtaccagagatttgctagggaaccaaaagtgcttgagaatctgcctgagggcttgcatagctttcacattaaaaaaagaaaaagctagcagatttactcctttttaggggatcatatcaagaaagttagtctggttggaaaccaagagaatggctgatgtctctttcttggaatatgtgaaataaatttagcagtttaactaaatacaaatatatgcattgtgtaatccactcagaattaaacagacaaaaggtatgcttgctttggaatgattttaggcattgtacaaccttgaatcacttgagcatgtaataactaataaataatgcagatccatgtgattattaaaatgactgtagctgagagctctaattttcctgtcttgaaactgtataagaactcatgtgattaagttcacagtttattgtttgtctgtttagtattttagaaatataccagcactactaattaactaatgtcttttatttattatattatgataaagtaaaaatttcacttgcattaagtctaaactgagaaggtaattactgggaggagaatgagcagctttgactttgacaggcggtttgtgcaggaaagcacagtgccgtgttgtttacagcttttctagagcagctgtgcgaccagggtagagagtgttgaaattcaataccaaatacagtaaaaacaaatgtaaataaaagaaaacacatcatcaataaaactgttattatgcgtgaccgtattctatttggtgatccatcagtctctaaaaagcaagcctagtcagatgagaaatcccaaataaattttatggtggaagtgatcgggcagagtgggggttaatggccgccatggccacaaatgttctttcctgaaactctgagaatgccctctcactaacctgaggctctagtatagtgagctgttgcctaggaaatccccatctttcagaaagccagaatccaccctgggcacagtagcccagcggcttggagcttgtagctgagaggaacagtgggggtgcacgccgagttctctgctgaagcactccgaagatttccagcaccatcagtaaagtcattctgagagataacagcaacactgtggaacgacagatttcttcaccaacacaccaaaaccaaaattatagctgatt

SEQ ID NO: 299148 - DNA, 4421 bp, Homo sapiens
cggacgcgtgggtcgacccacgcgcttgttttgctgaacacttttttttaaaaaaggaaaaagaaaaggagttgcttgatgtgagagtgaaatggacgtaagattttatccacctccagcccagcccgccgctgcgcccgacgctccctgtctgggaccttctccctgcctggacccctactattgcaacaagtttgacggtgagaacatgtatatgagcatgacagagccgagccaggactatgtgccagccagccagtcctaccctggtccaagcctggaaagtgaagacttcaacattccaccaattactcctccttccctcccagaccactcgctggtgcacctgaatgaagttgagtctggttaccattctctgtgtcaccccatgaaccataatggcctgctaccatttcatccacaaaacatggacctccctgaaatcacagtctccaatatgctgggccaggatggaacactgctttctaattccatttctgtgatgccagatatacgaaacccagaaggaactcagtacagttcccatcctcagatggcagccatgagaccaaggggccagcctgcagacatcaggcagcagccaggaatgatgccacatggccagctgactaccattaaccagtcacagctaagtgctcaacttggtttgaatatgggaggaagcaatgttccccacaactcaccatctccacctggaagcaagtctgcaactccttcaccatccagttcagtgcatgaagatgaaggcgatgatacctctaagatcaatggtggagagaagcggcctgcctctgatatggggaaaaaaccaaaaactcccaaaaagaagaagaagaaggatcccaatgagccccagaagcctgtgtctgcctatgcgttattctttcgtgatactcaggccgccatcaagggccaaaatccaaacgctacctttggcgaagtctctaaaattgtggcttcaatgtgggacggtttaggagaagagcaaaaacaggtctataaaaagaaaaccgaggctgcgaagaaggagtacctgaagcaactcgcagcatacagagccagccttgtatccaagagctacagtgaacctgttgacgtgaagacatctcaacctcctcagctgatcaattcgaagccgtcggtgttccatgggcccagccaggcccactcggccctgtacctaagttcccactatcaccaacaaccgggaatgaatcctcacctaactgccatgcatcctagtctccccaggaacatagcccccaagccgaataaccaaatgccagtgactgtctctatagcaaacatggctgtgtcccctcctcctcccctccagatcagcccgcctcttcaccagcatctcaacatgcagcagcaccagccgctcaccatgcagcagccccttgggaaccagctccccatgcaggtccagtctgccttacactcacccaccatgcagcaaggatttactcttcaacccgactatcagactattatcaatcctacatctacagctgcacaagttgtcacccaggcaatggagtatgtgcgttcggggtgcagaaatcctcccccacaaccggtggactggaataacgactactgcagtagtgggggcatgcagagggacaaagcactgtaccttacttgagaatctgaacacctcttctttccactgaggaattcagggaagtgttttcaccatggattgctttgtacagtcaaggcagttctccattttattagaaaatacaagttgctaagcacttaggaccatttgagcttgtgggtcacccactctggaagaaatagtcatgcttctttattatttttttaatcctttatggacattgtttttcttcttccctgaaggaaatttggaccattcagattttatgttggttttttgctgtgaagtgctgcgctctagtaactgccttagcaactgtagatgtctcggataaaagtcctggattttccattggttttcataatgggtgtttatatgaaactactaaagactttttaaatggcttgatgtagcagtcatagcaagtttgtaaatagcatctatgttacactctcctagagtataaaatgtgaatgtttttgtagctaaattgtaattgaaactggctcattccagtttattgatttcacaataggggttaaattggcaaacattcatatttttacttcatttttaaaacaactgactgatagttctatattttcaaaatatttgaaaataaaaagtattcccaagtgattttaatttaaaaacaaattggctttgtctcattgatcagacaaaaagaaactagtattaagggaagcgcaaacacatttattttgtactgcagaaaaattgcttttttgtatcactttttgtgtaatggttagtaaatgtcatttaagtccttttatgtataaaactgccaaatgcttacctggtattttattagatgcagaaacagattggaaacagctaaattacaacttttacatatggctctgtcttattgtttcttcatactgtgtctgtatttaatctttttttatggaacctgttgcgcctatttatgaaataataaatataggtgtttgtaagtaaatttgttagtatttgaaagaggtttctttgatgttttaacttttgctggcaaaaaaaaattcacgcttggtgtgaatactttattatttagtttttacagtaacatgaataaagccaaacctgcttttcatttagcagcaaattaaagtaaccagtccttatttctgcatttctttggttgatgcaaacaaaaaactattatatttaagaactttatttcttcatacgacataacagaattgccctccaagtcacacaagctccaagactaaacaaacagacaggtcctctgtcttaaaaaggttacttcttggttctcagctggttctagtcaattctgaaccaccaccccccgccccccgcaaaaaagtaaaagtcaaaccaaacttcctcaagctgcatgcttttcacaaaatccagaaagcatttaagaattgaactaggggctggaagaagtgaaagggaagcatctaaaaatgaaaggtgagtaaccagatagcaaaagaaaagggaaagccatccaaatttgaaagctgttgatagaaattgagattcttgctgtcttttgtgcctctacaagctactactcattccagaattcctgggtcttccaagaggattcttaaggtaccagagatttgctagggaaccaaaagtgcttgagaatctgcctgagggcttgcatagctttcacattaaaaaaagaaaaagctagcagatttactcctttttaggggatcatatcaagaaagttagtctggttggaaaccaagagaatggctgatgtctctttcttggaatatgtgaaataaatttagcagtttaactaaatacaaatatatgcattgtgtaatccactcagaattaaacagacaaaaggtatgcttgctttggaatgattttaggcattgtacaaccttgaatcacttgagcatgtaataactaataaataatgcagatccatgtgattattaaaatgactgtagctgagagctctaattttcctgtcttgaaactgtataagaactcatgtgattaagttcacagtttattgtttgtctgtttagtattttagaaatataccagcactactaattaactaatgtcttttatttattatattatgataaagtaaaaatttcacttgcattaagtctaaactgagaaggtaattactgggaggagaatgagcagctttgactttgacaggcggtttgtgcaggaaagcacagtgccgtgttgtttacagcttttctagagcagctgtgcgaccagggtagagagtgttgaaattcaataccaaatacagtaaaaacaaatgtaaataaaagaaaacacatcatcaataaaactgttattatgcgtgaccgtattctatttggtgatccatcagtctctaaaaagcaagcctagtcagatgagaaatcccaaataaattttatggtggaagtgatcgggcagagtgggggttaatggccgccatggccacaaatgttctttcctgaaactctgagaatgccctctcactaacctgaggctctagtatagtgagctgttgcctaggaaatccccatctttcagaaagccagaatccaccctgggcacagtagcccagcggcttggagcttgtagctgagaggaacagtgggggtgcacgccgagttctctgctgaagcactccgaagatttccagcaccatcagtaaagtcattctgagagataacagcaacactgtggaacgacagatttcttcaccaacacaccaaaaccaaaattatagctgatt

SEQ ID NO: 299149 - DNA, 2775 bp, Homo sapiens
cggacgcgtgggtcgacccacgcgcttgttttgctgaacacttttttttaaaaaaggaaaaagaaaaggagttgcttgatgtgagagtgaaatggacgtaagattttatccacctccagcccagcccgccgctgcgcccgacgctccctgtctgggaccttctccctgcctggacccctactattgcaacaagtttgacggtgagaacatgtatatgagcatgacagagccgagccaggactatgtgccagccagccagtcctaccctggtccaagcctggaaagtgaagacttcaacattccaccaattactcctccttccctcccagaccactcgctggtgcacctgaatgaagttgagtctggttaccattctctgtgtcaccccatgaaccataatggcctgctaccatttcatccacaaaacatggacctccctgaaatcacagtctccaatatgctgggccaggatggaacactgctttctaattccatttctgtgatgccagatatacgaaacccagaaggaactcagtacagttcccatcctcagatggcagccatgagaccaaggggccagcctgcagacatcaggcagcagccaggaatgatgccacatggccagctgactaccattaaccagtcacagctaagtgctcaacttggtttgaatatgggaggaagcaatgttccccacaactcaccatctccacctggaagcaagtctgcaactccttcaccatccagttcagtgcatgaagatgaaggcgatgatacctctaagatcaatggtggagagaagcggcctgcctctgatatggggaaaaaaccaaaaactcccaaaaagaagaagaagaaggatcccaatgagccccagaagcctgtgtctgcctatgcgttattctttcgtgatactcaggccgccatcaagggccaaaatccaaacgctacctttggcgaagtctctaaaattgtggcttcaatgtgggacggtttaggagaagagcaaaaacaggtctataaaaagaaaaccgaggctgcgaagaaggagtacctgaagcaactcgcagcatacagagccagccttgtatccaagagctacagtgaacctgttgacgtgaagacatctcaacctcctcagctgatcaattcgaagccgtcggtgttccatgggcccagccaggcccactcggccctgtacctaagttcccactatcaccaacaaccgggaatgaatcctcacctaactgccatgcatcctagtctccccaggaacatagcccccaagccgaataaccaaatgccagtgactgtctctatagcaaacatggctgtgtcccctcctcctcccctccagatcagcccgcctcttcaccagcatctcaacatgcagcagcaccagccgctcaccatgcagcagccccttgggaaccagctccccatgcaggtccagtctgccttacactcacccaccatgcagcaaggatttactcttcaacccgactatcagactattatcaatcctacatctacagctgcacaagttgtcacccaggcaatggagtatgtgcgttcggggtgcagaaatcctcccccacaaccggtggactggaataacgactactgcagtagtgggggcatgcagagggacaaagcactgtaccttacttgagaatctgaacacctcttctttccactgaggaattcagggaagtgttttcaccatggattgctttgtacagtcaaggcagttctccattttattagaaaatacaagttgctaagcacttaggaccatttgagcttgtgggtcacccactctggaagaaatagtcatgcttctttattatttttttaatcctttatggacattgtttttcttcttccctgaaggaaatttggaccattcagattttatgttggttttttgctgtgaagtgctgcgctctagtaactgccttagcaactgtagatgtctcggataaaagtcctggattttccattggttttcataatgggtgtttatatgaaactactaaagactttttaaatggcttgatgtagcagtcatagcaagtttgtaaatagcatctatgttacactctcctagagtataaaatgtgaatgtttttgtagctaaattgtaattgaaactggctcattccagtttattgatttcacaataggggttaaattggcaaacattcatatttttacttcatttttaaaacaactgactgatagttctatattttcaaaatatttgaaaataaaaagtattcccaagtgattttaatttaaaaacaaattggctttgtctcattgatcagacaaaaagaaactagtattaagggaagcgcaaacacatttattttgtactgcagaaaaattgcttttttgtatcactttttgtgtaatggttagtaaatgtcatttaagtccttttatgtataaaactgccaaatgcttacctggtattttattagatgcagaaacagattggaaacagctaaattacaacttttacatatggctctgtcttattgtttcttcatactgtgtctgtatttaatctttttttatggaacctgttgcgcctatttatgaaataataaatataggtgtttgtaagtaaatttgttagtatttgaaagaggtttctttgatgttttaacttttgctggcaaaaaaaaattcacgcttggtgtgaatactttattatttagtttttacagtaacatgaataaagccaaacctgcttttcatttagcagca

SEQ ID NO: 299150 - DNA, 651 bp, Homo sapiens
tctagtctattgccatacttcttaaaaatctgtttcagtaagaaaacacaatctttggggagatatatattattatattatataactataagtgtgtttgtgtgtgcagttatcattctatattgtacttctctgaaaacaaaagcaaatgcactttctaatttaagactctttgctgttgttgcaggtctataaaaagaaaaccgaggctgcgaagaaggagtacctgaagcaactcgcagcatacagagccagccttgtatccaaggtaacgtgcagttgtgtgatattgtgaaggattgtggccatctcggcgcagactttgatagtcacttaaaggcataaaagatcactttaacgattctgcacaatcttctttgttggaaaaaaaagtaaattacaaacaaagctatacgatatggaaatattcgttcagctccaaaagaccagagcagcatcccctgggccatttctaaaatattgtccacctgtggatgattggttttgtggattagtcacagtacattcttcaacctgagccaactttctacttctccatatccctttcttaaattgcctccaggcccccatgccattggcctttactgaggacatgccaactctaagttctagactcattacagcagcatt

SEQ ID NO: 299151 - DNA, 457 bp, Homo sapiens
tttttcctttcctgaaagcctcatctaccttaatttcacacattattcctcgttttgactggctctatcaggataaattgacccttgcttcccatggtatttatggcatttatccttggggtagagccagtaccgacaatcaccatcccaaagctacgaggatgcgatggtaacatgctcatcagccatctacttaacactttgcccaagcctagtcccgtttcatcatcccagcaacttgatgagttaggtgcagatgagaaaaccaagaatgacagaagtttatccaaggccatacatcagaccaacggtctcaaacatgggaccgccttcagtactttccaatgagctgggtacccactaaaaaaaaaaaaaaaaaaaatcaaaatctaccattccacttggttctatgtggaatgatgtggcaaatcatgatttctaatcatttagtgtagat

SEQ ID NO: 299152 - DNA, 999 bp, Homo sapiens
agcggggagaggcctggcgcacagggcgagggcggctgcggcgcagtctgcagcatggcgtacccggggcatcctggcgccggcggcgggtactacccaggcgggtatggaggggctcccggagggcctgcgtttcccggacaaactcaggatccgctgtatggttactttgctgctgtagctggacaggatgggcagatagatgctgatgaattgcagagatgtctgacacagtctggcattgctggaggatacaaaccttttaacctggagacttgccggcttatggtttcaatgctggatagagatatgtctggcacaatgggtttcaatgaatttaaagaactctgggctgtactgaatggctggagacaacactttatcagttttgacactgacaggagtggaacagtagacccacaagaattgcagaaggccctgacaacaatgggatttaggttgagtccccaggctgtgaattcaattgcaaaacgatacagcaccaatggaaagatcaccttcgacgactacatcgcctgctgcgtcaaactgagggctcttacagacagctttcgaagacgggatactgctcagcaaggtgttgtgaatttcccatatgatgatttcattcaatgtgtcatgagtgtttaaatcaagaggaagctgcatgaatgtaatcaacattccaactggagctctcctttgcttgtcctctttgccttcggtaatatgtataaacttacatcacgactttctcttaacagctgttgtaaagtttattactttatgtacaactgaagttttgttttagttttgataataaattctttgttcctttgggaaactttttaaaaacaaaccaccaccacaatcccccacacccactaaaacacacacctcacacacacaacaccacatcaacaacaaaacacaacggaggggggggggcgccacaataaaatccccccaggaggagccccaatctgcgccacacccttt

SEQ ID NO: 299153 - DNA, 757 bp, Homo sapiens
agcggggagaggcctggcgcacagggcgagggcggctgcggcgcagtctgcagcatggcgtacccggggcatcctggcgccggcggcgggtactacccaggcgggtatggaggggctcccggagggcctgcgtttcccggacaaactcaggatccgctgtatggttactttgctgctgtagctggacaggatgggcagatagatgctgatgaattgcagagatgtctgacacagtctggcattgctggaggatacaaaccttttaacctggagacttgccggcttatggtttcaatgctggatagagatatgtctggcacaatgggtttcaatgaatttaaagaactctgggctgtactgaatggctggagacaacactttatcagttttgacactgacaggagtggaacagtagacccacaagaattgcagaaggccctgacaacaatgggatttaggttgagtccccaggctgtgaattcaattgcaaaacgatacagcaccaatggaaagatcaccttcgacgactacatcgcctgctgcgtcaaactgagggctcttacagacagctttcgaagacgggatactgctcagcaaggtgttgtgaatttcccatatgatgatttcattcaatgtgtcatgagtgtttaaatcaagaggaagctgcatgaatgtaatcaacattccaactggagctctcctttgcttgtcctctttgccttcggtaatatgtataaacttacatcacgactttctc

SEQ ID NO: 299154 - DNA, 919 bp, Homo sapiens
agcggggagaggcctggcgcacagggcgagggcggctgcggcgcagtctgcagcatggcgtacccggggcatcctggcgccggcggcgggtactacccaggcgggtatggaggggctcccggagggcctgcgtttcccggacaaactcaggatccgctgtatggttactttgctgctgtagctggacaggatgggcagatagatgctgatgaattgcagagatgtctgacacagtctggcattgctggaggatacaaaccttttaacctggagacttgccggcttatggtttcaatgctggatagagatatgtctggcacaatgggtttcaatgaatttaaagaactctgggctgtactgaatggctggagacaacactttatcagttttgacactgacaggagtggaacagtagacccacaagaattgcagaaggccctgacaacaatgggatttaggttgagtccccaggctgtgaattcaattgcaaaacgatacagcaccaatggaaagatcaccttcgacgactacatcgcctgctgcgtcaaactgagggctcttacagacagctttcgaagacgggatactgctcagcaaggtgttgtgaatttcccatatgatgatgtaagtcttagaaattaagagatacagtagatgaaaaggatgtacaccagatgggtatccctttgaaattagctgttaagaatatcttaaggttaaggatgccagagacataagggattcaaaagttagaaagagttatcatccagaatttattaatttccatttattagtcttaactatagtgagaccatgatttgatttgcattcagagacctgggttcaagacccagcttgttgtatttattagctgggtcacttaagcaggtttcttaattgctgtgacactatatgaata

SEQ ID NO: 299155 - DNA, 2032 bp, Homo sapiens
agcggggagaggcctggcgcacagggcgagggcggctgcggcgcagtctgcagcatggcgtacccggggcatcctggcgccggcggcgggtactacccaggcgggtatggaggggctcccggagggcctgcgtttcccggacaaactcaggatccgctgtatggttactttgctgctgtagctggacaggatgggcagatagatgctgatgaattgcagagatgtctgacacagtctggcattgctggaggatacaaaccttttaacctggagacttgccggcttatggtttcaatgctggatagagatatgtctggcacaatgggtttcaatgaatttaaagaactctgggctgtactgaatggctggagacaacactttatcagttttgacactgacaggagtggaacagtagacccacaagaattgcagaaggccctgacaacaatgggatttaggttgagtccccaggctgtgaattcaattgcaaaacgatacagcaccaatggaaagatcaccttcgacgactacatcgcctgctgcgtcaaactgagggctcttacagacagctttcgaagacgggatactgctcagcaaggtgttgtgaatttcccatatgatgatttcattcaatgtgtcatgagtgtttaaatcaagaggaagctgcatgaatgtaatcaacattccaactggagctctcctttgcttgtcctctttgccttcggtaatatgtataaacttacatcacgactttctcttaacagctgttgtaaagtttattactttatgtacaactgaagttttgttttagttttgataataaattctttggaactttaataagatctagtctgttacaccatttagaactttcctgagccattatcagtcatgccttattttcttgctaaaactctatgtaaatttaagtatgcaaaatgtttaagtcacattatttatttttcattgtgagacactaaaaactgttaatcagactacagctgttatctttcctctcctacaaagaatactccacacataaaaacttaggtaaatgacatagacgcacttgggtgaaataaaacaacaaaaaaggtaatccagtaatccacgtcaggattcaccttagaagtttagcacacgcccttcaaaacctgttgaataatttgattggcaaatactatctgtcaccaagtccctttttgtcatctatttaaacctttgttaactctccttaaaaatcttgtacattataagcttaactatataaaaagaaaattgatagaaaaagactaagggaatatatggaaatattaacaatgtttattttggatgaatggaattctagatgactttaattttctttatatcagtatttttcagattttctatatgctttccttttaaaatcagattttagtttttaaaatactgatacatccattttgatataccatgtattcacactttaaaaaatacacatagcagagtatcggaaagtatgtaccaaaacattgatctggctaccactgggagtcaggatcatgagttcatcttcttccttcttactgcttttccaaacattctccagtaagcaggtactacatttataatggaaggaattttttaaaaaattttaagctgtacactttcaagtaagatctgaattctaatgctggcttgtgcctcttactatgtggtttggtcattatagataatgcccagtttcagtttccccatctttgaaaaggagataatatgttatctcttgggagtagttctgaatatgaagtgtgttgatacaagaagcactgacaatgtttctgtttcttaaatttaaaactggcctggtttgccttttttatcaagagagcttaacagataaaaaatgaaattagtctattttctacttgccagcagagtatctgtcttattttaggatgcagtgtgaaacttaccattcaactgaacaactagttgtcaactaatgaaaataaaacattttctctaagcatctttagcctcatttcac

SEQ ID NO: 299156 - DNA, 1995 bp, Homo sapiens
actctgcaagaaggcaatcctctaaggatcaccagcttctacctataagacttcaactcaagatgcagtatggaggggctcccggagggcctgcgtttcccggacaaactcaggatccgctgtatggttactttgctgctgtagctggacaggatgggcagatagatgctgatgaattgcagagatgtctgacacagtctggcattgctggaggatacaaaccttttaacctggagacttgccggcttatggtttcaatgctggatagagatatgtctggcacaatgggtttcaatgaatttaaagaactctgggctgtactgaatggctggagacaacactttatcagttttgacactgacaggagtggaacagtagacccacaagaattgcagaaggccctgacaacaatgggatttaggttgagtccccaggctgtgaattcaattgcaaaacgatacagcaccaatggaaagatcaccttcgacgactacatcgcctgctgcgtcaaactgagggctcttacagacagctttcgaagacgggatactgctcagcaaggtgttgtgaatttcccatatgatgatttcattcaatgtgtcatgagtgtttaaatcaagaggaagctgcatgaatgtaatcaacattccaactggagctctcctttgcttgtcctctttgccttcggtaatatgtataaacttacatcacgactttctcttaacagctgttgtaaagtttattactttatgtacaactgaagttttgttttagttttgataataaattctttggaactttaataagatctagtctgttacaccatttagaactttcctgagccattatcagtcatgccttattttcttgctaaaactctatgtaaatttaagtatgcaaaatgtttaagtcacattatttatttttcattgtgagacactaaaaactgttaatcagactacagctgttatctttcctctcctacaaagaatactccacacataaaaacttaggtaaatgacatagacgcacttgggtgaaataaaacaacaaaaaaggtaatccagtaatccacgtcaggattcaccttagaagtttagcacacgcccttcaaaacctgttgaataatttgattggcaaatactatctgtcaccaagtccctttttgtcatctatttaaacctttgttaactctccttaaaaatcttgtacattataagcttaactatataaaaagaaaattgatagaaaaagactaagggaatatatggaaatattaacaatgtttattttggatgaatggaattctagatgactttaattttctttatatcagtatttttcagattttctatatgctttccttttaaaatcagattttagtttttaaaatactgatacatccattttgatataccatgtattcacactttaaaaaatacacatagcagagtatcggaaagtatgtaccaaaacattgatctggctaccactgggagtcaggatcatgagttcatcttcttccttcttactgcttttccaaacattctccagtaagcaggtactacatttataatggaaggaattttttaaaaaattttaagctgtacactttcaagtaagatctgaattctaatgctggcttgtgcctcttactatgtggtttggtcattatagataatgcccagtttcagtttccccatctttgaaaaggagataatatgttatctcttgggagtagttctgaatatgaagtgtgttgatacaagaagcactgacaatgtttctgtttcttaaatttaaaactggcctggtttgccttttttatcaagagagcttaacagataaaaaatgaaattagtctattttctacttgccagcagagtatctgtcttattttaggatgcagtgtgaaacttaccattcaactgaacaactagttgtcaactaatgaaaataaaacattttctctaagcatctttagcctcatttcac

SEQ ID NO: 299157 - DNA, 1939 bp, Homo sapiens
cctgtttcacagtatggaggggctcccggagggcctgcgtttcccggacaaactcaggatccgctgtatggttactttgctgctgtagctggacaggatgggcagatagatgctgatgaattgcagagatgtctgacacagtctggcattgctggaggatacaaaccttttaacctggagacttgccggcttatggtttcaatgctggatagagatatgtctggcacaatgggtttcaatgaatttaaagaactctgggctgtactgaatggctggagacaacactttatcagttttgacactgacaggagtggaacagtagacccacaagaattgcagaaggccctgacaacaatgggatttaggttgagtccccaggctgtgaattcaattgcaaaacgatacagcaccaatggaaagatcaccttcgacgactacatcgcctgctgcgtcaaactgagggctcttacagacagctttcgaagacgggatactgctcagcaaggtgttgtgaatttcccatatgatgatttcattcaatgtgtcatgagtgtttaaatcaagaggaagctgcatgaatgtaatcaacattccaactggagctctcctttgcttgtcctctttgccttcggtaatatgtataaacttacatcacgactttctcttaacagctgttgtaaagtttattactttatgtacaactgaagttttgttttagttttgataataaattctttggaactttaataagatctagtctgttacaccatttagaactttcctgagccattatcagtcatgccttattttcttgctaaaactctatgtaaatttaagtatgcaaaatgtttaagtcacattatttatttttcattgtgagacactaaaaactgttaatcagactacagctgttatctttcctctcctacaaagaatactccacacataaaaacttaggtaaatgacatagacgcacttgggtgaaataaaacaacaaaaaaggtaatccagtaatccacgtcaggattcaccttagaagtttagcacacgcccttcaaaacctgttgaataatttgattggcaaatactatctgtcaccaagtccctttttgtcatctatttaaacctttgttaactctccttaaaaatcttgtacattataagcttaactatataaaaagaaaattgatagaaaaagactaagggaatatatggaaatattaacaatgtttattttggatgaatggaattctagatgactttaattttctttatatcagtatttttcagattttctatatgctttccttttaaaatcagattttagtttttaaaatactgatacatccattttgatataccatgtattcacactttaaaaaatacacatagcagagtatcggaaagtatgtaccaaaacattgatctggctaccactgggagtcaggatcatgagttcatcttcttccttcttactgcttttccaaacattctccagtaagcaggtactacatttataatggaaggaattttttaaaaaattttaagctgtacactttcaagtaagatctgaattctaatgctggcttgtgcctcttactatgtggtttggtcattatagataatgcccagtttcagtttccccatctttgaaaaggagataatatgttatctcttgggagtagttctgaatatgaagtgtgttgatacaagaagcactgacaatgtttctgtttcttaaatttaaaactggcctggtttgccttttttatcaagagagcttaacagataaaaaatgaaattagtctattttctacttgccagcagagtatctgtcttattttaggatgcagtgtgaaacttaccattcaactgaacaactagttgtcaactaatgaaaataaaacattttctctaagcatctttagcctcatttcac

SEQ ID NO: 299158 - DNA, 1948 bp, Homo sapiens
agcggggagaggcctggcgcacagggcgagggcggctgcggcgcagtctgcagcatggcgtacccggggcatcctggcgccggcggcgggtactacccaggcggggatgggcagatagatgctgatgaattgcagagatgtctgacacagtctggcattgctggaggatacaaaccttttaacctggagacttgccggcttatggtttcaatgctggatagagatatgtctggcacaatgggtttcaatgaatttaaagaactctgggctgtactgaatggctggagacaacactttatcagttttgacactgacaggagtggaacagtagacccacaagaattgcagaaggccctgacaacaatgggatttaggttgagtccccaggctgtgaattcaattgcaaaacgatacagcaccaatggaaagatcaccttcgacgactacatcgcctgctgcgtcaaactgagggctcttacagacagctttcgaagacgggatactgctcagcaaggtgttgtgaatttcccatatgatgatttcattcaatgtgtcatgagtgtttaaatcaagaggaagctgcatgaatgtaatcaacattccaactggagctctcctttgcttgtcctctttgccttcggtaatatgtataaacttacatcacgactttctcttaacagctgttgtaaagtttattactttatgtacaactgaagttttgttttagttttgataataaattctttggaactttaataagatctagtctgttacaccatttagaactttcctgagccattatcagtcatgccttattttcttgctaaaactctatgtaaatttaagtatgcaaaatgtttaagtcacattatttatttttcattgtgagacactaaaaactgttaatcagactacagctgttatctttcctctcctacaaagaatactccacacataaaaacttaggtaaatgacatagacgcacttgggtgaaataaaacaacaaaaaaggtaatccagtaatccacgtcaggattcaccttagaagtttagcacacgcccttcaaaacctgttgaataatttgattggcaaatactatctgtcaccaagtccctttttgtcatctatttaaacctttgttaactctccttaaaaatcttgtacattataagcttaactatataaaaagaaaattgatagaaaaagactaagggaatatatggaaatattaacaatgtttattttggatgaatggaattctagatgactttaattttctttatatcagtatttttcagattttctatatgctttccttttaaaatcagattttagtttttaaaatactgatacatccattttgatataccatgtattcacactttaaaaaatacacatagcagagtatcggaaagtatgtaccaaaacattgatctggctaccactgggagtcaggatcatgagttcatcttcttccttcttactgcttttccaaacattctccagtaagcaggtactacatttataatggaaggaattttttaaaaaattttaagctgtacactttcaagtaagatctgaattctaatgctggcttgtgcctcttactatgtggtttggtcattatagataatgcccagtttcagtttccccatctttgaaaaggagataatatgttatctcttgggagtagttctgaatatgaagtgtgttgatacaagaagcactgacaatgtttctgtttcttaaatttaaaactggcctggtttgccttttttatcaagagagcttaacagataaaaaatgaaattagtctattttctacttgccagcagagtatctgtcttattttaggatgcagtgtgaaacttaccattcaactgaacaactagttgtcaactaatgaaaataaaacattttctctaagcatctttagcctcatttcac

SEQ ID NO: 299159 - DNA, 2133 bp, Homo sapiens
ggtgcatctttccaatgagtctgctgagactcttgacagcacctccagctctgctgcttcaacaacagtgacttgctctccaatggtatccagtgattcgttgaagaggaggtgctctgtagcagaaactgagctccgggtggctggttctcagtggttgtctcatgtctctttttctgtcttaggtggtttcattaaatgcagcacttggttagcagatgtttaattttttttttaacaacattaacttgtggcctctttctacacctggaaatttactcttgaataaataaaaactcgtttgtcttgtcttctgccagagatgtctgacacagtctggcattgctggaggatacaaaccttttaacctggagacttgccggcttatggtttcaatgctggatagagatatgtctggcacaatgggtttcaatgaatttaaagaactctgggctgtactgaatggctggagacaacactttatcagttttgacactgacaggagtggaacagtagacccacaagaattgcagaaggccctgacaacaatgggatttaggttgagtccccaggctgtgaattcaattgcaaaacgatacagcaccaatggaaagatcaccttcgacgactacatcgcctgctgcgtcaaactgagggctcttacagacagctttcgaagacgggatactgctcagcaaggtgttgtgaatttcccatatgatgatttcattcaatgtgtcatgagtgtttaaatcaagaggaagctgcatgaatgtaatcaacattccaactggagctctcctttgcttgtcctctttgccttcggtaatatgtataaacttacatcacgactttctcttaacagctgttgtaaagtttattactttatgtacaactgaagttttgttttagttttgataataaattctttggaactttaataagatctagtctgttacaccatttagaactttcctgagccattatcagtcatgccttattttcttgctaaaactctatgtaaatttaagtatgcaaaatgtttaagtcacattatttatttttcattgtgagacactaaaaactgttaatcagactacagctgttatctttcctctcctacaaagaatactccacacataaaaacttaggtaaatgacatagacgcacttgggtgaaataaaacaacaaaaaaggtaatccagtaatccacgtcaggattcaccttagaagtttagcacacgcccttcaaaacctgttgaataatttgattggcaaatactatctgtcaccaagtccctttttgtcatctatttaaacctttgttaactctccttaaaaatcttgtacattataagcttaactatataaaaagaaaattgatagaaaaagactaagggaatatatggaaatattaacaatgtttattttggatgaatggaattctagatgactttaattttctttatatcagtatttttcagattttctatatgctttccttttaaaatcagattttagtttttaaaatactgatacatccattttgatataccatgtattcacactttaaaaaatacacatagcagagtatcggaaagtatgtaccaaaacattgatctggctaccactgggagtcaggatcatgagttcatcttcttccttcttactgcttttccaaacattctccagtaagcaggtactacatttataatggaaggaattttttaaaaaattttaagctgtacactttcaagtaagatctgaattctaatgctggcttgtgcctcttactatgtggtttggtcattatagataatgcccagtttcagtttccccatctttgaaaaggagataatatgttatctcttgggagtagttctgaatatgaagtgtgttgatacaagaagcactgacaatgtttctgtttcttaaatttaaaactggcctggtttgccttttttatcaagagagcttaacagataaaaaatgaaattagtctattttctacttgccagcagagtatctgtcttattttaggatgcagtgtgaaacttaccattcaactgaacaactagttgtcaactaatgaaaataaaacattttctctaagcatctttagcctcatttcac

SEQ ID NO: 299160 - DNA, 1850 bp, Homo sapiens
gggctcgtcttagatctacatgctgatgtgcttgccttgatgctcggacgtcgtctggcatgtcggaggtagcaaaccttttaacctggagacttgccggcttatggtttcaatgctggatagagatatgtctggcacaatgggtttcaatgaatttaaagaactctgggctgtactgaatggctggagacaacactttatcagttttgacactgacaggagtggaacagtagacccacaagaattgcagaaggccctgacaacaatgggatttaggttgagtccccaggctgtgaattcaattgcaaaacgatacagcaccaatggaaagatcaccttcgacgactacatcgcctgctgcgtcaaactgagggctcttacagacagctttcgaagacgggatactgctcagcaaggtgttgtgaatttcccatatgatgatttcattcaatgtgtcatgagtgtttaaatcaagaggaagctgcatgaatgtaatcaacattccaactggagctctcctttgcttgtcctctttgccttcggtaatatgtataaacttacatcacgactttctcttaacagctgttgtaaagtttattactttatgtacaactgaagttttgttttagttttgataataaattctttggaactttaataagatctagtctgttacaccatttagaactttcctgagccattatcagtcatgccttattttcttgctaaaactctatgtaaatttaagtatgcaaaatgtttaagtcacattatttatttttcattgtgagacactaaaaactgttaatcagactacagctgttatctttcctctcctacaaagaatactccacacataaaaacttaggtaaatgacatagacgcacttgggtgaaataaaacaacaaaaaaggtaatccagtaatccacgtcaggattcaccttagaagtttagcacacgcccttcaaaacctgttgaataatttgattggcaaatactatctgtcaccaagtccctttttgtcatctatttaaacctttgttaactctccttaaaaatcttgtacattataagcttaactatataaaaagaaaattgatagaaaaagactaagggaatatatggaaatattaacaatgtttattttggatgaatggaattctagatgactttaattttctttatatcagtatttttcagattttctatatgctttccttttaaaatcagattttagtttttaaaatactgatacatccattttgatataccatgtattcacactttaaaaaatacacatagcagagtatcggaaagtatgtaccaaaacattgatctggctaccactgggagtcaggatcatgagttcatcttcttccttcttactgcttttccaaacattctccagtaagcaggtactacatttataatggaaggaattttttaaaaaattttaagctgtacactttcaagtaagatctgaattctaatgctggcttgtgcctcttactatgtggtttggtcattatagataatgcccagtttcagtttccccatctttgaaaaggagataatatgttatctcttgggagtagttctgaatatgaagtgtgttgatacaagaagcactgacaatgtttctgtttcttaaatttaaaactggcctggtttgccttttttatcaagagagcttaacagataaaaaatgaaattagtctattttctacttgccagcagagtatctgtcttattttaggatgcagtgtgaaacttaccattcaactgaacaactagttgtcaactaatgaaaataaaacattttctctaagcatctttagcctcatttcac

SEQ ID NO: 299161 - DNA, 1816 bp, Homo sapiens
aggtctgactagaggatccccatggcatgtagtgaggacacaaactttaaccgggagacttgccggcttatggtttcaaggctggatagagatatgtctggcacaatgggtttcaatgaatttaaagaactctgggctgtactgaatggctggagacaacactttatcagttttgacactgacaggagtggaacagtagacccacaagaattgcagaaggccctgacaacaatgggatttaggttgagtccccaggctgtgaattcaattgcaaaacgatacagcaccaatggaaagatcaccttcgacgactacatcgcctgctgcgtcaaactgagggctcttacagacagctttcgaagacgggatactgctcagcaaggtgttgtgaatttcccatatgatgatttcattcaatgtgtcatgagtgtttaaatcaagaggaagctgcatgaatgtaatcaacattccaactggagctctcctttgcttgtcctctttgccttcggtaatatgtataaacttacatcacgactttctcttaacagctgttgtaaagtttattactttatgtacaactgaagttttgttttagttttgataataaattctttggaactttaataagatctagtctgttacaccatttagaactttcctgagccattatcagtcatgccttattttcttgctaaaactctatgtaaatttaagtatgcaaaatgtttaagtcacattatttatttttcattgtgagacactaaaaactgttaatcagactacagctgttatctttcctctcctacaaagaatactccacacataaaaacttaggtaaatgacatagacgcacttgggtgaaataaaacaacaaaaaaggtaatccagtaatccacgtcaggattcaccttagaagtttagcacacgcccttcaaaacctgttgaataatttgattggcaaatactatctgtcaccaagtccctttttgtcatctatttaaacctttgttaactctccttaaaaatcttgtacattataagcttaactatataaaaagaaaattgatagaaaaagactaagggaatatatggaaatattaacaatgtttattttggatgaatggaattctagatgactttaattttctttatatcagtatttttcagattttctatatgctttccttttaaaatcagattttagtttttaaaatactgatacatccattttgatataccatgtattcacactttaaaaaatacacatagcagagtatcggaaagtatgtaccaaaacattgatctggctaccactgggagtcaggatcatgagttcatcttcttccttcttactgcttttccaaacattctccagtaagcaggtactacatttataatggaaggaattttttaaaaaattttaagctgtacactttcaagtaagatctgaattctaatgctggcttgtgcctcttactatgtggtttggtcattatagataatgcccagtttcagtttccccatctttgaaaaggagataatatgttatctcttgggagtagttctgaatatgaagtgtgttgatacaagaagcactgacaatgtttctgtttcttaaatttaaaactggcctggtttgccttttttatcaagagagcttaacagataaaaaatgaaattagtctattttctacttgccagcagagtatctgtcttattttaggatgcagtgtgaaacttaccattcaactgaacaactagttgtcaactaatgaaaataaaacattttctctaagcatctttagcctcatttcac

SEQ ID NO: 299162 - DNA, 2211 bp, Homo sapiens
taacattgattcctctgcaagtgatgggatttttcacatcccacttgttggactgagtttaggtagtgctgactatccagtgcattccatcccacctcatttgtctgggggcactaaacaagggaatattagtaccagagatgatgctaggacagaagggcaaacagcatagcctgaagcacccacaaagtacagcctagttccagtaacaagaccgctttttataagtggttcacaatggcaacgctatttccttataatcaagtcatgtaagttatcttttccccacagtaaaaattggcacttgagctttttctccatagcccctttctatttttaaatcattaattttacatcataccaagaataatctacaataacttttttagccattgaatattgaattccccttatccttgatctttcatttaatccttagaaaatatcgcaaaatacagctctaatccttgattacagttcagagagatatgtctggcacaatgggtttcaatgaatttaaagaactctgggctgtactgaatggctggagacaacactttatcagttttgacactgacaggagtggaacagtagacccacaagaattgcagaaggccctgacaacaatgggatttaggttgagtccccaggctgtgaattcaattgcaaaacgatacagcaccaatggaaagatcaccttcgacgactacatcgcctgctgcgtcaaactgagggctcttacagacagctttcgaagacgggatactgctcagcaaggtgttgtgaatttcccatatgatgatttcattcaatgtgtcatgagtgtttaaatcaagaggaagctgcatgaatgtaatcaacattccaactggagctctcctttgcttgtcctctttgccttcggtaatatgtataaacttacatcacgactttctcttaacagctgttgtaaagtttattactttatgtacaactgaagttttgttttagttttgataataaattctttggaactttaataagatctagtctgttacaccatttagaactttcctgagccattatcagtcatgccttattttcttgctaaaactctatgtaaatttaagtatgcaaaatgtttaagtcacattatttatttttcattgtgagacactaaaaactgttaatcagactacagctgttatctttcctctcctacaaagaatactccacacataaaaacttaggtaaatgacatagacgcacttgggtgaaataaaacaacaaaaaaggtaatccagtaatccacgtcaggattcaccttagaagtttagcacacgcccttcaaaacctgttgaataatttgattggcaaatactatctgtcaccaagtccctttttgtcatctatttaaacctttgttaactctccttaaaaatcttgtacattataagcttaactatataaaaagaaaattgatagaaaaagactaagggaatatatggaaatattaacaatgtttattttggatgaatggaattctagatgactttaattttctttatatcagtatttttcagattttctatatgctttccttttaaaatcagattttagtttttaaaatactgatacatccattttgatataccatgtattcacactttaaaaaatacacatagcagagtatcggaaagtatgtaccaaaacattgatctggctaccactgggagtcaggatcatgagttcatcttcttccttcttactgcttttccaaacattctccagtaagcaggtactacatttataatggaaggaattttttaaaaaattttaagctgtacactttcaagtaagatctgaattctaatgctggcttgtgcctcttactatgtggtttggtcattatagataatgcccagtttcagtttccccatctttgaaaaggagataatatgttatctcttgggagtagttctgaatatgaagtgtgttgatacaagaagcactgacaatgtttctgtttcttaaatttaaaactggcctggtttgccttttttatcaagagagcttaacagataaaaaatgaaattagtctattttctacttgccagcagagtatctgtcttattttaggatgcagtgtgaaacttaccattcaactgaacaactagttgtcaactaatgaaaataaaacattttctctaagcatctttagcctcatttcac

SEQ ID NO: 299163 - DNA, 1858 bp, Homo sapiens
actgttttccatagttgctatactaatttagaagaaaggaacaagttccaatgtttgatagcagagtaagatacctatagttaacaacgttttgcatatttcaaaatagctagaagaaaaaaacttaaaatgttccccacatatagaaatgatgaatattcaaggtgatgtatgccttaagtactgaatggctggagacaacactttatcagttttgacactgacaggagtggaacagtagacccacaagaattgcagaaggccctgacaacaatgggatttaggttgagtccccaggctgtgaattcaattgcaaaacgatacagcaccaatggaaagatcaccttcgacgactacatcgcctgctgcgtcaaactgagggctcttacagacagctttcgaagacgggatactgctcagcaaggtgttgtgaatttcccatatgatgatttcattcaatgtgtcatgagtgtttaaatcaagaggaagctgcatgaatgtaatcaacattccaactggagctctcctttgcttgtcctctttgccttcggtaatatgtataaacttacatcacgactttctcttaacagctgttgtaaagtttattactttatgtacaactgaagttttgttttagttttgataataaattctttggaactttaataagatctagtctgttacaccatttagaactttcctgagccattatcagtcatgccttattttcttgctaaaactctatgtaaatttaagtatgcaaaatgtttaagtcacattatttatttttcattgtgagacactaaaaactgttaatcagactacagctgttatctttcctctcctacaaagaatactccacacataaaaacttaggtaaatgacatagacgcacttgggtgaaataaaacaacaaaaaaggtaatccagtaatccacgtcaggattcaccttagaagtttagcacacgcccttcaaaacctgttgaataatttgattggcaaatactatctgtcaccaagtccctttttgtcatctatttaaacctttgttaactctccttaaaaatcttgtacattataagcttaactatataaaaagaaaattgatagaaaaagactaagggaatatatggaaatattaacaatgtttattttggatgaatggaattctagatgactttaattttctttatatcagtatttttcagattttctatatgctttccttttaaaatcagattttagtttttaaaatactgatacatccattttgatataccatgtattcacactttaaaaaatacacatagcagagtatcggaaagtatgtaccaaaacattgatctggctaccactgggagtcaggatcatgagttcatcttcttccttcttactgcttttccaaacattctccagtaagcaggtactacatttataatggaaggaattttttaaaaaattttaagctgtacactttcaagtaagatctgaattctaatgctggcttgtgcctcttactatgtggtttggtcattatagataatgcccagtttcagtttccccatctttgaaaaggagataatatgttatctcttgggagtagttctgaatatgaagtgtgttgatacaagaagcactgacaatgtttctgtttcttaaatttaaaactggcctggtttgccttttttatcaagagagcttaacagataaaaaatgaaattagtctattttctacttgccagcagagtatctgtcttattttaggatgcagtgtgaaacttaccattcaactgaacaactagttgtcaactaatgaaaataaaacattttctctaagcatctttagcctcatttcac

SEQ ID NO: 299164 - DNA, 1667 bp, Homo sapiens
  misc_feature (26)..(26): n is a, c, g, or t
ggacgactctagagttaccccacgtngacacttcgggagtggaacagtagacccacaagaattgcagaaggccctgacaacaatgggatttaggttgagtccccaggctgtgaattcaattgcaaaacgatacagcaccaatggaaagatcaccttcgacgactacatcgcctgctgcgtcaaactgagggctcttacagacagctttcgaagacgggatactgctcagcaaggtgttgtgaatttcccatatgatgatttcattcaatgtgtcatgagtgtttaaatcaagaggaagctgcatgaatgtaatcaacattccaactggagctctcctttgcttgtcctctttgccttcggtaatatgtataaacttacatcacgactttctcttaacagctgttgtaaagtttattactttatgtacaactgaagttttgttttagttttgataataaattctttggaactttaataagatctagtctgttacaccatttagaactttcctgagccattatcagtcatgccttattttcttgctaaaactctatgtaaatttaagtatgcaaaatgtttaagtcacattatttatttttcattgtgagacactaaaaactgttaatcagactacagctgttatctttcctctcctacaaagaatactccacacataaaaacttaggtaaatgacatagacgcacttgggtgaaataaaacaacaaaaaaggtaatccagtaatccacgtcaggattcaccttagaagtttagcacacgcccttcaaaacctgttgaataatttgattggcaaatactatctgtcaccaagtccctttttgtcatctatttaaacctttgttaactctccttaaaaatcttgtacattataagcttaactatataaaaagaaaattgatagaaaaagactaagggaatatatggaaatattaacaatgtttattttggatgaatggaattctagatgactttaattttctttatatcagtatttttcagattttctatatgctttccttttaaaatcagattttagtttttaaaatactgatacatccattttgatataccatgtattcacactttaaaaaatacacatagcagagtatcggaaagtatgtaccaaaacattgatctggctaccactgggagtcaggatcatgagttcatcttcttccttcttactgcttttccaaacattctccagtaagcaggtactacatttataatggaaggaattttttaaaaaattttaagctgtacactttcaagtaagatctgaattctaatgctggcttgtgcctcttactatgtggtttggtcattatagataatgcccagtttcagtttccccatctttgaaaaggagataatatgttatctcttgggagtagttctgaatatgaagtgtgttgatacaagaagcactgacaatgtttctgtttcttaaatttaaaactggcctggtttgccttttttatcaagagagcttaacagataaaaaatgaaattagtctattttctacttgccagcagagtatctgtcttattttaggatgcagtgtgaaacttaccattcaactgaacaactagttgtcaactaatgaaaataaaacattttctctaagcatctttagcctcatttcac

SEQ ID NO: 299165 - DNA, 2006 bp, Homo sapiens
agcggggagaggcctggcgcacagggcgagggcggctgcggcgcagtctgcagcatggcgtacccggggcatcctggcgccggcggcgggtactacccaggcgggtatggaggggctcccggagggcctgcgtttcccggacaaactcaggatccgctgtatggttactttgctgctgtagctggacaggatgggcagatagatgctgatgaattgcagagatgtctgacacagtctggcattgctggaggatacaaaccttttaacctggagacttgccggcttatggtttcaatgctggatagagatatgtctggcacaatgggtttcaatgaatttaaagaactctgggctgtactgaatggctggagacaacactttatcagttttgacactgacaggagtggaacagtagacccacaagaattgcagaaggccctgacaacaatgggatttaggttgagtccccaggctgtgaattcaattgcaaaacgatacagcaccaatggaaagatcaccttcgacgactacatcgcctgctgcgtcaaactgagggctcttacagacagctttcgaagacgggatactgctcagcaagttcattcaatgtgtcatgagtgtttaaatcaagaggaagctgcatgaatgtaatcaacattccaactggagctctcctttgcttgtcctctttgccttcggtaatatgtataaacttacatcacgactttctcttaacagctgttgtaaagtttattactttatgtacaactgaagttttgttttagttttgataataaattctttggaactttaataagatctagtctgttacaccatttagaactttcctgagccattatcagtcatgccttattttcttgctaaaactctatgtaaatttaagtatgcaaaatgtttaagtcacattatttatttttcattgtgagacactaaaaactgttaatcagactacagctgttatctttcctctcctacaaagaatactccacacataaaaacttaggtaaatgacatagacgcacttgggtgaaataaaacaacaaaaaaggtaatccagtaatccacgtcaggattcaccttagaagtttagcacacgcccttcaaaacctgttgaataatttgattggcaaatactatctgtcaccaagtccctttttgtcatctatttaaacctttgttaactctccttaaaaatcttgtacattataagcttaactatataaaaagaaaattgatagaaaaagactaagggaatatatggaaatattaacaatgtttattttggatgaatggaattctagatgactttaattttctttatatcagtatttttcagattttctatatgctttccttttaaaatcagattttagtttttaaaatactgatacatccattttgatataccatgtattcacactttaaaaaatacacatagcagagtatcggaaagtatgtaccaaaacattgatctggctaccactgggagtcaggatcatgagttcatcttcttccttcttactgcttttccaaacattctccagtaagcaggtactacatttataatggaaggaattttttaaaaaattttaagctgtacactttcaagtaagatctgaattctaatgctggcttgtgcctcttactatgtggtttggtcattatagataatgcccagtttcagtttccccatctttgaaaaggagataatatgttatctcttgggagtagttctgaatatgaagtgtgttgatacaagaagcactgacaatgtttctgtttcttaaatttaaaactggcctggtttgccttttttatcaagagagcttaacagataaaaaatgaaattagtctattttctacttgccagcagagtatctgtcttattttaggatgcagtgtgaaacttaccattcaactgaacaactagttgtcaactaatgaaaataaaacattttctctaagcatctttagcctcatttcac

SEQ ID NO: 299166 - DNA, 2139 bp, Homo sapiens
taacattgattcctctgcaagtgatgggatttttcacatcccacttgttggactgagtttaggtagtgctgactatccagtgcattccatcccacctcatttgtctgggggcactaaacaagggaatattagtaccagagatgatgctaggacagaagggcaaacagcatagcctgaagcacccacaaagtacagcctagttccagtaacaagaccgctttttataagtggttcacaatggcaacgctatttccttataatcaagtcatgtaagttatcttttccccacagtaaaaattggcacttgagctttttctccatagcccctttctatttttaaatcattaattttacatcataccaagaataatctacaataacttttttagccattgaatattgaattccccttatccttgatctttcatttaatccttagaaaatatcgcaaaatacagctctaatccttgattacagttcagagagatatgtctggcacaatgggtttcaatgaatttaaagaactctgggctgtactgaatggctggagacaacactttatcagttttgacactgacaggagtggaacagtagacccacaagaattgcagaaggccctgacaacaatgggatttaggttgagtccccaggctgtgaattcaattgcaaaacacagctttcgaagacgggatactgctcagcaaggtgttgtgaatttcccatatgatgatttcattcaatgtgtcatgagtgtttaaatcaagaggaagctgcatgaatgtaatcaacattccaactggagctctcctttgcttgtcctctttgccttcggtaatatgtataaacttacatcacgactttctcttaacagctgttgtaaagtttattactttatgtacaactgaagttttgttttagttttgataataaattctttggaactttaataagatctagtctgttacaccatttagaactttcctgagccattatcagtcatgccttattttcttgctaaaactctatgtaaatttaagtatgcaaaatgtttaagtcacattatttatttttcattgtgagacactaaaaactgttaatcagactacagctgttatctttcctctcctacaaagaatactccacacataaaaacttaggtaaatgacatagacgcacttgggtgaaataaaacaacaaaaaaggtaatccagtaatccacgtcaggattcaccttagaagtttagcacacgcccttcaaaacctgttgaataatttgattggcaaatactatctgtcaccaagtccctttttgtcatctatttaaacctttgttaactctccttaaaaatcttgtacattataagcttaactatataaaaagaaaattgatagaaaaagactaagggaatatatggaaatattaacaatgtttattttggatgaatggaattctagatgactttaattttctttatatcagtatttttcagattttctatatgctttccttttaaaatcagattttagtttttaaaatactgatacatccattttgatataccatgtattcacactttaaaaaatacacatagcagagtatcggaaagtatgtaccaaaacattgatctggctaccactgggagtcaggatcatgagttcatcttcttccttcttactgcttttccaaacattctccagtaagcaggtactacatttataatggaaggaattttttaaaaaattttaagctgtacactttcaagtaagatctgaattctaatgctggcttgtgcctcttactatgtggtttggtcattatagataatgcccagtttcagtttccccatctttgaaaaggagataatatgttatctcttgggagtagttctgaatatgaagtgtgttgatacaagaagcactgacaatgtttctgtttcttaaatttaaaactggcctggtttgccttttttatcaagagagcttaacagataaaaaatgaaattagtctattttctacttgccagcagagtatctgtcttattttaggatgcagtgtgaaacttaccattcaactgaacaactagttgtcaactaatgaaaataaaacattttctctaagcatctttagcctcatttcac

SEQ ID NO: 299167 - DNA, 1478 bp, Homo sapiens
agctgccagaaataggctgtgccgtataagtgctttgaggtctgtcatataatgctgatttttctttcagttcattcaatgtgtcatgagtgtttaaatcaagaggaagctgcatgaatgtaatcaacattccaactggagctctcctttgcttgtcctctttgccttcggtaatatgtataaacttacatcacgactttctcttaacagctgttgtaaagtttattactttatgtacaactgaagttttgttttagttttgataataaattctttggaactttaataagatctagtctgttacaccatttagaactttcctgagccattatcagtcatgccttattttcttgctaaaactctatgtaaatttaagtatgcaaaatgtttaagtcacattatttatttttcattgtgagacactaaaaactgttaatcagactacagctgttatctttcctctcctacaaagaatactccacacataaaaacttaggtaaatgacatagacgcacttgggtgaaataaaacaacaaaaaaggtaatccagtaatccacgtcaggattcaccttagaagtttagcacacgcccttcaaaacctgttgaataatttgattggcaaatactatctgtcaccaagtccctttttgtcatctatttaaacctttgttaactctccttaaaaatcttgtacattataagcttaactatataaaaagaaaattgatagaaaaagactaagggaatatatggaaatattaacaatgtttattttggatgaatggaattctagatgactttaattttctttatatcagtatttttcagattttctatatgctttccttttaaaatcagattttagtttttaaaatactgatacatccattttgatataccatgtattcacactttaaaaaatacacatagcagagtatcggaaagtatgtaccaaaacattgatctggctaccactgggagtcaggatcatgagttcatcttcttccttcttactgcttttccaaacattctccagtaagcaggtactacatttataatggaaggaattttttaaaaaattttaagctgtacactttcaagtaagatctgaattctaatgctggcttgtgcctcttactatgtggtttggtcattatagataatgcccagtttcagtttccccatctttgaaaaggagataatatgttatctcttgggagtagttctgaatatgaagtgtgttgatacaagaagcactgacaatgtttctgtttcttaaatttaaaactggcctggtttgccttttttatcaagagagcttaacagataaaaaatgaaattagtctattttctacttgccagcagagtatctgtcttattttaggatgcagtgtgaaacttaccattcaactgaacaactagttgtcaactaatgaaaataaaacattttctctaagcatctttagcctcatttcac

SEQ ID NO: 299168 - DNA, 896 bp, Homo sapiens
agcggggagaggcctggcgcacagggcgagggcggctgcggcgcagtctgcagcatggcgtacccggggcatcctggcgccggcggcgggtactacccaggcgggtatggaggggctcccggagggcctgcgtttcccggacaaactcaggatccgctgtatggttactttgctgctgtagctggacaggatgggcagatagatgctgatgaattgcagagatgtctgacacagtctggcattgctggaggatacaaaccttttaacctggagacttgccggcttatggtttcaatgctggatagagatatgtctggcacaatgggtttcaatgaatttaaagaactctgggctgtactgaatggctggagacaacactttatcagttttgacactgacaggagtggaacagtagacccacaagaattgcagaaggccctgacaacaatgggatttaggttgagtccccaggctgtgaattcaattgcaaaacgatacagcaccaatggaaagatcaccttcgacgactacatcgcctgctgcgtcaaactgagggctcttacagacagctttcgaagacgggatacttcggggcgcgcggagctggggggtccctgtggggctcccggagttaagatggcgtcctcagcggagggggacgaggggactgtggtggcgctggcgggggttctgcagtcgggtttccaggagctgagccttaacgggttggcgacgtccctgggcgcgtcagaacaggcgctgcggctgatcatctccatcttcctgggttacccctttgctttggtttatcggcattaccttttctacaaggagacctacctcatccacctcttccatacctttacaggcctctcaattgcttattttaactttgg

SEQ ID NO: 299169 - DNA, 4290 bp, Homo sapiens
  misc_feature (15)..(15): n is a, c, g, or t
gctcggccgccagtnggaagcgccagcccagagcctgggaagtggccgcagaggctgctcggccccgctgcccgccaggtcgtgggctcccgctccgggcccggggccaccggctgtggacttcaaaatgagcgtccctgactacatgcagtgtgctgaggaccaccagacgctgctcgtggtggtccagcctgtgggcatcgtctccgaggagaacttcttcaggatctataagaggatttgctctgtgagtcagatcagcgtgcgggactcccagcgagtcctctacatccgctacaggcaccactacccacccgagaacaacgagtggggtgacttccagacccaccgcaaagtcgtgggcctcatcaccatcacagactgcttctcggccaaggactggccacagacctttgagaagttccacgtgcagaaggagatctacggctccacactgtatgactcccggctctttgtcttcgggctgcagggggagatcgtggagcagccgcgcaccgacgtggctttctaccccaactacgaggactgccagacggtggagaagagaatcgaggacttcatcgagtcactgttcatcgtgctggagtccaagcgtctggacagagccacagacaagtctggggataagatcccccttctctgtgtcccgtttgagaaaaaggactttgtaggactggacacagacagcagacattacaagaagcggtgccaaggccgcatgcggaagcacgtgggggacctgtgcctgcaggcagggatgctgcaggactccctggtgcattaccacatgtcggtggagctgctgcgttctgtgaatgactttctgtggcttggagctgccctggaaggattgtgttcagcttctgtcatctatcactatcctggtggaactggtgggaagagtggagctcggaggttccagggcagcacccttcctgctgaagcagccaatagacaccggccaggggcacaggaagttctcattgatccaggtgccctcaccaccaatggcatcaaccctgacaccagtactgagatcggacgtgctaagaactgccttagccctgaagacataattgacaagtataaagaggcgatttcctattacagcaagtataagaatgcgggagtgattgagttggaagcgtgcatcaaggctgtacgtgtccttgcaattcagaaacggagcatggaagcatcagaatttcttcagaatgcagtttacattaaccttcgacagctttctgaggaagagaaaattcagcgctacagcatcctctccgagctctatgagctgatcggcttccatcgcaagtctgcgttcttcaagcgcgtggccgccatgcagtgcgtggccccaagcatcgcggagcctgggtggagggcctgctacaaactcctcctggaaacgctgcccggctacagtctgtcgctggatcccaaagatttcagcagaggcacgcacagaggctgggctgcggtccagatgcgtttgctccatgaattggtctacgcctcccgaaggatggggaaccctgccctctctgtcagacacctgtccttccttctacagaccatgctggacttcttgtcggatcaggaaaagaaagatgtggcccaaagcctagagaactatacgtccaagtgtcctgggaccatggagcccatcgccctccctggcggcctcaccctgccaccggtgcccttcaccaagcttcccatcgtcaggcatgtgaaactattgaaccttcctgctagcctccggccacacaaaatgaaaagcttgctgggtcagaacgtgtcaaccaaaagtcctttcatctattcaccaattatcgcacacaaccgtggagaagagcggaacaagaaaatagatttccagtgggttcaaggagatgtgtgtgaagttcagctgatggtatataacccaatgccgtttgaacttcgagttgaaaacatggggctgctcaccagcggagtggagttcgagtctctccctgcggcgctttctcttccggctgaatctggtctgtacccagtgacgctcgtcggggtcccgcagacgactggaacgattactgtgaacggttaccataccacggtcttcggtgtgttcagtgactgtttgctggataacctgccgggaataaaaaccagtggctccacagtggaagtcattcccgcgttgccaagactgcagatcagcacctctctgcccagatctgcacattcattgcaaccttcttctggtgatgaaatatctactaatgtatctgtccagctttacaatggagaaagtcagcaactaatcattaaattggaaaatattggaatggaaccattggagaaactggaggtcacctcgaaagttctcaccactaaagaaaaattgtatggcgacttcttgagctggaagctagaggaaacccttgcccagttccctttgcagcctgggaaggtggccacgttcacaatcaacatcaaagtgaagctggatttctcctgccaggagaatctcctgcaggatctcagtgatgatggaatcagtgtgagtggctttcccctgtccagtccttttcggcaggtcgttcggccccgagtggagggcaaacctgtgaacccacccgagagcaacaaagcaggcgactacagccacgtgaagaccctggaagctgtcctgaatttcaaatactctggaggcccgggccacactgaaggatattacaggaatctctccctggggctgcatgtagaagtcgagccgtctgtatttttcacccgagtcagcaccctcccagcaaccagtacccggcagtgtcacctgctcctggatgtcttcaactccaccgagcatgagctgaccgtcagcaccaggagcagcgaggcactcatcctgcacgccggcgagtgccagcgaatggctattcaagtggacaagttcaactttgagagtttcccggagtcccctggggagaaggggcaatttgcaaaccccaagcagctggaggaagagcggcgggaagcccgaggcctggagatccacagcaagctgggcatctgctggagaatcccctccctgaagcgcagtggcgaggcgagtgtggaaggactcctgaaccagctcgtcctggagcacctgcagctggcgcctctgcagtgggatgtgctggtggacggacagccatgtgaccgcgaggctgtggcggcctgccaggtgggcgaccccgtgcgcctggaggtgcggctgaccaaccggagcccgcgcagcgtagggcccttcgccctcactgtggtccccttccaggaccaccagaacggcgtgcacaactacgacctgcacgacaccgtctccttcgtgggctccagcaccttctacctcgacgcggtgcagccgtccggccagtcggcctgcctcggggccctcctcttcctctacacgggagacttcttcctccacatccggttccacgaggacagcaccagcaaggagctgccaccctcttggttctgcctgcccagtgtgcacgtgtgtgccctggaggcgcaggcctgagcccgcctacttccgtccctctttctgcagggccagaggtgaccctgcctggcctcccacaccccctgcaatgagcaaggccttcactgcagccccatctcctcctcctcccccagacccctcccagccctctcctcctgttcctcctgtagcatctttgctgggctacgcagaagccccggacatggcagccccaccccatgccacgccccttcctacactgttccctggaccatacacaggctgaagcagaggaaatcccaaagcgggtgcccatccagcccaggtcccaggatccctgcacccatttctgtgacctggggccccagccgtgctgtgctgctcatcccagcagagggacctccctcgtccagcgacttccctttggccatagaaagaaatggtgagcatgagactgggcacagcctgagggcgtgggcagcttcccaccctccctgggccttggaatcccccaaggctggttttcttcctggagacccccatgggcaacttggcaggagagatggtgccgtaggaggtcgtggatggttgatgccaagagaggccctccacccgtggtgggcaaatgtccaggcctgggctggcagcccagggctgtttctgggtgctccctggccccagggtggcgtctggttaccatggctgtgtgtgtccatgtctgcaagcagttcttcaataaatggcctgcctccccc

SEQ ID NO: 299170 - DNA, 4263 bp, Homo sapiens
  misc_feature (15)..(15): n is a, c, g, or t
gctcggccgccagtnggaagcgccagcccagagcctgggaagtggccgcagaggctgctcggccccgctgcccgccaggtcgtgggctcccgctccgggcccggggccaccggctgtggacttcaaaatgagcgtccctgactacatgcagtgtgctgaggaccaccagacgctgctcgtggtggtccagcctgtgggcatcgtctccgaggagaacttcttcaggatctataagaggatttgctctgtgagtcagatcagcgtgcgggactcccagcgagtcctctacatccgctacaggcaccactacccacccgagaacaacgagtggggtgacttccagacccaccgcaaagtcgtgggcctcatcaccatcacagactgcttctcggccaaggactggccacagacctttgagaagttccacgtgcagaaggagatctacggctccacactgtatgactcccggctctttgtcttcgggctgcagggggagatcgtggagcagccgcgcaccgacgtggctttctaccccaactacgaggactgccagacggtggagaagagaatcgaggacttcatcgagtcactgttcatcgtgctggagtccaagcgtctggacagagccacagacaagtctggggataagatcccccttctctgtgtcccgtttgagaaaaaggactttgtaggactggacacagacagcagacattacaagaagcggtgccaaggccgcatgcggaagcacgtgggggacctgtgcctgcaggcagggatgctgcaggactccctggtgcattaccacatgtcggtggagctgctgcgttctgtgaatgactttctgtggcttggagctgccctggaaggattgtgttcagcttctgtcatctatcactatcctggtggaactggtgggaagagtggagctcggaggttccagggcagcacccttcctgctgaagcagccaatagacaccggccaggtgccctcaccaccaatggcatcaaccctgacaccagtactgagatcggacgtgctaagaactgccttagccctgaagacataattgacaagtataaagaggcgatttcctattacagcaagtataagaatgcgggagtgattgagttggaagcgtgcatcaaggctgtacgtgtccttgcaattcagaaacggagcatggaagcatcagaatttcttcagaatgcagtttacattaaccttcgacagctttctgaggaagagaaaattcagcgctacagcatcctctccgagctctatgagctgatcggcttccatcgcaagtctgcgttcttcaagcgcgtggccgccatgcagtgcgtggccccaagcatcgcggagcctgggtggagggcctgctacaaactcctcctggaaacgctgcccggctacagtctgtcgctggatcccaaagatttcagcagaggcacgcacagaggctgggctgcggtccagatgcgtttgctccatgaattggtctacgcctcccgaaggatggggaaccctgccctctctgtcagacacctgtccttccttctacagaccatgctggacttcttgtcggatcaggaaaagaaagatgtggcccaaagcctagagaactatacgtccaagtgtcctgggaccatggagcccatcgccctccctggcggcctcaccctgccaccggtgcccttcaccaagcttcccatcgtcaggcatgtgaaactattgaaccttcctgctagcctccggccacacaaaatgaaaagcttgctgggtcagaacgtgtcaaccaaaagtcctttcatctattcaccaattatcgcacacaaccgtggagaagagcggaacaagaaaatagatttccagtgggttcaaggagatgtgtgtgaagttcagctgatggtatataacccaatgccgtttgaacttcgagttgaaaacatggggctgctcaccagcggagtggagttcgagtctctccctgcggcgctttctcttccggctgaatctggtctgtacccagtgacgctcgtcggggtcccgcagacgactggaacgattactgtgaacggttaccataccacggtcttcggtgtgttcagtgactgtttgctggataacctgccgggaataaaaaccagtggctccacagtggaagtcattcccgcgttgccaagactgcagatcagcacctctctgcccagatctgcacattcattgcaaccttcttctggtgatgaaatatctactaatgtatctgtccagctttacaatggagaaagtcagcaactaatcattaaattggaaaatattggaatggaaccattggagaaactggaggtcacctcgaaagttctcaccactaaagaaaaattgtatggcgacttcttgagctggaagctagaggaaacccttgcccagttccctttgcagcctgggaaggtggccacgttcacaatcaacatcaaagtgaagctggatttctcctgccaggagaatctcctgcaggatctcagtgatgatggaatcagtgtgagtggctttcccctgtccagtccttttcggcaggtcgttcggccccgagtggagggcaaacctgtgaacccacccgagagcaacaaagcaggcgactacagccacgtgaagaccctggaagctgtcctgaatttcaaatactctggaggcccgggccacactgaaggatattacaggaatctctccctggggctgcatgtagaagtcgagccgtctgtatttttcacccgagtcagcaccctcccagcaaccagtacccggcagtgtcacctgctcctggatgtcttcaactccaccgagcatgagctgaccgtcagcaccaggagcagcgaggcactcatcctgcacgccggcgagtgccagcgaatggctattcaagtggacaagttcaactttgagagtttcccggagtcccctggggagaaggggcaatttgcaaaccccaagcagctggaggaagagcggcgggaagcccgaggcctggagatccacagcaagctgggcatctgctggagaatcccctccctgaagcgcagtggcgaggcgagtgtggaaggactcctgaaccagctcgtcctggagcacctgcagctggcgcctctgcagtgggatgtgctggtggacggacagccatgtgaccgcgaggctgtggcggcctgccaggtgggcgaccccgtgcgcctggaggtgcggctgaccaaccggagcccgcgcagcgtagggcccttcgccctcactgtggtccccttccaggaccaccagaacggcgtgcacaactacgacctgcacgacaccgtctccttcgtgggctccagcaccttctacctcgacgcggtgcagccgtccggccagtcggcctgcctcggggccctcctcttcctctacacgggagacttcttcctccacatccggttccacgaggacagcaccagcaaggagctgccaccctcttggttctgcctgcccagtgtgcacgtgtgtgccctggaggcgcaggcctgagcccgcctacttccgtccctctttctgcagggccagaggtgaccctgcctggcctcccacaccccctgcaatgagcaaggccttcactgcagccccatctcctcctcctcccccagacccctcccagccctctcctcctgttcctcctgtagcatctttgctgggctacgcagaagccccggacatggcagccccaccccatgccacgccccttcctacactgttccctggaccatacacaggctgaagcagaggaaatcccaaagcgggtgcccatccagcccaggtcccaggatccctgcacccatttctgtgacctggggccccagccgtgctgtgctgctcatcccagcagagggacctccctcgtccagcgacttccctttggccatagaaagaaatggtgagcatgagactgggcacagcctgagggcgtgggcagcttcccaccctccctgggccttggaatcccccaaggctggttttcttcctggagacccccatgggcaacttggcaggagagatggtgccgtaggaggtcgtggatggttgatgccaagagaggccctccacccgtggtgggcaaatgtccaggcctgggctggcagcccagggctgtttctgggtgctccctggccccagggtggcgtctggttaccatggctgtgtgtgtccatgtctgcaagcagttcttcaataaatggcctgcctccccc

SEQ ID NO: 299171 - DNA, 4252 bp, Homo sapiens
ttacgggcctcgtcgatccgggcctccgccgtatgatgcggggtcggccccgaatgtccgccatgtcgtgggctcccgctcctgggccctggggccacctggatgtggacttcaaaatgagcgtccctgactacatgcagtgtgctgaggaccaccagacgctgctcgtggtggtccagcctgtgggcatcgtctccgaggagaacttcttcaggatctataagaggatttgctctgtgagtcagatcagcgtgcgggactcccagcgagtcctctacatccgctacaggcaccactacccacccgagaacaacgagtggggtgacttccagacccaccgcaaagtcgtgggcctcatcaccatcacagactgcttctcggccaaggactggccacagacctttgagaagttccacgtgcagaaggagatctacggctccacactgtatgactcccggctctttgtcttcgggctgcagggggagatcgtggagcagccgcgcaccgacgtggctttctaccccaactacgaggactgccagacggtggagaagagaatcgaggacttcatcgagtcactgttcatcgtgctggagtccaagcgtctggacagagccacagacaagtctggggataagatcccccttctctgtgtcccgtttgagaaaaaggactttgtaggactggacacagacagcagacattacaagaagcggtgccaaggccgcatgcggaagcacgtgggggacctgtgcctgcaggcagggatgctgcaggactccctggtgcattaccacatgtcggtggagctgctgcgttctgtgaatgactttctgtggcttggagctgccctggaaggattgtgttcagcttctgtcatctatcactatcctggtggaactggtgggaagagtggagctcggaggttccagggcagcacccttcctgctgaagcagccaatagacaccggccaggtgccctcaccaccaatggcatcaaccctgacaccagtactgagatcggacgtgctaagaactgccttagccctgaagacataattgacaagtataaagaggcgatttcctattacagcaagtataagaatgcgggagtgattgagttggaagcgtgcatcaaggctgtacgtgtccttgcaattcagaaacggagcatggaagcatcagaatttcttcagaatgcagtttacattaaccttcgacagctttctgaggaagagaaaattcagcgctacagcatcctctccgagctctatgagctgatcggcttccatcgcaagtctgcgttcttcaagcgcgtggccgccatgcagtgcgtggccccaagcatcgcggagcctgggtggagggcctgctacaaactcctcctggaaacgctgcccggctacagtctgtcgctggatcccaaagatttcagcagaggcacgcacagaggctgggctgcggtccagatgcgtttgctccatgaattggtctacgcctcccgaaggatggggaaccctgccctctctgtcagacacctgtccttccttctacagaccatgctggacttcttgtcggatcaggaaaagaaagatgtggcccaaagcctagagaactatacgtccaagtgtcctgggaccatggagcccatcgccctccctggcggcctcaccctgccaccggtgcccttcaccaagcttcccatcgtcaggcatgtgaaactattgaaccttcctgctagcctccggccacacaaaatgaaaagcttgctgggtcagaacgtgtcaaccaaaagtcctttcatctattcaccaattatcgcacacaaccgtggagaagagcggaacaagaaaatagatttccagtgggttcaaggagatgtgtgtgaagttcagctgatggtatataacccaatgccgtttgaacttcgagttgaaaacatggggctgctcaccagcggagtggagttcgagtctctccctgcggcgctttctcttccggctgaatctggtctgtacccagtgacgctcgtcggggtcccgcagacgactggaacgattactgtgaacggttaccataccacggtcttcggtgtgttcagtgactgtttgctggataacctgccgggaataaaaaccagtggctccacagtggaagtcattcccgcgttgccaagactgcagatcagcacctctctgcccagatctgcacattcattgcaaccttcttctggtgatgaaatatctactaatgtatctgtccagctttacaatggagaaagtcagcaactaatcattaaattggaaaatattggaatggaaccattggagaaactggaggtcacctcgaaagttctcaccactaaagaaaaattgtatggcgacttcttgagctggaagctagaggaaacccttgcccagttccctttgcagcctgggaaggtggccacgttcacaatcaacatcaaagtgaagctggatttctcctgccaggagaatctcctgcaggatctcagtgatgatggaatcagtgtgagtggctttcccctgtccagtccttttcggcaggtcgttcggccccgagtggagggcaaacctgtgaacccacccgagagcaacaaagcaggcgactacagccacgtgaagaccctggaagctgtcctgaatttcaaatactctggaggcccgggccacactgaaggatattacaggaatctctccctggggctgcatgtagaagtcgagccgtctgtatttttcacccgagtcagcaccctcccagcaaccagtacccggcagtgtcacctgctcctggatgtcttcaactccaccgagcatgagctgaccgtcagcaccaggagcagcgaggcactcatcctgcacgccggcgagtgccagcgaatggctattcaagtggacaagttcaactttgagagtttcccggagtcccctggggagaaggggcaatttgcaaaccccaagcagctggaggaagagcggcgggaagcccgaggcctggagatccacagcaagctgggcatctgctggagaatcccctccctgaagcgcagtggcgaggcgagtgtggaaggactcctgaaccagctcgtcctggagcacctgcagctggcgcctctgcagtgggatgtgctggtggacggacagccatgtgaccgcgaggctgtggcggcctgccaggtgggcgaccccgtgcgcctggaggtgcggctgaccaaccggagcccgcgcagcgtagggcccttcgccctcactgtggtccccttccaggaccaccagaacggcgtgcacaactacgacctgcacgacaccgtctccttcgtgggctccagcaccttctacctcgacgcggtgcagccgtccggccagtcggcctgcctcggggccctcctcttcctctacacgggagacttcttcctccacatccggttccacgaggacagcaccagcaaggagctgccaccctcttggttctgcctgcccagtgtgcacgtgtgtgccctggaggcgcaggcctgagcccgcctacttccgtccctctttctgcagggccagaggtgaccctgcctggcctcccacaccccctgcaatgagcaaggccttcactgcagccccatctcctcctcctcccccagacccctcccagccctctcctcctgttcctcctgtagcatctttgctgggctacgcagaagccccggacatggcagccccaccccatgccacgccccttcctacactgttccctggaccatacacaggctgaagcagaggaaatcccaaagcgggtgcccatccagcccaggtcccaggatccctgcacccatttctgtgacctggggccccagccgtgctgtgctgctcatcccagcagagggacctccctcgtccagcgacttccctttggccatagaaagaaatggtgagcatgagactgggcacagcctgagggcgtgggcagcttcccaccctccctgggccttggaatcccccaaggctggttttcttcctggagacccccatgggcaacttggcaggagagatggtgccgtaggaggtcgtggatggttgatgccaagagaggccctccacccgtggtgggcaaatgtccaggcctgggctggcagcccagggctgtttctgggtgctccctggccccagggtggcgtctggttaccatggctgtgtgtgtccatgtctgcaagcagttcttcaataaatggcctgcctccccc

SEQ ID NO: 299172 - DNA, 1677 bp, Homo sapiens
tgatttggttcccaggcttgctttgaagacatgctgtgtgctagagaaggctgggcctgaggagttggagaccctggaagctgtcctgaatttcaaatactctggaggcccgggccacactgaaggatattacaggaatctctccctggggctgcatgtagaagtcgagccgtctgtatttttcacccgagtcagcaccctcccagcaaccagtacccggcagtgtcacctgctcctggatgtcttcaactccaccgagcatgagctgaccgtcagcaccaggagcagcgaggcactcatcctgcacgccggcgagtgccagcgaatggctattcaagtggacaagttcaactttgagagtttcccggagtcccctggggagaaggggcaatttgcaaaccccaagcagctggaggaagagcggcgggaagcccgaggcctggagatccacagcaagctgggcatctgctggagaatcccctccctgaagcgcagtggcgaggcgagtgtggaaggactcctgaaccagctcgtcctggagcacctgcagctggcgcctctgcagtgggatgtgctggtggacggacagccatgtgaccgcgaggctgtggcggcctgccaggtgggcgaccccgtgcgcctggaggtgcggctgaccaaccggagcccgcgcagcgtagggcccttcgccctcactgtggtccccttccaggaccaccagaacggcgtgcacaactacgacctgcacgacaccgtctccttcgtgggctccagcaccttctacctcgacgcggtgcagccgtccggccagtcggcctgcctcggggccctcctcttcctctacacgggagacttcttcctccacatccggttccacgaggacagcaccagcaaggagctgccaccctcttggttctgcctgcccagtgtgcacgtgtgtgccctggaggcgcaggcctgagcccgcctacttccgtccctctttctgcagggccagaggtgaccctgcctggcctcccacaccccctgcaatgagcaaggccttcactgcagccccatctcctcctcctcccccagacccctcccagccctctcctcctgttcctcctgtagcatctttgctgggctacgcagaagccccggacatggcagccccaccccatgccacgccccttcctacactgttccctggaccatacacaggctgaagcagaggaaatcccaaagcgggtgcccatccagcccaggtcccaggatccctgcacccatttctgtgacctggggccccagccgtgctgtgctgctcatcccagcagagggacctccctcgtccagcgacttccctttggccatagaaagaaatggtgagcatgagactgggcacagcctgagggcgtgggcagcttcccaccctccctgggccttggaatcccccaaggctggttttcttcctggagacccccatgggcaacttggcaggagagatggtgccgtaggaggtcgtggatggttgatgccaagagaggccctccacccgtggtgggcaaatgtccaggcctgggctggcagcccagggctgtttctgggtgctccctggccccagggtggcgtctggttaccatggctgtgtgtgtccatgtctgcaagcagttcttcaataaatggcctgcctccccc

SEQ ID NO: 299173 - DNA, 1345 bp, Homo sapiens
  misc_feature (25)..(25): n is a, c, g, or t
agcaggcggtaccgtccgggagtanggatgtgaaaatgaggttcaacttgtcttaatatattctatcaggcaaaagaaacaaattccccagggaggggtagtccagctgctgccactcctggagtgagcctgtggacagtctctccagccagaggccaccagaggaacctcgggagggcaggaggctccttctgcagcaccacgtcgtttcttccccaggcttgctttttctgtttgatgtgctggtggacggacagccatgtgaccgcgaggctgtggcggcctgccaggtgggcgaccccgtgcgcctggaggtgcggctgaccaaccggagcccgcgcagcgtagggcccttcgccctcactgtggtccccttccaggaccaccagaacggcgtgcacaactacgacctgcacgacaccgtctccttcgtgggctccagcaccttctacctcgacgcggtgcagccgtccggccagtcggcctgcctcggggccctcctcttcctctacacgggagacttcttcctccacatccggttccacgaggacagcaccagcaaggagctgccaccctcttggttctgcctgcccagtgtgcacgtgtgtgccctggaggcgcaggcctgagcccgcctacttccgtccctctttctgcagggccagaggtgaccctgcctggcctcccacaccccctgcaatgagcaaggccttcactgcagccccatctcctcctcctcccccagacccctcccagccctctcctcctgttcctcctgtagcatctttgctgggctacgcagaagccccggacatggcagccccaccccatgccacgccccttcctacactgttccctggaccatacacaggctgaagcagaggaaatcccaaagcgggtgcccatccagcccaggtcccaggatccctgcacccatttctgtgacctggggccccagccgtgctgtgctgctcatcccagcagagggacctccctcgtccagcgacttccctttggccatagaaagaaatggtgagcatgagactgggcacagcctgagggcgtgggcagcttcccaccctccctgggccttggaatcccccaaggctggttttcttcctggagacccccatgggcaacttggcaggagagatggtgccgtaggaggtcgtggatggttgatgccaagagaggccctccacccgtggtgggcaaatgtccaggcctgggctggcagcccagggctgtttctgggtgctccctggccccagggtggcgtctggttaccatggctgtgtgtgtccatgtctgcaagcagttcttcaataaatggcctgcctccccc

SEQ ID NO: 299174 - DNA, 1795 bp, Homo sapiens
  misc_feature (15)..(15): n is a, c, g, or t
gctcggccgccagtnggaagcgccagcccagagcctgggaagtggccgcagaggctgctcggccccgctgcccgccaggtcgtgggctcccgctccgggcccggggccaccggctgtggacttcaaaatgagcgtccctgactacatgcagtgtgctgaggaccaccagacgctgctcgtggtggtccagcctgtgggcatcgtctccgaggagaacttcttcaggatctataagaggatttgctctgtgagtcagatcagcgtgcgggactcccagcgagtcctctacatccgctacaggcaccactacccacccgagaacaacgagtggggtgacttccagacccaccgcaaagtcgtgggcctcatcaccatcacagactgcttctcggccaaggactggccacagacctttgagaagttccacgtgcagaaggagatctacggctccacactgtatgactcccggctctttgtcttcgggctgcagggggagatcgtggagcagccgcgcaccgacgtggctttctaccccaactacgaggactgccagacggtggagaagagaatcgaggacttcatcgagtcactgttcatcgtgctggagtccaagcgtctggacagagccacagacaagtctggggataagatcccccttctctgtgtcccgtttgagaaaaaggactttgtaggactggacacagacagcagacattacaagaagcggtgccaaggccgcatgcggaagcacgtgggggacctgtgcctgcaggcagggatgctgcaggactccctggtgcattaccacatgtcggtggagctgctgcgttctgtgaatgactttctgtggcttggagctgccctggaaggattgtgttcagcttctgtcatctatcactatcctggtggaactggtgggaagagtggagctcggaggttccagggcagcacccttcctgctgaagcagccaatagacaccggccaggggcacaggaagttctcattgatccaggtgccctcaccaccaatggcatcaaccctgacaccagtactgagatcggacgtgctaagaactgccttagccctgaagacataattgacaagtataaagaggcgatttcctattacagcaagtataagaatgcgggagtgattgagttggaagcgtgcatcaaggctgtacgtgtccttgcaattcagaaacggagcatggaagcatcagaatttcttcagaatgcagtttacattaaccttcgacagctttctgaggaagagaaaattcagcgctacagcatcctctccgagctctatgagctgatcggcttccatcgcaagtctgcgttcttcaagcgcgtggccgccatgcagtgcgtggccccaagcatcgcggagcctgggtggagggcctgctacaaactcctcctggaaacgctgcccggctacagtctgtcgctggatcccaaagatttcagcagaggcacgcacagaggctgggctgcggtccagatgcgtttgctccatgaattggtctacgcctcccgaaggatggggaaccctgccctctctgtcagacacctgtccttccttctacagaccatgctggacttcttgtcggatcaggaaaagaaagatgtggcccaaagcctagagaactatacgtccaaatgtccaggcctgggctggcagcccagggctgtttctgggtgctccctggccccagggtggcgtctggttaccatggctgtgtgtgtccatgtctgcaagcagttcttcaataaatggcctgcctccccc

SEQ ID NO: 299175 - DNA, 430 bp, Homo sapiens
gcatagagagatggttagcagttggtaggccagctctttttttcataactaaagaaaggtagccttgcctttgttagggtggtggtttgagacgcagcacttcagccatctgaggacagtcatcagatgtgggtgagtgacttcatcatgagaccagagcaggtctatttgctagtttggaggacataattcccgcttcagcaggttgttaggcagctcaggtggtataaagggtggataggagatggggcgcttaccacatgtgatgctctgtaaatgagtgctgagcaaaccaattggcagtcagatctatttttgttaaattattaaggtttgaacagaaaatacatctggatctaaaggaattcggattccctaaaaagactagtgaaaatgaggttcaacttgtcttaatatattctatcaggca

SEQ ID NO: 299176 - DNA, 501 bp, Homo sapiens
gctgcccggctacagtctgtcgctggatcccaaagatttcagcagaggtactggagtccccttgctggcgctaaggtgttgctttctgtctgatggtcacatgctgtttcagcccctgccctgagtggcagacatcgtggttggtgctggtggctccagaatgactagatccctgccctggagttgggtgcctgctgtaatccgattataggaaaaagtactggtgctttgccttggggctcggattcttgaatctttatcagtgggagtcagaaattgcctttgagttcattggcatggtgtgtcatcatcaatcaaacagtggaagtacctaatgaattttactcatgagatttagttagtttagcacaaatcaatgaacccagaataaatatccttgggtatatgtgtatacctgagctatgcattcagcagtaaattcttattctgaaatattaatgcagggtaatatgtattaaaaataaagctatcaatctaata

SEQ ID NO: 299177 - DNA, 446 bp, Homo sapiens
agctgtttgagaggctgaacccatgaggtcgaggctgcacccatgaggtcgaggctgcagtgagctatggtcatgccagtgcactccagcctgggtgacagagtgagaccctgtctcaaaaaaggaaacaaatcacccataaatggataattaagatttggttattatagacacttaatacttaggtagctaaggtagttttaccaataaattatattaatttaatatttcagtattggcaaaactgatgcatactcatttacaattttgacatggaatggttctgttttgttttattaaatttgaacttaaaagttctctgcaagaagagatttgtataataaattccctgagcctctcaaattaatattttagccatagactcatatttagagcagtgtttctaatgtaatgatacaaggcccagggttattcatagtttcacc

SEQ ID NO: 299178 - DNA, 339 bp, Homo sapiens
gcatctggtcctgaggggttagggacatcccctaagggtataccctggctttgccacccatgaaccagctcagcatacagccagtgagtgggcacccaatgcctctcaggatgagaccagtaaatgtcgcaggtgaagttggccagctgtggagccacaggccacaggccagtctagcttggctcccccctccattcccacccctcatacctacacccaaggttgtcagctttggattgctggggccaggccccatggagggtatactgaggggtctataggtttgtgattaaaataataaaagctaggcgtgtttgatgcgcttttaactttggcaaa

SEQ ID NO: 299179 - DNA, 438 bp, Homo sapiens
actctttcttcctctcctcccctctccaaagttgagcgtcgcaggcgattcaacattaacgacaggatcaaggaactgggcactctcatccctaagtccagtgacccgtgagtctgggctgggaccctcaggccagcgggaggtggggcaggcgtcccatgctactaaaattgtgccttggtgggctcaccaggcagtctcggcccaggcatttctcctctgtctggttctttctcagcctgagcagggttgcagaccctcactatgtcagcacctaaaattttaggcacataatgttatggtctgtgtgccccatctggtccccgtaggatatatgcacctacttttctgttcacttagtacttcctttttttttttcttttttttgagatggagcctgggtgacagagcgagactccatcccccaccgccccgcaa

SEQ ID NO: 299180 - DNA, 3420 bp, Homo sapiens
gggaggagggggaagaagacgagggggaggagggcggtcgtccggggttaggttgagggggggcgtcggtccgttctgggcgggggatgactcacagcccatcccatctccccgacgccgcccgcccgcgcagtgctagctccatggcttagcggaggaggcggcagtggcgagctggggggaggggggactcttattttgttagggggaccgggccgaggcccgaccggcctggcagggctcgcccggggccgggcgtcatgtctcatgcggccgaaccagctcgggatggcgtagaggccagcgcggagggccctcgagccgtgttcgtgctgttggaggagcgcaggccggccgactcggctcagctgctcagcctgaactctttgcttccggaatccgggattgttgctgacatagaattagaaaacgtccttgatcctgacagcttctacgagctcaaaagccaacccttaccccttcgctcaagcctcccaatatcactgcaggccacaccagccaccccagctacactctctgcatcgtcttctgcagggggctccaggacccctgccatgtcgtcatcttcttcatcgagggtcttgctgcggcagcagctaatgcgggcccaggcgcaggagcaggagaggcgtgagcgtcgggaacaggccgccgcggctcccttccccagtcctgcacctgcctctcctgccatctctgtggttggcgtctctgctgggggccacacattgagccgtccaccccctgctcaggtgcccagggaggtgctcaaggtgcagacccatctggagaacccaacgcgctaccacctgcagcaggcgcgccggcagcaggtgaaacagtacctgtccaccacactcgggcccaagctggcttcccaggccctcaccccaccgccggggcccgcaagtgcccagccactgcctgcccctgaggctgcccacactaccggccccacaggcagtgcgcccaacagccccatggcgctgctcaccatcgggtccagctcagagaaggagattgatgatgtcattgatgagatcatcagcctggagtccagttacaatgatgaaatgctcagctatctgcccggaggcaccacaggactgcagctccccagcacgctgcctgtgtcagggaatctgcttgatgtgtacagtagtcaaggcgtggccacaccagccatcactgtcagcaactcctgcccagctgagctgcccaacatcaaacgggagatctctgagaccgaggcaaaggcccttttgaaggaacggcagaagaaagacaatcacaacctaattgagcgtcgcaggcgattcaacattaacgacaggatcaaggaactgggcactctcatccctaagtccagtgacccggagatgcgctggaacaagggcaccatcctgaaggcctctgtggattatatccgcaagctgcagaaggagcagcagcgctccaaagacctggagagccggcagcgatccctggagcaggccaaccgcagcctgcagctccgaattcaggaactagaactgcaggcccagatccatggcctgccagtacctcccactccagggctgctttccttggccacgacttcggcttctgacagcctcaagccagagcagctggacattgaggaggagggcaggccaggcgcagcaacgttccatgtaggggggggacctgcccagaatgctccccatcagcagccccctgcaccgccctcagatgcccttctggacctgcactttcccagcgaccacctgggggacctgggagaccccttccacctggggctggaggacattctgatggaggaggaggagggggtggtgggaggactgtcggggggtgccctgtccccactgcgggctgcctccgatcccctgctctcttcagtgtcccctgctgtctccaaggccagcagccgccgcagcagcttcagcatggaagaggagtcctgatcaggcctcacccctcccctgggactttcccacccaggaaaggaggaccagtcaggatgaggccccgccttttcccccaccctcccatgagactgccctgcccaggtatcctgggggaagaggagatgtgatcaggccccacccctgtaatcaggcaaggaggaggagtcagatgaggccctgcaccttccccaaaggaaccgcccagtgcaggtatttcagaaggagaaggctggagaaggacatgagatcagggcctgccccctggggatcacagcctcacccctgcccctgtgggactcatccttgcccaggtgagggaaggagacaggatgaggtctcgaccctgtcccctagggactgtcctagccaggtctcctgggaaagggagatgtcaggatgttgctccatcctttgtcttggaaccaccagtctagtccgtcctggcacagaagaggagtcaagtaatggaggtcccagccctgggggtttaagctctgccccttccccatgaaccctgccctgctctgcccaggcaaggaacagaagtgaggatgagacccagccccttcccctgggaactctcctggccttctaggaatggaggagccaggccccaccccttccctataggaacagcccagcacaggtatttcaggtgtgaaagaatcagtaggaccaggccaccgctagtgcttgtggagatcacagccccacccttgtccctcagcaacatcccatctaagcattccacactgcagggaggagtggtacttaagctcccctgccttaacctgggaccaacctgacctaacctaggagggctctgagccaaccttgctcttggggaaggggacagattatgaaatttcatggatgaattttccagacctatatctggagtgagaggcccccacccttgggcagagtcctgccttcttccttgaggggcagtttgggaaggtgatgggtattagtgggggactgagttcaggttaccagaaccagtacctcagtattctttttcaacatgtagggcaagaggatgaaggaaggggctatcctgggacctccccagcccaggaaaaactggaagccttcccccagcaaggcagaagcttggaggagggttgtaaaagcatattgtaccccctcatttgtttatctgatttttttattgctccgcatactgagaatctaggccaccccaacctctgttccccacccagttcttcatttggaggaatcaccccatttcagagttatcaagagacactcccccctccattcccacccctcatacctacacccaaggttgtcagctttggattgctggggccaggccccatggagggtatactgaggggtctataggtttgtgattaaaataataaaagctaggcgtgtttgatgcgcttttaactttggcaaa

SEQ ID NO: 299181 - DNA, 3550 bp, Homo sapiens
  misc_feature (3434)..(3434): n is a, c, g, or t
  misc_feature (3438)..(3438): n is a, c, g, or t
  misc_feature (3441)..(3441): n is a, c, g, or t
gggaggagggggaagaagacgagggggaggagggcggtcgtccggggttaggttgagggggggcgtcggtccgttctgggcgggggatgactcacagcccatcccatctccccgacgccgcccgcccgcgcagtgctagctccatggcttagcggaggaggcggcagtggcgagctggggggaggggggactcttattttgttagggggaccgggccgaggcccgaccggcctggcagggctcgcccggggccgggcgtcatgtctcatgcggccgaaccagctcgggatggcgtagaggccagcgcggagggccctcgagccgtgttcgtgctgttggaggagcgcaggccggccgactcggctcagctgctcagcctgaactctttgcttccggaatccgggattgttgctgacatagaattagaaaacgtccttgatcctgacagcttctacgagctcaaaagccaacccttaccccttcgctcaagcctcccaatatcactgcaggccacaccagccaccccagctacactctctgcatcgtcttctgcagggggctccaggacccctgccatgtcgtcatcttcttcatcgagggtcttgctgcggcagcagctaatgcgggcccaggcgcaggagcaggagaggcgtgagcgtcgggaacaggccgccgcggctcccttccccagtcctgcacctgcctctcctgccatctctgtggttggcgtctctgctgggggccacacattgagccgtccaccccctgctcaggtgcccagggaggtgctcaaggtgcagacccatctggagaacccaacgcgctaccacctgcagcaggcgcgccggcagcaggtgaaacagtacctgtccaccacactcgggcccaagctggcttcccaggccctcaccccaccgccggggcccgcaagtgcccagccactgcctgcccctgaggctgcccacactaccggccccacaggcagtgcgcccaacagccccatggcgctgctcaccatcgggtccagctcagagaaggagattgatgatgtcattgatgagatcatcagcctggagtccagttacaatgatgaaatgctcagctatctgcccggaggcaccacaggactgcagctccccagcacgctgcctgtgtcagggaatctgcttgatgtgtacagtagtcaaggcgtggccacaccagccatcactgtcagcaactcctgcccagctgagctgcccaacatcaaacgggagatctctgagaccgaggcaaaggcccttttgaaggaacggcagaagaaagacaatcacaacctaattgagcgtcgcaggcgattcaacattaacgacaggatcaaggaactgggcactctcatccctaagtccagtgacccggagatgcgctggaacaagggcaccatcctgaaggcctctgtggattatatccgcaagctgcagaaggagcagcagcgctccaaagacctggagagccggcagcgatccctggagcaggccaaccgcagcctgcagctccgaattcaggaactagaactgcaggcccagatccatggcctgccagtacctcccactccagggctgctttccttggccacgacttcggcttctgacagcctcaagccagagcagctggacattgaggaggagggcaggccaggcgcagcaacgttccatgtaggggggggacctgcccagaatgctccccatcagcagccccctgcaccgccctcagatgcccttctggacctgcactttcccagcgaccacctgggggacctgggagaccccttccacctggggctggaggacattctgatggaggaggaggagggggtggtgggaggactgtcggggggtgccctgtccccactgcgggctgcctccgatcccctgctctcttcagtgtcccctgctgtctccaaggccagcagccgccgcagcagcttcagcatggaagaggagtcctgatcaggcctcacccctcccctgggactttcccacccaggaaaggaggaccagtcaggatgaggccccgccttttcccccaccctcccatgagactgccctgcccaggtatcctgggggaagaggagatgtgatcaggccccacccctgtaatcaggcaaggaggaggagtcagatgaggccctgcaccttccccaaaggaaccgcccagtgcaggtatttcagaaggagaaggctggagaaggacatgagatcagggcctgccccctggggatcacagcctcacccctgcccctgtgggactcatccttgcccaggtgagggaaggagacaggatgaggtctcgaccctgtcccctagggactgtcctagccaggtctcctgggaaagggagatgtcaggatgttgctccatcctttgtcttggaaccaccagtctagtccgtcctggcacagaagaggagtcaagtaatggaggtcccagccctgggggtttaagctctgccccttccccatgaaccctgccctgctctgcccaggcaaggaacagaagtgaggatgagacccagccccttcccctgggaactctcctggccttctaggaatggaggagccaggccccaccccttccctataggaacagcccagcacaggtatttcaggtgtgaaagaatcagtaggaccaggccaccgctagtgcttgtggagatcacagccccacccttgtccctcagcaacatcccatctaagcattccacactgcagggaggagtggtacttaagctcccctgccttaacctgggaccaacctgacctaacctaggagggctctgagccaaccttgctcttggggaaggggacagattatgaaatttcatggatgaattttccagacctatatctggagtgagaggcccccacccttgggcagagtcctgccttcttccttgaggggcagtttgggaaggtgatgggtattagtgggggactgagttcaggttaccagaaccagtacctcagtattctttttcaacatgtagggcaagaggatgaaggaaggggctatcctgggacctccccagcccaggaaaaactggaagccttcccccagcaaggcagaagcttggaggagggttgtaaaagcatattgtaccccctcatttgtttatctgatttttttattgctccgcatactgagaatctaggccaccccaacctctgttccccacccagttcttcatttggaggaatcaccccatttcagagttatcaagagacactcccccctccattcccacccctcatacctacacccaaggttgtcagctttggattgctggggccaggccccatggagggtatactgaggggtctataggtttgtgattaaaataataaaagctaggcgtgtttgatgcgcttttaactttggcaaaaaaaaaaaacaaanacanaanacaaacaagagaagacaaacacacaaacaaaacacaaagggggggggcaaaaactcccgggcgacaaacacacccttgagaaaggccaaagggaaaaaaacgagggcac

SEQ ID NO: 299182 - DNA, 3354 bp, Homo sapiens
tatttcattcacgggccgggcagtatagttgacgttacatggcccttggtccaacaattgcacgtcggtccgttctgggcgggggatgactcacagcccatcccatctccccgacgccgcccgcccgcgcagtgctagctccatggcttagcggaggaggcggcagtggcgagctggggggaggggggactcttattttgttagggggaccgggccgaggcccgaccggcctggcagggctcgcccggggccgggcgtcatgtctcatgcggccgaaccagctcgggatggcgtagaggccagcgcggagggccctcgagccgtgttcgtgctgttggaggagcgcaggccggccgactcggctcagctgctcagcctgaactctttgcttccggaatccgggattgttgctgacatagaattagaaaacgtccttgatcctgacagcttctacgagctcaaaagccaacccttaccccttcgctcaagggggctccaggacccctgccatgtcgtcatcttcttcatcgagggtcttgctgcggcagcagctaatgcgggcccaggcgcaggagcaggagaggcgtgagcgtcgggaacaggccgccgcggctcccttccccagtcctgcacctgcctctcctgccatctctgtggttggcgtctctgctgggggccacacattgagccgtccaccccctgctcaggtgcccagggaggtgctcaaggtgcagacccatctggagaacccaacgcgctaccacctgcagcaggcgcgccggcagcaggtgaaacagtacctgtccaccacactcgggcccaagctggcttcccaggccctcaccccaccgccggggcccgcaagtgcccagccactgcctgcccctgaggctgcccacactaccggccccacaggcagtgcgcccaacagccccatggcgctgctcaccatcgggtccagctcagagaaggagattgatgatgtcattgatgagatcatcagcctggagtccagttacaatgatgaaatgctcagctatctgcccggaggcaccacaggactgcagctccccagcacgctgcctgtgtcagggaatctgcttgatgtgtacagtagtcaaggcgtggccacaccagccatcactgtcagcaactcctgcccagctgagctgcccaacatcaaacgggagatctctgagaccgaggcaaaggcccttttgaaggaacggcagaagaaagacaatcacaacctaattgagcgtcgcaggcgattcaacattaacgacaggatcaaggaactgggcactctcatccctaagtccagtgacccggagatgcgctggaacaagggcaccatcctgaaggcctctgtggattatatccgcaagctgcagaaggagcagcagcgctccaaagacctggagagccggcagcgatccctggagcaggccaaccgcagcctgcagctccgaattcaggaactagaactgcaggcccagatccatggcctgccagtacctcccactccagggctgctttccttggccacgacttcggcttctgacagcctcaagccagagcagctggacattgaggaggagggcaggccaggcgcagcaacgttccatgtaggggggggacctgcccagaatgctccccatcagcagccccctgcaccgccctcagatgcccttctggacctgcactttcccagcgaccacctgggggacctgggagaccccttccacctggggctggaggacattctgatggaggaggaggagggggtggtgggaggactgtcggggggtgccctgtccccactgcgggctgcctccgatcccctgctctcttcagtgtcccctgctgtctccaaggccagcagccgccgcagcagcttcagcatggaagaggagtcctgatcaggcctcacccctcccctgggactttcccacccaggaaaggaggaccagtcaggatgaggccccgccttttcccccaccctcccatgagactgccctgcccaggtatcctgggggaagaggagatgtgatcaggccccacccctgtaatcaggcaaggaggaggagtcagatgaggccctgcaccttccccaaaggaaccgcccagtgcaggtatttcagaaggagaaggctggagaaggacatgagatcagggcctgccccctggggatcacagcctcacccctgcccctgtgggactcatccttgcccaggtgagggaaggagacaggatgaggtctcgaccctgtcccctagggactgtcctagccaggtctcctgggaaagggagatgtcaggatgttgctccatcctttgtcttggaaccaccagtctagtccgtcctggcacagaagaggagtcaagtaatggaggtcccagccctgggggtttaagctctgccccttccccatgaaccctgccctgctctgcccaggcaaggaacagaagtgaggatgagacccagccccttcccctgggaactctcctggccttctaggaatggaggagccaggccccaccccttccctataggaacagcccagcacaggtatttcaggtgtgaaagaatcagtaggaccaggccaccgctagtgcttgtggagatcacagccccacccttgtccctcagcaacatcccatctaagcattccacactgcagggaggagtggtacttaagctcccctgccttaacctgggaccaacctgacctaacctaggagggctctgagccaaccttgctcttggggaaggggacagattatgaaatttcatggatgaattttccagacctatatctggagtgagaggcccccacccttgggcagagtcctgccttcttccttgaggggcagtttgggaaggtgatgggtattagtgggggactgagttcaggttaccagaaccagtacctcagtattctttttcaacatgtagggcaagaggatgaaggaaggggctatcctgggacctccccagcccaggaaaaactggaagccttcccccagcaaggcagaagcttggaggagggttgtaaaagcatattgtaccccctcatttgtttatctgatttttttattgctccgcatactgagaatctaggccaccccaacctctgttccccacccagttcttcatttggaggaatcaccccatttcagagttatcaagagacactcccccctccattcccacccctcatacctacacccaaggttgtcagctttggattgctggggccaggccccatggagggtatactgaggggtctataggtttgtgattaaaataataaaagctaggcgtgtttgatgcgcttttaactttggcaaa

SEQ ID NO: 299183 - DNA, 3419 bp, Homo sapiens
tatttcattcacgggccgggcagtatagttgacgttacatggcccttggtccaacaattgcacgtcggtccgttctgggcgggggatgactcacagcccatcccatctccccgacgccgcccgcccgcgcagtgctagctccatggcttagcggaggaggcggcagtggcgagctggggggaggggggactcttattttgttagggggaccgggccgaggcccgaccggcctggcagggctcgcccggggccgggcgtcatgtctcatgcggccgaaccagctcgggatggcgtagaggccagcgcggagggccctcgagccgtgttcgtgctgttggaggagcgcaggccggccgactcggctcagctgctcagcctgaactctttgcttccggaatccgggattgttgctgacatagaattagaaaacgtccttgatcctgacagcttctacgagctcaaaagccaacccttaccccttcgctcaagcctcccaatatcactgcaggccacaccagccaccccagctacactctctgcatcgtcttctgcagggggctccaggacccctgccatgtcgtcatcttcttcatcgagggtcttgctgcggcagcagctaatgcgggcccaggcgcaggagcaggagaggcgtgagcgtcgggaacaggccgccgcggctcccttccccagtcctgcacctgcctctcctgccatctctgtggttggcgtctctgctgggggccacacattgagccgtccaccccctgctcaggtgcccagggaggtgctcaaggtgcagacccatctggagaacccaacgcgctaccacctgcagcaggcgcgccggcagcaggtgaaacagtacctgtccaccacactcgggcccaagctggcttcccaggccctcaccccaccgccggggcccgcaagtgcccagccactgcctgcccctgaggctgcccacactaccggccccacaggcagtgcgcccaacagccccatggcgctgctcaccatcgggtccagctcagagaaggagattgatgatgtcattgatgagatcatcagcctggagtccagttacaatgatgaaatgctcagctatctgcccggaggcaccacaggactgcagctccccagcacgctgcctgtgtcagggaatctgcttgatgtgtacagtagtcaaggcgtggccacaccagccatcactgtcagcaactcctgcccagctgagctgcccaacatcaaacgggagatctctgagaccgaggcaaaggcccttttgaaggaacggcagaagaaagacaatcacaacctaattgagcgtcgcaggcgattcaacattaacgacaggatcaaggaactgggcactctcatccctaagtccagtgacccggagatgcgctggaacaagggcaccatcctgaaggcctctgtggattatatccgcaagctgcagaaggagcagcagcgctccaaagacctggagagccggcagcgatccctggagcaggccaaccgcagcctgcagctccgaattcaggaactagaactgcaggcccagatccatggcctgccagtacctcccactccagggctgctttccttggccacgacttcggcttctgacagcctcaagccagagcagctggacattgaggaggagggcaggccaggcgcagcaacgttccatgtaggggggggacctgcccagaatgctccccatcagcagccccctgcaccgccctcagatgcccttctggacctgcactttcccagcgaccacctgggggacctgggagaccccttccacctggggctggaggacattctgatggaggaggaggagggggtggtgggaggactgtcggggggtgccctgtccccactgcgggctgcctccgatcccctgctctcttcagtgtcccctgctgtctccaaggccagcagccgccgcagcagcttcagcatggaagaggagtcctgatcaggcctcacccctcccctgggactttcccacccaggaaaggaggaccagtcaggatgaggccccgccttttcccccaccctcccatgagactgccctgcccaggtatcctgggggaagaggagatgtgatcaggccccacccctgtaatcaggcaaggaggaggagtcagatgaggccctgcaccttccccaaaggaaccgcccagtgcaggtatttcagaaggagaaggctggagaaggacatgagatcagggcctgccccctggggatcacagcctcacccctgcccctgtgggactcatccttgcccaggtgagggaaggagacaggatgaggtctcgaccctgtcccctagggactgtcctagccaggtctcctgggaaagggagatgtcaggatgttgctccatcctttgtcttggaaccaccagtctagtccgtcctggcacagaagaggagtcaagtaatggaggtcccagccctgggggtttaagctctgccccttccccatgaaccctgccctgctctgcccaggcaaggaacagaagtgaggatgagacccagccccttcccctgggaactctcctggccttctaggaatggaggagccaggccccaccccttccctataggaacagcccagcacaggtatttcaggtgtgaaagaatcagtaggaccaggccaccgctagtgcttgtggagatcacagccccacccttgtccctcagcaacatcccatctaagcattccacactgcagggaggagtggtacttaagctcccctgccttaacctgggaccaacctgacctaacctaggagggctctgagccaaccttgctcttggggaaggggacagattatgaaatttcatggatgaattttccagacctatatctggagtgagaggcccccacccttgggcagagtcctgccttcttccttgaggggcagtttgggaaggtgatgggtattagtgggggactgagttcaggttaccagaaccagtacctcagtattctttttcaacatgtagggcaagaggatgaaggaaggggctatcctgggacctccccagcccaggaaaaactggaagccttcccccagcaaggcagaagcttggaggagggttgtaaaagcatattgtaccccctcatttgtttatctgatttttttattgctccgcatactgagaatctaggccaccccaacctctgttccccacccagttcttcatttggaggaatcaccccatttcagagttatcaagagacactcccccctccattcccacccctcatacctacacccaaggttgtcagctttggattgctggggccaggccccatggagggtatactgaggggtctataggtttgtgattaaaataataaaagctaggcgtgtttgatgcgcttttaactttggcaaa

SEQ ID NO: 299184 - DNA, 3291 bp, Homo sapiens
ccaccggcaggttgtactccaccggcaggttgtactccaccggcaggttgtactccaccggcaggttgtactccaccggcaggttgtactcatggtggtgtggtacccagcaaggtggccaaatatgaggggcttgtaccctcctcttcgttctcccccgctctctgtctctttctctgtctcaggggagggctggggaataaggtccttcattcaatcactgaccaccactccacctccccctcagcctgaactctttgcttccggaatccgggattgttgctgacatagaattagaaaacgtccttgatcctgacagcttctacgagctcaaaagccaacccttaccccttcgctcaagcctcccaatatcactgcaggccacaccagccaccccagctacactctctgcatcgtcttctgcagggggctccaggacccctgccatgtcgtcatcttcttcatcgagggtcttgctgcggcagcagctaatgcgggcccaggcgcaggagcaggagaggcgtgagcgtcgggaacaggccgccgcggctcccttccccagtcctgcacctgcctctcctgccatctctgtggttggcgtctctgctgggggccacacattgagccgtccaccccctgctcaggtgcccagggaggtgctcaaggtgcagacccatctggagaacccaacgcgctaccacctgcagcaggcgcgccggcagcaggtgaaacagtacctgtccaccacactcgggcccaagctggcttcccaggccctcaccccaccgccggggcccgcaagtgcccagccactgcctgcccctgaggctgcccacactaccggccccacaggcagtgcgcccaacagccccatggcgctgctcaccatcgggtccagctcagagaaggagattgatgatgtcattgatgagatcatcagcctggagtccagttacaatgatgaaatgctcagctatctgcccggaggcaccacaggactgcagctccccagcacgctgcctgtgtcagggaatctgcttgatgtgtacagtagtcaaggcgtggccacaccagccatcactgtcagcaactcctgcccagctgagctgcccaacatcaaacgggagatctctgagaccgaggcaaaggcccttttgaaggaacggcagaagaaagacaatcacaacctaattgagcgtcgcaggcgattcaacattaacgacaggatcaaggaactgggcactctcatccctaagtccagtgacccggagatgcgctggaacaagggcaccatcctgaaggcctctgtggattatatccgcaagctgcagaaggagcagcagcgctccaaagacctggagagccggcagcgatccctggagcaggccaaccgcagcctgcagctccgaattcaggaactagaactgcaggcccagatccatggcctgccagtacctcccactccagggctgctttccttggccacgacttcggcttctgacagcctcaagccagagcagctggacattgaggaggagggcaggccaggcgcagcaacgttccatgtaggggggggacctgcccagaatgctccccatcagcagccccctgcaccgccctcagatgcccttctggacctgcactttcccagcgaccacctgggggacctgggagaccccttccacctggggctggaggacattctgatggaggaggaggagggggtggtgggaggactgtcggggggtgccctgtccccactgcgggctgcctccgatcccctgctctcttcagtgtcccctgctgtctccaaggccagcagccgccgcagcagcttcagcatggaagaggagtcctgatcaggcctcacccctcccctgggactttcccacccaggaaaggaggaccagtcaggatgaggccccgccttttcccccaccctcccatgagactgccctgcccaggtatcctgggggaagaggagatgtgatcaggccccacccctgtaatcaggcaaggaggaggagtcagatgaggccctgcaccttccccaaaggaaccgcccagtgcaggtatttcagaaggagaaggctggagaaggacatgagatcagggcctgccccctggggatcacagcctcacccctgcccctgtgggactcatccttgcccaggtgagggaaggagacaggatgaggtctcgaccctgtcccctagggactgtcctagccaggtctcctgggaaagggagatgtcaggatgttgctccatcctttgtcttggaaccaccagtctagtccgtcctggcacagaagaggagtcaagtaatggaggtcccagccctgggggtttaagctctgccccttccccatgaaccctgccctgctctgcccaggcaaggaacagaagtgaggatgagacccagccccttcccctgggaactctcctggccttctaggaatggaggagccaggccccaccccttccctataggaacagcccagcacaggtatttcaggtgtgaaagaatcagtaggaccaggccaccgctagtgcttgtggagatcacagccccacccttgtccctcagcaacatcccatctaagcattccacactgcagggaggagtggtacttaagctcccctgccttaacctgggaccaacctgacctaacctaggagggctctgagccaaccttgctcttggggaaggggacagattatgaaatttcatggatgaattttccagacctatatctggagtgagaggcccccacccttgggcagagtcctgccttcttccttgaggggcagtttgggaaggtgatgggtattagtgggggactgagttcaggttaccagaaccagtacctcagtattctttttcaacatgtagggcaagaggatgaaggaaggggctatcctgggacctccccagcccaggaaaaactggaagccttcccccagcaaggcagaagcttggaggagggttgtaaaagcatattgtaccccctcatttgtttatctgatttttttattgctccgcatactgagaatctaggccaccccaacctctgttccccacccagttcttcatttggaggaatcaccccatttcagagttatcaagagacactcccccctccattcccacccctcatacctacacccaaggttgtcagctttggattgctggggccaggccccatggagggtatactgaggggtctataggtttgtgattaaaataataaaagctaggcgtgtttgatgcgcttttaactttggcaaa

SEQ ID NO: 299185 - DNA, 3400 bp, Homo sapiens
tatttcattcacgggccgggcagtatagttgacgttacatggcccttggtccaacaattgcacgtcggtccgttctgggcgggggatgactcacagcccatcccatctccccgacgccgcccgcccgcgcagtgctagctccatggcttagcggaggaggcggcagtggcgagctggggggaggggggactcttattttgttagggggaccgggccgaggcccgaccggcctggcagggctcgcccggggccgggcgtcatgtctcatgcggccgaaccagctcgggatggcgtagaggccagcgcggagggccctcgagccgtgttcgtgctgttggaggagcgcaggccggccgactcggctcagctgctcagcctgaactctttgcttccggaatccgggattgttgctgacatagaattagaaaacgtccttgatcctgacagcttctacgagctcaaaagccaacccttaccccttcgctcaaggccacaccagccaccccagctacactctctgcatcgtcttctgcagggggctccaggacccctgccatgtcgtcatcttcttcatcgagggtcttgctgcggcagcagctaatgcgggcccaggcgcaggagcaggagaggcgtgagcgtcgggaacaggccgccgcggctcccttccccagtcctgcacctgcctctcctgccatctctgtggttggcgtctctgctgggggccacacattgagccgtccaccccctgctcaggtgcccagggaggtgctcaaggtgcagacccatctggagaacccaacgcgctaccacctgcagcaggcgcgccggcagcaggtgaaacagtacctgtccaccacactcgggcccaagctggcttcccaggccctcaccccaccgccggggcccgcaagtgcccagccactgcctgcccctgaggctgcccacactaccggccccacaggcagtgcgcccaacagccccatggcgctgctcaccatcgggtccagctcagagaaggagattgatgatgtcattgatgagatcatcagcctggagtccagttacaatgatgaaatgctcagctatctgcccggaggcaccacaggactgcagctccccagcacgctgcctgtgtcagggaatctgcttgatgtgtacagtagtcaaggcgtggccacaccagccatcactgtcagcaactcctgcccagctgagctgcccaacatcaaacgggagatctctgagaccgaggcaaaggcccttttgaaggaacggcagaagaaagacaatcacaacctaattgagcgtcgcaggcgattcaacattaacgacaggatcaaggaactgggcactctcatccctaagtccagtgacccggagatgcgctggaacaagggcaccatcctgaaggcctctgtggattatatccgcaagctgcagaaggagcagcagcgctccaaagacctggagagccggcagcgatccctggagcaggccaaccgcagcctgcagctccgaattcaggaactagaactgcaggcccagatccatggcctgccagtacctcccactccagggctgctttccttggccacgacttcggcttctgacagcctcaagccagagcagctggacattgaggaggagggcaggccaggcgcagcaacgttccatgtaggggggggacctgcccagaatgctccccatcagcagccccctgcaccgccctcagatgcccttctggacctgcactttcccagcgaccacctgggggacctgggagaccccttccacctggggctggaggacattctgatggaggaggaggagggggtggtgggaggactgtcggggggtgccctgtccccactgcgggctgcctccgatcccctgctctcttcagtgtcccctgctgtctccaaggccagcagccgccgcagcagcttcagcatggaagaggagtcctgatcaggcctcacccctcccctgggactttcccacccaggaaaggaggaccagtcaggatgaggccccgccttttcccccaccctcccatgagactgccctgcccaggtatcctgggggaagaggagatgtgatcaggccccacccctgtaatcaggcaaggaggaggagtcagatgaggccctgcaccttccccaaaggaaccgcccagtgcaggtatttcagaaggagaaggctggagaaggacatgagatcagggcctgccccctggggatcacagcctcacccctgcccctgtgggactcatccttgcccaggtgagggaaggagacaggatgaggtctcgaccctgtcccctagggactgtcctagccaggtctcctgggaaagggagatgtcaggatgttgctccatcctttgtcttggaaccaccagtctagtccgtcctggcacagaagaggagtcaagtaatggaggtcccagccctgggggtttaagctctgccccttccccatgaaccctgccctgctctgcccaggcaaggaacagaagtgaggatgagacccagccccttcccctgggaactctcctggccttctaggaatggaggagccaggccccaccccttccctataggaacagcccagcacaggtatttcaggtgtgaaagaatcagtaggaccaggccaccgctagtgcttgtggagatcacagccccacccttgtccctcagcaacatcccatctaagcattccacactgcagggaggagtggtacttaagctcccctgccttaacctgggaccaacctgacctaacctaggagggctctgagccaaccttgctcttggggaaggggacagattatgaaatttcatggatgaattttccagacctatatctggagtgagaggcccccacccttgggcagagtcctgccttcttccttgaggggcagtttgggaaggtgatgggtattagtgggggactgagttcaggttaccagaaccagtacctcagtattctttttcaacatgtagggcaagaggatgaaggaaggggctatcctgggacctccccagcccaggaaaaactggaagccttcccccagcaaggcagaagcttggaggagggttgtaaaagcatattgtaccccctcatttgtttatctgatttttttattgctccgcatactgagaatctaggccaccccaacctctgttccccacccagttcttcatttggaggaatcaccccatttcagagttatcaagagacactcccccctccattcccacccctcatacctacacccaaggttgtcagctttggattgctggggccaggccccatggagggtatactgaggggtctataggtttgtgattaaaataataaaagctaggcgtgtttgatgcgcttttaactttggcaaa

SEQ ID NO: 299186 - DNA, 3380 bp, Homo sapiens
gggaggagggggaagaagacgagggggaggagggcggtcgtccggggttaggttgagggggggcgtcggtccgttctgggcgggggatgactcacagcccatcccatctccccgacgccgcccgcccgcgcagtgctagctccatggcttagcggaggaggcggcagtggcgagctggggggaggggggactcttattttgttagggggaccgggccgaggcccgaccggcctggcagggctcgcccggggccgggcgtcatgtctcatgcggccgaaccagctcgggatggcgtagaggccagcgcggagggccctcgagccgtgttcgtgctgttggaggagcgcaggccggccgactcggctcagctgctcagcctgaactctttgcttccggaatccgggattgttgctgacatagaattagaaaacgtccttgatcctgacagcttctacgagctcaaaagccaacccttaccccttcgctcaagcctcccaatatcactgcaggccacaccagccaccccagctacactctctgcatcgtcttctgcagggggctccaggacccctgccatgtcgtcatcttcttcatcgagggtcttgctgcggcagcagctaatgcgggcccaggcgcaggagcaggagaggcgtgagcgtcgggaacaggccgccgcggctcccttccccagtcctgcacctgcctctcctgccatctctgtggttggcgtctctgctgggggccacacattgagccgtccaccccctgctcaggtgcccagggaggtgctcaaggtgcagacccatctggagaacccaacgcgctaccacctgcagcaggcgcgccggcagcaggtgaaacagtacctgtccaccacactcgggcccaagctggcttcccaggccctcaccccaccgccggggcccgcaagtgcccagccactgcctgcccctgaggctgcccacactaccggccccacaggcagtgcgcccaacagccccatggcgctgctcaccatcgggtccagctcagagaaggagattgatgatgtcattgatgagatcatcagcctggagtccagttacaatgatgaaatgctcagctatctgcccggaggcaccacaggactgcagctccccagcacgctgcctgtgtcagggaatctgcttgatgtgtacagtagtcaaggcgtggccacaccagccatcactgtcagcaactcctgcccagctgagctgcccaacatcaaacgggagatctctgagaccgaggcaaaggcccttttgaaggaacggcagaagaaagacaatcacaacctaattgagcgtcgcaggcgattcaacattaacgacaggatcaaggaactgggcactctcatccctaagtccagtgacccggagatgcgctggaacaagggcaccatcctgaaggcctctgtggattatatccgcaagctgcagaaggagcagcagcgctccaaagacctggagagccggcagcgatccctggagcaggccaaccgcagcctgcagctccgaattcaggaactagaactgcaggcccagatccatggcctgccagtacctcccactccagggctgctttccttggccacgacttcggcttctgacagcctcaagccagagcagctggacattgaggaggagggcaggccaggcgcagcaacgttccatgtaggggggggacctgcccagaatgctccccatcagcagccccctgcaccgccctcagatgcccttctggacctgcactttcccagcgaccacctgggggacctgggagaccccttccacctggggctggaggacattctgatggaggaggaggagggggtggtgggaggactgtcggggggtgccctgtccccactgcgggctgcctccgatcccctgctctcttcagtgtcccctgctgtctccaaggccagcagccgccgcagcagcttcagcatggaagaggagtcctgatcaggcctcacccctcccctgggactttcccacccaggaaaggaggaccagtcaggatgaggccccgccttttcccccaccctcccatgagactgccctgcccaggtatcctgggggaagaggagatgtgatcaggccccacccctgtaatcaggcaaggaggaggagtcagatgaggccctgcaccttccccaaaggaaccgcccagtgcaggtatttcagaaggagaaggctggagaaggacatgagatcagggcctgccccctggggatcacagcctcacccctgcccctgtgggactcatccttgcccaggtgagggaaggagacaggatgaggtctcgaccctgtcccctagggactgtcctagccaggtctcctgggaaagggagatgtcaggatgttgctccatcctttgtcttggaaccaccagtctagtccgtcctggcacagaagaggagtcaagtaatggaggtccctgccctgctctgcccaggcaaggaacagaagtgaggatgagacccagccccttcccctgggaactctcctggccttctaggaatggaggagccaggccccaccccttccctataggaacagcccagcacaggtatttcaggtgtgaaagaatcagtaggaccaggccaccgctagtgcttgtggagatcacagccccacccttgtccctcagcaacatcccatctaagcattccacactgcagggaggagtggtacttaagctcccctgccttaacctgggaccaacctgacctaacctaggagggctctgagccaaccttgctcttggggaaggggacagattatgaaatttcatggatgaattttccagacctatatctggagtgagaggcccccacccttgggcagagtcctgccttcttccttgaggggcagtttgggaaggtgatgggtattagtgggggactgagttcaggttaccagaaccagtacctcagtattctttttcaacatgtagggcaagaggatgaaggaaggggctatcctgggacctccccagcccaggaaaaactggaagccttcccccagcaaggcagaagcttggaggagggttgtaaaagcatattgtaccccctcatttgtttatctgatttttttattgctccgcatactgagaatctaggccaccccaacctctgttccccacccagttcttcatttggaggaatcaccccatttcagagttatcaagagacactcccccctccattcccacccctcatacctacacccaaggttgtcagctttggattgctggggccaggccccatggagggtatactgaggggtctataggtttgtgattaaaataataaaagctaggcgtgtttgatgcgcttttaactttggcaaa

SEQ ID NO: 299187 - DNA, 2413 bp, Homo sapiens
cgggatccccagcaggagcaggagcgggagcggattgatgatgtcattgatgagatcatcagcctggagtccagttacaatgatgaaatgctcagctatctgcccggaggcaccacaggactgcagctccccagcacgctgcctgtgtcagggaatctgcttgatgtgtacagtagtcaaggcgtggccacaccagccatcactgtcagcaactcctgcccagctgagctgcccaacatcaaacgggagatctctgagaccgaggcaaaggcccttttgaaggaacggcagaagaaagacaatcacaacctaattgagcgtcgcaggcgattcaacattaacgacaggatcaaggaactgggcactctcatccctaagtccagtgacccggagatgcgctggaacaagggcaccatcctgaaggcctctgtggattatatccgcaagctgcagaaggagcagcagcgctccaaagacctggagagccggcagcgatccctggagcaggccaaccgcagcctgcagctccgaattcaggaactagaactgcaggcccagatccatggcctgccagtacctcccactccagggctgctttccttggccacgacttcggcttctgacagcctcaagccagagcagctggacattgaggaggagggcaggccaggcgcagcaacgttccatgtaggggggggacctgcccagaatgctccccatcagcagccccctgcaccgccctcagatgcccttctggacctgcactttcccagcgaccacctgggggacctgggagaccccttccacctggggctggaggacattctgatggaggaggaggagggggtggtgggaggactgtcggggggtgccctgtccccactgcgggctgcctccgatcccctgctctcttcagtgtcccctgctgtctccaaggccagcagccgccgcagcagcttcagcatggaagaggagtcctgatcaggcctcacccctcccctgggactttcccacccaggaaaggaggaccagtcaggatgaggccccgccttttcccccaccctcccatgagactgccctgcccaggtatcctgggggaagaggagatgtgatcaggccccacccctgtaatcaggcaaggaggaggagtcagatgaggccctgcaccttccccaaaggaaccgcccagtgcaggtatttcagaaggagaaggctggagaaggacatgagatcagggcctgccccctggggatcacagcctcacccctgcccctgtgggactcatccttgcccaggtgagggaaggagacaggatgaggtctcgaccctgtcccctagggactgtcctagccaggtctcctgggaaagggagatgtcaggatgttgctccatcctttgtcttggaaccaccagtctagtccgtcctggcacagaagaggagtcaagtaatggaggtcccagccctgggggtttaagctctgccccttccccatgaaccctgccctgctctgcccaggcaaggaacagaagtgaggatgagacccagccccttcccctgggaactctcctggccttctaggaatggaggagccaggccccaccccttccctataggaacagcccagcacaggtatttcaggtgtgaaagaatcagtaggaccaggccaccgctagtgcttgtggagatcacagccccacccttgtccctcagcaacatcccatctaagcattccacactgcagggaggagtggtacttaagctcccctgccttaacctgggaccaacctgacctaacctaggagggctctgagccaaccttgctcttggggaaggggacagattatgaaatttcatggatgaattttccagacctatatctggagtgagaggcccccacccttgggcagagtcctgccttcttccttgaggggcagtttgggaaggtgatgggtattagtgggggactgagttcaggttaccagaaccagtacctcagtattctttttcaacatgtagggcaagaggatgaaggaaggggctatcctgggacctccccagcccaggaaaaactggaagccttcccccagcaaggcagaagcttggaggagggttgtaaaagcatattgtaccccctcatttgtttatctgatttttttattgctccgcatactgagaatctaggccaccccaacctctgttccccacccagttcttcatttggaggaatcaccccatttcagagttatcaagagacactcccccctccattcccacccctcatacctacacccaaggttgtcagctttggattgctggggccaggccccatggagggtatactgaggggtctataggtttgtgattaaaataataaaagctaggcgtgtttgatgcgcttttaactttggcaaa

SEQ ID NO: 299188 - DNA, 2308 bp, Homo sapiens
cgggatccccagcaggagcaggagcgggagcggctgcctgtgtcagggaatctgcttgatgtgtacagtagtcaaggcgtggccacaccagccatcactgtcagcaactcctgcccagctgagctgcccaacatcaaacgggagatctctgagaccgaggcaaaggcccttttgaaggaacggcagaagaaagacaatcacaacctaattgagcgtcgcaggcgattcaacattaacgacaggatcaaggaactgggcactctcatccctaagtccagtgacccggagatgcgctggaacaagggcaccatcctgaaggcctctgtggattatatccgcaagctgcagaaggagcagcagcgctccaaagacctggagagccggcagcgatccctggagcaggccaaccgcagcctgcagctccgaattcaggaactagaactgcaggcccagatccatggcctgccagtacctcccactccagggctgctttccttggccacgacttcggcttctgacagcctcaagccagagcagctggacattgaggaggagggcaggccaggcgcagcaacgttccatgtaggggggggacctgcccagaatgctccccatcagcagccccctgcaccgccctcagatgcccttctggacctgcactttcccagcgaccacctgggggacctgggagaccccttccacctggggctggaggacattctgatggaggaggaggagggggtggtgggaggactgtcggggggtgccctgtccccactgcgggctgcctccgatcccctgctctcttcagtgtcccctgctgtctccaaggccagcagccgccgcagcagcttcagcatggaagaggagtcctgatcaggcctcacccctcccctgggactttcccacccaggaaaggaggaccagtcaggatgaggccccgccttttcccccaccctcccatgagactgccctgcccaggtatcctgggggaagaggagatgtgatcaggccccacccctgtaatcaggcaaggaggaggagtcagatgaggccctgcaccttccccaaaggaaccgcccagtgcaggtatttcagaaggagaaggctggagaaggacatgagatcagggcctgccccctggggatcacagcctcacccctgcccctgtgggactcatccttgcccaggtgagggaaggagacaggatgaggtctcgaccctgtcccctagggactgtcctagccaggtctcctgggaaagggagatgtcaggatgttgctccatcctttgtcttggaaccaccagtctagtccgtcctggcacagaagaggagtcaagtaatggaggtcccagccctgggggtttaagctctgccccttccccatgaaccctgccctgctctgcccaggcaaggaacagaagtgaggatgagacccagccccttcccctgggaactctcctggccttctaggaatggaggagccaggccccaccccttccctataggaacagcccagcacaggtatttcaggtgtgaaagaatcagtaggaccaggccaccgctagtgcttgtggagatcacagccccacccttgtccctcagcaacatcccatctaagcattccacactgcagggaggagtggtacttaagctcccctgccttaacctgggaccaacctgacctaacctaggagggctctgagccaaccttgctcttggggaaggggacagattatgaaatttcatggatgaattttccagacctatatctggagtgagaggcccccacccttgggcagagtcctgccttcttccttgaggggcagtttgggaaggtgatgggtattagtgggggactgagttcaggttaccagaaccagtacctcagtattctttttcaacatgtagggcaagaggatgaaggaaggggctatcctgggacctccccagcccaggaaaaactggaagccttcccccagcaaggcagaagcttggaggagggttgtaaaagcatattgtaccccctcatttgtttatctgatttttttattgctccgcatactgagaatctaggccaccccaacctctgttccccacccagttcttcatttggaggaatcaccccatttcagagttatcaagagacactcccccctccattcccacccctcatacctacacccaaggttgtcagctttggattgctggggccaggccccatggagggtatactgaggggtctataggtttgtgattaaaataataaaagctaggcgtgtttgatgcgcttttaactttggcaaa

SEQ ID NO: 299189 - DNA, 2547 bp, Homo sapiens
gttatgagaagaataaagactggaaggaaaatgggagaatgttggggagggttagtttgggataaggaaggtgaggacagggcaggccccaactgacaaggaaacgtttgaataaagagcctaaggaggcaaggcggggagccgcatgggtgtctgggggtaagagtattcaaggcagagggcacggctgggattgatgccctgagatgggagtggttttccatattctaggagcactgagagaccaatgtggctgtagtgagatcaatcggagggacatagggaagagaggaatcctaaggggtcaggtcagagacggcttccagggtttggagtgtgatggggcaccattgtaagattccaggcgggaagttttcctctggatactccatacctttgaaagaccccagcctcaagttctaagcatgtggtgggaggctcccacctggtgcaatccccgcctcagctcctgagaaactcctcatgtggcatttcctgcttgcctcccacttgggccccacagggagatgcgctggaacaagggcaccatcctgaaggcctctgtggattatatccgcaagctgcagaaggagcagcagcgctccaaagacctggagagccggcagcgatccctggagcaggccaaccgcagcctgcagctccgaattcaggaactagaactgcaggcccagatccatggcctgccagtacctcccactccagggctgctttccttggccacgacttcggcttctgacagcctcaagccagagcagctggacattgaggaggagggcaggccaggcgcagcaacgttccatgtaggggggggacctgcccagaatgctccccatcagcagccccctgcaccgccctcagatgcccttctggacctgcactttcccagcgaccacctgggggacctgggagaccccttccacctggggctggaggacattctgatggaggaggaggagggggtggtgggaggactgtcggggggtgccctgtccccactgcgggctgcctccgatcccctgctctcttcagtgtcccctgctgtctccaaggccagcagccgccgcagcagcttcagcatggaagaggagtcctgatcaggcctcacccctcccctgggactttcccacccaggaaaggaggaccagtcaggatgaggccccgccttttcccccaccctcccatgagactgccctgcccaggtatcctgggggaagaggagatgtgatcaggccccacccctgtaatcaggcaaggaggaggagtcagatgaggccctgcaccttccccaaaggaaccgcccagtgcaggtatttcagaaggagaaggctggagaaggacatgagatcagggcctgccccctggggatcacagcctcacccctgcccctgtgggactcatccttgcccaggtgagggaaggagacaggatgaggtctcgaccctgtcccctagggactgtcctagccaggtctcctgggaaagggagatgtcaggatgttgctccatcctttgtcttggaaccaccagtctagtccgtcctggcacagaagaggagtcaagtaatggaggtcccagccctgggggtttaagctctgccccttccccatgaaccctgccctgctctgcccaggcaaggaacagaagtgaggatgagacccagccccttcccctgggaactctcctggccttctaggaatggaggagccaggccccaccccttccctataggaacagcccagcacaggtatttcaggtgtgaaagaatcagtaggaccaggccaccgctagtgcttgtggagatcacagccccacccttgtccctcagcaacatcccatctaagcattccacactgcagggaggagtggtacttaagctcccctgccttaacctgggaccaacctgacctaacctaggagggctctgagccaaccttgctcttggggaaggggacagattatgaaatttcatggatgaattttccagacctatatctggagtgagaggcccccacccttgggcagagtcctgccttcttccttgaggggcagtttgggaaggtgatgggtattagtgggggactgagttcaggttaccagaaccagtacctcagtattctttttcaacatgtagggcaagaggatgaaggaaggggctatcctgggacctccccagcccaggaaaaactggaagccttcccccagcaaggcagaagcttggaggagggttgtaaaagcatattgtaccccctcatttgtttatctgatttttttattgctccgcatactgagaatctaggccaccccaacctctgttccccacccagttcttcatttggaggaatcaccccatttcagagttatcaagagacactcccccctccattcccacccctcatacctacacccaaggttgtcagctttggattgctggggccaggccccatggagggtatactgaggggtctataggtttgtgattaaaataataaaagctaggcgtgtttgatgcgcttttaactttggcaaa

SEQ ID NO: 299190 - DNA, 1391 bp, Homo sapiens
aattcagtgacggggcggtgtctcacccgatagattacgtggcccatcggtccgacaattgccccgccttttcccccaccctcccatgagactgccctgcccaggtatcctgggggaagaggagatgtgatcaggccccacccctgtaatcaggcaaggaggaggagtcagatgaggccctgcaccttccccaaaggaaccgcccagtgcaggtatttcagaaggagaaggctggagaaggacatgagatcagggcctgccccctggggatcacagcctcacccctgcccctgtgggactcatccttgcccaggtgagggaaggagacaggatgaggtctcgaccctgtcccctagggactgtcctagccaggtctcctgggaaagggagatgtcaggatgttgctccatcctttgtcttggaaccaccagtctagtccgtcctggcacagaagaggagtcaagtaatggaggtccctgccctgctctgcccaggcaaggaacagaagtgaggatgagacccagccccttcccctgggaactctcctggccttctaggaatggaggagccaggccccaccccttccctataggaacagcccagcacaggtatttcaggtgtgaaagaatcagtaggaccaggccaccgctagtgcttgtggagatcacagccccacccttgtccctcagcaacatcccatctaagcattccacactgcagggaggagtggtacttaagctcccctgccttaacctgggaccaacctgacctaacctaggagggctctgagccaaccttgctcttggggaaggggacagattatgaaatttcatggatgaattttccagacctatatctggagtgagaggcccccacccttgggcagagtcctgccttcttccttgaggggcagtttgggaaggtgatgggtattagtgggggactgagttcaggttaccagaaccagtacctcagtattctttttcaacatgtagggcaagaggatgaaggaaggggctatcctgggacctccccagcccaggaaaaactggaagccttcccccagcaaggcagaagcttggaggagggttgtaaaagcatattgtaccccctcatttgtttatctgatttttttattgctccgcatactgagaatctaggccaccccaacctctgttccccacccagttcttcatttggaggaatcaccccatttcagagttatcaagagacactcccccctccattcccacccctcatacctacacccaaggttgtcagctttggattgctggggccaggccccatggagggtatactgaggggtctataggtttgtgattaaaataataaaagctaggcgtgtttgatgcgcttttaactttggcaaa

SEQ ID NO: 299191 - DNA, 955 bp, Homo sapiens
  misc_feature (15)..(15): n is a, c, g, or t
  misc_feature (21)..(21): n is a, c, g, or t
ccagctggtacgccngagtantggatatgtgaccgcgcctcgccacgcgtcgccacgcgtcgggaacagaagtgaggatgagacccagccccttcccctgggaactctcctggccttctaggaatggaggagccaggccccaccccttccctataggaacagcccagcacaggtatttcaggtgtgaaagaatcagtaggaccaggccaccgctagtgcttgtggagatcacagccccacccttgtccctcagcaacatcccatctaagcattccacactgcagggaggagtggtacttaagctcccctgccttaacctgggaccaacctgacctaacctaggagggctctgagccaaccttgctcttggggaaggggacagattatgaaatttcatggatgaattttccagacctatatctggagtgagaggcccccacccttgggcagagtcctgccttcttccttgaggggcagtttgggaaggtgatgggtattagtgggggactgagttcaggttaccagaaccagtacctcagtattctttttcaacatgtagggcaagaggatgaaggaaggggctatcctgggacctccccagcccaggaaaaactggaagccttcccccagcaaggcagaagcttggaggagggttgtaaaagcatattgtaccccctcatttgtttatctgatttttttattgctccgcatactgagaatctaggccaccccaacctctgttccccacccagttcttcatttggaggaatcaccccatttcagagttatcaagagacactcccccctccattcccacccctcatacctacacccaaggttgtcagctttggattgctggggccaggccccatggagggtatactgaggggtctataggtttgtgattaaaataataaaagctaggcgtgtttgatgcgcttttaactttggcaaa

SEQ ID NO: 299192 - DNA, 2740 bp, Homo sapiens
gggaggagggggaagaagacgagggggaggagggcggtcgtccggggttaggttgagggggggcgtcggtccgttctgggcgggggatgactcacagcccatcccatctccccgacgccgcccgcccgcgcagtgctagctccatggcttagcggaggaggcggcagtggcgagctggggggaggggggactcttattttgttagggggaccgggccgaggcccgaccggcctggcagggctcgcccggggccgggcgtcatgtctcatgcggccgaaccagctcgggatggcgtagaggccagcgcggagggccctcgagccgtgttcgtgctgttggaggagcgcaggccggccgactcggctcagctgctcagcctgaactctttgcttccggaatccgggattgttgctgacatagaattagaaaacgtccttgatcctgacagcttctacgagctcaaaagccaacccttaccccttcgctcaagcctcccaatatcactgcaggccacaccagccaccccagctacactctctgcatcgtcttctgcagggggctccaggacccctgccatgtcgtcatcttcttcatcgagggtcttgctgcggcagcagctaatgcgggcccaggcgcaggagcaggagaggcgtgagcgtcgggaacaggccgccgcggctcccttccccagtcctgcacctgcctctcctgccatctctgtggttggcgtctctgctgggggccacacattgagccgtccaccccctgctcaggtgcccagggaggtgctcaaggtgcagacccatctggagaacccaacgcgctaccacctgcagcaggcgcgccggcagcaggtgaaacagtacctgtccaccacactcgggcccaagctggcttcccaggccctcaccccaccgccggggcccgcaagtgcccagccactgcctgcccctgaggctgcccacactaccggccccacaggcagtgcgcccaacagccccatggcgctgctcaccatcgggtccagctcagagaaggagattgatgatgtcattgatgagatcatcagcctggagtccagttacaatgatgaaatgctcagctatctgcccggaggcaccacaggactgcagctccccagcacgctgcctgtgtcagggaatctgcttgatgtgtacagtagtcaaggcgtggccacaccagccatcactgtcagcaactcctgcccagctgagctgcccaacatcaaacgggagatctctgagaccgaggcaaaggcccttttgaaggaacggcagaagaaagacaatcacaacctaattgagcgtcgcaggcgattcaacattaacgacaggatcaaggaactgggcactctcatccctaagtccagtgacccggagatgcgctggaacaagggcaccatcctgaaggcctctgtggattatatccgcaagctgcagaaggagcagcagcgctccaaagacctggagagccggcagcgatccctggagcaggccaaccgcagcctgcagctccgaattcaggaactagaactgcaggcccagatccatggcctgccagtacctcccactccagggctgctttccttggccacgacttcggcttctgacagcctcaagccagagcagctggacattgaggaggagggcaggccaggcgcagcaacgttccatgtaggggggggacctgcccagaatgctccccatcagcagccccctgcaccgccctcagatgcccttctggacctgcactttcccagcgaccacctgggggacctgggagaccccttccacctggggctggaggacattctgatggaggaggaggagggggtggtgggaggactgtcggggggtgccctgtccccactgcgggctgcctccgatcccctgctctcttcagtgtcccctgctgtctccaaggccagcagccgccgcagcagcttcagcatggaagaggagtcctgatcaggcctcacccctcccctgggactttcccacccaggaaaggaggaccagtcaggatgaggccccgccttttcccccaccctcccatgagactgccctgcccaggtatcctgggggaagaggagatgtgatcaggccccacccctgtaatcaggcaaggaggaggagtcagatgaggccctgcaccttccccaaaggaaccgcccagtgcaggtatttcagaaggagaaggctggagaaggacatgagatcagggcctgccccctggggatcacagcctcacccctgcccctgtgggactcatccttgcccaggtgagggaaggagacaggatgaggtctcgaccctgtcccctagggactgtcctagccaggtctcctgggaaagggagatgtcaggatgttgctccatcctttgtcttggaaccaccagtctagtccgtcctggcacagaagaggagtcaagtaatggaggtcccagccctgggggtttaagctctgccccttccccatgaaccctgccctgctctgcccaggcaaggaacagaagtgaggatgagacccagccccttcccctgggaactctcctggccttctaggaatggaggagccaggccccaccccttccctataggaacagcccagcacaggtatttcaggtgtgaaagaatcagtaggaccaggttaaggcaggggagcttaagtaccactcctccctgcagtgtggaatgcttagatgggatgttgctgagg

SEQ ID NO: 299193 - DNA, 2597 bp, Homo sapiens
gggaggagggggaagaagacgagggggaggagggcggtcgtccggggttaggttgagggggggcgtcggtccgttctgggcgggggatgactcacagcccatcccatctccccgacgccgcccgcccgcgcagtgctagctccatggcttagcggaggaggcggcagtggcgagctggggggaggggggactcttattttgttagggggaccgggccgaggcccgaccggcctggcagggctcgcccggggccgggcgtcatgtctcatgcggccgaaccagctcgggatggcgtagaggccagcgcggagggccctcgagccgtgttcgtgctgttggaggagcgcaggccggccgactcggctcagctgctcagcctgaactctttgcttccggaatccgggattgttgctgacatagaattagaaaacgtccttgatcctgacagcttctacgagctcaaaagccaacccttaccccttcgctcaagcctcccaatatcactgcaggccacaccagccaccccagctacactctctgcatcgtcttctgcagggggctccaggacccctgccatgtcgtcatcttcttcatcgagggtcttgctgcggcagcagctaatgcgggcccaggcgcaggagcaggagaggcgtgagcgtcgggaacaggccgccgcggctcccttccccagtcctgcacctgcctctcctgccatctctgtggttggcgtctctgctgggggccacacattgagccgtccaccccctgctcaggtgcccagggaggtgctcaaggtgcagacccatctggagaacccaacgcgctaccacctgcagcaggcgcgccggcagcaggtgaaacagtacctgtccaccacactcgggcccaagctggcttcccaggccctcaccccaccgccggggcccgcaagtgcccagccactgcctgcccctgaggctgcccacactaccggccccacaggcagtgcgcccaacagccccatggcgctgctcaccatcgggtccagctcagagaaggagattgatgatgtcattgatgagatcatcagcctggagtccagttacaatgatgaaatgctcagctatctgcccggaggcaccacaggactgcagctccccagcacgctgcctgtgtcagggaatctgcttgatgtgtacagtagtcaaggcgtggccacaccagccatcactgtcagcaactcctgcccagctgagctgcccaacatcaaacgggagatctctgagaccgaggcaaaggcccttttgaaggaacggcagaagaaagacaatcacaacctaattgagcgtcgcaggcgattcaacattaacgacaggatcaaggaactgggcactctcatccctaagtccagtgacccggagatgcgctggaacaagggcaccatcctgaaggcctctgtggattatatccgcaagctgcagaaggagcagcagcgctccaaagacctggagagccggcagcgatccctggagcaggccaaccgcagcctgcagctccgaattcaggaactagaactgcaggcccagatccatggcctgccagtacctcccactccagggctgctttccttggccacgacttcggcttctgacagcctcaagccagagcagctggacattgaggaggagggcaggccaggcgcagcaacgttccatgtaggggggggacctgcccagaatgctccccatcagcagccccctgcaccgccctcagatgcccttctggacctgcactttcccagcgaccacctgggggacctgggagaccccttccacctggggctggaggacattctgatggaggaggaggagggggtggtgggaggactgtcggggggtgccctgtccccactgcgggctgcctccgatcccctgctctcttcagtgtcccctgctgtctccaaggccagcagccgccgcagcagcttcagcatggaagaggagtcctgatcaggcctcacccctcccctgggactttcccacccaggaaaggaggaccagtcaggatgaggccccgccttttcccccaccctcccatgagactgccctgcccaggtatcctgggggaagaggagatgtgatcaggccccacccctgtaatcaggcaaggaggaggagtcagatgaggccctgcaccttccccaaaggaaccgcccagtgcagggcaagaggatgaaggaaggggctatcctgggacctccccagcccaggaaaaactggaagccttcccccagcaaggcagaagcttggaggagggttgtaaaagcatattgtaccccctcatttgtttatctgatttttttattgctccgcatactgagaatctaggccaccccaacctctgttccccacccagttcttcatttggaggaatcaccccatttcagagttatcaagagacactcccccctccattcccacccctcatacctacacccaaggttgtcagctttggattgctggggccaggccccatggagggtatactgaggggtctataggtttgtgattaaaataataaaagctaggcgtgtttgatgcgcttttaactttggcaaa

SEQ ID NO: 299194 - DNA, 1849 bp, Homo sapiens
gggaggagggggaagaagacgagggggaggagggcggtcgtccggggttaggttgagggggggcgtcggtccgttctgggcgggggatgactcacagcccatcccatctccccgacgccgcccgcccgcgcagtgctagctccatggcttagcggaggaggcggcagtggcgagctggggggaggggggactcttattttgttagggggaccgggccgaggcccgaccggcctggcagggctcgcccggggccgggcgtcatgtctcatgcggccgaaccagctcgggatggcgtagaggccagcgcggagggccctcgagccgtgttcgtgctgttggaggagcgcaggccggccgactcggctcagctgctcagcctgaactctttgcttccggaatccgggattgttgctgacatagaattagaaaacgtccttgatcctgacagcttctacgagctcaaaagccaacccttaccccttcgctcaagcctcccaatatcactgcaggccacaccagccaccccagctacactctctgcatcgtcttctgcagggggctccaggacccctgccatgtcgtcatcttcttcatcgagggtcttgctgcggcagcagctaatgcgggcccaggcgcaggagcaggagaggcgtgagcgtcgggaacaggccgccgcggctcccttccccagtcctgcacctgcctctcctgccatctctgtggttggcgtctctgctgggggccacacattgagccgtccaccccctgctcaggtgcccagggaggtgctcaaggtgcagacccatctggagaacccaacgcgctaccacctgcagcaggcgcgccggcagcaggtgaaacagtacctgtccaccacactcgggcccaagctggcttcccaggccctcaccccaccgccggggcccgcaagtgcccagccactgcctgcccctgaggctgcccacactaccggccccacaggcagtgcgcccaacagccccatggcgctgctcaccatcgggtccagctcagagaaggagattgatgatgtcattgatgagatcatcagcctggagtccagttacaatgatgaaatgctcagctatctgcccggaggcaccacaggactgcagctccccagcacgctgcctgtgtcagggaatctgcttgatgtgtacagtagtcaaggcgtggccacaccagccatcactgtcagcaactcctgcccagctgagctgcccaacatcaaacgggagatctctgagaccgaggcaaaggcccttttgaaggaacggcagaagaaagacaatcacaacctaattgagcgtcgcaggcgattcaacattaacgacaggatcaaggaactgggcactctcatccctaagtccagtgacccggagatgcgctggaacaagggcaccatcctgaaggcctctgtggattatatccgcaagctgcagaaggagcagcagcgctccaaagacctggagagccggcagcgatccctggagcaggccaaccgcagcctgcagctccgaattcaggaactagaactgcaggcccagatccatggcctgccagtacctcccactccagggctgctttccttggccacgacttcggcttctgacagcctcaagccagagcagctggacattgaggaggagggcaggccaggcgcagcaacgttccatgtaggggggggacctgcccagaatgctccccatcagcagctcgcccctgagttagcagctcgcccctgagttagcagctcgcccctgagttagctgctcgcccctgagttagcagctcgcccctgagttagcagctcgcccctgagttagcaggt

SEQ ID NO: 299195 - DNA, 1727 bp, Homo sapiens
gggaggagggggaagaagacgagggggaggagggcggtcgtccggggttaggttgagggggggcgtcggtccgttctgggcgggggatgactcacagcccatcccatctccccgacgccgcccgcccgcgcagtgctagctccatggcttagcggaggaggcggcagtggcgagctggggggaggggggactcttattttgttagggggaccgggccgaggcccgaccggcctggcagggctcgcccggggccgggcgtcatgtctcatgcggccgaaccagctcgggatggcgtagaggccagcgcggagggccctcgagccgtgttcgtgctgttggaggagcgcaggccggccgactcggctcagctgctcagcctgaactctttgcttccggaatccgggattgttgctgacatagaattagaaaacgtccttgatcctgacagcttctacgagctcaaaagccaacccttaccccttcgctcaagcctcccaatatcactgcaggccacaccagccaccccagctacactctctgcatcgtcttctgcagggggctccaggacccctgccatgtcgtcatcttcttcatcgagggtcttgctgcggcagcagctaatgcgggcccaggcgcaggagcaggagaggcgtgagcgtcgggaacaggccgccgcggctcccttccccagtcctgcacctgcctctcctgccatctctgtggttggcgtctctgctgggggccacacattgagccgtccaccccctgctcaggtgcccagggaggtgctcaaggtgcagacccatctggagaacccaacgcgctaccacctgcagcaggcgcgccggcagcaggtgaaacagtacctgtccaccacactcgggcccaagctggcttcccaggccctcaccccaccgccggggcccgcaagtgcccagccactgcctgcccctgaggctgcccacactaccggccccacaggcagtgcgcccaacagccccatggcgctgctcaccatcgggtccagctcagagaaggagattgatgatgtcattgatgagatcatcagcctggagtccagttacaatgatgaaatgctcagctatctgcccggaggcaccacaggactgcagctccccagcacgctgcctgtgtcagggaatctgcttgatgtgtacagtagtcaaggcgtggccacaccagccatcactgtcagcaactcctgcccagctgagctgcccaacatcaaacgggagatctctgagaccgaggcaaaggcccttttgaaggaacggcagaagaaagacaatcacaacctaattgagcgtcgcaggcgattcaacattaacgacaggatcaaggaactgggcactctcatccctaagtccagtgacccgtgagtctgggctgggaccctcaggccagcgggaggtggggcaggcgtcccatgctactaaaattgtgccttggtgggctcaccaggcagtctcggcccaggcatttctcctctgtctggttctttctcagcctgagcagggttgcagaccctcactatgtcagcacctaaaattttaggcacataatgttatggtctgtgtgccccatctggtccccgtaggatatatgcacctacttttctgttcacttagtacttcctttttttttttcttttttttgagatggagcctgggtgacagagcgagactccatcccccaccgccccgcaa

SEQ ID NO: 299196 - DNA, 1819 bp, Homo sapiens
gggaggagggggaagaagacgagggggaggagggcggtcgtccggggttaggttgagggggggcgtcggtccgttctgggcgggggatgactcacagcccatcccatctccccgacgccgcccgcccgcgcagtgctagctccatggcttagcggaggaggcggcagtggcgagctggggggaggggggactcttattttgttagggggaccgggccgaggcccgaccggcctggcagggctcgcccggggccgggcgtcatgtctcatgcggccgaaccagctcgggatggcgtagaggccagcgcggagggccctcgagccgtgttcgtgctgttggaggagcgcaggccggccgactcggctcagctgctcagcctgaactctttgcttccggaatccgggattgttgctgacatagaattagaaaacgtccttgatcctgacagcttctacgagctcaaaagccaacccttaccccttcgctcaagcctcccaatatcactgcaggccacaccagccaccccagctacactctctgcatcgtcttctgcagggggctccaggacccctgccatgtcgtcatcttcttcatcgagggtcttgctgcggcagcagctaatgcgggcccaggcgcaggagcaggagaggcgtgagcgtcgggaacaggccgccgcggctcccttccccagtcctgcacctgcctctcctgccatctctgtggttggcgtctctgctgggggccacacattgagccgtccaccccctgctcaggtgcccagggaggtgctcaaggtgcagacccatctggagaacccaacgcgctaccacctgcagcaggcgcgccggcagcaggtgaaacagtacctgtccaccacactcgggcccaagctggcttcccaggccctcaccccaccgccggggcccgcaagtgcccagccactgcctgcccctgaggctgcccacactaccggccccacaggcagtgcgcccaacagccccatggcgctgctcaccatcgggtccagctcagagaaggagattgatgatgtcattgatgagatcatcagcctggagtccagttacaatgatgaaatgctcagctatctgcccggaggcaccacaggactgcagctccccagcacggctggagcgcaatggtgctatctcggctcactggaacctccgcctaccaagttcaagcgattctcttgcctcagcctcctgagtaactgggactacagctgcctgtgtcagggaatctgcttgatgtgtacagtagtcaaggcgtggccacaccagccatcactgtcagcaactcctgcccagctgagctgcccaacatcaaacgggagatctctgaccggagcaaagcctttgcaggaccgggacacagaacgacatccaaactaattgagcgtcgcaggcgattcaacattaacgacaggatcaaggaactgggcactctcatccctaagtccagtgacccgtgagtctgggctgggaccctcaggccagcgggaggtggggcaggcgtcccatgctactaaaattgtgccttggtgggctcaccaggcagtctcggcccaggcatttctcctctgtctggttctttctcagcctgagcagggttgcagaccctcactatgtcagcacctaaaattttaggcacataatgttatggtctgtgtgccccatctggtccccgtaggatatatgcacctacttttctgttcacttagtacttcctttttttttttcttttttttgagatggagcctgggtgacagagcgagactccatcccccaccgccccgcaa

SEQ ID NO: 299197 - DNA, 1418 bp, Homo sapiens
gggaggagggggaagaagacgagggggaggagggcggtcgtccggggttaggttgagggggggcgtcggtccgttctgggcgggggatgactcacagcccatcccatctccccgacgccgcccgcccgcgcagtgctagctccatggcttagcggaggaggcggcagtggcgagctggggggaggggggactcttattttgttagggggaccgggccgaggcccgaccggcctggcagggctcgcccggggccgggcgtcatgtctcatgcggccgaaccagctcgggatggcgtagaggccagcgcggagggccctcgagccgtgttcgtgctgttggaggagcgcaggccggccgactcggctcagctgctcagcctgaactctttgcttccggaatccgggattgttgctgacatagaattagaaaacgtccttgatcctgacagcttctacgagctcaaaagccaacccttaccccttcgctcaagcctcccaatatcactgcaggccacaccagccaccccagctacactctctgcatcgtcttctgcagggggctccaggacccctgccatgtcgtcatcttcttcatcgagggtcttgctgcggcagcagctaatgcgggcccaggcgcaggagcaggagaggcgtgagcgtcgggaacaggccgccgcggctcccttccccagtcctgcacctgcctctcctgccatctctgtggttggcgtctctgctgggggccacacattgagccgtccaccccctgctcaggtgcccagggaggtgctcaaggtgcagacccatctggagaacccaacgcgctaccacctgcagcaggcgcgccggcagcaggtgaaacagtacctgtccaccacactcgggcccaagctggcttcccaggccctcaccccaccgccggggcccgcaagtgcccagccactgcctgcccctgaggctgcccacactaccggccccacaggcagtgcgcccaacagccccatggcgctgctcaccatcgggtccagctcagagaaggagattgatgatgtcattgatgagatcatcagcctggagtccagttacaatgatgaaatgctcagctatctgcccggaggcaccacaggactgcagctccccagcacggtgaggccctgagatgggaggttggtctgaaaattagggcatttctgtatcaccaagaccatactcagtctggctgtgtgtataggagacccttgccttgattgtgctaagatagagagggaggccttatgacgagaacagggtatgtcaacaatgcctttggaccttgttggactgtgttgagaggtggaccatgtagactgtgagagatacaggtggggagttcactgagacagtagggcatatcaaagtgcttgggctttgctgtgagaa

SEQ ID NO: 299198 - DNA, 162 bp, Homo sapiens
atagaattagaaaacgtccttgatcctgacagcttctacgagctcaaaagccaacccttaccccttcgctcaaggtatgtatgacttgtctatctgattcccctcccaattcctcagccctcctctcccctcttgatgggcagaggccctcagtaccagccc

SEQ ID NO: 299199 - DNA, 1132 bp, Homo sapiens
ggcacgagggccgcccgactgccatcgcccggcccggccgcgcccgcggaaccagaccaggcagatcgggagcggtgccgagaaaaatttccttactagatgacatttcatcgcaatgtccgatcgtttggggcaaattaccaagggcaaggatgggaaaagcaagtactcgactctcagcctgtttgataagtataaaggaaaatcagtagacgcgattagatcctcagttattcctagacatggcttacagagtcttgggaaagttgctgcagcccggcgcatgccaccgcctgcaaacctgccaagcttgaagtctgaaaacaaaggaaacgaccccaacatcgtgatagtacccaaggacgggacgggatgggcaaacaagcaggatcagcaagacccaaagagttccagtgcgacggcctctcagccgccggagtcgctgccgcagccgggtttgcagaaatctgtctccaatttgcagaaaccgacacagtcaatcagtcaggagaatacaaattcagtgccaggtggaccaaagtcatgggcacagctgaatggaaagccagtaggacacgaaggtggtttaaggggctcaagccgactgttatccttctctcccgaggaatttccgacgctgaaagcagctggagggcaggacaaggctggcaaagaaaagggcgtcttagatctgtcgtatgggccaggaccaagcctccgccctcagaatgtgacaagctggagggagggcggtgggcgacacataatttctgccacgtctctgagcacctccccaactgagctgggcagcaggaactcgagtacgggagatggagccccctcctcggcatgtaccagcgattctaaggacccctctctccgcccggctcagcctgtccgaaaaggggcttcacagttcatgggaaatgtataccacccacctacataccatgacatgcttcctgcttttatgtgttcgccgaagtcatcagaaaaccagggtacagtggaacgaggctcttttccccttcctcagctccgccttgaacctcgagttccttttagacagttccagatgaatgaccaagacggaattatggtgctagattagtaaacatgacttttaatgagt

SEQ ID NO: 299200 - DNA, 448 bp, Homo sapiens
ccaccttggcctcccaaagtgctaggattacaggtgtgagccactgtgccaggcaaaagcagcatcttaatccttttggggtggactggggcagggatggcagcacactctgtaggtgttgcctccacaggaaagcagttgccttcttggcctcccctgggctgattttataggaggctgtgcttgtctgtggccccaggcagtcagtagaaccttccctgctggggcaggctgtggcctggagcggctgtgatgtcttacctctttccatttgtaagcaggcactggtccttgcaggtcagctgggaaggggcatgatgctgtcagcagcagtctcccttgccaccctcagcaccctcgtggcatctgccagcacagagcacccttgtgacaagactcccttcaaaagcccacttccaggcaacacggctttcaaggtgtggagctg

SEQ ID NO: 299201 - DNA, 1891 bp, Homo sapiens
  misc_feature (1872)..(1872): n is a, c, g, or t
ggcacgagggccgcccgactgccatcgcccggcccggccgcgcccgcggaaccagaccaggcagatcgggagcggtgccgagaaaaatttccttactagatgacatttcatcgcaatgtccgatcgtttggggcaaattaccaagggcaaggatgggaaaagcaagtactcgactctcagcctgtttgataagtataaaggaaaatcagtagacgcgattagatcctcagttattcctagacatggcttacagagtcttgggaaagttgctgcagcccggcgcatgccaccgcctgcaaacctgccaagcttgaagtctgaaaacaaaggaaacgaccccaacatcgtgatagtacccaaggacgggacgggatgggcaaacaagcaggatcagcaagacccaaagagttccagtgcgacggcctctcagccgccggagtcgctgccgcagccgggtttgcagaaatctgtctccaatttgcagaaaccgacacagtcaatcagtcaggagaatacaaattcagtgccaggtggaccaaagtcatgggcacagctgaatggaaagccagtaggacacgaaggtggtttaaggggctcaagccgactgttatccttctctcccgaggaatttccgacgctgaaagcagctggagggcaggacaaggctggcaaagaaaagggcgtcttagatctgtcgtatgggccaggaccaagcctccgccctcagaatgtgacaagctggagggagggcggtgggcgacacataatttctgccacgtctctgagcacctccccaactgagctgggcagcaggaactcgagtacgggagatggagccccctcctcggcatgtaccagcgattctaaggacccctctctccgcccggctcagcctgtccgaaaaggggcttcacagttcatgggaaatgtataccacccacctacataccatgacatgcttcctgcttttatgtgttcgccgaagtcatcagaaaaccagggtacagtggaacgaggctcttttccccttcctcagctccgccttgaacctcgagttccttttagacagttccagatgaatgaccaagacggaaaagaaaacaggctgggattgtctcgcccactccgcccactaaggcagctggtggagcgggcaccacggcccaccattatcaatgcggaaaacctgaagggccttgacgatctggacgccgatgccgatgatggctgggcaggcctccatgaagaagtggactattctgagaaactgaagttcagtgatgatgaagaggaggaagaagttgtgaaggacggcaggccaaagtggaacagttgggaccctaggaggcagcggcagttgtcaatgagctctgcagacagtgcggacgctaagcggactcgagaggaagggaaggactgggctgaagcagtgggtgcgtcccgtgtggtccgaaaggcgccagaccctcagccaccgcccaggaagcttcatggctgggcaccaggccctgactaccagaagtcatcaatgggcagcatgttccggcaacagtccatcgaggacaaggaggacaagcccccaccaaggcagaagttcattcagtcagagatgtccgaggcggtggagcgagcccgaaagcgccgggaagaagaggagcgccgagcccgggaggagaggctggccgcctgtgctgccaaactcaagcagctggaccagaagtgtaagcaggcacgaaaggcaggtgaggcccggaagcaggcagagaaggaagtgccctggtctccaagtgctgagaaggcatctccccaggaaaacggccctgctgtccacaaaggctccccagaattcctgcccaagatgcccccacctcnggacctctagacaccacca

SEQ ID NO: 299202 - DNA, 2062 bp, Homo sapiens
ggcacgagggccgcccgactgccatcgcccggcccggccgcgcccgcggaaccagaccaggcagatcgggagcggtgccgagaaaaatttccttactagatgacatttcatcgcaatgtccgatcgtttggggcaaattaccaagggcaaggatgggaaaagcaagtactcgactctcagcctgtttgataagtataaaggaaaatcagtagacgcgattagatcctcagttattcctagacatggcttacagagtcttgggaaagttgctgcagcccggcgcatgccaccgcctgcaaacctgccaagcttgaagtctgaaaacaaaggaaacgaccccaacatcgtgatagtacccaaggacgggacgggatgggcaaacaagcaggatcagcaagacccaaagagttccagtgcgacggcctctcagccgccggagtcgctgccgcagccgggtttgcagaaatctgtctccaatttgcagaaaccgacacagtcaatcagtcaggagaatacaaattcagtgccaggtggaccaaagtcatgggcacagctgaatggaaagccagtaggacacgaaggtggtttaaggggctcaagccgactgttatccttctctcccgaggaatttccgacgctgaaagcagctggagggcaggacaaggctggcaaagaaaagggcgtcttagatctgtcgtatgggccaggaccaagcctccgccctcagaatgtgacaagctggagggagggcggtgggcgacacataatttctgccacgtctctgagcacctccccaactgagctgggcagcaggaactcgagtacgggagatggagccccctcctcggcatgtaccagcgattctaaggacccctctctccgcccggctcagcctgtccgaaaaggggcttcacagttcatgggaaatgtataccacccacctacataccatgacatgcttcctgcttttatgtgttcgccgaagtcatcagaaaaccagggtacagtggaacgaggctcttttccccttcctcagctccgccttgaacctcgagttccttttagacagttccagatgaatgaccaagacggaaaagaaaacaggctgggattgtctcgcccactccgcccactaaggcagctggtggagcgggcaccacggcccaccattatcaatgcggaaaacctgaagggccttgacgatctggacgccgatgccgatgatggctgggcaggcctccatgaagaagtggactattctgagaaactgaagttcagtgatgatgaagaggaggaagaagttgtgaaggacggcaggccaaagtggaacagttgggaccctaggaggcagcggcagttgtcaatgagctctgcagacagtgcggacgctaagcggactcgagaggaagggaaggactgggctgaagcagtgggtgcgtcccgtgtggtccgaaaggcgccagaccctcagccaccgcccaggaagcttcatggctgggcaccaggccctgactaccagaagtcatcaatgggcagcatgttccggcaacagtccatcgaggacaaggaggacaagcccccaccaaggcagaagttcattcagtcagagatgtccgaggcggtggagcgagcccgaaagcgccgggaagaagaggagcgccgagcccgggaggagaggctggccgcctgtgctgccaaactcaagcagctggaccagaagtgtaagcaggcacgaaaggcaggtgaggcccggaagcaggcagagaaggaagtgccctggtctccaagtgctgagaaggcatctccccaggaaaacggccctgctgtccacaaaggctccccagaattccctgcccaagagacccccaccacattcccagaagaggcacccacagtgtccccagcagtggcacagagcaacagcagtgaggaagaggccagagaggctgggtcccctgcacaggagttcaagtatcagatcctctcccgatccagcgcacacacacacacagagcacttacaagtcacactgcacgttaccgactcgcttaagattgtagcc

SEQ ID NO: 299203 - DNA, 2092 bp, Homo sapiens
ggcacgagggccgcccgactgccatcgcccggcccggccgcgcccgcggaaccagaccaggcagatcgggagcggtgccgagaaaaatttccttactagatgacatttcatcgcaatgtccgatcgtttggggcaaattaccaagggcaaggatgggaaaagcaagtactcgactctcagcctgtttgataagtataaaggaaaatcagtagacgcgattagatcctcagttattcctagacatggcttacagagtcttgggaaagttgctgcagcccggcgcatgccaccgcctgcaaacctgccaagcttgaagtctgaaaacaaaggaaacgaccccaacatcgtgatagtacccaaggacgggacgggatgggcaaacaagcaggatcagcaagacccaaagagttccagtgcgacggcctctcagccgccggagtcgctgccgcagccgggtttgcagaaatctgtctccaatttgcagaaaccgacacagtcaatcagtcaggagaatacaaattcagtgccaggtggaccaaagtcatgggcacagctgaatggaaagccagtaggacacgaaggtggtttaaggggctcaagccgactgttatccttctctcccgaggaatttccgacgctgaaagcagctggagggcaggacaaggctggcaaagaaaagggcgtcttagatctgtcgtatgggccaggaccaagcctccgccctcagaatgtgacaagctggagggagggcggtgggcgacacataatttctgccacgtctctgagcacctccccaactgagctgggcagcaggaactcgagtacgggagatggagccccctcctcggcatgtaccagcgattctaaggacccctctctccgcccggctcagcctgtccgaaaaggggcttcacagttcatgggaaatgtataccacccacctacataccatgacatgcttcctgcttttatgtgttcgccgaagtcatcagaaaaccagggtacagtggaacgaggctcttttccccttcctcagctccgccttgaacctcgagttccttttagacagttccagatgaatgaccaagacggaaaagaaaacaggctgggattgtctcgcccactccgcccactaaggcagctggtggagcgggcaccacggcccaccattatcaatgcggaaaacctgaagggccttgacgatctggacgccgatgccgatgatggctgggcaggcctccatgaagaagtggactattctgagaaactgaagttcagtgatgatgaagaggaggaagaagttgtgaaggacggcaggccaaagtggaacagttgggaccctaggaggcagcggcagttgtcaatgagctctgcagacagtgcggacgctaagcggactcgagaggaagggaaggactgggctgaagcagtgggtgcgtcccgtgtggtccgaaaggcgccagaccctcagccaccgcccaggaagcttcatggctgggcaccaggccctgactaccagaagtcatcaatgggcagcatgttccggcaacagtccatcgaggacaaggaggacaagcccccaccaaggcagaagttcattcagtcagagatgtccgaggcggtggagcgagcccgaaagcgccgggaagaagaggagcgccgagcccgggaggagaggctggccgcctgtgctgccaaactcaagcagctggaccagaagtgtaagcaggcacgaaaggcaggtgaggcccggaagcaggcagagaaggaagtgccctggtctccaagtgctgagaaggcatctccccaggaaaacggccctgctgtccacaaaggctccccagaattccctgcccaagagacccccaccacattcccagaagaggcacccacagtgtccccagcagtggcacagagcaacagcagtgaggaagaggccagagaggctgggtcccctgcacaggagttcaagtatcagaagtcccttcctccccgattccagcgccagcagcagcaacaacagcaggagcagctgtacaagatgcagcactggcagccggtgtaccccccgccgtcccacccccagcgcacc

SEQ ID NO: 299204 - DNA, 1643 bp, Homo sapiens
ggcacgagggccgcccgactgccatcgcccggcccggccgcgcccgcggaaccagaccaggcagatcgggagcggtgccgagaaaaatttccttactagatgacatttcatcgcaatgtccgatcgtttggggcaaattaccaagggcaaggatgggaaaagcaagtactcgactctcagcctgtttgataagtataaaggaaaatcagtagacgcgattagatcctcagttattcctagacatggcttacagagtcttgggaaagttgctgcagcccggcgcatgccaccgcctgcaaacctgccaagcttgaagtctgaaaacaaaggaaacgaccccaacatcgtgatagtacccaaggacgggacgggatgggcaaacaagcaggatcagcaagacccaaagagttccagtgcgacggcctctcagccgccggagtcgctgccgcagccgggtttgcagaaatctgtctccaatttgcagaaaccgacacagtcaatcagtcaggagaatacaaattcagtgccaggtggaccaaagtcatgggcacagctgaatggaaagccagtaggacacgaaggtggtttaaggggctcaagccgactgttatccttctctcccgaggaatttccgacgctgaaagcagctggagggcaggacaaggctggcaaagaaaagggcgtcttagatctgtcgtatgggccaggaccaagcctccgccctcagaatgtgacaagctggagggagggcggtgggcgacacataatttctgccacgtctctgagcacctccccaactgagctgggcagcaggaactcgagtacgggagatggagccccctcctcggcatgtaccagcgattctaaggacccctctctccgcccggctcagcctgtccgaaaaggggcttcacagttcatgggaaatgtataccacccacctacataccatgacatgcttcctgcttttatgtgttcgccgaagtcatcagaaaaccagggtacagtggaacgaggctcttttccccttcctcagctccgccttgaacctcgagttccttttagacagttccagatgaatgaccaagacggaaaagaaaacaggctgggattgtctcgcccactccgcccactaaggcagctggtggagcgggcaccacggcccaccattatcaatgcggaaaacctgaagggccttgacgatctggacgccgatgccgatgatggctgggcaggtgggcagagaagcacgggtggtttagacgggcaggaccaaagtccatctgtacttaccagggatggaaaccccctggcaccaccgtgtgttttcccttggcaagatagggatgaagagccggacagggaagcagacctgatgccctccttcctcatttactccctgactagcggttccttcctggccaagccattagcttcttttggtctttagtcttgatcttagagttttgttgttaactttttaaaaattattgatgatgcaaaatttaaacaaaaaagaaaatagctcccaaccactgatcactcaggttcaataagtaccaatgttctgccattcggtttttgtttgttttaatttaatttttttccaagagacagggtctcagctactctgggcatactgc

SEQ ID NO: 299205 - DNA, 871 bp, Homo sapiens
ggcacgagggccgcccgactgccatcgcccggcccggccgcgcccgcggaaccagaccaggcagatcgggagcggtgccgagaaaaatttccttactagatgacatttcatcgcaatgtccgatcgtttggggcaaattaccaagggcaaggatgggaaaagcaagtactcgactctcagcctgtttgataagtataaaggaaaatcagtagacgcgattagatcctcagttattcctagacatggcttacagagtcttgggaaagttgctgcagcccggcgcatgccaccgcctgcaaacctgccaagcttgaagtctgaaaacaaaggaaacgaccccaacatcgtgatagtacccaaggacgggacgggatgggcaaacaagcaggatcagcaagacccaaagagttccagtgcgacggcctctcagccgccggagtcgctgccgcagccgggtttgcagaaatctgtctccaatttgcagaaaccgacacagtcaatcagtcaggagaatacaaattcagtgccaggtggaccaaagtcatgggcacagctgaatggaaagccagtaggacacgaaggtggtttaaggggctcaagccgactgttatccttctctcccgaggaatttccgacgctgaaagcagctggagggcaggacaaggctggcaaagaaaagggcgtcttagatctgtcgtatgggccatgctggcccttacgcgcagccttacctcataaggtctacagtggaggggcgcttctccctcttcaaaaacgtactcacccatggcacatgcaaaattttattgtaaaacggtagccatttgcatttataaagaaagacaccgttctcagcatcctcagaatggcc

SEQ ID NO: 299206 - DNA, 636 bp, Homo sapiens
ggcacgagggccgcccgactgccatcgcccggcccggccgcgcccgcggaaccagaccaggcagatcgggagcggtgccgagaaaaatttccttactagatgacatttcatcgcaatgtccgatcgtttggggcaaattaccaagggcaaggatgggaaaagcaagtactcgactctcagcctgtttgataagtataaaggaaaatcagtagacgcgattagatcctcagttattcctagacatggcttacagagtcttgggaaagttgctgcagcccggcgcatgccaccgcctgcaaacctgccaagcttgaagtctgaaaacaaaggaaacgaccccaacatcgtgatagtacccaaggacgggacgggatgggcaaacaagcaggatcagcaagacccaaagagttccagtgcgacggcctctcagccgccggagtcgctgccgcagccgggtttgcagaaatctgtctccaatttgcagaaaccgacacagtcaatcagtcaggagaatacaaattcagtgccaggtggaccaaagtcatgggcacagctgaatggaaagccagtaggacacgaaggtggtaagtgcgcacgtgagtgtgttgcttgttccgctggggagagggaggtgaa

SEQ ID NO: 299207 - DNA, 370 bp, Homo sapiens
agagcacccttgtgacaagactcccttcaaaagcccacttccaggcaacacggctttcaaggtgtggagctgggaagcagacgactgttgactccatctcacttcctccatgtctaccccgtcttcttgacaggtttaaggggctcaagccgactgttatccttctctcccgaggaatttccgacgctgaaagcagctggagggcaggacaaggctggcaaagaaaagggcgtcttagatctgtcgtatgggccaggaccaagcctccgccctcagagtaagtgactgcagcctctgggcactcgatggagtaacagaacttcctcctctcatctctctgcactcctaaaagggtgctgatgccactggg

SEQ ID NO: 299208 - DNA, 720 bp, Homo sapiens
gcatccggcgcgcggcggttgaattgctgcgcccagcgaggcaaccgcctccgaacgccaggtgggggcgaggcgtctcggagtctcagagacaccaaggcccctgcgacaaggtggctgcagctaggccgggggcgtcaggacgacggagcgggttcgggtcggtgacacgcagacctgagggagctgggcccgccttttccgcccgcgccccaggcccttgcagatcgagatttgcgtcctagagtgggaaaaaagcagaggccagggcgccgattttatttggagagaagcaagcatctttgcctctttggagtaggaaattcagacttgaaaaagtggtgtgtggttgactctgtttctcgccatgtcttctcacaagactttcaccattaagcgattcctggccaagaaacaaaagcaaaatcgtcccatcccccagtggattcagatgaaacctggtagtaaaatcaggtacaactccaaaaggaggcattggagaagaaccaagctgggtctataaggaattgcacatgagatggcacacatatttatgctgtatcaagttcacgatcatcttacgatatcaagctgaaaatgtcaccactacctggacagttgcacatgttttactgggaatatttttttctgtttttctgtatgctctgtgctagtagggtggattcagtaataaatatgtgaaagcttttgtttcaaaaa

SEQ ID NO: 299209 - DNA, 1528 bp, Homo sapiens
  misc_feature (767)..(767): n is a, c, g, or t
gcatccggcgcgcggcggttgaattgctgcgcccagcgaggcaaccgcctccgaacgccaggtgggggcgaggcgtctcggagtctcagagacaccaaggcccctgcgacaaggtggctgcagctaggccgggggcgtcaggacgacggagcgggttcgggtcggtgacacgcagacctgagggagctgggcccgccttttccgcccgcgccccaggcccttgcagatcgagatttgcgtcctagagtgggaaaaaagcagaggccagggcgccgattttatttggagagaagcaagcatctttgcctctttggagtaggaaattcagacttgaaaaagtggtgtgtggttgactctgtttctcgccatgtcttctcacaagactttcaccattaagcgattcctggccaagaaacaaaagcaaaatcgtcccatcccccagtggattcagatgaaacctggtagtaaaatcaggtacaactccaaaaggaggcattggagaagaaccaagctgggtctataaggaattgcacatgagatggcacacatatttatgctgtatcaagttcacgatcatcttacgatatcaagctgaaaatgtcaccactacctggacagttgcacatgttttactgggaatatttttttctgtttttctgtatgctctgtgctagtagggtggattcagtaataaatatgtgaaagcttttgtttcaaaaaaaaaaaaaaaaaaaaaaaaaaaaaaaaaaaaaaaaaaaaaaaaaaanaaaaagaagagaggggcgggcgccctcccaagagagtgcttctctcccgccagcgagggggcgcgccaaggcagtgctgcgcgcgcagctcacaccgcgagttttggatggtgccacagagagggtcgcgcccccactacgggggggagcggctgtatcatcaacacagcacgccaagcgcgacgccgggggccgcgacggcgcctattatatctcccacaaaacgcgcccgggaaccaagaggagagaacaaacacgcgcccgtccaccaagcggaggcacacccatctctgagacgaacaaaacgcacccgccaacaaatagggcaggcaggacagtgtgacgcacacaacagaagggcagccacacacagcaccccgtcccaccaacgcaacagatcaactccacagacgccccccccaacccggcggcacacacacacccccacgccaccaccctccccagacggccgccagcaacatccaagacgccgccaccaacaacccgcacagcccgccactcagagcgcgcgccctgcgcccgcgcgcggcagaaccgaccagaccatccgcgcaccgcaccaccccagcgcgggcgaagccccgcagcactcgccctccagcacgccacacactgacgtctgtcacccacgccgcccccgggagcaccaccggccaaggaccggacaacaaacaccgcccgagctccaccgcacacaccaggcgcgccaccgccgccacgcccacccgcacgcgccgccc

SEQ ID NO: 299210 - DNA, 797 bp, Homo sapiens
gcatccggcgcgcggcggttgaattgctgcgcccagcgaggcaaccgcctccgaacgccaggtgggggcgaggcgtctcggagtctcagagacaccaaggcccctgcgacaaggtggctgcagctaggccgggggcgtcaggacgacggagcgggttcgggtcggtgacacgcagacctgagggagctgggcccgccttttccgcccgcgccccaggcccttgcagatcgagatttgcgtcctagagtgggaaaaaagcagaggccagggcgccgattttatttggagagaagcaagcatctttgcctctttggagtaggaaattcagacttgaaaaagtggtgtgtggttgactctgtttctcgccatgtcttctcacaagactttcaccattaagcgattcctggccaagaaacaaaagcaaaatcgtcccatcccccagtggattcagatgaaacctggtagtaaaatcaggtacaactccaaaaggaggcattggagaagaaccaagctgggtctataaggaattgcacatgagatggcacacatatttatgctgtatcaagttcacgatcatcttacgatatcaagctgaaaatgtcaccactacctggacagttgcacatgttttactgggaatatttttttctgtttttctgtatgctctgtgctagtagggtggattcagtaataaatatgtgaaagcttttgtttcaaaaattgtaaaaatattttattaatattaatgtcttttaatatcgattaaatgatattttcatcttttgggtctctaattt

SEQ ID NO: 299211 - DNA, 1092 bp, Homo sapiens
  misc_feature (767)..(767): n is a, c, g, or t
gcatccggcgcgcggcggttgaattgctgcgcccagcgaggcaaccgcctccgaacgccaggtgggggcgaggcgtctcggagtctcagagacaccaaggcccctgcgacaaggtggctgcagctaggccgggggcgtcaggacgacggagcgggttcgggtcggtgacacgcagacctgagggagctgggcccgccttttccgcccgcgccccaggcccttgcagatcgagatttgcgtcctagagtgggaaaaaagcagaggccagggcgccgattttatttggagagaagcaagcatctttgcctctttggagtaggaaattcagacttgaaaaagtggtgtgtggttgactctgtttctcgccatgtcttctcacaagactttcaccattaagcgattcctggccaagaaacaaaagcaaaatcgtcccatcccccagtggattcagatgaaacctggtagtaaaatcaggtacaactccaaaaggaggcattggagaagaaccaagctgggtctataaggaattgcacatgagatggcacacatatttatgctgtatcaagttcacgatcatcttacgatatcaagctgaaaatgtcaccactacctggacagttgcacatgttttactgggaatatttttttctgtttttctgtatgctctgtgctagtagggtggattcagtaataaatatgtgaaagcttttgtttcaaaaaaaaaaaaaaaaaaaaaaaaaaaaaaaaaaaaaaaaaaaaaaaaaaanaaaaaaaaaaaaaaaaaaaaaaaaaaaaaaaaaaaaaaagggggcacacaacacaaaagaaaaacacacacagggaggggcgacaacaaacaaaacaacacacaaccacagataagcagcagaaaaagagagagagcgacccaaaagacggaggggaataactaaccagacaggcgacgggggggcagaaaagaaaaaaaccacgagagggaaaaaaccacacgcaagcgacagtaccgagcaagaccacacaacaacggcgggggaaacagcagacaaaccacaaaagaaaaaacgcgcagcgaaataacgcgagggcacaagg

SEQ ID NO: 299212 - DNA, 656 bp, Homo sapiens
gcatccggcgcgcggcggttgaattgctgcgcccagcgaggcaaccgcctccgaacgccaggtgggggcgaggcgtctcggagtctcagagacaccaaggcccctgcgacaaggtggctgcagctaggccgggggcgtcaggacgacggagcgggttcgggtcggtgacacgcagacctgagggagctgggcccgccttttccgcccgcgccccaggcccttgcagatcgagatttgcgtcctagagtgggaaaaaagcagaggccagggcgccgtggtgtgtggttgactctgtttctcgccatgtcttctcacaagactttcaccattaagcgattcctggccaagaaacaaaagcaaaatcgtcccatcccccagtggattcagatgaaacctggtagtaaaatcaggtacaactccaaaaggaggcattggagaagaaccaagctgggtctataaggaattgcacatgagatggcacacatatttatgctgtatcaagttcacgatcatcttacgatatcaagctgaaaatgtcaccactacctggacagttgcacatgttttactgggaatatttttttctgtttttctgtatgctctgtgctagtagggtggattcagtaataaatatgtgaaagcttttgtttcaaaaa

SEQ ID NO: 299213 - DNA, 1464 bp, Homo sapiens
  misc_feature (703)..(703): n is a, c, g, or t
gcatccggcgcgcggcggttgaattgctgcgcccagcgaggcaaccgcctccgaacgccaggtgggggcgaggcgtctcggagtctcagagacaccaaggcccctgcgacaaggtggctgcagctaggccgggggcgtcaggacgacggagcgggttcgggtcggtgacacgcagacctgagggagctgggcccgccttttccgcccgcgccccaggcccttgcagatcgagatttgcgtcctagagtgggaaaaaagcagaggccagggcgccgtggtgtgtggttgactctgtttctcgccatgtcttctcacaagactttcaccattaagcgattcctggccaagaaacaaaagcaaaatcgtcccatcccccagtggattcagatgaaacctggtagtaaaatcaggtacaactccaaaaggaggcattggagaagaaccaagctgggtctataaggaattgcacatgagatggcacacatatttatgctgtatcaagttcacgatcatcttacgatatcaagctgaaaatgtcaccactacctggacagttgcacatgttttactgggaatatttttttctgtttttctgtatgctctgtgctagtagggtggattcagtaataaatatgtgaaagcttttgtttcaaaaaaaaaaaaaaaaaaaaaaaaaaaaaaaaaaaaaaaaaaaaaaaaaaanaaaaagaagagaggggcgggcgccctcccaagagagtgcttctctcccgccagcgagggggcgcgccaaggcagtgctgcgcgcgcagctcacaccgcgagttttggatggtgccacagagagggtcgcgcccccactacgggggggagcggctgtatcatcaacacagcacgccaagcgcgacgccgggggccgcgacggcgcctattatatctcccacaaaacgcgcccgggaaccaagaggagagaacaaacacgcgcccgtccaccaagcggaggcacacccatctctgagacgaacaaaacgcacccgccaacaaatagggcaggcaggacagtgtgacgcacacaacagaagggcagccacacacagcaccccgtcccaccaacgcaacagatcaactccacagacgccccccccaacccggcggcacacacacacccccacgccaccaccctccccagacggccgccagcaacatccaagacgccgccaccaacaacccgcacagcccgccactcagagcgcgcgccctgcgcccgcgcgcggcagaaccgaccagaccatccgcgcaccgcaccaccccagcgcgggcgaagccccgcagcactcgccctccagcacgccacacactgacgtctgtcacccacgccgcccccgggagcaccaccggccaaggaccggacaacaaacaccgcccgagctccaccgcacacaccaggcgcgccaccgccgccacgcccacccgcacgcgccgccc

SEQ ID NO: 299214 - DNA, 124 bp, Homo sapiens
cagacctgagggagctgggcccgccttttccgcccgcgccccaggcccttgcagatcgagatttgcgtcctagagtgggaaaaaagcagaggccagggcgccggtaagtaaaggttcctcctca

SEQ ID NO: 299215 - DNA, 1026 bp, Homo sapiens
aggaatttgtgccttcataggctgaagacttaaaggttggagatgctatggagccctgcagaagagggatctgctttctggcaaaccgggtgttgatgattcatggcctacctcagatgacgaagacctcaattttgatactaagaatgtcccaaaaccaagcttagcaaagctaatgactgcttctcagcaatccaggaaaaatttagaagcaacatatggcactgtgagaacaggaaatagaactttgtttgaggatagagattccgatagtcaagatgaagttgtggttgaaagccttcctacaacatcaatcaaagtccagtgcttttctcatcctacctatcaatcacctgaccttcttccaaaaccttcccacaagtcgttagcaaaccctggtcttatgaaggtaagttgttttttaaaaaacttttttcatgtacccttcccctgccccaacaatcctcataatgatgcatctattgagatgatcatacagtttttgtttctaattatgtttatgtgatgaatcacatttaagacttgcatatgttgaaccatccctgcatccttgaaatgaaacccacttgatcatggtgaattattactttgtgatgtgctgttggattcggtttgctagtattttcttgaggatttttgtatctatattcatcagagatattggtctgcagttttctttttttgttatgtccttttctggctttggtattagggtgatactggctttatagaatgagttagggaggatttcccccttctcaaccttttggagtagtttcagtagaattgttatcagttcttttttgaatgtctggtagaatttagctgtgaatccgtgtggccctgggtttttttcttgttggcggttttaaaattactgattcaatctcactgcttattactggtctgttcaggatttctattttttcctaattcaagctagaggagttacgtgtttcccggaatttttcagtttcctctagattttctagtttgtgtgcatag

SEQ ID NO: 299216 - DNA, 536 bp, Homo sapiens
cccagttcgaggagactctcagatactgggattctgagagtatctctgagaattttccacagaagtatgttgatcctttagctggggctgcagacggaaaagaaaaaaatataggaaatgaacaagcagaagatgtgttttatataccttcttgcatgagtggatcaagaaactttaagatggctaaactagaggatacaagaaatgtaggcatgccagtagcccacatggatctcctgagagagtctccgtcgaactagttcgacggagactctcactttgaataacaaccaaagtgagagtccacgcaaaatataaatattaaaaagttagaaatactcatttttgctcagttttatcttttgaatttgatttaaacgtaaaaattaactagaaaactattaaaattcttcctatttcttatcccattctctgtctctcataggtaatcatttttaattaatttcagtttatccttctggttttcttttcttttctttttttttttccgaaaaaagccagtagctttatgtatt

SEQ ID NO: 299217 - DNA, 6770 bp, Homo sapiens
gtctagcgggatcgcttgcttggtaacccggagggagagattggaaaccgcggagtttcctttgggaggctgcggccagccggggctgacttgttatgttgggctccggaggccgttaagagccgagagagacatgaggtgtctctgaagcccggtcgcctgggccatgaagaagatttttagtaagaagggcgagtcgcccttgggctccttcgcgcggcggcggaggagcagcgcgggaggcgggggcgagccgggggagggcgcctactcgcagcccggctaccacgtccgagaccgagatctcggcaagatccacaaagctgccagcgcgggtaatgtggcgaaagtgcagcagatccttttgctcaggaagaatggcttgaacgatagagacaagatgaacaggacggctctacatttggcctgtgccaatggtcatccagaagtagtaactctcctggtggacagaaaatgccagctcaatgtctgtgacaacgaaaacaggacagctctgatgaaggctgtacaatgccaggaagagaaatgtgcaactattctgctagaacatggtgctgatccaaatcttgcggatgtccatggcaacactgctcttcactatgctgtctataatgaggacatatcagtagcaacaaagctgcttttgtatgatgcaaatattgaagcaaaaaacaaggatgacctcacaccacttttacttgcagtaagtggaaaaaagcagcaaatggtggaatttttaataaagaaaaaagcaaatgtaaatgcagtagataagttggaaagcagtcaccaactaatttcagaatataaagaagaaaggatacctaaacattcttctcaaaatagtaattcagtggatgaaagctctgaagactccttaagcaggctttctggcaaaccgggtgttgatgattcatggcctacctcagatgacgaagacctcaattttgatactaagaatgtcccaaaaccaagcttagcaaagctaatgactgcttctcagcaatccaggaaaaatttagaagcaacatatggcactgtgagaacaggaaatagaactttgtttgaggatagagattccgatagtcaagatgaagttgtggttgaaagccttcctacaacatcaatcaaagtccagtgcttttctcatcctacctatcaatcacctgaccttcttccaaaaccttcccacaagtcgttagcaaaccctggtcttatgaaggaagaaccaacaaagccaggcattgcaaaaaaagaaaatggtattgatattattgaaagtgctccactagagcaaacaaataatgacaatttgacttatgttgatgaagtgcacaaaaataatagaagtgatatgatgtccgcattaggattaggacaagaggaagatatagaatcaccttgggattctgagagtatctctgagaattttccacagaagtatgttgatcctttagctggggctgcagacggaaaagaaaaaaatataggaaatgaacaagcagaagatgtgttttatataccttcttgcatgagtggatcaagaaactttaagatggctaaactagaggatacaagaaatgtaggcatgccagtagcccacatggagtctcctgagagatatcttcacttgaagcctaccattgaaatgaaagattctgttccaaataaagcaggaggaatgaaggatgtacaaacatccaaagcagctgaacatgacttagaagtagcatcagaagaagagcaagaaagggaagggagtgaaaataaccagccacaggttgaagaagaaaggaaaaaacacagaaataatgaaatggaagtatcagcaaacatacatgatggtgctactgatgatgctgaagatgatgatgatgatgatggattaattcaaaaaagaaagagtggagaaactgatcatcagcaatttcccaggaaggaaaataaagagtatgctagtggtcctgccttgcaaatgaaggaagtaaagagcactgaaaaagaaaaacggacctcgaaagaatctgtgaattcaccagtgtttgggaaggccagtttactaactggtggcctgctacaagtggatgatgacagcagtttaagtgaaatagatgaggatgaaggaaggcctactaagaaaacatctaatgaaaagaacaaggtcaaaaaccaaatacagtctatggatgatgttgatgacttaactcagtcatctgaaacagcctcagaggattgtgagctaccccactctagttacaagaattttatgttgctcattgaacaacttggaatggagtgtaaagattctgttagcctattgaaaatccaggatgcagctctttcatgtgaaagattattagaacttaaaaaaaatcactgtgaactacttacagtaaaaattaaaaaaatggaagacaaggttaatgtactacaaagggagctatctgaaacaaaagaaataaaatcacagttagagcatcaaaaagttgaatgggaacgagaactgtgctctttgagatttagcttaaaccaagaagaagagaagagaagaaatgctgatacgttgtatgaaaaaattagggaacagttaagaagaaaagaagagcaatataggaaagaagttgaagtgaaacaacagcttgaactgagtctccaaacactggagatggaattgaggactgtaaaaagtaatttgaatcaggtcgttcaagagcgaaatgacgctcagaggcaactttctcgagaacagaatgccagaatgttacaagatggaattctgaccaatcacctttccaaacaaaaggagattgaaatggctcaaaagaaaatgaattctgagaattctcatagtcatgaagaagaaaaagacctatcgcataaaaatagcatgttgcaggaagaaattgctatgctaagactagaaatagacacaataaaaaatcaaaaccaggaaaaagaaaagaaatgttttgaggaccttaaaattgtaaaagaaaagaatgaagaccttcagaagactataaaacagaatgaggaaacattaacacaaacaatatcccagtataatggacggcttagtgttctgacagctgagaatgcaatgctaaattctaaactggagaatgaaaagcaaagcaaggaaagactggaagcagaagttgaatcataccattctagattggctgctgctatacatgatcgtgatcaaagtgagacatcaaaaagagaactagaacttgctttccagagagcaagagatgaatgttctcgtttacaggacaaaatgaattttgatgtgtctaacctaaaagataacaatgagattctttctcaacaactatttaaaactgaaagtaaactcaatagcctagaaattgagttccatcacacgagagatgccctcagagaaaagactttgggtttagaacgggtacaaaaggacctaagccaaacacagtgtcaaatgaaggaaatggaacaaaagtatcaaaatgaacaagttaaagtgaataaatacattggaaagcaggagtctgtagaggagagattgtctcaactacaaagtgagaatatgttgcttcgacaacaactggatgatgcccacaacaaggctgacaataaagagaagacagtgattaatatccaagaccagtttcatgctattgtgcaaaaacttcaagctgagagtgaaaagcaaagtcttctgctagaagaaagaaataaggagttaatcagtgaatgtaatcacttaaaagaaagacagtatcaatatgaaaatgaaaaggcagaaagagaagttgttgtgagacaacttcaacaagaactagctgataccctaaaaaaacaatctatgtcagaggcttcactggaggttacgtcacgttatcgtattaatttagaagatgagacacaggatttaaagaagaaattaggtcaaatcagaaatcaattgcaagaagcacaggatcgacatacagaagctgtcagatgtgctgagaagatgcaagatcacaagcaaaagcttgaaaaagataatgccaagttaaaagttacagtcaaaaagcaaatggacaaaattgaggagcttcagaaaaacctgttaaatgcaaatttgtctgaagatgaaaaggaacaattaaagaaacttatggaattaaaacagtcactggaatgtaatttggatcaagaaatgaagaaaaatgttgaattagaaagagagataactggatttaagaacctcttaaaaatgacaagaaagaagttaaatgaatatgaaaatggagaatttagtttccatggagatttaaaaactagtcaatttgaaatggatattcagattaataagctaaaacataagattgatgatcttacagcagaactggagactgcaggttcaaaatgtctacatctggatacaaagaaccaaattcttcaagaggagttgttatctatgaaaacagtacaaaagaaatgtgaaaaactacagaagaataaaaagaagttggaacaagaagtgatcaacctgagaagtcatatagaaaggaatatggtagaacttggtcaagtcaaacagtataaacaggagattgaagaaagagcaagacaggaaatagcagaaaaattaaaagaagtcaatctatttttacaggcacaagcagcatctcaagaaaacttagagcagtttagagagaataattttgcttcaatgaaaagtcagatggaactcagaattaaagatctggaatctgaactctccaaaataaaaacttctcaagaagactttaataaaaccgaactggaaaaatataagcaactctatctagaagaattaaaagttagaaaatctttgtcaagtaaactaaccaaaactaatgagaggctagcagaggtcaacaccaaacttcttgtggaaaaacagcagagcagatctttgttcaccactctcactaccaggccagtcatggagccaccttgtgtgggaaatcttaataatagtttagatctcaacagaaaacttattccaagagaaaacttagtgatctctacctcaaatccacgggcttcaaataatagcatggagaactacttgagcaagatgcagcaggagttggaaaaaaatataactagagaactcaaagaagctgctgctgaattggaatctggatcaatagcttcccctctagggtctactgatgagtcaaatctaaatcaagatctagtttggaaagcatcaagagaatatgtacaggttttaaagaaaaattatatgatctgaaagataagattttattactgggctgtttatgtgacattttgtttctcattaaatattaatatatgacatgtaaaaatattaaaggaacgtatttttgtatcatatatgtcagatcaaaatttatatagtattttaaacaatgttacttggcttctttaacttttaagtggattttgccaatgaaaaccaggaatattgagttttacatactcaaactgcccaaatgtgagctgtttaaacagccaaaccactaagttgtcattaatactttagtgcagttaattgatggcttatttgtattttgtaatttttatcactatatgtagtggtagatgtctaattggacttagacatcattttgttgtgcaggaactgtggtcattgttcatgtttggatgtattacaattgttacagtgccatcaaatttacataattttaattttaagcactgatttatatagctgttctcagggagaaacaagatttgcctgattcaccttttctgtttgtttatttatttttaattaaccttttggaaatagccttcagtttagagaaaatttcgaagttttagtacaaagactttctcctccgaacaatttgagagtaaattgctgacattatgtcatcacccctgattactttagtgggcattcctacaagtcaggacattctacataactacagtgcaaaccttgcaatcagaaagtcaacattaatacattctagtttgttacttctctgtaatgtcctttatagcaaaaggatcccattctaatccatggcttgtatttagttgttgtatctgttagatctttcagtctggaacagttcctcagtctttccttgaccttcatgaccttgaatattttgaagagtaaagtctggtaatataagaatgtccctcaattgggtttcatggtgattagatttagattatatgattttttggcaggagtatcacagaagtgacccagtgatcttctcattgcatcttacctgtgaccctacagttttgatttgccctgttactggtaatgttagcattgatcactaacagtggtatctgctgaatttctcctctgtaatgttattttttcaccttgtggttaattagtattttacagggaggtaatttgagactatgtacatatctctactccccatcgaaccctcaatttattcatttgcttgtatcaaataaaccatggattcatggtttattttattcagtgagttataattcattaatattgttattaaaaatttgtttttcttttaagaaatgttatattttgacaacttcagacttacagaaagattataagaggtagtacaaataatttttggatattattccccaaatgttaacattttactgcatttactttatcctttctcccccttctcctcctgtctttctagatgaatatgaatataggtacttaatacagattttttttctaaactgtt

SEQ ID NO: 299218 - DNA, 6846 bp, Homo sapiens
gtctagcgggatcgcttgcttggtaacccggagggagagattggaaaccgcggagtttcctttgggaggctgcggccagccggggctgacttgttatgttgggctccggaggccgttaagagccgagagagacatgaggtgtctctgaagcccggtcgcctgggccatgaagaagatttttagtaagaagggcgagtcgcccttgggctccttcgcgcggcggcggaggagcagcgcgggaggcgggggcgagccgggggagggcgcctactcgcagcccggctaccacgtccgagaccgagatctcggcaagatccacaaagctgccagcgcgggtaatgtggcgaaagtgcagcagatccttttgctcaggaagaatggcttgaacgatagagacaagatgaacaggacggctctacatttggcctgtgccaatggtcatccagaagtagtaactctcctggtggacagaaaatgccagctcaatgtctgtgacaacgaaaacaggacagctctgatgaaggctgtacaatgccaggaagagaaatgtgcaactattctgctagaacatggtgctgatccaaatcttgcggatgtccatggcaacactgctcttcactatgctgtctataatgaggacatatcagtagcaacaaagctgcttttgtatgatgcaaatattgaagcaaaaaacaaggatgacctcacaccacttttacttgcagtaagtggaaaaaagcagcaaatggtggaatttttaataaagaaaaaagcaaatgtaaatgcagtagataagttggaaagcagtcaccaactaatttcagaatataaagaagaaaggatacctaaacattcttctcaaaatagtaattcagtggatgaaagctctgaagactccttaagcaggctttctggcaaaccgggtgttgatgattcatggcctacctcagatgacgaagacctcaattttgatactaagaatgtcccaaaaccaagcttagcaaagctaatgactgcttctcagcaatccaggaaaaatttagaagcaacatatggcactgtgagaacaggaaatagaactttgtttgaggatagagattccgatagtcaagatgaagttgtggttgaaagccttcctacaacatcaatcaaagtccagtgcttttctcatcctacctatcaatcacctgaccttcttccaaaaccttcccacaagtcgttagcaaaccctggtcttatgaaggaagaaccaacaaagccaggcattgcaaaaaaagaaaatggtattgatattattgaaagtgctccactagagcaaacaaataatgacaatttgacttatgttgatgaagtgcacaaaaataatagaagtgatatgatgtccgcattaggattaggacaagaggaagatatagaatcaccttgggattctgagagtatctctgagaattttccacagaagtatgttgatcctttagctggggctgcagacggaaaagaaaaaaatataggaaatgaacaagcagaagatgtgttttatataccttcttgcatgagtggatcaagaaactttaagatggctaaactagaggatacaagaaatgtaggcatgccagtagcccacatggagtctcctgagagatatcttcacttgaagcctaccattgaaatgaaagattctgttccaaataaagcaggaggaatgaaggatgtacaaacatccaaagcagctgaacatgacttagaagtagcatcagaagaagagcaagaaagggaagggagtgaaaataaccagccacaggttgaagaagaaaggaaaaaacacagaaataatgaaatggaagtatcagcaaacatacatgatggtgctactgatgatgctgaagatgatgatgatgatgatggattaattcaaaaaagaaagagtggagaaactgatcatcagcaatttcccaggaaggaaaataaagagtatgctagtggtcctgccttgcaaatgaaggaagtaaagagcactgaaaaagaaaaacggacctcgaaagaatctgtgaattcaccagtgtttgggaaggccagtttactaactggtggcctgctacaagtggatgatgacagcagtttaagtgaaatagatgaggatgaaggaaggcctactaagaaaacatctaatgaaaagaacaaggtcaaaaaccaaatacagtctatggatgatgttgatgacttaactcagtcatctgaaacagcctcagaggattgtgagctaccccactctagttacaagaattttatgttgctcattgaacaacttggaatggagtgtaaagattctgttagcctattgaaaatccaggatgcagctctttcatgtgaaagattattagaacttaaaaaaaatcactgtgaactacttacagtaaaaattaaaaaaatggaagacaaggttaatgtactacaaagggagctatctgaaacaaaagaaataaaatcacagttagagcatcaaaaagttgaatgggaacgagaactgtgctctttgagatttagcttaaaccaagaagaagagaagagaagaaatgctgatacgttgtatgaaaaaattagggaacagttaagaagaaaagaagagcaatataggaaagaagttgaagtgaaacaacagcttgaactgagtctccaaacactggagatggaattgaggactgtaaaaagtaatttgaatcaggtcgttcaagagcgaaatgacgctcagaggcaactttctcgagaacagaatgccagaatgttacaagatggaattctgaccaatcacctttccaaacaaaaggagattgaaatggctcaaaagaaaatgaattctgagaattctcatagtcatgaagaagaaaaagacctatcgcataaaaatagcatgttgcaggaagaaattgctatgctaagactagaaatagacacaataaaaaatcaaaaccaggaaaaagaaaagaaatgttttgaggaccttaaaattgtaaaagaaaagaatgaagaccttcagaagactataaaacagaatgaggaaacattaacacaaacaatatcccagtataatggacggcttagtgttctgacagctgagaatgcaatgctaaattctaaactggagaatgaaaagcaaagcaaggaaagactggaagcagaagttgaatcataccattctagattggctgctgctatacatgatcgtgatcaaagtgagacatcaaaaagagaactagaacttgctttccagagagcaagagatgaatgttctcgtttacaggacaaaatgaattttgatgtgtctaacctaaaagataacaatgagattctttctcaacaactatttaaaactgaaagtaaactcaatagcctagaaattgagttccatcacacgagagatgccctcagagaaaagactttgggtttagaacgggtacaaaaggacctaagccaaacacagtgtcaaatgaaggaaatggaacaaaagtatcaaaatgaacaagttaaagtgaataaatacattggaaagcaggagtctgtagaggagagattgtctcaactacaaagtgagaatatgttgcttcgacaacaactggatgatgcccacaacaaggctgacaataaagagaagacagtgattaatatccaagaccagtttcatgctattgtgcaaaaacttcaagctgagagtgaaaagcaaagtcttctgctagaagaaagaaataaggagttaatcagtgaatgtaatcacttaaaagaaagacagtatcaatatgaaaatgaaaaggcagaaagagaagttgttgtgagacaacttcaacaagaactagctgataccctaaaaaaacaatctatgtcagaggcttcactggaggttacgtcacgttatcgtattaatttagaagatgagacacaggatttaaagaagaaattaggtcaaatcagaaatcaattgcaagaagcacaggatcgacatacagaagctgtcagatgtgctgagaagatgcaagatcacaagcaaaagcttgaaaaagataatgccaagttaaaagttacagtcaaaaagcaaatggacaaaattgaggagcttcagaaaaacctgttaaatgcaaatttgtctgaagatgaaaaggaacaattaaagaaacttatggaattaaaacagtcactggaatgtaatttggatcaagaaatgaagaaaaatgttgaattagaaagagagataactggatttaagaacctcttaaaaatgacaagaaagaagttaaatgaatatgaaaatggagaatttagtttccatggagatttaaaaactagtcaatttgaaatggatattcagattaataagctaaaacataagattgatgatcttacagcagaactggagactgcaggttcaaaatgtctacatctggatacaaagaaccaaattcttcaagaggagttgttatctatgaaaacagtacaaaagaaatgtgaaaaactacagaagaataaaaagaagttggaacaagaagtgatcaacctgagaagtcatatagaaaggaatatggtagaacttggtcaagtcaaacagtataaacaggagattgaagaaagagcaagacaggaaatagcagaaaaattaaaagaagtcaatctatttttacaggcacaagcagcatctcaagaaaacttagagcagtttagagagaataattttgcttcaatgaaaagtcagatggaactcagaattaaagatctggaatctgaactctccaaaataaaaacttctcaagaagactttaataaaaccgaactggaaaaatataagcaactctatctagaagaattaaaagttagaaaatctttgtcaagtaaactaaccaaaactaatgagaggctagcagaggtcaacaccaaacttcttgtggaaaaacagcagagcagatctttgttcaccactctcactaccaggccagtcatggagccaccttgtgtgggaaatcttaataatagtttagatctcaacagaaaacttattccaagagaaaacttagtgatctctacctcaaatccacgggcttcaaataatagcatggagaactacttgagcaagatgcagcaggagttggaaaaaaatataactagagaactcaaagaagctgctgctgaattggaatctggatcaatagcttcccctctagggtctactgatgagtcaaatctaaatcaagatctagtttggaaagcatcaagagaatatgtacaggttttaaagaaaaattatatgatctgaaagataagattttattactgggctgtttatgtgacattttgtttctcattaaatattaatatatgacatgtaaaaatattaaaggaacgtatttttgtatcatatatgtcagatcaaaatttatatagtattttaaacaatgttacttggcttctttaacttttaagtggattttgccaatgaaaaccaggaatattgagttttacatactcaaactgcccaaatgtgagctgtttaaacagccaaaccactaagttgtcattaatactttagtgcagttaattgatggcttatttgtattttgtaatttttatcactatatgtagtggtagatgtctaattggacttagacatcattttgttgtgcaggaactgtggtcattgttcatgtttggatgtattacaattgttacagtgccatcaaatttacataattttaattttaagcactgatttatatagctgttctcagggagaaacaagatttgcctgattcaccttttctgtttgtttatttatttttaattaaccttttggaaatagccttcagtttagagaaaatttcgaagttttagtacaaagactttctcctccgaacaatttgagagtaaattgctgacattatgtcatcacccctgattactttagtgggcattcctacaagtcaggacattctacataactacagtgcaaaccttgcaatcagaaagtcaacattaatacattctagtttgttacttctctgtaatgtcctttatagcaaaaggatcccattctaatccatggcttgtatttagttgttgtatctgttagatctttcagtctggaacagttcctcagtctttccttgaccttcatgaccttgaatattttgaagagtaaagtctggtaatataagaatgtccctcaattgggtttcatggtgattagatttagattatatgattttttggcaggagtatcacagaagtgacccagtgatcttctcattgcatcttacctgtgaccctacagttttgatttgccctgttactggtaatgttagcattgatcactaacagtggtatctgctgaatttctcctctgtaatgttattttttcaccttgtggttaattagtattttacagggaggtaatttgagactatgtacatatctctactccccatcgaaccctcaatttattcatttgcttgtatcaaataaaccatggattcatggtttattttattcagtgagttataattcattaatattgttattaaaaatttgtttttcttttaagaaatgttatattttgacaacttcagacttacagaaagattataagaggtagtacaaataatttttggatattattccccaaatgttaacattttactgcatttactttatcctttctcccccttctcctcctgtctttctagatgaatatgaatataggtacttaatacagattttttttctaaactgtttgtaggttgcagacacgatgcctctttatttctaaataatgtgtatttcctaaataaaaggaattaccttacataa

SEQ ID NO: 299219 - DNA, 6889 bp, Homo sapiens
gtctagcgggatcgcttgcttggtaacccggagggagagattggaaaccgcggagtttcctttgggaggctgcggccagccggggctgacttgttatgttgggctccggaggccgttaagagccgagagagacatgaggtgtctctgaagcccggtcgcctgggccatgaagaagatttttagtaagaagggcgagtcgcccttgggctccttcgcgcggcggcggaggagcagcgcgggaggcgggggcgagccgggggagggcgcctactcgcagcccggctaccacgtccgagaccgagatctcggcaagatccacaaagctgccagcgcgggtaatgtggcgaaagtgcagcagatccttttgctcaggaagaatggcttgaacgatagagacaagatgaacaggacggctctacatttggcctgtgccaatggtcatccagaagtagtaactctcctggtggacagaaaatgccagctcaatgtctgtgacaacgaaaacaggacagctctgatgaaggctgtacaatgccaggaagagaaatgtgcaactattctgctagaacatggtgctgatccaaatcttgcggatgtccatggcaacactgctcttcactatgctgtctataatgaggacatatcagtagcaacaaagctgcttttgtatgatgcaaatattgaagcaaaaaacaaggatgacctcacaccacttttacttgcagtaagtggaaaaaagcagcaaatggtggaatttttaataaagaaaaaagcaaatgtaaatgcagtagataagttggaaagcagtcaccaactaatttcagaatataaagaagaaaggatacctaaacattcttctcaaaatagtaattcagtggatgaaagctctgaagactccttaagcaggctttctggcaaaccgggtgttgatgattcatggcctacctcagatgacgaagacctcaattttgatactaagaatgtcccaaaaccaagcttagcaaagctaatgactgcttctcagcaatccaggaaaaatttagaagcaacatatggcactgtgagaacaggaaatagaactttgtttgaggatagagattccgatagtcaagatgaagttgtggttgaaagccttcctacaacatcaatcaaagtccagtgcttttctcatcctacctatcaatcacctgaccttcttccaaaaccttcccacaagtcgttagcaaaccctggtcttatgaaggaagaaccaacaaagccaggcattgcaaaaaaagaaaatggtattgatattattgaaagtgctccactagagcaaacaaataatgacaatttgacttatgttgatgaagtgcacaaaaataatagaagtgatatgatgtccgcattaggattaggacaagaggaagatatagaatcaccttgggattctgagagtatctctgagaattttccacagaagtatgttgatcctttagctggggctgcagacggaaaagaaaaaaatataggaaatgaacaagcagaagatgtgttttatataccttcttgcatgagtggatcaagaaactttaagatggctaaactagaggatacaagaaatgtaggcatgccagtagcccacatggagtctcctgagagatatcttcacttgaagcctaccattgaaatgaaagattctgttccaaataaagcaggaggaatgaaggatgtacaaacatccaaagcagctgaacatgacttagaagtagcatcagaagaagagcaagaaagggaagggagtgaaaataaccagccacaggttgaagaagaaaggaaaaaacacagaaataatgaaatggaagtatcagcaaacatacatgatggtgctactgatgatgctgaagatgatgatgatgatgatggattaattcaaaaaagaaagagtggagaaactgatcatcagcaatttcccaggaaggaaaataaagagtatgctagtggtcctgccttgcaaatgaaggaagtaaagagcactgaaaaagaaaaacggacctcgaaagaatctgtgaattcaccagtgtttgggaaggccagtttactaactggtggcctgctacaagtggatgatgacagcagtttaagtgaaatagatgaggatgaaggaaggcctactaagaaaacatctaatgaaaagaacaaggtcaaaaaccaaatacagtctatggatgatgttgatgacttaactcagtcatctgaaacagcctcagaggattgtgagctaccccactctagttacaagaattttatgttgctcattgaacaacttggaatggagtgtaaagattctgttagcctattgaaaatccaggatgcagctctttcatgtgaaagattattagaacttaaaaaaaatcactgtgaactacttacagtaaaaattaaaaaaatggaagacaaggttaatgtactacaaagggagctatctgaaacaaaagaaataaaatcacagttagagcatcaaaaagttgaatgggaacgagaactgtgctctttgagatttagcttaaaccaagaagaagagaagagaagaaatgctgatacgttgtatgaaaaaattagggaacagttaagaagaaaagaagagcaatataggaaagaagttgaagtgaaacaacagcttgaactgagtctccaaacactggagatggaattgaggactgtaaaaagtaatttgaatcaggtttaaaacaaaactgttatctcaagctgacctgtgacctttataactaaaattattcatgataaatcttggcacctaatagatgcttagtctctgttttctgaatgaaggaatggagggtcgttcaagagcgaaatgacgctcagaggcaactttctcgagaacagaatgccagaatgttacaagatggaattctgaccaatcacctttccaaacaaaaggagattgaaatggctcaaaagaaaatgaattctgagaattctcatagtcatgaagaagaaaaagacctatcgcataaaaatagcatgttgcaggaagaaattgctatgctaagactagaaatagacacaataaaaaatcaaaaccaggaaaaagaaaagaaatgttttgaggaccttaaaattgtaaaagaaaagaatgaagaccttcagaagactataaaacagaatgaggaaacattaacacaaacaatatcccagtataatggacggcttagtgttctgacagctgagaatgcaatgctaaattctaaactggagaatgaaaagcaaagcaaggaaagactggaagcagaagttgaatcataccattctagattggctgctgctatacatgatcgtgatcaaagtgagacatcaaaaagagaactagaacttgctttccagagagcaagagatgaatgttctcgtttacaggacaaaatgaattttgatgtgtctaacctaaaagataacaatgagattctttctcaacaactatttaaaactgaaagtaaactcaatagcctagaaattgagttccatcacacgagagatgccctcagagaaaagactttgggtttagaacgggtacaaaaggacctaagccaaacacagtgtcaaatgaaggaaatggaacaaaagtatcaaaatgaacaagttaaagtgaataaatacattggaaagcaggagtctgtagaggagagattgtctcaactacaaagtgagaatatgttgcttcgacaacaactggatgatgcccacaacaaggctgacaataaagagaagacagtgattaatatccaagaccagtttcatgctattgtgcaaaaacttcaagctgagagtgaaaagcaaagtcttctgctagaagaaagaaataaggagttaatcagtgaatgtaatcacttaaaagaaagacagtatcaatatgaaaatgaaaaggcagaaagagaagttgttgtgagacaacttcaacaagaactagctgataccctaaaaaaacaatctatgtcagaggcttcactggaggttacgtcacgttatcgtattaatttagaagatgagacacaggatttaaagaagaaattaggtcaaatcagaaatcaattgcaagaagcacaggatcgacatacagaagctgtcagatgtgctgagaagatgcaagatcacaagcaaaagcttgaaaaagataatgccaagttaaaagttacagtcaaaaagcaaatggacaaaattgaggagcttcagaaaaacctgttaaatgcaaatttgtctgaagatgaaaaggaacaattaaagaaacttatggaattaaaacagtcactggaatgtaatttggatcaagaaatgaagaaaaatgttgaattagaaagagagataactggatttaagaacctcttaaaaatgacaagaaagaagttaaatgaatatgaaaatggagaatttagtttccatggagatttaaaaactagtcaatttgaaatggatattcagattaataagctaaaacataagattgatgatcttacagcagaactggagactgcaggttcaaaatgtctacatctggatacaaagaaccaaattcttcaagaggagttgttatctatgaaaacagtacaaaagaaatgtgaaaaactacagaagaataaaaagaagttggaacaagaagtgatcaacctgagaagtcatatagaaaggaatatggtagaacttggtcaagtcaaacagtataaacaggagattgaagaaagagcaagacaggaaatagcagaaaaattaaaagaagtcaatctatttttacaggcacaagcagcatctcaagaaaacttagagcagtttagagagaataattttgcttcaatgaaaagtcagatggaactcagaattaaagatctggaatctgaactctccaaaataaaaacttctcaagaagactttaataaaaccgaactggaaaaatataagcaactctatctagaagaattaaaagttagaaaatctttgtcaagtaaactaaccaaaactaatgagaggctagcagaggtcaacaccaaacttcttgtggaaaaacagcagagcagatctttgttcaccactctcactaccaggccagtcatggagccaccttgtgtgggaaatcttaataatagtttagatctcaacagaaaacttattccaagagaaaacttagtgatctctacctcaaatccacgggcttcaaataatagcatggagaactacttgagcaagatgcagcaggagttggaaaaaaatataactagagaactcaaagaagctgctgctgaattggaatctggatcaatagcttcccctctagggtctactgatgagtcaaatctaaatcaagatctagtttggaaagcatcaagagaatatgtacaggttttaaagaaaaattatatgatctgaaagataagattttattactgggctgtttatgtgacattttgtttctcattaaatattaatatatgacatgtaaaaatattaaaggaacgtatttttgtatcatatatgtcagatcaaaatttatatagtattttaaacaatgttacttggcttctttaacttttaagtggattttgccaatgaaaaccaggaatattgagttttacatactcaaactgcccaaatgtgagctgtttaaacagccaaaccactaagttgtcattaatactttagtgcagttaattgatggcttatttgtattttgtaatttttatcactatatgtagtggtagatgtctaattggacttagacatcattttgttgtgcaggaactgtggtcattgttcatgtttggatgtattacaattgttacagtgccatcaaatttacataattttaattttaagcactgatttatatagctgttctcagggagaaacaagatttgcctgattcaccttttctgtttgtttatttatttttaattaaccttttggaaatagccttcagtttagagaaaatttcgaagttttagtacaaagactttctcctccgaacaatttgagagtaaattgctgacattatgtcatcacccctgattactttagtgggcattcctacaagtcaggacattctacataactacagtgcaaaccttgcaatcagaaagtcaacattaatacattctagtttgttacttctctgtaatgtcctttatagcaaaaggatcccattctaatccatggcttgtatttagttgttgtatctgttagatctttcagtctggaacagttcctcagtctttccttgaccttcatgaccttgaatattttgaagagtaaagtctggtaatataagaatgtccctcaattgggtttcatggtgattagatttagattatatgattttttggcaggagtatcacagaagtgacccagtgatcttctcattgcatcttacctgtgaccctacagttttgatttgccctgttactggtaatgttagcattgatcactaacagtggtatctgctgaatttctcctctgtaatgttattttttcaccttgtggttaattagtattttacagggaggtaatttgagactatgtacatatctctactccccatcgaaccctcaatttattcatttgcttgtatcaaataaaccatggattcatggtttattttattcagtgagttataattcattaatattgttattaaaaatttgtttttcttttaagaaatgttatattttgacaacttcagacttacagaaagattataagaggtagtacaaataatttttggatattattccccaaatgttaacattttactgcatttactttatcctttctcccccttctcctcctgtctttctagatgaatatgaatataggtacttaatacagattttttttctaaactgtt

SEQ ID NO: 299220 - DNA, 6798 bp, Homo sapiens
gtctagcgggatcgcttgcttggtaacccggagggagagattggaaaccgcggagtttcctttgggaggctgcggccagccggggctgacttgttatgttgggctccggaggccgttaagagccgagagagacatgaggtgtctctgaagcccggtcgcctgggccatgaagaagatttttagtaagaagggcgagtcgcccttgggctccttcgcgcggcggcggaggagcagcgcgggaggcgggggcgagccgggggagggcgcctactcgcagcccggctaccacgtccgagaccgagatctcggcaagatccacaaagctgccagcgcgggtaatgtggcgaaagtgcagcagatccttttgctcaggaagaatggcttgaacgatagagacaagatgaacaggacggctctacatttggcctgtgccaatggtcatccagaagtagtaactctcctggtggacagaaaatgccagctcaatgtctgtgacaacgaaaacaggacagctctgatgaaggctgtacaatgccaggaagagaaatgtgcaactattctgctagaacatggtgctgatccaaatcttgcggatgtccatggcaacactgctcttcactatgctgtctataatgaggacatatcagtagcaacaaagctgcttttgtatgatgcaaatattgaagcaaaaaacaaggatgacctcacaccacttttacttgcagtaagtggaaaaaagcagcaaatggtggaatttttaataaagaaaaaagcaaatgtaaatgcagtagataagttggaaagcagtcaccaactaatttcagaatataaagaagaaaggatacctaaacattcttctcaaaatagtaattcagtggatgaaagctctgaagactccttaagcaggctttctggcaaaccgggtgttgatgattcatggcctacctcagatgacgaagacctcaattttgatactaagaatgtcccaaaaccaagcttagcaaagctaatgactgcttctcagcaatccaggaaaaatttagaagcaacatatggcactgtgagaacaggaaatagaactttgtttgaggatagagattccgatagtcaagatgaagttgtggttgaaagccttcctacaacatcaatcaaagtccagtgcttttctcatcctacctatcaatcacctgaccttcttccaaaaccttcccacaagtcgttagcaaaccctggtcttatgaaggaagaaccaacaaagccaggcattgcaaaaaaagaaaatggtattgatattattgaaagtgctccactagagcaaacaaataatgacaatttgacttatgttgatgaagtgcacaaaaataatagaagtgatatgatgtccgcattaggattaggacaagaggaagatatagaatcaccttgggattctgagagtatctctgagaattttccacagaagtatgttgatcctttagctggggctgcagacggaaaagaaaaaaatataggaaatgaacaagcagaagatgtgttttatataccttcttgcatgagtggatcaagaaactttaagatggctaaactagaggatacaagaaatgtaggcatgccagtagcccacatggagtctcctgagagatatcttcacttgaagcctaccattgaaatgaaagattctgttccaaataaagcaggaggaatgaaggatgtacaaacatccaaagcagctgaacatgacttagaagtagcatcagaagaagagcaagaaagggaagggagtgaaaataaccagccacaggttgaagaagaaaggaaaaaacacagaaataatgaaatggaagtatcagcaaacatacatgatggtgctactgatgatgctgaagatgatgatgatgatgatggattaattcaaaaaagaaagagtggagaaactgatcatcagcaatttcccaggaaggaaaataaagagtatgctagtggtcctgccttgcaaatgaaggaagtaaagagcactgaaaaagaaaaacggacctcgaaagaatctgtgaattcaccagtgtttgggaaggccagtttactaactggtggcctgctacaagtggatgatgacagcagtttaagtgaaatagatgaggatgaaggaaggcctactaagaaaacatctaatgaaaagaacaaggtcaaaaaccaaatacagtctatggatgatgttgatgacttaactcagtcatctgaaacagcctcagaggattgtgagctaccccactctagttacaagaattttatgttgctcattgaacaacttggaatggagtgtaaagattctgttagcctattgaaaatccaggatgcagctctttcatgtgaaagattattagaacttaaaaaaaatcactgtgaactacttacagtaaaaattaaaaaaatggaagacaaggttaatgtactacaaagggagctatctgaaacaaaagaaataaaatcacagttagagcatcaaaaagttgaatgggaacgagaactgtgctctttgagattttaagataaacatatttaactgcagatttagcttaaaccaagaagaagagaagagaagaaatgctgatacgttgtatgaaaaaattagggaacagttaagaagaaaagaagagcaatataggaaagaagttgaagtgaaacaacagcttgaactgagtctccaaacactggagatggaattgaggactgtaaaaagtaatttgaatcaggtcgttcaagagcgaaatgacgctcagaggcaactttctcgagaacagaatgccagaatgttacaagatggaattctgaccaatcacctttccaaacaaaaggagattgaaatggctcaaaagaaaatgaattctgagaattctcatagtcatgaagaagaaaaagacctatcgcataaaaatagcatgttgcaggaagaaattgctatgctaagactagaaatagacacaataaaaaatcaaaaccaggaaaaagaaaagaaatgttttgaggaccttaaaattgtaaaagaaaagaatgaagaccttcagaagactataaaacagaatgaggaaacattaacacaaacaatatcccagtataatggacggcttagtgttctgacagctgagaatgcaatgctaaattctaaactggagaatgaaaagcaaagcaaggaaagactggaagcagaagttgaatcataccattctagattggctgctgctatacatgatcgtgatcaaagtgagacatcaaaaagagaactagaacttgctttccagagagcaagagatgaatgttctcgtttacaggacaaaatgaattttgatgtgtctaacctaaaagataacaatgagattctttctcaacaactatttaaaactgaaagtaaactcaatagcctagaaattgagttccatcacacgagagatgccctcagagaaaagactttgggtttagaacgggtacaaaaggacctaagccaaacacagtgtcaaatgaaggaaatggaacaaaagtatcaaaatgaacaagttaaagtgaataaatacattggaaagcaggagtctgtagaggagagattgtctcaactacaaagtgagaatatgttgcttcgacaacaactggatgatgcccacaacaaggctgacaataaagagaagacagtgattaatatccaagaccagtttcatgctattgtgcaaaaacttcaagctgagagtgaaaagcaaagtcttctgctagaagaaagaaataaggagttaatcagtgaatgtaatcacttaaaagaaagacagtatcaatatgaaaatgaaaaggcagaaagagaagttgttgtgagacaacttcaacaagaactagctgataccctaaaaaaacaatctatgtcagaggcttcactggaggttacgtcacgttatcgtattaatttagaagatgagacacaggatttaaagaagaaattaggtcaaatcagaaatcaattgcaagaagcacaggatcgacatacagaagctgtcagatgtgctgagaagatgcaagatcacaagcaaaagcttgaaaaagataatgccaagttaaaagttacagtcaaaaagcaaatggacaaaattgaggagcttcagaaaaacctgttaaatgcaaatttgtctgaagatgaaaaggaacaattaaagaaacttatggaattaaaacagtcactggaatgtaatttggatcaagaaatgaagaaaaatgttgaattagaaagagagataactggatttaagaacctcttaaaaatgacaagaaagaagttaaatgaatatgaaaatggagaatttagtttccatggagatttaaaaactagtcaatttgaaatggatattcagattaataagctaaaacataagattgatgatcttacagcagaactggagactgcaggttcaaaatgtctacatctggatacaaagaaccaaattcttcaagaggagttgttatctatgaaaacagtacaaaagaaatgtgaaaaactacagaagaataaaaagaagttggaacaagaagtgatcaacctgagaagtcatatagaaaggaatatggtagaacttggtcaagtcaaacagtataaacaggagattgaagaaagagcaagacaggaaatagcagaaaaattaaaagaagtcaatctatttttacaggcacaagcagcatctcaagaaaacttagagcagtttagagagaataattttgcttcaatgaaaagtcagatggaactcagaattaaagatctggaatctgaactctccaaaataaaaacttctcaagaagactttaataaaaccgaactggaaaaatataagcaactctatctagaagaattaaaagttagaaaatctttgtcaagtaaactaaccaaaactaatgagaggctagcagaggtcaacaccaaacttcttgtggaaaaacagcagagcagatctttgttcaccactctcactaccaggccagtcatggagccaccttgtgtgggaaatcttaataatagtttagatctcaacagaaaacttattccaagagaaaacttagtgatctctacctcaaatccacgggcttcaaataatagcatggagaactacttgagcaagatgcagcaggagttggaaaaaaatataactagagaactcaaagaagctgctgctgaattggaatctggatcaatagcttcccctctagggtctactgatgagtcaaatctaaatcaagatctagtttggaaagcatcaagagaatatgtacaggttttaaagaaaaattatatgatctgaaagataagattttattactgggctgtttatgtgacattttgtttctcattaaatattaatatatgacatgtaaaaatattaaaggaacgtatttttgtatcatatatgtcagatcaaaatttatatagtattttaaacaatgttacttggcttctttaacttttaagtggattttgccaatgaaaaccaggaatattgagttttacatactcaaactgcccaaatgtgagctgtttaaacagccaaaccactaagttgtcattaatactttagtgcagttaattgatggcttatttgtattttgtaatttttatcactatatgtagtggtagatgtctaattggacttagacatcattttgttgtgcaggaactgtggtcattgttcatgtttggatgtattacaattgttacagtgccatcaaatttacataattttaattttaagcactgatttatatagctgttctcagggagaaacaagatttgcctgattcaccttttctgtttgtttatttatttttaattaaccttttggaaatagccttcagtttagagaaaatttcgaagttttagtacaaagactttctcctccgaacaatttgagagtaaattgctgacattatgtcatcacccctgattactttagtgggcattcctacaagtcaggacattctacataactacagtgcaaaccttgcaatcagaaagtcaacattaatacattctagtttgttacttctctgtaatgtcctttatagcaaaaggatcccattctaatccatggcttgtatttagttgttgtatctgttagatctttcagtctggaacagttcctcagtctttccttgaccttcatgaccttgaatattttgaagagtaaagtctggtaatataagaatgtccctcaattgggtttcatggtgattagatttagattatatgattttttggcaggagtatcacagaagtgacccagtgatcttctcattgcatcttacctgtgaccctacagttttgatttgccctgttactggtaatgttagcattgatcactaacagtggtatctgctgaatttctcctctgtaatgttattttttcaccttgtggttaattagtattttacagggaggtaatttgagactatgtacatatctctactccccatcgaaccctcaatttattcatttgcttgtatcaaataaaccatggattcatggtttattttattcagtgagttataattcattaatattgttattaaaaatttgtttttcttttaagaaatgttatattttgacaacttcagacttacagaaagattataagaggtagtacaaataatttttggatattattccccaaatgttaacattttactgcatttactttatcctttctcccccttctcctcctgtctttctagatgaatatgaatataggtacttaatacagattttttttctaaactgtt

SEQ ID NO: 299221 - DNA, 5962 bp, Homo sapiens
tttttggagggggcatccagattgaaaattgtaagctggtttttgttttgtttttaaagaaatgaattcactcatttttctatatttttgttctaaaggctttctggcaaaccgggtgttgatgattcatggcctacctcagatgacgaagacctcaattttgatactaagaatgtcccaaaaccaagcttagcaaagctaatgactgcttctcagcaatccaggaaaaatttagaagcaacatatggcactgtgagaacaggaaatagaactttgtttgaggatagagattccgatagtcaagatgaagttgtggttgaaagccttcctacaacatcaatcaaagtccagtgcttttctcatcctacctatcaatcacctgaccttcttccaaaaccttcccacaagtcgttagcaaaccctggtcttatgaaggaagaaccaacaaagccaggcattgcaaaaaaagaaaatggtattgatattattgaaagtgctccactagagcaaacaaataatgacaatttgacttatgttgatgaagtgcacaaaaataatagaagtgatatgatgtccgcattaggattaggacaagaggaagatatagaatcaccttgggattctgagagtatctctgagaattttccacagaagtatgttgatcctttagctggggctgcagacggaaaagaaaaaaatataggaaatgaacaagcagaagatgtgttttatataccttcttgcatgagtggatcaagaaactttaagatggctaaactagaggatacaagaaatgtaggcatgccagtagcccacatggagtctcctgagagatatcttcacttgaagcctaccattgaaatgaaagattctgttccaaataaagcaggaggaatgaaggatgtacaaacatccaaagcagctgaacatgacttagaagtagcatcagaagaagagcaagaaagggaagggagtgaaaataaccagccacaggttgaagaagaaaggaaaaaacacagaaataatgaaatggaagtatcagcaaacatacatgatggtgctactgatgatgctgaagatgatgatgatgatgatggattaattcaaaaaagaaagagtggagaaactgatcatcagcaatttcccaggaaggaaaataaagagtatgctagtggtcctgccttgcaaatgaaggaagtaaagagcactgaaaaagaaaaacggacctcgaaagaatctgtgaattcaccagtgtttgggaaggccagtttactaactggtggcctgctacaagtggatgatgacagcagtttaagtgaaatagatgaggatgaaggaaggcctactaagaaaacatctaatgaaaagaacaaggtcaaaaaccaaatacagtctatggatgatgttgatgacttaactcagtcatctgaaacagcctcagaggattgtgagctaccccactctagttacaagaattttatgttgctcattgaacaacttggaatggagtgtaaagattctgttagcctattgaaaatccaggatgcagctctttcatgtgaaagattattagaacttaaaaaaaatcactgtgaactacttacagtaaaaattaaaaaaatggaagacaaggttaatgtactacaaagggagctatctgaaacaaaagaaataaaatcacagttagagcatcaaaaagttgaatgggaacgagaactgtgctctttgagatttagcttaaaccaagaagaagagaagagaagaaatgctgatacgttgtatgaaaaaattagggaacagttaagaagaaaagaagagcaatataggaaagaagttgaagtgaaacaacagcttgaactgagtctccaaacactggagatggaattgaggactgtaaaaagtaatttgaatcaggtcgttcaagagcgaaatgacgctcagaggcaactttctcgagaacagaatgccagaatgttacaagatggaattctgaccaatcacctttccaaacaaaaggagattgaaatggctcaaaagaaaatgaattctgagaattctcatagtcatgaagaagaaaaagacctatcgcataaaaatagcatgttgcaggaagaaattgctatgctaagactagaaatagacacaataaaaaatcaaaaccaggaaaaagaaaagaaatgttttgaggaccttaaaattgtaaaagaaaagaatgaagaccttcagaagactataaaacagaatgaggaaacattaacacaaacaatatcccagtataatggacggcttagtgttctgacagctgagaatgcaatgctaaattctaaactggagaatgaaaagcaaagcaaggaaagactggaagcagaagttgaatcataccattctagattggctgctgctatacatgatcgtgatcaaagtgagacatcaaaaagagaactagaacttgctttccagagagcaagagatgaatgttctcgtttacaggacaaaatgaattttgatgtgtctaacctaaaagataacaatgagattctttctcaacaactatttaaaactgaaagtaaactcaatagcctagaaattgagttccatcacacgagagatgccctcagagaaaagactttgggtttagaacgggtacaaaaggacctaagccaaacacagtgtcaaatgaaggaaatggaacaaaagtatcaaaatgaacaagttaaagtgaataaatacattggaaagcaggagtctgtagaggagagattgtctcaactacaaagtgagaatatgttgcttcgacaacaactggatgatgcccacaacaaggctgacaataaagagaagacagtgattaatatccaagaccagtttcatgctattgtgcaaaaacttcaagctgagagtgaaaagcaaagtcttctgctagaagaaagaaataaggagttaatcagtgaatgtaatcacttaaaagaaagacagtatcaatatgaaaatgaaaaggcagaaagagaagttgttgtgagacaacttcaacaagaactagctgataccctaaaaaaacaatctatgtcagaggcttcactggaggttacgtcacgttatcgtattaatttagaagatgagacacaggatttaaagaagaaattaggtcaaatcagaaatcaattgcaagaagcacaggatcgacatacagaagctgtcagatgtgctgagaagatgcaagatcacaagcaaaagcttgaaaaagataatgccaagttaaaagttacagtcaaaaagcaaatggacaaaattgaggagcttcagaaaaacctgttaaatgcaaatttgtctgaagatgaaaaggaacaattaaagaaacttatggaattaaaacagtcactggaatgtaatttggatcaagaaatgaagaaaaatgttgaattagaaagagagataactggatttaagaacctcttaaaaatgacaagaaagaagttaaatgaatatgaaaatggagaatttagtttccatggagatttaaaaactagtcaatttgaaatggatattcagattaataagctaaaacataagattgatgatcttacagcagaactggagactgcaggttcaaaatgtctacatctggatacaaagaaccaaattcttcaagaggagttgttatctatgaaaacagtacaaaagaaatgtgaaaaactacagaagaataaaaagaagttggaacaagaagtgatcaacctgagaagtcatatagaaaggaatatggtagaacttggtcaagtcaaacagtataaacaggagattgaagaaagagcaagacaggaaatagcagaaaaattaaaagaagtcaatctatttttacaggcacaagcagcatctcaagaaaacttagagcagtttagagagaataattttgcttcaatgaaaagtcagatggaactcagaattaaagatctggaatctgaactctccaaaataaaaacttctcaagaagactttaataaaaccgaactggaaaaatataagcaactctatctagaagaattaaaagttagaaaatctttgtcaagtaaactaaccaaaactaatgagaggctagcagaggtcaacaccaaacttcttgtggaaaaacagcagagcagatctttgttcaccactctcactaccaggccagtcatggagccaccttgtgtgggaaatcttaataatagtttagatctcaacagaaaacttattccaagagaaaacttagtgatctctacctcaaatccacgggcttcaaataatagcatggagaactacttgagcaagatgcagcaggagttggaaaaaaatataactagagaactcaaagaagctgctgctgaattggaatctggatcaatagcttcccctctagggtctactgatgagtcaaatctaaatcaagatctagtttggaaagcatcaagagaatatgtacaggttttaaagaaaaattatatgatctgaaagataagattttattactgggctgtttatgtgacattttgtttctcattaaatattaatatatgacatgtaaaaatattaaaggaacgtatttttgtatcatatatgtcagatcaaaatttatatagtattttaaacaatgttacttggcttctttaacttttaagtggattttgccaatgaaaaccaggaatattgagttttacatactcaaactgcccaaatgtgagctgtttaaacagccaaaccactaagttgtcattaatactttagtgcagttaattgatggcttatttgtattttgtaatttttatcactatatgtagtggtagatgtctaattggacttagacatcattttgttgtgcaggaactgtggtcattgttcatgtttggatgtattacaattgttacagtgccatcaaatttacataattttaattttaagcactgatttatatagctgttctcagggagaaacaagatttgcctgattcaccttttctgtttgtttatttatttttaattaaccttttggaaatagccttcagtttagagaaaatttcgaagttttagtacaaagactttctcctccgaacaatttgagagtaaattgctgacattatgtcatcacccctgattactttagtgggcattcctacaagtcaggacattctacataactacagtgcaaaccttgcaatcagaaagtcaacattaatacattctagtttgttacttctctgtaatgtcctttatagcaaaaggatcccattctaatccatggcttgtatttagttgttgtatctgttagatctttcagtctggaacagttcctcagtctttccttgaccttcatgaccttgaatattttgaagagtaaagtctggtaatataagaatgtccctcaattgggtttcatggtgattagatttagattatatgattttttggcaggagtatcacagaagtgacccagtgatcttctcattgcatcttacctgtgaccctacagttttgatttgccctgttactggtaatgttagcattgatcactaacagtggtatctgctgaatttctcctctgtaatgttattttttcaccttgtggttaattagtattttacagggaggtaatttgagactatgtacatatctctactccccatcgaaccctcaatttattcatttgcttgtatcaaataaaccatggattcatggtttattttattcagtgagttataattcattaatattgttattaaaaatttgtttttcttttaagaaatgttatattttgacaacttcagacttacagaaagattataagaggtagtacaaataatttttggatattattccccaaatgttaacattttactgcatttactttatcctttctcccccttctcctcctgtctttctagatgaatatgaatataggtacttaatacagattttttttctaaactgtt

SEQ ID NO: 299222 - DNA, 5868 bp, Homo sapiens
ggcggacgggatgtgctatcagtcacctgaccttcttccaaaccttcccacaagtcgttagcaaccctggtcttatgaatgtcccaaaaccaagcttagcaaagctaatgactgcttctcagcaatccaggaaaaatttagaagcaacatatggcactgtgagaacaggaaatagaactttgtttgaggatagagattccgatagtcaagatgaagttgtggttgaaagccttcctacaacatcaatcaaagtccagtgcttttctcatcctacctatcaatcacctgaccttcttccaaaaccttcccacaagtcgttagcaaaccctggtcttatgaaggaagaaccaacaaagccaggcattgcaaaaaaagaaaatggtattgatattattgaaagtgctccactagagcaaacaaataatgacaatttgacttatgttgatgaagtgcacaaaaataatagaagtgatatgatgtccgcattaggattaggacaagaggaagatatagaatcaccttgggattctgagagtatctctgagaattttccacagaagtatgttgatcctttagctggggctgcagacggaaaagaaaaaaatataggaaatgaacaagcagaagatgtgttttatataccttcttgcatgagtggatcaagaaactttaagatggctaaactagaggatacaagaaatgtaggcatgccagtagcccacatggagtctcctgagagatatcttcacttgaagcctaccattgaaatgaaagattctgttccaaataaagcaggaggaatgaaggatgtacaaacatccaaagcagctgaacatgacttagaagtagcatcagaagaagagcaagaaagggaagggagtgaaaataaccagccacaggttgaagaagaaaggaaaaaacacagaaataatgaaatggaagtatcagcaaacatacatgatggtgctactgatgatgctgaagatgatgatgatgatgatggattaattcaaaaaagaaagagtggagaaactgatcatcagcaatttcccaggaaggaaaataaagagtatgctagtggtcctgccttgcaaatgaaggaagtaaagagcactgaaaaagaaaaacggacctcgaaagaatctgtgaattcaccagtgtttgggaaggccagtttactaactggtggcctgctacaagtggatgatgacagcagtttaagtgaaatagatgaggatgaaggaaggcctactaagaaaacatctaatgaaaagaacaaggtcaaaaaccaaatacagtctatggatgatgttgatgacttaactcagtcatctgaaacagcctcagaggattgtgagctaccccactctagttacaagaattttatgttgctcattgaacaacttggaatggagtgtaaagattctgttagcctattgaaaatccaggatgcagctctttcatgtgaaagattattagaacttaaaaaaaatcactgtgaactacttacagtaaaaattaaaaaaatggaagacaaggttaatgtactacaaagggagctatctgaaacaaaagaaataaaatcacagttagagcatcaaaaagttgaatgggaacgagaactgtgctctttgagatttagcttaaaccaagaagaagagaagagaagaaatgctgatacgttgtatgaaaaaattagggaacagttaagaagaaaagaagagcaatataggaaagaagttgaagtgaaacaacagcttgaactgagtctccaaacactggagatggaattgaggactgtaaaaagtaatttgaatcaggtcgttcaagagcgaaatgacgctcagaggcaactttctcgagaacagaatgccagaatgttacaagatggaattctgaccaatcacctttccaaacaaaaggagattgaaatggctcaaaagaaaatgaattctgagaattctcatagtcatgaagaagaaaaagacctatcgcataaaaatagcatgttgcaggaagaaattgctatgctaagactagaaatagacacaataaaaaatcaaaaccaggaaaaagaaaagaaatgttttgaggaccttaaaattgtaaaagaaaagaatgaagaccttcagaagactataaaacagaatgaggaaacattaacacaaacaatatcccagtataatggacggcttagtgttctgacagctgagaatgcaatgctaaattctaaactggagaatgaaaagcaaagcaaggaaagactggaagcagaagttgaatcataccattctagattggctgctgctatacatgatcgtgatcaaagtgagacatcaaaaagagaactagaacttgctttccagagagcaagagatgaatgttctcgtttacaggacaaaatgaattttgatgtgtctaacctaaaagataacaatgagattctttctcaacaactatttaaaactgaaagtaaactcaatagcctagaaattgagttccatcacacgagagatgccctcagagaaaagactttgggtttagaacgggtacaaaaggacctaagccaaacacagtgtcaaatgaaggaaatggaacaaaagtatcaaaatgaacaagttaaagtgaataaatacattggaaagcaggagtctgtagaggagagattgtctcaactacaaagtgagaatatgttgcttcgacaacaactggatgatgcccacaacaaggctgacaataaagagaagacagtgattaatatccaagaccagtttcatgctattgtgcaaaaacttcaagctgagagtgaaaagcaaagtcttctgctagaagaaagaaataaggagttaatcagtgaatgtaatcacttaaaagaaagacagtatcaatatgaaaatgaaaaggcagaaagagaagttgttgtgagacaacttcaacaagaactagctgataccctaaaaaaacaatctatgtcagaggcttcactggaggttacgtcacgttatcgtattaatttagaagatgagacacaggatttaaagaagaaattaggtcaaatcagaaatcaattgcaagaagcacaggatcgacatacagaagctgtcagatgtgctgagaagatgcaagatcacaagcaaaagcttgaaaaagataatgccaagttaaaagttacagtcaaaaagcaaatggacaaaattgaggagcttcagaaaaacctgttaaatgcaaatttgtctgaagatgaaaaggaacaattaaagaaacttatggaattaaaacagtcactggaatgtaatttggatcaagaaatgaagaaaaatgttgaattagaaagagagataactggatttaagaacctcttaaaaatgacaagaaagaagttaaatgaatatgaaaatggagaatttagtttccatggagatttaaaaactagtcaatttgaaatggatattcagattaataagctaaaacataagattgatgatcttacagcagaactggagactgcaggttcaaaatgtctacatctggatacaaagaaccaaattcttcaagaggagttgttatctatgaaaacagtacaaaagaaatgtgaaaaactacagaagaataaaaagaagttggaacaagaagtgatcaacctgagaagtcatatagaaaggaatatggtagaacttggtcaagtcaaacagtataaacaggagattgaagaaagagcaagacaggaaatagcagaaaaattaaaagaagtcaatctatttttacaggcacaagcagcatctcaagaaaacttagagcagtttagagagaataattttgcttcaatgaaaagtcagatggaactcagaattaaagatctggaatctgaactctccaaaataaaaacttctcaagaagactttaataaaaccgaactggaaaaatataagcaactctatctagaagaattaaaagttagaaaatctttgtcaagtaaactaaccaaaactaatgagaggctagcagaggtcaacaccaaacttcttgtggaaaaacagcagagcagatctttgttcaccactctcactaccaggccagtcatggagccaccttgtgtgggaaatcttaataatagtttagatctcaacagaaaacttattccaagagaaaacttagtgatctctacctcaaatccacgggcttcaaataatagcatggagaactacttgagcaagatgcagcaggagttggaaaaaaatataactagagaactcaaagaagctgctgctgaattggaatctggatcaatagcttcccctctagggtctactgatgagtcaaatctaaatcaagatctagtttggaaagcatcaagagaatatgtacaggttttaaagaaaaattatatgatctgaaagataagattttattactgggctgtttatgtgacattttgtttctcattaaatattaatatatgacatgtaaaaatattaaaggaacgtatttttgtatcatatatgtcagatcaaaatttatatagtattttaaacaatgttacttggcttctttaacttttaagtggattttgccaatgaaaaccaggaatattgagttttacatactcaaactgcccaaatgtgagctgtttaaacagccaaaccactaagttgtcattaatactttagtgcagttaattgatggcttatttgtattttgtaatttttatcactatatgtagtggtagatgtctaattggacttagacatcattttgttgtgcaggaactgtggtcattgttcatgtttggatgtattacaattgttacagtgccatcaaatttacataattttaattttaagcactgatttatatagctgttctcagggagaaacaagatttgcctgattcaccttttctgtttgtttatttatttttaattaaccttttggaaatagccttcagtttagagaaaatttcgaagttttagtacaaagactttctcctccgaacaatttgagagtaaattgctgacattatgtcatcacccctgattactttagtgggcattcctacaagtcaggacattctacataactacagtgcaaaccttgcaatcagaaagtcaacattaatacattctagtttgttacttctctgtaatgtcctttatagcaaaaggatcccattctaatccatggcttgtatttagttgttgtatctgttagatctttcagtctggaacagttcctcagtctttccttgaccttcatgaccttgaatattttgaagagtaaagtctggtaatataagaatgtccctcaattgggtttcatggtgattagatttagattatatgattttttggcaggagtatcacagaagtgacccagtgatcttctcattgcatcttacctgtgaccctacagttttgatttgccctgttactggtaatgttagcattgatcactaacagtggtatctgctgaatttctcctctgtaatgttattttttcaccttgtggttaattagtattttacagggaggtaatttgagactatgtacatatctctactccccatcgaaccctcaatttattcatttgcttgtatcaaataaaccatggattcatggtttattttattcagtgagttataattcattaatattgttattaaaaatttgtttttcttttaagaaatgttatattttgacaacttcagacttacagaaagattataagaggtagtacaaataatttttggatattattccccaaatgttaacattttactgcatttactttatcctttctcccccttctcctcctgtctttctagatgaatatgaatataggtacttaatacagattttttttctaaactgtt

SEQ ID NO: 299223 - DNA, 3016 bp, Homo sapiens
cagtgtagtatgagaattatatcagctatgatcataagtacatctgtgtgaagtcaaggaaaaatttcagcattaagcaattttgaaatgcggatttttttatattatcctagaattttgtgcattatccacaaaccacaactagaaaaacgatagagttgccaaatcacctacttttgaaatctttaagaatttatgtaattatgccttcaggtgtttgctaagaaattacacagtattttaaaaatttatctgtgagaataattattttaaaatatacatttcaggcttgaaaaagataatgccaagttaaaagttacagtcaaaaagcaaatggacaaaattgaggagcttcagaaaaacctgttaaatgcaaatttgtctgaagatgaaaaggaacaattaaagaaacttatggaattaaaacagtcactggaatgtaatttggatcaagaaatgaagaaaaatgttgaattagaaagagagataactggatttaagaacctcttaaaaatgacaagaaagaagttaaatgaatatgaaaatggagaatttagtttccatggagatttaaaaactagtcaatttgaaatggatattcagattaataagctaaaacataagattgatgatcttacagcagaactggagactgcaggttcaaaatgtctacatctggatacaaagaaccaaattcttcaagaggagttgttatctatgaaaacagtacaaaagaaatgtgaaaaactacagaagaataaaaagaagttggaacaagaagtgatcaacctgagaagtcatatagaaaggaatatggtagaacttggtcaagtcaaacagtataaacaggagattgaagaaagagcaagacaggaaatagcagaaaaattaaaagaagtcaatctatttttacaggcacaagcagcatctcaagaaaacttagagcagtttagagagaataattttgcttcaatgaaaagtcagatggaactcagaattaaagatctggaatctgaactctccaaaataaaaacttctcaagaagactttaataaaaccgaactggaaaaatataagcaactctatctagaagaattaaaagttagaaaatctttgtcaagtaaactaaccaaaactaatgagaggctagcagaggtcaacaccaaacttcttgtggaaaaacagcagagcagatctttgttcaccactctcactaccaggccagtcatggagccaccttgtgtgggaaatcttaataatagtttagatctcaacagaaaacttattccaagagaaaacttagtgatctctacctcaaatccacgggcttcaaataatagcatggagaactacttgagcaagatgcagcaggagttggaaaaaaatataactagagaactcaaagaagctgctgctgaattggaatctggatcaatagcttcccctctagggtctactgatgagtcaaatctaaatcaagatctagtttggaaagcatcaagagaatatgtacaggttttaaagaaaaattatatgatctgaaagataagattttattactgggctgtttatgtgacattttgtttctcattaaatattaatatatgacatgtaaaaatattaaaggaacgtatttttgtatcatatatgtcagatcaaaatttatatagtattttaaacaatgttacttggcttctttaacttttaagtggattttgccaatgaaaaccaggaatattgagttttacatactcaaactgcccaaatgtgagctgtttaaacagccaaaccactaagttgtcattaatactttagtgcagttaattgatggcttatttgtattttgtaatttttatcactatatgtagtggtagatgtctaattggacttagacatcattttgttgtgcaggaactgtggtcattgttcatgtttggatgtattacaattgttacagtgccatcaaatttacataattttaattttaagcactgatttatatagctgttctcagggagaaacaagatttgcctgattcaccttttctgtttgtttatttatttttaattaaccttttggaaatagccttcagtttagagaaaatttcgaagttttagtacaaagactttctcctccgaacaatttgagagtaaattgctgacattatgtcatcacccctgattactttagtgggcattcctacaagtcaggacattctacataactacagtgcaaaccttgcaatcagaaagtcaacattaatacattctagtttgttacttctctgtaatgtcctttatagcaaaaggatcccattctaatccatggcttgtatttagttgttgtatctgttagatctttcagtctggaacagttcctcagtctttccttgaccttcatgaccttgaatattttgaagagtaaagtctggtaatataagaatgtccctcaattgggtttcatggtgattagatttagattatatgattttttggcaggagtatcacagaagtgacccagtgatcttctcattgcatcttacctgtgaccctacagttttgatttgccctgttactggtaatgttagcattgatcactaacagtggtatctgctgaatttctcctctgtaatgttattttttcaccttgtggttaattagtattttacagggaggtaatttgagactatgtacatatctctactccccatcgaaccctcaatttattcatttgcttgtatcaaataaaccatggattcatggtttattttattcagtgagttataattcattaatattgttattaaaaatttgtttttcttttaagaaatgttatattttgacaacttcagacttacagaaagattataagaggtagtacaaataatttttggatattattccccaaatgttaacattttactgcatttactttatcctttctcccccttctcctcctgtctttctagatgaatatgaatataggtacttaatacagattttttttctaaactgtt

SEQ ID NO: 299224 - DNA, 5463 bp, Homo sapiens
gtctagcgggatcgcttgcttggtaacccggagggagagattggaaaccgcggagtttcctttgggaggctgcggccagccggggctgacttgttatgttgggctccggaggccgttaagagccgagagagacatgaggtgtctctgaagcccggtcgcctgggccatgaagaagatttttagtaagaagggcgagtcgcccttgggctccttcgcgcggcggcggaggagcagcgcgggaggcgggggcgagccgggggagggcgcctactcgcagcccggctaccacgtccgagaccgagatctcggcaagatccacaaagctgccagcgcgggtaatgtggcgaaagtgcagcagatccttttgctcaggaagaatggcttgaacgatagagacaagatgaacaggacggctctacatttggcctgtgccaatggtcatccagaagtagtaactctcctggtggacagaaaatgccagctcaatgtctgtgacaacgaaaacaggacagctctgatgaaggctgtacaatgccaggaagagaaatgtgcaactattctgctagaacatggtgctgatccaaatcttgcggatgtccatggcaacactgctcttcactatgctgtctataatgaggacatatcagtagcaacaaagctgcttttgtatgatgcaaatattgaagcaaaaaacaaggatgacctcacaccacttttacttgcagtaagtggaaaaaagcagcaaatggtggaatttttaataaagaaaaaagcaaatgtaaatgcagtagataagttggaaagcagtcaccaactaatttcagaatataaagaagaaaggatacctaaacattcttctcaaaatagtaattcagtggatgaaagctctgaagactccttaagcaggctttctggcaaaccgggtgttgatgattcatggcctacctcagatgacgaagacctcaattttgatactaagaatgtcccaaaaccaagcttagcaaagctaatgactgcttctcagcaatccaggaaaaatttagaagcaacatatggcactgtgagaacaggaaatagaactttgtttgaggatagagattccgatagtcaagatgaagttgtggttgaaagccttcctacaacatcaatcaaagtccagtgcttttctcatcctacctatcaatcacctgaccttcttccaaaaccttcccacaagtcgttagcaaaccctggtcttatgaaggaagaaccaacaaagccaggcattgcaaaaaaagaaaatggtattgatattattgaaagtgctccactagagcaaacaaataatgacaatttgacttatgttgatgaagtgcacaaaaataatagaagtgatatgatgtccgcattaggattaggacaagaggaagatatagaatcaccttgggattctgagagtatctctgagaattttccacagaagtatgttgatcctttagctggggctgcagacggaaaagaaaaaaatataggaaatgaacaagcagaagatgtgttttatataccttcttgcatgagtggatcaagaaactttaagatggctaaactagaggatacaagaaatgtaggcatgccagtagcccacatggagtctcctgagagatatcttcacttgaagcctaccattgaaatgaaagattctgttccaaataaagcaggaggaatgaaggatgtacaaacatccaaagcagctgaacatgacttagaagtagcatcagaagaagagcaagaaagggaagggagtgaaaataaccagccacaggttgaagaagaaaggaaaaaacacagaaataatgaaatggaagtatcagcaaacatacatgatggtgctactgatgatgctgaagatgatgatgatgatgatggattaattcaaaaaagaaagagtggagaaactgatcatcagcaatttcccaggaaggaaaataaagagtatgctagtggtcctgccttgcaaatgaaggaagtaaagagcactgaaaaagaaaaacggacctcgaaagaatctgtgaattcaccagtgtttgggaaggccagtttactaactggtggcctgctacaagtggatgatgacagcagtttaagtgaaatagatgaggatgaaggaaggcctactaagaaaacatctaatgaaaagaacaaggtcaaaaaccaaatacagtctatggatgatgttgatgacttaactcagtcatctgaaacagcctcagaggattgtgagctaccccactctagttacaagaattttatgttgctcattgaacaacttggaatggagtgtaaagattctgttagcctattgaaaatccaggatgcagctctttcatgtgaaagattattagaacttaaaaaaaatcactgtgaactacttacagtaaaaattaaaaaaatggaagacaaggttaatgtactacaaagggagctatctgaaacaaaagaaataaaatcacagttagagcatcaaaaagttgaatgggaacgagaactgtgctctttgagatttagcttaaaccaagaagaagagaagagaagaaatgctgatacgttgtatgaaaaaattagggaacagttaagaagaaaagaagagcaatataggaaagaagttgaagtgaaacaacagcttgaactgagtctccaaacactggagatggaattgaggactgtaaaaagtaatttgaatcaggtcgttcaagagcgaaatgacgctcagaggcaactttctcgagaacagaatgccagaatgttacaagatggaattctgaccaatcacctttccaaacaaaaggagattgaaatggctcaaaagaaaatgaattctgagaattctcatagtcatgaagaagaaaaagacctatcgcataaaaatagcatgttgcaggaagaaattgctatgctaagactagaaatagacacaataaaaaatcaaaaccaggaaaaagaaaagaaatgttttgaggaccttaaaattgtaaaagaaaagaatgaagaccttcagaagactataaaacagaatgaggaaacattaacacaaacaatatcccagtataatggacggcttagtgttctgacagctgagaatgcaatgctaaattctaaactggagaatgaaaagcaaagcaaggaaagactggaagcagaagttgaatcataccattctagattggctgctgctatacatgatcgtgatcaaagtgagacatcaaaaagagaactagaacttgctttccagagagcaagagatgaatgttctcgtttacaggacaaaatgaattttgatgtgtctaacctaaaagataacaatgagattctttctcaacaactatttaaaactgaaagtaaactcaatagcctagaaattgagttccatcacacgagagatgccctcagagaaaagactttgggtttagaacgggtacaaaaggacctaagccaaacacagtgtcaaatgaaggaaatggaacaaaagtatcaaaatgaacaagttaaagtgaataaatacattggaaagcaggagtctgtagaggagagattgtctcaactacaaagtgagaatatgttgcttcgacaacaactggatgatgcccacaacaaggctgacaataaagagaagacagtgattaatatccaagaccagtttcatgctattgtgcaaaaacttcaagctgagagtgaaaagcaaagtcttctgctagaagaaagaaataaggagttaatcagtgaatgtaatcacttaaaagaaagacagtatcaatatgaaaatgaaaaggcagaaagagaagttgttgtgagacaacttcaacaagaactagctgataccctaaaaaaacaatctatgtcagaggcttcactggaggttacgtcacgttatcgtattaatttagaagatgagacacaggatttaaagaagaaattaggtcaaatcagaaatcaattgcaagaagcacaggatcgacatacagaagctgtcagatgtgctgagaagatgcaagatcacaagcaaaagcttgaaaaagataatgccaagttaaaagttacagtcaaaaagcaaatggacaaaattgaggagcttcagaaaaacctgttaaatgcaaatttgtctgaagatgaaaaggaacaattaaagaaacttatggaattaaaacagtcactggaatgtaatttggatcaagaaatgaagaaaaatgttgaattagaaagagagataactggatttaagaacctcttaaaaatgacaagaaagaagttaaatgaatatgaaaatggagaatttagtttccatggagatttaaaaactagtcaatttgaaatggatattcagattaataagctaaaacataagattgatgatcttacagcagaactggagactgcaggttcaaaatgtctacatctggatacaaagaaccaaattcttcaagaggagttgttatctatgaaaacagtacaaaagaaatgtgaaaaactacagaagaataaaaagaagttggaacaagaagtgatcaacctgagaagtcatatagaaaggaatatggtagaacttggtcaagtcaaacagtataaacaggagattgaagaaagagcaagacaggaaatagcagaaaaattaaaagaagtcaatctatttttacaggcacaagcagcatctcaagaaaacttagagcagtttagagagaataattttgcttcaatgaaaagtcagatggaactcagaattaaagatctggaatctgaactctccaaaataaaaacttctcaagaagactttaataaaaccgaactggaaaaatataagcaactctatctagaagaattaaaagttagaaaatctttgtcaagtaaactaaccaaaactaatgagaggctagcagaggtcaacaccaaacttcttgtggaaaaacagcagagcagatctttgttcaccactctcactaccaggccagtcatggagccaccttgtgtgggaaatcttaataatagtttagatctcaacagaaaacttattccaagagaaaacttagtgatctctacctcaaatccacgggcttcaaataatagcatggagaactacttgagcaagatgcagcaggagttggaaaaaaatataactagagaactcaaagaagctgctgctgaattggaatctggatcaatagcttcccctctagggtctactgatgagtcaaatctaaatcaagatctagtttggaaagcatcaagagaatatggaccttctgatgaaacccctcatgactatgttctgatgactgaccaatgtctcacttccaggacagacctgcaatagatgccactggataatgctgagatagactgggtgcaggacaaaggacagaactcaaagtcatccctctgctgacctgaggacaaatgtgtatctgagtgcttcctccgcctattgtctatgtc

SEQ ID NO: 299225 - DNA, 1860 bp, Homo sapiens
gtctagcgggatcgcttgcttggtaacccggagggagagattggaaaccgcggagtttcctttgggaggctgcggccagccggggctgacttgttatgttgggctccggaggccgttaagagccgagagagacatgaggtgtctctgaagcccggtcgcctgggccatgaagaagatttttagtaagaagggcgagtcgcccttgggctccttcgcgcggcggcggaggagcagcgcgggaggcgggggcgagccgggggagggcgcctactcgcagcccggctaccacgtccgagaccgagatctcggcaagatccacaaagctgccagcgcgggtaatgtggcgaaagtgcagcagatccttttgctcaggaagaatggcttgaacgatagagacaagatgaacaggacggctctacatttggcctgtgccaatggtcatccagaagtagtaactctcctggtggacagaaaatgccagctcaatgtctgtgacaacgaaaacaggacagctctgatgaaggctgtacaatgccaggaagagaaatgtgcaactattctgctagaacatggtgctgatccaaatcttgcggatgtccatggcaacactgctcttcactatgctgtctataatgaggacatatcagtagcaacaaagctgcttttgtatgatgcaaatattgaagcaaaaaacaaggatgacctcacaccacttttacttgcagtaagtggaaaaaagcagcaaatggtggaatttttaataaagaaaaaagcaaatgtaaatgcagtagataagttggaaagcagtcaccaactaatttcagaatataaagaagaaaggatacctaaacattcttctcaaaatagtaattcagtggatgaaagctctgaagactccttaagcaggctttctggcaaaccgggtgttgatgattcatggcctacctcagatgacgaagacctcaattttgatactaagaatgtcccaaaaccaagcttagcaaagctaatgactgcttctcagcaatccaggaaaaatttagaagcaacatatggcactgtgagaacaggaaatagaactttgtttgaggatagagattccgatagtcaagatgaagttgtggttgaaagccttcctacaacatcaatcaaagtccagtgcttttctcatcctacctatcaatcacctgaccttcttccaaaaccttcccacaagtcgttagcaaaccctggtcttatgaaggtaagttgttttttaaaaaacttttttcatgtacccttcccctgccccaacaatcctcataatgatgcatctattgagatgatcatacagtttttgtttctaattatgtttatgtgatgaatcacatttaagacttgcatatgttgaaccatccctgcatccttgaaatgaaacccacttgatcatggtgaattattactttgtgatgtgctgttggattcggtttgctagtattttcttgaggatttttgtatctatattcatcagagatattggtctgcagttttctttttttgttatgtccttttctggctttggtattagggtgatactggctttatagaatgagttagggaggatttcccccttctcaaccttttggagtagtttcagtagaattgttatcagttcttttttgaatgtctggtagaatttagctgtgaatccgtgtggccctgggtttttttcttgttggcggttttaaaattactgattcaatctcactgcttattactggtctgttcaggatttctattttttcctaattcaagctagaggagttacgtgtttcccggaatttttcagtttcctctagattttctagtttgtgtgcatag

SEQ ID NO: 299226 - DNA, 681 bp, Homo sapiens
tatgcagatgggtctgatttaagaggggagcatggaaatgttagagcaggatatgctgtgatttccttattagaggtaattgaagccagtcctcttccccaaggcagatcagctgaagtagccaagttgatttccctgacccgagcttttcaattggcgagctctatgttcacaaggttgtgaacataggccctgacagctgctctgcatttgggtttgctcatgactttgggatgctacagaaggagagaagatatttaaccttctcggggcaacccataaaaaatgaccaacaagcatcagagctgttagaaaccattctaaaaccagaacttctggcaattataaaaatcccaggtcactctaaattggacaccactgaaagcagggtaaccaatctgctgatgctacagctaaaagagcagtatttgagccaccagcccccatctggggaatggccataaaacctgaaacacttaaaaacatgttgaagaaaacccagagcatagcccaaacgagagggaaatctacttggaaacagaaagggggatacctgtctctgcaaactgaaatatgatgtgaacctaataataaacccattattccaatgggatgtcagatgccccttatggaatatgttcatcatcagacccattggaatccagagaaaatgatatcctg

SEQ ID NO: 299227 - DNA, 373 bp, Homo sapiens
aaatattcatgaatggagatagacttgtatatgtatttaattatgtatttaaaatttacaatagtaaatgttctcatgaatatatctgtgtatcacatttgatagatatgatgtccgcattaggattaggacaagaggaagatatagaatcaccttgggattctgaggtactttctatggttgttactattattttaaaatataagcattgagtgatgttaaaacataaagagatgctttgacttgacttttttacctctgcatacatccataaggaactactttcttatatttttcagttcataattaataaagtatgtgctaagtatattactgctgcatagtataattctgctaatttgcaggattcatt

SEQ ID NO: 299228 - DNA, 137 bp, Homo sapiens
ttcagttcagccgagaattatgtaattttatgcattttaacttgtttttgctgtcttacaggatgacctcacaccacttttacttgcagtaagtggaaaaaagcagcaaatggtggaatttttaataaagaaaaaag

SEQ ID NO: 299229 - DNA, 805 bp, Homo sapiens
ggccccactccaccagccggccccgcgggacggttactctgttcctgaggtaccccccgagattgtctgtggggtcagaaacagctctggaggggtctgcagaaattactttcccaagtctttgggctggaaggaacgaacagtgcctgaccaaggactttgagcaggagagagatgggagcagagaggagccaaggtctactattttcacttctgtcaattagatcaaagccctgcccagaagctttgagcgccgctgtcaagtcccattcctcccctaaaccatccaggttccatctgccttgaagccaaaggatcttcttagattcctcaagaaaaattcaggccccgagtttctccaccagcactctcctctccccgaaggagtgggtgggctgcatttctcttcatattctattccattccagaccgtcttggactaccagcctgtccgccacccctcggggccctccctcctactctgcccttgcccgctgaggtcccaagctgaggagatgagccgagcagtaaaaagagaggaggtttggaaaagcaatgtcctctcagtctttaataggtggcccccctgggaacctgctggaagtggaagttaataagctgaaggtggtcacaaccaatctctgccacactcgcaccctaccccaccccaaatcattccttttaattaatagtggaagacctttttaaaaatgtaacatgaattggctatttcttgaggcaaacaaaaggtggctctgaagcgatatatttgtactcgtataaattcattaaaatagaaagctta

SEQ ID NO: 299230 - DNA, 532 bp, Homo sapiens
acggttactctgttcctgaggtaccccccgaggtgggtgtatggggacctccgcctccctagacttctaggccaggggcgaggatcaccttagagggtttccccagacgtccctgatttcacatgtcctgtcctgctggcaggctgcgccttctttctgcgctttggggaatggtgccttcacgcactttgtaaagggtctggaactgagctgaagagaagtgattgagggctattgtggaaagtctccgctaattcaggtttcttcacccaccagattgtctgtggggtcagaaacagctctggaggggtctgcagaaattactttcccaagtctttgggctggaaggaacgaacagtgcctgaccaaggactttgagcaggagagagatgggagcagagaggagccaaggtctactattttcacttctgtcaattagatcaaagccctgcccagaagctttgagcgccgctgtcaagtcccattcctcccctaaaccatccaggttccatctgccttgaagccaaaggat

SEQ ID NO: 299231 - DNA, 1392 bp, Homo sapiens
tttgagacagagtgtctcactcttgcccagaacccaggctggagtgcagtggcccaatctcggctcactgcaacctccacctcccaggttccagcgattctcatgcctcagcctcctgagtagctgggactataggcatgcaccaccatgccccactaaattttgtatttttagtagaaacagagtttcaccatgttggccaggctggtctcgatctcctgacctcatgatctgcccgccttggcctcccaaagtgtgggattacaggcgtgagccactgtgcccagcatggtgtttcttatatcaggtgttttagggagctcgcttgcttattccattctttaatccttacagtgtgccacacgtataaagtttataacgtattaatgatctcattacccaaaaccagaacataatttcacaagggttcctacttctgtattgttttattatctcaaaaatttaaataacatgttctgctgtttattgttcttgttatccactgtattagcaccttccctgatgtgctttggaggttgatcaatgaatttctgagactttctgctggaattactttaagggtgtcttattagatgatgaaaagttggctgagacacccttcaagtgaccatgtcattgttttcttgctatgtctttagcttaatgattaagatacaattctttttaaaatcaaatggtattagttattatgtttcccaaattagaaatcgattttagttaacattttattttattttattctattttatttatttttgagacagagtctcgctctgttgcccaggctggagtacaatggcgcaatctcagctcactccaatctccgcctcccaggttcaagcgatttttctgcctcagcctcccgagtagctgggattacaggcacccactaccatgcccagctaatctttgtatttttagtagagacggggtttcaccatgttggccagtccggtctcgaacttctgacctgaggtgatctgcccaccttggcctcacaaagtgctgagattacaggcttgagccaccacgcctggcctagttagcattttaaagaaacacaaagccataacaaaaaccatcattgtttgtattccacactgttaatgaatgtaaagaggttagaaatgtagtgtttgattaatgatgtttatttttactgtatttaatatgagtaatttttcatcatctttcaagaggaataatgtttattgattaaaggtgagaaatgatagttaagacaccaattccatgtccagatctttgactgtatcatgcattgtacaattgatttcatattttatgaaatgccttaattttcctactataacataaagacaatgatgaataaagtttatgtgtatgattaaa

SEQ ID NO: 299232 - DNA, 1180 bp, Homo sapiens
  misc_feature (1139)..(1139): n is a, c, g, or t
tttgagacagagtgtctcactcttgcccagaacccaggctggagtgcagtggcccaatctcggctcactgcaacctccacctcccaggttccagcgattctcatgcctcagcctcctgagtagctgggactataggcatgcaccaccatgccccactaaattttgtatttttagtagaaacagagtttcaccatgttggccaggctggtctcgatctcctgacctcatgatctgcccgccttggcctcccaaagtgtgggattacaggcgtgagccactgtgcccagcatggtgtttcttatatcaggtgttttagggagctcgcttgcttattccattctttaatccttacagtgtgccacacgtataaagtttataacgtattaatgatctcattacccaaaaccagaacataatttcacaagggttcctacttctgtattgttttattatctcaaaaatttaaataacatgttctgctgtttattgttcttgttatccactgtattagcaccttccctgatgtgctttggaggttgatcaatgaatttctgagactttctgctggaattactttaagggtgtcttattagatgatgaaaagttggctgagacacccttcaagtgaccatgtcattgttttcttgctatgtctttagcttaatgattaagatacaattctttttaaaatcaaatggtattagttattatgtttcccaaattagaaatcgattttagttaacattttattttattttattctattttatttatttttgagacagagtctcgctctgttgcccaggctggagtacaatggcgcaatctcagctcactccaatctccgcctcccaggttcaagcgatttttctgcctcagcctcccgagtagctgggattacaggcacccactaccatgcccagctaatctttgtatttttagtagagacggggtttcaccatgttggccagtccggtctcgaacttctgacctgaggtgatctgcccaccttggcctcacaaagtgctgagattacaggcttgagccaccacgcctggcctagttagcattttaaagaaacacaaagccataacaaaaaccatcattgtttgtattccacactgttaatgaacatttcnaacctctttacattcattaacagtgtgtcgacgcggccgca

SEQ ID NO: 299233 - DNA, 4119 bp, Homo sapiens
agtgctcgcggggccgcggcggagtgtaccgtgctgctctactcgctgccattcgcccgcaggtcggcgcgctcgcccacctgagccgcgccggggctgcgggaccgtgggacagcgcgctcagcccagcctaggaaagaggcagcagtctcagcgcggagatggggagcgggcgaagttgacgagtctcccgcccacgctgcgcccctcctgcccagaggggctgcagccagcggtctgtcgcgcgtgcctgtgtgcccgaggagccgccccggggagaagacccggcgcggagttgttcccccagggaggatccgcagcccagccgagggggtcgggcggcctggctacgcaggacccagccccgcagccgcggactcccagcggcggcgaagtttggctgctgagcggcgcggcgccggaccactggacagcgggagcgatgcccgtggggggcctgttgccgctcttcagcagccccgcgggcggcgtcctgggcggggggctcggcggcggcggtggcaggaaggggtcgggccccgccgccctccgcctgacggagaagttcgtgctgctgctggtattcagcgccttcatcacgctctgcttcggggcgatcttcttcctgccagactcctccaagctgctcagcggggtcctgttccactccagccccgccttgcagccggccgccgaccacaagcccgggcccggggcgcgcgccgaggacgcggccgaggggcgagcccggcgccgcgaggagggggcacccggggacccggaggccgccctggaggacaacttggccaggatccgcgaaaaccacgagcgggctctcagggaagccaaggagaccctgcagaagctgcccgaggagatccaaagagacatcctactggagaagaagaaggtggcccaggaccagctgcgtgacaaggcgccgttcagaggcctgcccccggtggacttcgtgcccccaatcggggtggagagccgggagcccgccgacgccgccatccgcgagaaaagggcaaagatcaaagagatgatgaaacatgcttggaataattataaaggttatgcctggggattaaatgaactcaaacctatatcaaaaggaggccattcaagcagtttgtttggtaacatcaaaggagcaactatagtagatgccctggatacactttttattatggaaatgaaacatgaatttgaagaagcaaaatcatgggttgaagaaaatttagattttaatgtgaatgctgaaatttctgtctttgaagtaaatatacgctttgttggtggactactctcagcctactatctgtctggagaagagatttttcgaaagaaagcagtggaacttggggtaaaattgctacctgcatttcatactccctctggaataccttgggcattgctgaatatgaaaagtggtattggaaggaactggccctgggcctctggaggcagcagtattctggcagaatttggaaccctgcatttggagtttatgcacttgagccacttatcaggaaaccccatctttgctgaaaaggtaatgaatattcgaacagtactgaacaaactggaaaaaccacaaggcctttatcctaactatctgaatcccagtagtggacagtggggtcaacatcatgtatcagttggaggacttggagacagcttctatgagtatttgctgaaggcctggttaatgtctgacaagacagatctggaagctaagaagatgtattttgatgctgttcaggctatcgagactcatttgatccgcaagtctagcagcggactaacttatatcgcagagtggaaagggggcctcctggagcacaagatgggccacctgacctgcttcgctgggggcatgttcgcactcggggctgatgcagctcccgaaggcatggcccaacactaccttgaactcggggctgaaattgcccgtacttgtcatgaatcatataatcgaacatttatgaaactgggaccagaagctttcagatttgatggtggtgttgaagccatcgctacaagacaaaatgaaaaatactacatcttacggccagaagttatggagacttacatgtatatgtggagactgactcatgatccaaagtacaggaaatgggcctgggaagccgtagaggccttggaaaaccattgcagagtgaatggaggctattcaggcctaagggatgtttaccttcttcatgagagttatgatgatgtgcagcagagtttcttcctggcagagacattgaaatatttgtacctaatattttctgacgacgatcttcttccactggagcattggatcttcaatagcgaggcacatcttctccctatcctccctaaagataaaaaggaagttgaaatcagagaggaataaaaagacattttatattttattctgctccattcccttcactgtataccttaataattccttttctggtaatcaggcacatgatgaactttgattagtaggtctgtgattaagttcttaaattgttttgcagtcttttatgtttattatcataggtataggtggacctaaattccttatcatatcctttattaattcagccagtgtatccaccagttttttgtttatgtttttaagtaacctattatctctggatttcatgaaggtgtaatatcgtttttgttaaactgaatagaattgtatagcgatgacctcttaattataatttgatttgactgcaaaactttttcctcctctaagaggagatgatgtctgctttaagctgtaatgttttgccatgttgcaaaaagccataataataagtataaaaaagctttttcctttacaatttcatgttaatctggtttgtctgtccaccagagacagatcttctgtgacagcctccttatgcaggtctatcattatttgatagaatgtcttctaaaatacttcactcacattgtaattcaaattagaaagtcattccaaaaggatcatgtcatgttgacctcatttcatcggaactgcagtatatttttgttggttaattatattagtgttttctattttgtaaatgtgtcctttaattttactttaaatgccctgtgtcatttctggattatatactagttaatttcttccattccctactacacagagaggtgagctttcaaattttgcagagctctgctatcactgaattacatttatctgaagaaaatagtacaacttaatggattagcttttgggtttaactgaatatatgaagaaattgggtctgtctaaagagagggtatttcatatggcttttagttcacttgtttgtatttcatcttgatttttttctttggaaaataaagcattctatttggttcagatttctcagatttgaaaaaggctctatctcagatgtagtaaattatttcctttcagtttgtgaaagcaggatttgactctgaaagaagctttgccaattttacttattcgtgatcaatcaaggaaaatctaataaattttaggccaaataagaatatagcatatttagtatggttatagtcaacacagagatcacaacttagaagaaatataaagaaatggccactccccatcccccacagtcctggagtaaatcaaaatcaatatatgattcttttaaacattaagtttgaaataggaatggttttctcaagaatagatttggtgtgataccttgtgtttgcttacattggcccactatatatacatatatatttatgtagatatacttccatgaaagggctaatacgatgcatatactgaagggcaaggactttgaccatgtgaattttcagccgagaatggtcagaaagatcagtacaaccccatggattaggctgaaacatatgaaattgctgcatttgtagtttaaaaactgtcagcagtttcatatggttccacctaatattattgaagacaattattttcttagctatcaataggcttaatagttttagttattttagcttttgaaagtgttttaaaagatttcctttatcggacaggaccatctttatgacctgctttctgtttttcaatatcatacattggtgtatgtcaaagaataaattagtaaaattagt
